United States Patent Application Publication US 2026/0103690 A1 - sequence listing, part 6

SEQ ID NO: 8713 - DNA, 1486 bp, unidentified
  source 1..1486: mol_type = unassigned DNA; note = element_daa6b70
  misc_feature 1..3: note = core
  misc_feature 4..241: note = LE
  misc_feature 242..1465: note = CDS
  misc_feature 1466..1486: note = RE
  misc_feature 7..236: note = bridgeRNA
ctaatggggatcgaccacctcgttccttgtgtgaatgaggctggtcaccgagccgccagcaagtgagcactatgagtcccagggcctcgagtcctacgtttagatcgtgcccttgctggtcggtgaggtctcctcggacggctggtgggatgtcgtgcctcgagcactgatccattaggaagctgctggagtcctcggggctcaatcgtggtgaccgtcgatggagaggagtcagaggaagatgatctttgttggagtggactgggcggaagcccaccatgatgtgcacgtccaaagtgaggacggcaggcgcttgtcgggaggccggctgcctgaaggggtcgagggtatcgcccggtttcacgaaatggtgggcgttcatgcccaagagcccgacgaggtagtgatcgggatggaaaccgaccggggcctgttcgtcggcgctctggtggcggccggctatcaggtgttcgcagtgaacccgatgtcgacatctcgctatcgggaccgacactcgacgtcgggagcaaaatcggatcccggggacgccaaggtgttggccgacatggtccgcaccgatcggcataatcaccgcccggtcgccggagacagcgaactcgcagaggcgatcaaggttctggctcgagctcaccagtcgatgatctggtcgcgggggcgccagaccaacttcttgcggtcgaccctgcgggagttctatccggccgctctggtcgcctttgacaacctgaccagcggcgatgccctcgaggtgctccgggtcgcacccaccccgacacttggagctggactgtcccgctccaagatcgccgccgccctcaaaaggggaggtcgccttcggcgggtcgagcaacgggccgaagagatccaagaggctctgcggacaccgcagttgcaaggatcggccatcgtggcaaccgccatgggcacctcggtgtcggccacggcggcggtcattgtaaccatgaacgtccagatcgccgagctaaccaaggagctcgacgcgggttttgaacaacacccggatgccgaggtgatccgatccctgccaggactagggaccatcctcagcgcccgggtgctcggcgagttcggcgatgagccgaacaggtatgccaccgccaagtgtcgcaaaaactacgccggcacgtcacctatcacccgggcctcgggcaccaagcgggtcgtgctcgcccgctacgcccgcaacatgcgcctggccgatgccatctaccagtgggcgttcacctcgctcaccgcctcaccgggggcacggaccttctacgactaccggcgagccgctggagatacccatcacgccgcgctccgacacctcggcaaccgactggtcggcatcctccacggttgtctcatccaccacaccaactacgacgagaacaccgcctgggggcatcgagcagagatcgagctcgcaagagccgcttgacaagttaggaccgtgggatat

SEQ ID NO: 8714 - DNA, 1361 bp, unidentified
  source 1..1361: mol_type = unassigned DNA; note = element_daae8fd
  misc_feature 1..2: note = core
  misc_feature 3..76: note = LE
  misc_feature 77..1108: note = CDS
  misc_feature 1109..1361: note = RE
  misc_feature 1081..1349: note = bridgeRNA
tgatggggtggacgccccccggcggcatcgatgtgccaaagtggagtcgttcaacacaccacttgaggaggcgcccatgttggaagttaccacaatcggtctggatatcgcgaagaacgttttccatgcgcacggtgcagattcaagcggtcgagctctgtttagccgcaagatcagccgcacgaagttgctggagttcttcgctcggcagccacagtccctagtggcgttggaggcgtgcggcggtgcgcaccattgggcgcgcgaactcacgctgttgggtcacaaggtcaagcttatcccgccagcctatgtgaagcccttcgtaaagcggaacaagaacgacgcggtcgatgccgaagccatctgcgaggcagcgcagcgtcccagcatgcggttcgtggcgatcaagagcgaggaacagcaggcatcagctttggtgtttagaacccgcgaccttctggtgcggcagcgcacccagttgatcaatgcgatccgcggccacctcaccgagtatggctgggtcgcgccaaagggtccgtcacatatagcggtgttggccgacatgctcgatggcgagatgggctcgtcgcttccagacacagccaagcccatgttccgcacgatgctcgatctgctcgatcaactgaacgccaagataggcgagctggacaaggagatcgcacggcgagcccgcgaggatgtggtcgcccggcgactgatgacaataccgggcgtgggtcccatcaccgctacggcgattgtagcccttgctccgccagccgagacgttcagcaaaggtcgagacttcgccgcctggttgggtctggcgccacgtcagctctcaaccggtggcaagcaaaagctgggctcgatcaccaaaatgggtgagcgaaccttgcggcggcttctcatcattggctccagtgcggtggtcttgcaagcgagcaagcgaggtgcgcccgcaggctcatggcttgagcagatgatggctcgcaagccgcgcatgctggtcacggtcgcactggccaacaagacggcgcgcatcgtctgggcgctgctcatcaaacaagaggaatacaaagctccggtcgcagctgcggcgtaagccaaggcgggccagaggtcgtcggagacgtagtcggtcgaaggaaggtatggcacaacagtcggcgagacggggtcggaaaaccagggcaatccactgtgccgagagcacgccgtgggtgatatggatccggtccgcgaactcccatacgggcccgcagcctctggtgctgcatcagaggccggacagatggcagcatccgactacgtgcaatccttcaaaaaccgcttgcgtcttacggggcgtccacaga

SEQ ID NO: 8715 - DNA, 1380 bp, unidentified
  source 1..1380: mol_type = unassigned DNA; note = element_dab0509
  misc_feature 1: note = core
  misc_feature 2..341: note = LE
  misc_feature 342..1121: note = CDS
  misc_feature 1122..1380: note = RE
  misc_feature 1148..1375: note = bridgeRNA
caatggtatggactcctcctcccctaaacggcatctaagtgccacactggtaaacgttatcaaccagtcaacggagaagaggagtcaccatgaagcttagtaaagttggagtcgatttggcgaagaacgtttatcagttgcacggcgttgatcggtctggcaagacaatgtggaagcgccgtttgaagcgtcatcaatagttaaaggtgttgctggataaaacagaagcagattgtgtgattggcatggaggcctgtgccagtgcgcatcactggggtcgggagctgcagtcacgaggttacacggtcaaattgattccactgcagtttgtgaagccgtaggtgaagagcaacaagaacgatgccagggatgccgaggcgatctgcgaggcgatgagtcggccgaacatgcgcttcgtgacagtgaagacggtagaacaacaggacattcaggcgacgcaccggattcgtgaagagctcaaggttcggcgtaccgccaaggccaaccagatccgcgggctggtggccgagtatggcctggtcgcaccactgacgttacgagcattacaagccgtgattccctattggctggaagatgcggagaatggtctgacgcattactttcgttccctgctgcatggtttgtgggatgacctgttggcgcttgatgatcgcatgggcgagatggataagacgatcaaaggactggctaagggcaatgaagactgcgttcgactagagcaactacgcggtatcggtccgatgacctccacggccatgatcgccacggtgggcgatgcgcggcagtatcacaaaagccggcagatggctgctgccatcggcctcacccccaggcaacatagttccggtgacaagcatcgcctgcttggcatcagtaaacgcggtgatgtctacctgcgaatgctgatggtccacggtgcaaggtcggtggtgacacgagccaaacacaaagatgacccgctcagtcgctgggttactgagatcgcaaagcgacggcatccgaatgtggcagcggtggcattggccaacaagaacgcacgcatggcctgggccatgctgcgcaacaagactgattacgatcctgagtatgcgataagctgagacaggattactaaggagccctccaagacgattgcttaagcaaactgcataatggcaaacaggtcgaaccgacgtcagggatacccgggaatgtccgcgtacttgaaagtacgacgaagcgattgggactgacgcgcgaataaaccattatggcccggcatcaataaacgtatgccaacttaagaggccggatatacgtatgcagtcgtgccatgtctgccaaatacagcttgcttgcaaccgagggggagtccatata

SEQ ID NO: 8716 - DNA, 1600 bp, unidentified
  source 1..1600: mol_type = unassigned DNA; note = element_dab142a
  misc_feature 1..2: note = core
  misc_feature 3..247: note = LE
  misc_feature 248..1531: note = CDS
  misc_feature 1532..1600: note = RE
tctaccatcggaatttagcaggtagcgggacggaagagaaagcggtatagaagttcctgacgagggtgtggctcttggggtcagtggcctgtttgttcaggctcacccagtctgaaatgccgccctcgtcacctgcatcatccgaggggtcgaccgggatggtgccatattctcaccgaatacgtggctctgtaagtagacgagaccgaaggatgatgacaactcgatctaccgaaggaggagctacgtgtcagaagaaaaatcattagaactcagggtcagtgtggacgtggggtatcgtcgtcacagtgtggcgatggggctatcgagcggcgaggtgcttgaggagttcgagatcgatcaccggcccgaaggttttcaagagttcttttctcgtatagagaagcaccgcaacaaaaagaactgtgcggtagcagtagcgatggaaggctacaacggctatgcccggccgctcgacagcttggtgcgcgagcggggctaccggctttataatctcaacaacttaaagtttgcccgctttaaagagattttccctggagccgccaagagcgaccggatcgatgcgcgcaagggattggagctctttcagctgggcgatcatttgccgctggccaaagaagtgctgcaggaagtcactgggaccccgcccgagaatgaagtcctcaaacgattaacccggcgtcggcgaagattagtcaacgagcgagtgcgggtggtgaacaatctgcagaccgatctccaagcagtgtgtccgggcctgttagagatcaccggtgaagcgagcaaccagtggtttttaaattttctcctctgtgcggacactctgccccagcttgcccggctacggcgcagtacgcttctgaagatcccgtcggtgggagtaaagagtgccgccattatcgagggctggcagaagcggtctcactttagccaagaggtcgactgggtcggcgagatgattcaggaagatgccaagcggtgtctggagctcgatgaaaaaatcaaacggctggaagccaagatcgttgaggttgccaagggctctaagatcgccaagaccttacgatcgattcctgggtttggtgccgtgtgcacttccgagttggccggcgagatcggcaccatcgagcggtttgcctctgagggaagcctttctttgtatctcggtatgtccacgttggacaatcgttcgggaaaataccaggggaccaaggcaccgaagcacgtgaacactcgggccaaggcagcgatgatgatcgccttggatcggcatcgaaagtacgtgccggagtcgcaaagatactatgaaaagaaacgcagcgaggggaaaaagcacaaccaggcgattcgagctctgggacggcacttgtctcggatcatctacaagatgctaacggaggagcgcgagtacgagattcggcctgaaaaagggaataccaaggccaaggtcggtccgagatcgttcgttaaaacgcaaatacggaggccgaaaatctcagcgaagtcttaaaatcgaaagtctacatcgcagagcacggagaaatcttgtttcatccgcttgagatttccagcgggatga

SEQ ID NO: 8717 - DNA, 1558 bp, unidentified
  source 1..1558: mol_type = unassigned DNA; note = element_dab24a9
  misc_feature 1..2: note = core
  misc_feature 3..263: note = LE
  misc_feature 264..1430: note = CDS
  misc_feature 1431..1558: note = RE
  misc_feature 3..239: note = bridgeRNA
cttgtatgatgcagtcagaagctaatgcatcacatttcctttctttttgattcgtggttcaatgcaatccaggtactgtgaacgattgatttttctctgtagcttgactactcgacaggagtgtattgccgctacctttatctggattgtttatcagctggatgtgccggagcttcctccgagttcttatttctatcaagtctacgatgataatcgctggtggatatcacggtatcaataattgaaagggaggtacatacctcatgatctacgtcggcattgacattgccaaactcaaccactttgcctcagccatatcttctgatggcgaagaactcattcagccgtttcaattcactaacgacgctgatggcttccaactgctggtctcccgactcgattccttcgagaaggccagcctcatcatcggtcttgaatctacggctcactacggcgacaaccttgtcagatttcttgttgccagtaactattcggtctgtgtgctcaacccgatccagacatcgtccatacggaagaacaacatccgcaagactaagacggataaggtcgacacacgtgttattgccagaacccttatgatgcaggactcgtatcgttttgtctccttcaccgacctggatatcatggatctcaagcagctcggccgcttccgccagaaaactgtgaaacagcgtacccgcctgaagatccaactggtatcctacgtcgaccaggcttttccggaacttcagtatttcttcaagtccggcctgcatcagcactctgtctatgctctcttaaaagaggcaccgaccgctcagatggttgcttccatgcatatgactcatcttgcccgccttctttctgaagcttcccacggccgatttaagaaggatgtggccaaagagttaagagctctcgcacagaaatctgtcggtcatcacgacagtgcacttgctatccagatcgctcattccgtagatcagatcgagctgctggacagccagctggcaaaaatcgaggctgaaatgaccgagatcatgaaattccatgatcctgtcatcctgaccatccccgggatggggtacatcaacggcgggatgatcctgggtgagatcggtgatatccaccgtttctccagcccctcgaagctgcttgcttatgccggtttggatccttcggtctatcagtctggaaactttcaggctaaaaggaccaggatgtccaagcgtggctccagggttcttcgttatgccctgatcaatgcagcacacaatgttgtaaagaacaactccactttcaaggcgtactatgatgccaagatggcggagggccggacgcattacaatgccctcgggcactgtgccggcaaacttgtcagagtcatcttcaagatgttgactgacaacgtcgagttcaatctcggctaaacacgagcggattcatcgatagattttgaaaagcgcccatatgggagccttattaaggtcacccttttttagccacgatgaaaaattgtaatttcctgctaatttatgcttgacttttcatagctggt

SEQ ID NO: 8718 - DNA, 1378 bp, unidentified
  source 1..1378: mol_type = unassigned DNA; note = element_dab66eb
  misc_feature 1..2: note = core
  misc_feature 3..206: note = LE
  misc_feature 207..1181: note = CDS
  misc_feature 1182..1378: note = RE
  misc_feature 13..192: note = bridgeRNA
cttgtatgtaatcaacgagcgatgattagctaccatcgcatgaagcggagagaacctaccccatcatctaaggtaataaccttcgtcaacagctatagtcctctgcttcacctttcacgccagcattaacattgaacggttgccaagagctaagactctgcatgaacaagacaaattggcgtgatggttatgtgaaaggagaaaaaatgccaatgtatcaattaggtattgatgtcagtaaaaacactcttgatctatgtctcttacgggagggcatcaaagggaggatcaaaactcgtaagctaaaaaataccgctgatgcggctaaagtcgtgacagagtggcttaagaagcaatcctgtgaactgggcgaagttcatatcatcatggaagccactggggtatatcatgaaccgctggcttatggccttcactttgctggtgccagaatttctttagccaatcctcaccgtacaagggaatttgccagagggatgaatatcctgaccaagaatgacaaagtcgatgcctggatgctggcttgttatggctcccttaaagagcctgaggcatggactccaccaccggaatctgtgcggtatcttagagctcttttacgccgcagagacgctcttgttgcagatagcaccagagaaaaaaacagacttgaaaaatctgtttttacagacagccctgatgccgtcagggcatcaattgaacacatgcttcaggagctgaacaatgagatcgaacatcttgatgtcctgatccaggaacatattgaaactcacccggaactaaaccaggatttcagactgttaacatcaataaaatctgttggttatctgctgggattaaatatgctggcgatactcaaaagccattcattcgaatcagcagagcaggcagcagcattccttggtgtagttccggtagaaaggagatctggcacatctgtaaagggaaaacctaaattatctaaaattggaccaccagagataagaacaaaactttatcttgcagctttatgtgggctgaggttcaaccctgtaatgaaaacagatgtatacgaagttatgccagaggggaaagtcaaagatgtgtgctattggagcattaatgcgaaaacttgtgcactggtgctatggtgtgctgaaaacacagttaccattcgatgctgaatacaatcaataaaatcattataaaacaacatggtaagcaataacaccggagcaatgctgaagcaacatgtttgtatcttttaccttctttcatggtatctaactgagcatctgctcttttataaaaactcagagaaaatttctcctgaagatggaatgttcaaacatcacataattttcttgactaaacacggtag

SEQ ID NO: 8719 - DNA, 1188 bp, unidentified
  source 1..1188: mol_type = unassigned DNA; note = element_dad1664
  misc_feature 1..2: note = core
  misc_feature 3..222: note = LE
  misc_feature 223..1185: note = CDS
  misc_feature 1186..1188: note = RE
  misc_feature 23..194: note = bridgeRNA
cttgtatgttcgctctggcaggtttagaaagagcctgtcggggtggagggactcagaccgcttctggcctttcggcacagactgtaggagatatcgtcccacccctcaccacagcgccaatgtggaatctatcggccggcaagggaccgacgattattgcaagcgagcgccacggtgagccccgacaagcctgttgactacgatagcttggagggacccgtcatggcaatggaagtccagccgatcgacatcggcatcgacgtcggcaagaacgaactcacgctcgcacgcagcgatctcgagggaattcgatcgatcgacaacacgccctcggcgatctcggcctggctgaggtcgctgcctggtccagcgcgactggcggtcgaggcgaccgggatattccacgtcgagctgatcgagcgagcgcaccgggctggccatacggtctacgtgatcgacggctaccgcctcaaccgctaccgggaaggcatcggcgggcgggccaagaccgatcccggcgatgcgcggttgctgctgcgctacctgcagcgcgaggccaacgaccttcggccctggagcccgccgcccaagggctaccgggccttgcagcagctgctactgcgacgcgccaggctcgtccaggccaagacccggttggatcagagcctgcgcgggctgccgcagctcggtcccagccgccgatcgctgatccggcacctcgaccagctcgatcagatcctgatccggcgcatgcgcaaagtgctgctcggccagcagtggaaagagcacgcacgccgactccaggcggtcgaagggatcggcgagatcaccgccgcagcgctggtcatggcattccaccgaggtcgcttcaccggtgccgatgcgttcatcgccttcctcgggctcgacgtccgggtgcgcgaatccgggtcgtatcgaggccggcgcaagctgaccaagaaaggggcccctgaactcaggcggctgctctacatggccgccatggcggcccggagatcatccacttgggaaggcttctatcggcgccaccgtgatcgcggcctgtcgagaatccagtcgctggtcgcactggcccggaagctcgctcggatcgccttcgcactgctcaagaacggctccgagtaccagccgcgaatccgtcaggagggttgcatcgcaacatagaat

SEQ ID NO: 8720 - DNA, 1494 bp, unidentified
  source 1..1494: mol_type = unassigned DNA; note = element_dad1f56
  misc_feature 1..2: note = core
  misc_feature 3..238: note = LE
  misc_feature 239..1474: note = CDS
  misc_feature 1475..1494: note = RE
  misc_feature 7..236: note = bridgeRNA
ctaataggtttcgtcagcctgtaggtgcaggatggctccagtagcggctggcgggtcagcactccactcttcggacccttgttgaggtcttgcggcagaccgtgcgcccgctggtcgtgaggagatgagatagctgatgagatgacgtgccccgcggtcgtggtgagcacttgactattagatcgctggcgtctcctccacgctgctaccaggcagtttccggagtcggaggtgcgagatgatctggataggtgacgactgggccgaagaccaccacgacatcgagatcctcgacgagggcggccaccggctggcccgggcgaggctgcctgaagggctggagggcatcacccggctgcacacgttgatcgccgagcacctgccggattcgtggtccgatctggacccggtgcaggcgtcggggcaggtcgggatcgggatcgagactgatcgcggcacctgggttcaggccctgctcgcggccggttaccaagtttatgcgatcaatccgatgtcgtcggcccgataccgggaacggcattccacctcgggcgcgaagtccgacgccggtgacgcccacgtgctggccgagatcgtgcgcctggaccacgaccatcaccggcaggtcgccggcgacagccctgcggccgaagcggtgaagctgctggccagagcccatcagagtctggtctgggaccgcacccggcaggtcctgcgactgcggtcggtgctgcgagagttcttccccgccgccctgcaggccttcgacgacctggccgccagcgatgccctcgaactgctggaccgggcgccggacccggaccaggccgcccggctcacccggttgaccgtcgtcgccgtgctgcgccgggccgggcgccgtgacctcgacggccgggccatcacactccagcagatcttcaagcaacagcagctgcgtcagccgcggccagtccagacggcctacgccgcgatcgtgtccagccaggtccagctgatcaatatcttgaacatcgagatcgacgagttgggtcgggtgatggccgaccattttggccggcaccgggacgctgagcgctatctgagcctgcccggcctcggcatggtgctcggcgcccggatcctcggcgagttcggcgacgacccgcaccgctacaccgacgccaaagcccgccgcaactacgccgggacctcaccgatcacccgcgcgtcgggccgtcgccgggtcgtgctggcccgctacgcccgcaaccggcgcctggccgacgccgtgcaccagtgggcgttctgcgccatgcgcggctcacccggcgcccgcgcctactaccaggcactacgcggacgaggtatcggtcaccaagccgccctgcgccagctgggcaaccgcctggtcggcattctgcacggctgcctcaagaccaagacctcctacgacgaagccaccgcctgggcccatctgcagccaaccacttgacaacgaaaaacatgggatgt

SEQ ID NO: 8721 - DNA, 1610 bp, unidentified
  source 1..1610: mol_type = unassigned DNA; note = element_dad3a18
  misc_feature 1..2: note = core
  misc_feature 3..206: note = LE
  misc_feature 207..1358: note = CDS
  misc_feature 1359..1610: note = RE
atttatataaaattttcgaattataagccagtaaaataaaaaacttaaatgatttccctcgaattgtgcgagattagccttatttttcgagaaatcaagaccacaactgcaaaataattcctaccaacgtgctctaagtcacaaaaaaatattatctttgaagcagtgttcattaaccgagtttttaacttcaaaaatgtaggcttatgaaagcagtatgtggtcttgacgtgcacaaagatagcatttttctttgtattttgcacagtgatggtgaattatttgagcaagttttcggtgttttaacatttcagctggaagaaatgcggaaattgctccaaaagcatcatgtttctgaggtatgtatggagagtaccagtatctattggataccaatatggcgtgtgctttctcctcattttactctgcgtctggtaaatccttatttcatcaagcaacttccaggtcataagagcgatgtcaaggatgctcagtggatagcagaatgcaccatgaaggaattggttaggggaagtttcgttcctccagagattatccaacagcttcgccagtacgaccgccgaatctttgacctcaatgcggagattgtccgtaaggtttccaaggtggacggtgtactccaacgttgcaatatccgcttgagcaattacgtgtccaacatcgagtgtaagagttatcgcgatgtcgtgcgcaggctctcggaaggtgtcactgacccgaacgagttggtaaagctcgttcatgggcgcattgtcaatcgccatggtgcggatacgatattagcctcattgacaggtgttgtctcccaggccgaaatagatgtactgcgccaactccatgaggagatagacatcgccgagagccacagagacgaatgccagcagcggatgttagagatatgcgagaagcattttccagaggaactcgaacgcttgcagaaaattccaggaatcaaggaacgtgccgcaacatcattgatcgcagagatcggaacggatatgagtaagttcgaaacggcaaatcaccttgcctcatggagtggactgagaccaagaaacgacgagtccaacaagaaaatcaagtctcgcaagataacccatggcaacgtatatctccgtaacaccatcattcaatgtgcctgggctgccagtcgtcagaaagcctgtttcttctgtaggttctcgtatcaccaaacaattgtgaggagaaagaacaaaatgaaggtgattgttgctgtggcaagaaagttacttgtcgccgtatggcatgtcttacatgacaggacagattatgtcgacttcaaacctgatcgtgaagagtccgccaacaacggatgaccatgatataccttccatgataaggctattatctttgtgatgggttagacctcgtttgcaaattaacttcatgtcatggaaggctatggaagtcagtatgagtaaaactcgaagaggaaagtatattgataatcgcatttgccataaaggcaagtgtaagggagacatgcgctttaatttacgaggaaaaggcaaaatcccttgttttagttacctttgcgagggaaatcattttcgttttatagaggaaag

SEQ ID NO: 8722 - DNA, 1394 bp, unidentified
  source 1..1394: mol_type = unassigned DNA; note = element_dad4a6c
  misc_feature 1..3: note = core
  misc_feature 4..84: note = LE
  misc_feature 85..1125: note = CDS
  misc_feature 1126..1394: note = RE
  misc_feature 1099..1381: note = bridgeRNA
tgatggggtggatgccccctcccggcggcatcgtaatgtgccaaagtggtgacgtataaatcaccggatacggaggagacatccatggacgaagttatcattgtcggcgttgatcttgcaaagaatgtttttcaggcccatggcgctgcggcggacggatcggtcatatttcgcaaaaagctgtcgcggccccagtttgccaaattcatgtcggaacttccagcgtgcatcgtggcgatggaggcctgcgcgaccgcgcattactggggccgcgagatgacgcgccttggtcatgaggtgcgcctcatcccgcccatttacgtaaaaccattcgtcaaacgccagaaaaatgacgccgccgacgccgaggcaattgtcgaggccgcgctgcgtccgaccatgcgatttgtggaaatcaagaccgccgagcagcaatcccgggcgatgctgtttcggacccgggaactcctagttacgcaacgcacgaaaatgattaatgcgctcagggcgcatctggccgaacacgggtttgtggttgccaggggggtcggcaacgttcagcgcctcgcgaccattcttgatggtcaggagcatgacctgccggagctcgtgcgtcagatgggcgcaatttacctcgacgaaatcacccgcatatcggaacgcattgacagcttgaaactcaggatcagggcggtgggcgaagatagtgacgccgcaaggcggttgcagacaatgccggggatcggcccgattacggccatggccatcgagacgttcgcgccgccaatggaggttttcaagcgggggcgggattttgccgcctggctggggctggtgccgcgccagcattccaccggcggcaaaccgagactgggccacgtctcgaaaatgggccagcgcgatatccgccgactgctcatcattggcgccatgtcggtgatccaagccgccgcccgtaaaggcgcggtgggtggttcgtggctcatgcgcatgctggccaggaaaccgcgcatgctggttgcgatcgcgcttgccaataaaatggcgcggatgatctgggccatgctggtgcgcaaagaagattaccggaaagattgcaaggttccggcgggaatgcctgcctgacaaattgtcagctgcgccctgccgggcagtcgggaatgtgagaaggaagatgaaccgtatggacacatgatcgaccagatccgggcccgggaaaaccagtttggaccagagagcaccaagctcgctcatctgatttggacccgacccgcgcatcgccataccggcccgcggcgtgtgaaagccgcatcagaggtctgacacatgaacgcaaccgatcacatgtccaaaatggttcagaaaacgcttgcattaccgggggcatccacaca

SEQ ID NO: 8723 - DNA, 1408 bp, unidentified
  source 1..1408: mol_type = unassigned DNA; note = element_dad8d11
  misc_feature 1..2: note = core
  misc_feature 3..94: note = LE
  misc_feature 95..1111: note = CDS
  misc_feature 1112..1408: note = RE
  misc_feature 1171..1407: note = bridgeRNA
ataatggtatggacccactccaactttatttcaggcctctttagggccaaaatgaaagtgataacaatcatttataaaagcggagtggatcaacatgaagattactacaatcggtttagacattgcaaaatcaatttttcacatgttcgctgtgaataaaaatgggcgatttgtaaaaaagaaacaattaagaagaaaacaagtgttgagtttcatggcaacattagagccttgcctaattgtaatggaagcttgtggcagtgcgaactactgggctagaaaatttattgaattggggcaccaagtaaaacttattgcgcctcaatatgtaaaccccttcgttaaaggcaataaaaatgattataacgatgccgaaggtattgcagaggcagcgcaacgcccgaccatgaggtttgtgccaattaaatcgatagaacaacaagatattcaaaacttccatcgacaacgtgaacgcataaagaaagaacgtaaagcattagcaagtcaggtacgaggcttgttaggagaatatggcattgtcatcaataaaggtatttctgcaattcgcaatgaactgccggatattttagaggatgcgacaaatgagttaacgtatttaagtcgggagatatttaatgagttatggcttgaatttcaagtcacagaagtgaagtttaaagcgtgtgaagttcgcttaaacacgatgaataaagaaaatgaaatatgtgttcgcttagatgaaatattaggtattggagcaatcacagctagcgctacttatgcagctgcaggagatggaaaagactttgtaaatggtcgacatttttcggcatggcttgggcttgttcctgggcagcattcaacgggtggaaaggccaccttactcggtataagtaaacgcggtaatagttatttaagaacactatacatccacggggcccgggcagtattaaggcacagtgaaaacaaaactgaccgatttagtttgtgggcacaagcgttaaaatcccgacgaggacacaacaaagcatgcgttgctgtggcgaataaaatagcaagaatggcttgggtaataatggcgaagggggaaagttatcgcccggctatataaataaagctcaaaactgaagcaagttagattggtttcagtgatgagataacagtaaaacccttttacttcagttgcaaaagataaattaatcggatggtaagatagtcagactggcttgcacaaaacctggtacctgcattggctaataaaaaagccggagggatgatgaggagtgtgagcgcaaacaaccatcggggccagaaggtaaaaatccttcataaacaggccggatatatgagagcaatgattttctcttacataacgattaaatgtcttgcaaacggagtgggtccatat

SEQ ID NO: 8724 - DNA, 1153 bp, unidentified
  source 1..1153: mol_type = unassigned DNA; note = element_dadf0c0
  misc_feature 1..2: note = core
  misc_feature 3..163: note = LE
  misc_feature 164..1141: note = CDS
  misc_feature 1142..1153: note = RE
  misc_feature 8..194: note = bridgeRNA
cttgtcttatgactttccatgccgaacaggcgaagatgggccgctgggagagagtgaccgctctctcgtcagcggcgagggacggatcgtagacacgcggaccgtttgacgggtcaagctaaagtttgatcgccctcgtcttttctttggcctgaacggatacatgcgggttgtgccgcgcatgacaagcagaggcgtggaaaagatggaagatcatagcatcggcgtcgacatctcgaaagactggctcgacgcgcaccggctgaacgatggagcaaacgggcgcttcgccaatgacgcgaagggacacaaggcgttgatcgcctggatgggcggcgatgttgtgcggatcgtctacgaaccgaccggagcctatcatcggcgtttcgaagaatgcatgacaaaggccggacttcccctcgtcaaggtcaatccgcgacgcgcccatcgcttcttcgatgtcgctggccagatcgccaagactgatcggctcgatgccgaaatgctggccaggatgggcgcgctgctgagcctcaagcccagaccgcaagcaagtcctcagctcaatgagctcagggagttgcacgtcgctcgccaggctttggtgaaggacagaaccgccgcaaagaaccgcgccaggaacgtatcgctggcgctgctcaagagccagagtgccgaacggctcaaacagatcgaacgcgccattgaagccatcgacgccgagatcgtgcgccgcattgaggccgacgatgtcatggccgccaacttcgtgatcctgatctccatccccggtatctccgacattactgccaccgccctcatcgtcgaaatgcccgaactgggcacactcgaacccaacgaagcagcggccctgctcggcgtcgcgccagtgacacggcagtccggaaagtggcggggccgcgccttcattcgcggcggccgtgctaccctgcgccaggcgctctatctgccggcgctcgtggcgacgagattcaatcccgacctcgccgccaaatacgcccagctcaggggcagcggaaaaccgccgaagctggccattgtcgcaatcatgcgaaagctgatcatcctcgcaaacgccctgatccgcagccagcgaaattggcagccaaatccagcttgatcaacacggata

SEQ ID NO: 8725 - DNA, 1160 bp, unidentified
  source 1..1160: mol_type = unassigned DNA; note = element_dafd44e
  misc_feature 1..2: note = core
  misc_feature 3..188: note = LE
  misc_feature 189..1148: note = CDS
  misc_feature 1149..1160: note = RE
  misc_feature 40..190: note = bridgeRNA
cttctgtatctgcgctctgctaaactggccccgtcaccggccccggcccgggtcagtgacggggtagtgcgcgacgtctgacccttgtggcatgaccacgtttcctagcctgtcggcaccgcctctcttcatcgtctcgaacagttgattgcggcctttgcaggaccgcgcaccagaaggaagagagcatggacaatctatcacatggccgcgtcatcggcatagatgtcagccgcgactggcttgaccttcattgcctgcccgacggacatcgctgcagagtaccaaacgttctggcgggccattctgctgtggcgacccttgcccggggccggaatgcagtggtctgctttgaatcgactggcggccaggagtggcagctctgggcaaggctcgaggcagaaggtgttgcggcccgccaggtgccccccgcacaggtcaaggcatttgcgcaaagctgcggcacacgcgccaagaccgacaggatcgatgcggaacttatcgcccgcttcttcgccttccggcccgaagcaggccgcagtctacccgcagaaaacttacgccttctcagagctttgacgtcgaagcgagcgcaactggtcgaaatgcgcaaacggctgctggcccaagtccgcgcgcatcagaaactcggcaccgccgcaatgttcgaggacgtcgacaccgaactgaagcaacggatcgacagcctgatcaaggaactggaagaccggatcaccagagccatcgcgagcgatgatcacatgtcggagatggtcaccgttctccgttccatcccagggatcggcccggttgccagcacaatgctgatcgccgaaatgcctgagatcggcaccatctccggcgaagaagctgccgcgctcaccggattggccccgatcgcacacgacagtggaactcttcgcgggaaaagggttatcgccggaggccgccgtgccctgcggcacgtaatgttccaggcggcgttggtcgcggcacatcacaacccaagcctgaaatccttcgcagatcgcctccgtgacgcaggaaaaccacacaaagtcatcatcaccgccgtcgccagaaagctggtcaccattgcgaatgcgttgtgcaaaagccggcagaaatggacgatccctgggacctgacagatacagttg

SEQ ID NO: 8726 - DNA, 1378 bp, unidentified
  source 1..1378: mol_type = unassigned DNA; note = element_dafef18
  misc_feature 1..3: note = core
  misc_feature 4..87: note = LE
  misc_feature 88..1014: note = CDS
  misc_feature 1015..1378: note = RE
  misc_feature 1080..1364: note = bridgeRNA
agatggggtggttgccgtcctccccgcacgacatcgcaatgtgccagaatggtcgttggaagaaacgactgcgcgaaaggacggcagatgaaggatacagtgataggcgttgatctggcaaagaacattttccaggttcatggagcttcgcgtgcgggcgaggtgatgtttcgcaaaaagctgcgtcgtcagcagtttatgcagttcatggccacgcagccgcctgctctggtcgttcttgaagcgtgcgggagcgcgcattactgggctcgcgaactggcaggagctggtcacgaggtcagactgatcgctccgcagtatgtgaagcctttcgtgaagcgccagaagaacgatgctgctgatgcggaagcgatcgtcattgcggcccgtcagccggaaatgcgctttgtcgaaccacgcactgaagcgcagcaggcgcgtggcgttcttttccgggcccggcagcgtctggtgcaccagcgcatggaactggtgaatgccctgcgtgccgttctgtatgaattcggtctcgtcgtgccacaggggattgcgcatatcagacacattgaagccatgctggatgaggcggttctgccagaggctgtgaagcaggaatgccttgatctgctgcgacagatttcggagcagagtgtgcggattgatgtcagaacaaagaagatcaggatgcttgcccaggaaagtgaaaacacctgcagattgcagagcatgcctggagtgggtcctctgaccgctcttgcgattgaagcttttgcgcctgacctgcagagcttccggcgcgggcgcgactttgctgcgtggctggggctggtgccccgtcagttctcatctggcggaaaggaaaggctggggaagatatcaaaagccgggcaggctgatatccgcaggcttctcatcatgggcgccatgacccaggtgaactgggccagccgtaaggcccctgcaccgggaagctggctggcacggatgctggcccgcaagcccgtatgctggtagccattgcgctggccaacaggatggcacgagccatctgggccatggcaacaaaacaggaggattatcgggatccggccctgtccctggcagcctgagcgatggctcggctcccgcggatggaaccggtaggggtgtgagagggcgatgacctgaatgggcgcatgatcgtctgatccggatcggaaaaaccagtggatttctctgtgctttaaagcacgcctgtgagatttggatctgatccgctgatcaccatactggccagtggcttctgaaaggccacatcaacaggccttacagaagaccgcacacgatcacacgtcaatatgggtcagaaaactcttgcataacggacggcaaccacaga

SEQ ID NO: 8727 - DNA, 1570 bp, unidentified
  source 1..1570: mol_type = unassigned DNA; note = element_db13065
  misc_feature 1..4: note = core
  misc_feature 5..276: note = LE
  misc_feature 277..1446: note = CDS
  misc_feature 1447..1570: note = RE
  misc_feature 22..256: note = bridgeRNA
tcacgtataatccaattacctcattcgaggattggattttcctttctcccgatttttcggggtgtttaaaaatctaatgtataatctttttatgcactgtggatttgtacccatatttttacggctatgaccgttacgaggtgactcagaccacagtttttcgtacccattgttaattagctagtcagcgcttcgacgcttacatttacgtgttgacatgacgaaatttcttgtggacttaccaacagtgcaaattcattttaaggaggtgctcatatgtactatgtaggaattgatgtttccaagtacaagcacgattgtattgtcgtttccaatgatggcgagatcatctgtgacacattctcatttgacaacgactatgatggctttcaggctccatcatccatgctctcttctctgggtgagcatgagaacataaggatagggtttgaagctactgcccattacaccctgaacctgaaattgttccttgaaaacgcccactacagcttcatggaattcaatccggttctcctctcaaagttcaacaaatcacaaaccctaagacgtaccaaaacagatgcaatagattgcgcagctattgcccgccggttaatgacagtagaatacaaaccccatccagttggattctatcatgcttattctctaaagtcactaacccgtcttcgggacagtcttgtaaggcagcgtagtttttatctggtcaagattaccaatgtccttgaccatacattccctgaattcaaaccttttttcggcaacaagttcagcaagactgcaatttatctgccggaaaactatggcaatgccgacaggatgtcccgcatgaattctctgtcatacgagaatctcagacgcatttccagaggaaaattctcccctaagaaattcatagagttgaaaaatcttgccgcaacaactgtcggtgaatccaacgaaatcttcgatctgcagttatccggtctgctgtctctttacaagttatctgccaatgagatcgattcactggagcagaagatcacggaacttatctgtaagatcgatccgcgttcactttccattcccggaatcggtccgctatctgcagctgtcatctatgctgaattcggagatatcgccaagttctcttctcctcagaaaatgctatcatttgcaggtcttgagccgggatattaccagtccggtacttctgcacatggcgggcatatggtcaagcgtggttcttcgcatcttagattcacacttatgaatctttgcgtcccgctcatacagtacaacattgtttttgctgaatactatgctaagaagcgcgccgaaggcaagcctcatcgcgttgcctgctctcacctggtcaaaaagttgctccgtgtcatctatacacttgagacaaaaaggatcgactttgaccctgaaaaactccgctgattgagtagtggcaatcagtaacaactcattatccattcaagttttcatgttgaatggcttgtttgccatactctttttttgataaacattattttcataaaagcccttgacttctaatagctag

SEQ ID NO: 8728 - DNA, 1316 bp, unidentified
  source 1..1316: mol_type = unassigned DNA; note = element_db23f22
  misc_feature 1..2: note = core
  misc_feature 3..239: note = LE
  misc_feature 240..1241: note = CDS
  misc_feature 1242..1316: note = RE
  misc_feature 7..219: note = bridgeRNA
tcctttagatttgcaccataaataataaaggctgaaatattatctttgtagtgaataaaagttaaccaagaaaaggaggtgacctaacgtgttgtctagacagaagctctatacgcggaattagtcctccttttcttttcagttgaaccgtcccaagtagaattgtaggtcgatggcctaataaaggatttagagagttcaacttatggttaacctacaaatattaatgttgcaaaaatatggaaaagaaatggtttatcggtattgatatctctaaaaaaacattggatgtagtactttacaattcccaaaagaaacattcagatgaaacgaattaccgtaagttctctaacgatgaagaagggtataaagaactcttgtcatggtgtcgtagtaaatacatctcctgttcccaacttgtagtcgggatggaaaacaccggtgtgtatggttttgatttgcgtctgttccttgagagcaagaagattgactattgtgcttttatgcctcttgatttgaaacactccatgggattgatacgcggaaagaacgataaagttgacgcagaacggatcgcctattacacttatctgcatcgggaggaactgtcttattccaagctttctggcagttccatcctccgcttgcaggaactttccgttgagcggaagcgctttgtcaagcaaagagctgaatatgaaggcctgataacggaataccaggaaaagaagacgactgccacttatactcgtgcgaagcagatgaaggaggttctggatgaggaaatagctgccgtagaatcggaaatgaaagaggttgtagctcatgacccggcccttttgcataactatcaattactgctcagtataaagggaataggagaagtcaatgccatctccacgcttatccacacgaataacttcaaggcttttgaaacggccaggcaatatgcatgctaccttggaatcgcaccttttgatcacacctcgggaaccagcataaaagggaggcctcaagtcagccatgtgggtgccaaattgttgaaagcggatttatctcaggcagccaaatctgctgtggtttgggacaaagagctgaaaagctattatgaacgaaaaataaaggaagggaaagaatatggggtggtgttgaacgccgtcaaattcaaactggtatgtagaatgtttgctgtagtcagaagaggaactccatttgttgatttgatggcttataaaaattaaacggacgagtcaccccatccgtttaacttatttaacagaatttgcttgtgcaaaaatttgtgcaggtcttagaat

SEQ ID NO: 8729 - DNA, 1344 bp, unidentified
  source 1..1344: mol_type = unassigned DNA; note = element_db375af
  misc_feature 1..2: note = core
  misc_feature 3..83: note = LE
  misc_feature 84..1103: note = CDS
  misc_feature 1104..1344: note = RE
  misc_feature 1118..1330: note = bridgeRNA
gatggggtggatggctcccgctcccggcgtcgcaatgcgccatactgcaggtgtcagaatctgcaactgagaggagccaccccatgcaagttaccactgtcggcctcgacctcgccaagaacatctttcatgtccacggagtttcccagaccggagaggtcgctttcaatcggcctttgcgtcgggcgcaggtgctggcgttcttcgagcgactgtcgccctgcctcatcggcatcgaagcctgcgcatcgagccaccactggggccgcgagcttacgaagctcggtcatactgtccggctgatgccgccgatgtacgtcaaaccttacgtgaaacggggtaagtccgacgcggtcgatgcagaagccatttgcgaggccgtgacgcgaccgacgatgcgttttgtcgagatcaagtccgaggaccagcaggcgcttctctccttgcaccgcgcacgggacttcgtggttcgacagcgcacccggttgatcaacatgctccgaagcttggccgcggaattcggggttgccatcgcccggggcgtcacgcgggctatcgattttgcgaaagggatcatcgagggcaagcagtccgggttccccgagctcgcccaagacgttctgcgggttctcagccgtcagctggtcgaactgcacaaccgccttcgctggtacgagatcaccatgcgtatccaggctcgtctcagccgccaagcgcaactcctgcagaccattcccggcgtcggaccagtgaccgcctcggccgtggccgccacgatcgggtcgggtcaccagttcaagagtggtcgggaatttgcggcgtggcttggtctgacaccgcgcaaccactccagcggtggcaaagagcggctgggaaagatcacgaagatgggcgatcggtacctgcgccagcttatcgtcgtcgggatgacatcgcgtgtgcggcaggtcaccaatcatcccgagcgtgccgatccctggctgacgaagctgttgcagagaaaaccggcccggctcgcgactgtcgccatggcgaacaagacggcgcggatcatgtgggcggtgctgaccagaaacgaaccctaccgccctcacacagcctgagacataccgaaacagcgagatagcaagaccgacgatgtgatggtgtacccttcagccgcaacgatcaggacgctccgccgaatgtccagggcgcaattgcccgctttccagataggaacctgacctgcggatcccatcagggccagcggtgtgaaacgcgcaaacaggccggacacaagaccgcttctgaaaaggtacacgagatcatttacgacttgctatgcgggagccatccacacaa

SEQ ID NO: 8730 - DNA, 1493 bp, unidentified
  source 1..1493: mol_type = unassigned DNA; note = element_db398ab
  misc_feature 1..2: note = core
  misc_feature 3..246: note = LE
  misc_feature 247..1473: note = CDS
  misc_feature 1474..1493: note = RE
  misc_feature 13..232: note = bridgeRNA
ctaatcagttctgggagtgatccatccggcacactcctggcggtagccgaccggcaggtgagcactcgtggttcctggacgttgagtcctgatgaaagacagtgcccctgccggtaggccgggagagttgatcgctgctgggatgtcgtgcccacccactggtggtgtgagcactgcttgattaggtcgctgatggttctcccgccggctgcgcagggcgatcggcatcgagaaccgggaggaccgttgcgactgttcgtgggggatgactgggctgaggaccatcacgatgtcgagttgatggacgccacaggccgacggctggccacggcccggctgcccgagggcgtggccggcatggcccggctgcacgcgatgatcggcgagcgggtcggcgaggaccccgacgaggatgtggaggtggtggtcgggatcgagaccgaccgaggcccctgggtggccgcgctggtcgccgccggttacacggtgatggctgtcaacccgttgcaggccgcccgattccgtgaccggctcggtatgtccggcgcgaaaagcgacgccggtgacgcccatgtgctggccgacatggtccgcacccacgctcacgagctgcgcccggtcgccggggactccgcgcgggccgcggcgatcaaggtcgtggcccgcacccacaagacactgatctgggaacggacccgccacacccagcggctgcggcacgcgctgcgcgactacttcccggccgcgctggtcgccttcgcggacctggacgccgctgacacgctggaactgctggccaaggcgcccaccccggcgcaagcggcccggctgacgtcgccacagatcagcgccgcgctcaagcgtgcgcgtcgcagaaacgtcgcggagaaggccgcggtgatccagaccgcgttgcgtgccgagcacctgggccaacccgaggtcgtggccgacgcctacgccgccagcgttcaggcgctgatcgcggtcctgatcgtgctcaacacccaggtcacgaccctgcaagggcaggtggaggcccattttgggcagcacccggccgctgagatcatcacctctcagcccggcctgggaccgatcctcggcgcccgggtgctcgcagagttcggcgacgacccccaccgctacacctgcgccaaggcccgcaagaactacgcgggcacgtccccgatcactcgcgcgtcgggcaagaagaaggccgtcttggcccggttcgtgcacaacgaccggctcatcgacgcgctgatgacccaggcgttcgccgcgctgaaggcctcgcccggcgcccgcgcctactacgaccgccaccgtgcccgcggcgccagtcacaacgccgccctgcgtcaacttgccaaccgactcgtcggcatcctgcacggctgcctcaagaccggcaccctctacgacgagacgaccgcttggtcgcatcacgccgagaacgtcgcggcttgacatttcagctcctgggatgt

SEQ ID NO: 8731 - DNA, 1499 bp, unidentified
  source 1..1499: mol_type = unassigned DNA; note = element_db4407c
  misc_feature 1..2: note = core
  misc_feature 3..364: note = LE
  misc_feature 365..1417: note = CDS
  misc_feature 1418..1499: note = RE
  misc_feature 6..229: note = bridgeRNA
ctaatggcttctgtcggtctgcttcggcaggctggttccggtagcggccggcgggtcagcactctccgaatctgatcgcttgcaggtctcgcggcagaccgtgcgcccgttggtcgtgaggaggcgtcaatcgctgctgggatgtcgtgccccgtcggtggtgagcacttggaccattagatcgctggctgtctcctccacgctgctgaccattggtgagggagtaggaaggcgaggcgatgctcttcattggagatgactgggccgaggatcaccacgacctcgagctggtcgacgacgaaggccacgtgttgcccgcagacggttgcccgaggggatccagggcgtcgcggggctggacgcgatggtcgccgaccacttccccgaagactggatccagctggaatctgagcagattcaggggctggtcaaggtaggcatcgagaccgaccggggaccctgggtggcggcagcactggtcgcggcgggatacgaggtctttgcgatcaatccgctgtcggtgtcccgatatcgcgaacgccactccaccgctggtgcgaactccgacgccggcgacgcgcacgtgctggctgagatcgtgcgcgtggaccgcgcccatcaccgcccactagccgatgactctgaggaggccgaggcgatcaagctggtggcgcgtactcaccagagcctgacctgggagcgcagccgccatgtcttgcggttacgtgcggcattgcgggacttctttcccgccgagctggaggccttcgccgacctcgacgcccccgatgcgctcgagctgctggcggccgcacctggtccggaccgggcaggtcggctgaaccgccgccaaatcatcactgcgctgcgtcgagcgaagcgacgcgacgtcgaagccagggccgccgagctcctccagatcttcggtgctgagcagctgcgccgatcggctccggtggagacggcctacgcggcgatcgtggccagccaggccaccatcatcgcgacgctgaacacccagatcgaccagatggcgacggtgggtgaggcgcattttggccgacacccggacgctgagatctacgccaaccaaaccggcctgggtgtggtcctcgccgcccgggtcctcggcgagttcggcgacgatccgcaccgctacaccgacgccaaggcccgcaagaactacgccgacaccgccccgatcacccgagcctcaggcaagaagaagatcgtgctcgcccggtacgcccgcagccgacggctcggcgacgcactgcagcaatgggcgttctgctccctgcgaggatcacccggagcccgtgcgtactaccggcaactcgcgcccgcggcatcggacaccacgccgctctgcgccaggtcgcgaaccgcctcgtcggcatcctccacggctgcctgaagacccacaccccctacgacgaacacaccgcctggagccaccaccggcccaccgctgcttgacaacgaaaaacctgagatgt

SEQ ID NO: 8732 - DNA, 1580 bp, unidentified
  source 1..1580: mol_type = unassigned DNA; note = element_db45a01
  misc_feature 1..3: note = core
  misc_feature 4..260: note = LE
  misc_feature 261..1463: note = CDS
  misc_feature 1464..1580: note = RE
  misc_feature 1..239: note = bridgeRNA
cccattaccatgtttggtaggccccgatggtcggggccgggtcgccggttccggtatgactttcctgccctgtcgtcgatgatccgggggtgttgtcgccgggaacggggacgcccgatgaccgctgataggaaccaggccggctacacggacgcttcaggggcgcatggcgcaggtctcgtcgtaatgtgggtgcggcgcgggcgtccggactcctccgagcccgcggcgaccggaaaaccttcatgacgggaggaacgatgatgaccccggacgacatcgacgtgtgggtcggcctggacgtgggcaagagcgcgcaccacgcgcacgccctcgaccatgacgggaacaccctgtacgacaagccgttgaaacaggacgagaaggccatccgcacgatgctgggcaagctctccaagcatggccgtgtgctgctggtcgtggaccagcccaacaccatcggctccctgcccctgacggtggcgcggaacatggggatcgcggttgcctaccttcccggcacggccatgcgcaggaccgcgcagctgctgcccggggacgcgaagaccgaccgcagggacgcgcatgtgatcgcgtgggccgcgctcaagctgcccgagacgctcagggacgcgggcccggatgacgagaccctcgccgccctgaagctgctcgccggccacgacgaggacctcgcccacgaatccccccgccacgtcaaccgcctgcggagcctgctgctgcagacccaccccgcgttcgaacgcgcgctcaagggcgagagaatcacgcgcgacgcgacgctcgcgctgctcgaacgatacggcgggcccatgggcgtgaaacgggccgggatcgaggacgtgaaggactgggccaagtccaacgggcttcgcgccggccgcatcatcgacgacatgttcaaggcgatcggcgagcagaccgtcaccgtgcccggcaccctcatggccgagaccatcatcccctccatcgcccacgacatcaagacgatcagggaccggcggcgcgaggtcggccgccaggtcgagaagctcctggaggaccaccctcttctcacggtcctgacgtcgatgcccgggataggcgtcaggaccgcaagcaacatcctgctcggcatcggcggcgacatcgccaacttcaaatcgtccgcccatctggccgcctacgcgggcatatcgcccgccaccggccaatccggcaccagcatcaaaggcgaacggccctccaggcggggcaacaaacgcctcaagaacgcgctgtggcagaccgcgttcgtcgcatccaccaaacacccgccctccgtggcctattacaagcgcaaacgcgaacagggcaaacaccacaacgccgccatcatctgcctcgcgcgtcggcgctgcgacgtgatctacagcatgctcaaaaacggaaccctctaccaggaaccagccctcgtagcctgaaccgggccacacgggaaaggacgccggacgccaccggcagggcgaagcgcgcccacgacagccaaccggaatcccgacacgtcaactccccaaggagttgacaaaaacataggaaca

SEQ ID NO: 8733 - DNA, 1774 bp, unidentified
  source 1..1774: mol_type = unassigned DNA; note = element_db46a02
  misc_feature 1: note = core
  misc_feature 2..385: note = LE
  misc_feature 386..1540: note = CDS
  misc_feature 1541..1774: note = RE
  misc_feature 14..280: note = bridgeRNA
cctgttactataatatttgcctcggaaaagtggcagccagctacgagccgagacatctcgttgcctaagctgttagaataggaaggcaatggtctgacctaattctccaggggctacgcgcccgcagataagtcagtcagctatcctcctattcacagcgttcgatttgtgcgggtagagccgcgtgttcgtgtcaccaaacagatagaatcggcaatgggtagatgctcagtccattgctaatttagggatgagaaaaactctgatttgttcgcagtggcatgcaatatatagatgccataataatttgcaactcaatatattggttcacgattttgcaaaacttgcgttttgctcatctctattgctaatcctttcaggagtgatgaacacgaacgcagcaggtgtcgacgtttccagcagaaagagtactgtggccgtgcttcggcctttcagcgaggttgtgaagctgcccttcgatgtgcgacacagtgccgaggatctgacggcgctggcagcgcagctcaagtccatcgatggcgaaacacgggtagtcatggagcacatcgggcgctactatgagagtgtcgccaaggttctccgcgaagccgggctttatgtctcagcggtcaaccctctgctcatcaaggagtgcggcaacaactctctccgcaaagtcaaaaccgataaggcggatgcgatgaagatttccaaatacgcgcttgacaattggacggaattgcgggtccatacccctatggacacgattcgatatgatttgaaagccctgaaccggcagttccagttggccgccaagcagaaaaccacaaccgcaagcaacctcattgcacttcaggaacagcctttcctcggtatccgcaagctgtttgacagccccgtacgtagcgacagcacacagaagtgggtggatttcactcatgacttttggcatgtcggttgcgtccgcagcggcagtcagaacgcttttgccgagcgctaccgcaaatggtgcaagcgaaaccgctaccaattcagcatggaaaaggccgctgaggtgtatgctctggcaaaatctgctgttgtgctggtgcagaagacctccgacacgaagatgctcattcaggaggccgccaaccaactcacggcgatctcgcgcagcgtggaaatctaccacagcgagatgaacaaactggcttcccagctcccggaataccctgtcgtcatggaaatgtacggcgttggggaatctctcgggccacagctcatggcggagattggcgatgtgcgccgcttcgagcgcaagcagtcgctggttgccttcgcaggcattgacccggcgccgagcgaatcgggagactattgctctcgaagcaataagactacgaaacgtggctccccatatctgcgaaaaacgctgttcaacatcatgatcgtacatctgaaacgtggctccggcagacgagacggtgttccagttcttggacaagaagcgtgccgagggcaagccgtactatgtttacatgacggctgcgggaaataagtttctgcgccgttactacggcaaggtgatggcttatttcgccactctggagggactgccgcccgtggacatgaattcaacaggtctgcaccacacagagtaaccgactgtaacctgcccactcaggtcagcgcatttgcggtggcctttttgtgttgcactttttctctacctgctgcctgcaagtttttcttctgtcaagtccgctttggggcttgactttttatttgcagg

SEQ ID NO: 8734 - DNA, 1602 bp, unidentified
  source 1..1602: mol_type = unassigned DNA; note = element_db48903
  misc_feature 1..4: note = core
  misc_feature 5..271: note = LE
  misc_feature 272..1480: note = CDS
  misc_feature 1481..1602: note = RE
  misc_feature 34..291: note = bridgeRNA
ttttagtaccataaaagtgtagttgttagagagtaattaactctgacatctgcacttattttattataattagggaagcagttggtatggcatggtcttttttggatttagcatccgtcaataaaaccgtcaaccaaccccttattataaacattcgcttaggcaggttgatactctacggagctttcgtgtaacgaactaaactggatcgtaataagtgtggatggttttagcaattgctgttatataaatctaaaatcaggaggttattatgattagcgtaggaattgatgtagcaaaaggaaaaagcactgtatgtatcttaaaaccatatggagaaattgtgagtaaaccatttgatatagttcataacgaaaaggatctgagcgaacttgcatccatgcttgtgcgatttgacgaagaagtaaaagttgtcatggaagcaactggcatttaccatctaccagttcttacgtacttacaggaaaaaggactttttgtaactgttattaatccatatcttatgaaggtataccgtagtggggatttaaggaaagccaaaacggataagattgattccaggataattgctaattacggaattgatcactggttcactatgactgaatttcaagcatcagaagatatatatggagaattaaaacttctggggcagcaataccgccattacatgaagttgcatatcaactcactgcatgaattgacgcatttgttggattatacgatgcctggaataaaaggaatgtttgcaagctggaatgagggaaatcgtaaagataagcttagtgattttgttgaatccttttggcactatgataaaattacgtgtttagatgaaatggaatttattaatcaatatataaactgggcaaaagagaagaaataccatcagagccagactaaagccaaggcaatatataagctggctcatgaaagtattccgaccttatcttcagaaaccccatccgtcaaaatgctggtaactgaagctgttcgagtgctcaaagaagttgatgcaactctaggcactattttatcacgaatgcaagaattagcaaagggattaccagaatatgcagttgtgaggggaatgggtggtgtaggtgaagtccttgcaccgaagttaattgcagaagtaggtgatgttcgtaggtttcacagtggaaaagcattgatcgcttttgcaggaattgatacaccgccatatgaatcaggtcaatttgctggttccaacagaaagataaccaagcgcggatcagctgcacttcgtaaagtaggctatgaaaccatgagatgtatcaagacacatccgagaccaaatgacccagtttatcaatacatagtcaaaaaagaattagaaggcaaagcgaaaaaatcggcaaagatagcaggattaaataagttcctcagaatttattacgcacgggtcaaagaagtttatagggatagttcagagtaaaaagtaaccataaataagatgcgaaatggctgccgtaatgacagcctatttgttgtacacaaatttgaagataaataaaaacttaaaaacctgcaagaaaactattgacttttcttagcagg

SEQ ID NO: 8735 - DNA, 1576 bp, unidentified
  source 1..1576: mol_type = unassigned DNA; note = element_db4a8cc
  misc_feature 1..3: note = core
  misc_feature 4..249: note = LE
  misc_feature 250..1449: note = CDS
  misc_feature 1450..1576: note = RE
  misc_feature 8..226: note = bridgeRNA
gttcgtattataaggttaaccaaattttactggttgaccttttttatataggacctattatatcagtagccagggtaggacgaacgggtgcgtgggactattgatcccatcagctaaactgtccgccccctactcatagaaacatgtttgaggctggttgagacaatgatctcgaataacaagcgaagctatgatactaggagatggaaataggggtactggtaagtaaacaggagaagaagagatagaatgaatccagtaattggtctggatgtttcaaaaggagagagtgaggtacaagcatttttagataagagaaaaccttataaaaagagtttcagtgtattgcacaataataaaggtttagagaatttacttggttttttgatagaagtggagggtgaaactggggttaaaccaacagtgatatttgaatccacgggacattatcacacatcaattgttcagttcttggaggagaatgactacctttacattatggttaatccgttactttcctatcaagcaaaaaaatcaagtttacgtaaggtgaagaccgatgcgatagatgcttataacttatgcgagctttactataaagaagaattggagccgtataaacaaagaggtattcaacttctgaacctacgaaatctctcaaggcagcacgaaacagtgacaggtatttatgtacaaacaaaactacaattccatgcaatattagatcaggtatttcctgagtatagaggggtttttggagatttattttcaaaagtttcactgaatacgttattggagtttagtacatcagaagctgttttgaaggctggggaaaatccactatcagataaaattgcaagcgaatgtgtaactagatcagagcgttgggcgaaggatagagcgaaaaagttgattgaagcagctcatcgcaatccatttaaaaacacactgtaccaaagccatttgattagtcttcaaatgtatattcaaatgcttctccagtaccaagagcacctttcaaagttagatgcccaaatagatgccctggcagaagaaatagaagaatataagattatccaatcgatccctggaataggagggaaaatcgcggcaaagataatttccgaaatcggagagatcgaacggtttaatcatcctaaaaaactagtggccttctctggtattgatccgagcgttcattcatctggtaagttcacagcaacgattaatcggattagcaagagaggatccagtcgattgcgtcatgccttatatatggcagccctctgtgggattcgtagttctcgtaataagcttagagaattttatgatcgcaaacgtgaagaaggtaagcccttcaaagtagctatgattggatgtactaataagcttattcattggatttttgttcttttgaaacgtaaagaaactttcctagatttagcttaagcgatataattaagaaactgatccaaaaccttccaatagaataaaggaaggttatttggcctgttcattttagtatatcattttattaactagatttttattggaaattattgacttctattagctg

SEQ ID NO: 8736 - DNA, 1380 bp, unidentified
  source 1..1380: mol_type = unassigned DNA; note = element_db501d9
  misc_feature 1: note = core
  misc_feature 2..94: note = LE
  misc_feature 95..1126: note = CDS
  misc_feature 1127..1380: note = RE
  misc_feature 1147..1372: note = bridgeRNA
caatgggatggactcctcctcatcttaacggcatcgcaatgtgccagactgaagaagcgtaatttttcagtgacagaatgagaaggagtccgtaatggagcttagtagagttggtgtggatttggcaaagaatgtgtatcagttgcacggcgaggatcgtcacggccaggcggtctggaagcgccgactgagacgcggccagtggctgcaagccttgttggacaacacagagcctggttgcaagatcggcatggaagcctgtaccggtgcgcaccactgggcacgggagcttcagtctcgggtttacacggtgcgcttgattgcgccgcagttcgtaaagccctacgtgaagagcaacaagaacgatgccaacgacgctgaggcgatctgcgaagcaatgagccgtccgcatatgcgctttgtcaccgtgaagagcgttgaacagcaggatatccaggcaacgcatcgtgtccgcaccgagctcaaggatcatcgcaacgccaaggccaaccagatccgcggcctggtcgccgagtacggactggttgccccgcagaccttgctggcactgcggcgagcgatccctgagtggctggaagatgcagagaacggtctgaccgatagcttccggtgcctgctgcacggtctctgggacgaccttcttaacctggacgatcgcctcaaggaactcgacaaggagatcgagacgctggctcgcagcaacgaagtcacccagaggttgcagcaactacgtggctttggcccgctggtggcaaccacggtggacgccaccgttggtaccggcgagcagttcagtaaaggccgacagatggcggctgcgttgggactgacgccaagacaaaacagctccggtgacaagcaccgcctgttcgatatcagcaagcgcggtgatgcctacctgcgaacactcctgatccacggtgccagggcggtggtgtcacaggctaaacatcgggacgacccgttgagtcgctgggcgactgacatcgccaagcgacgtcaccctaacgtcgccgccgtggcactggccaacaaaacggcacgcatggcttgggccatgctgcaaaatgacacggattacgatcccggcttggctgttggctgagcgggaaataataggagaatctcaacagcgattgcttaagcaaactgcttgatggcaaacaggtcgaaccggcgtcggccgaacccgtgaatgactaagtgcccagagtacgaagaagcgattgggagctgacgcgcgaatagcccattatggcccggcatcaacgtgtgccaactacagaggccgaatatacgtatgcagtcgtgccatgcttgtcatcaacagagtgcttgcaacgaggaggagtccatata

SEQ ID NO: 8737 - DNA, 1378 bp, unidentified
  source 1..1378: mol_type = unassigned DNA; note = element_db51134
  misc_feature 1..3: note = core
  misc_feature 4..77: note = LE
  misc_feature 78..1109: note = CDS
  misc_feature 1110..1378: note = RE
  misc_feature 1113..1364: note = bridgeRNA
tgctggtgtggacggcctctcaaccccacggcttaaatagcgcccttggcgtttgagccagaagagaggagaggcgaatgaagaatccacccgttcgcatcggcatggatacctccaagtcggtgttccagcttcacggagtagatgacaacgaagaggttgtcgtgcggcgccagtttcgccgcgcggagatgatccgttacttcgagcggcttccgccagtgctggtggcgatcgaatcttgcggcagttcccactactgggcgcgcctgctgcagtcgttcggccacaaggtgaggctgattccgccgcaatacgtcaaaccctacgtcaagcgtgggaagaatgatgcgaccgatgccgaggcgctttgcgaagccgttacgcggccgagcatgcgatttgtccccgtgaagtcggaggagcggcaggcagcctgcatgctgatgaccgttcgggagcgtctggtcagcgtaaaacttcagctctcgaatgccttcagaagctacgctgcagaattcggcatcattgcccccgctggtaggcagaacataaacgcgctcatgaagcgggtgatcgaggatgacaccttgccgaaactggcgcaggatctctttcggctccaggcgcgggaatatgccgctgtcgaagctcgcctcgaggagatcgaggcgaagctgatgaaatggcaccgcgaagacgacgtcagccggaggatcgcaacgatccccggggtcggcccaatcgggtcaaccatgctgagcatgaaggcgccaccgccggagacattcagatcgggccgcgacttcgcggcgtggatcgggctcacgcccagagatcattcgacaggcggcagacaaagacacggcggcatcacgaaggccggagattctgcgctgcgatccacgctgatcgtcggcgccaccgcgctgctgaggcacattcgaagtggccgtcacaagcccacggcatggctggcagcgctactggagagaaagccgccgaagctggtggcggttgccctggctaacaaatttgcgcgcattgcctggcgcttgatgatctcgggtgggatttacaaccggccggcagccgccatgcccacctgacccagaattcagcaccggcgagcggaggctgctcggcggataacccatgaacttgcaggacgcagtagatggtatgactgatcggtcgatacgcgcgacattccgaaggttacactggcaccccaatgtcgcccatgtgcttggagcgggcgtagcgaacaccatcttggccaacgggctccgctcgtgcaaacaggccggacatctgatagcaagcgatcaggtcagaattctgctatcgtcctgataagcgagaggccgtccacatc

SEQ ID NO: 8738 - DNA, 1497 bp, unidentified
  source 1..1497: mol_type = unassigned DNA; note = element_db536de
  misc_feature 1..3: note = core
  misc_feature 4..288: note = LE
  misc_feature 289..1416: note = CDS
  misc_feature 1417..1497: note = RE
gtttaccatcgaatttgcagggtgacgggctcccttgaagcccgttaggattgtccttggcgggggtgtggctcatggggtcggtggccgggttttcccggctcgctcgaacctgaaatgccgcccccgccaccttgcatcatccgaggggtcgaacgggatggtgccaatcagtcttctgatgtggctctgccagtagacgagaccggcggatgatttttctcagccggttttgacttgcggagacttcgatcatgcccaccgtctcggaaattcgtgtcagcattgatgttggttgccatagccacagcgtggccattggcctgccgacgggcgaagtgctggaggaattcgacctgcagcaccggccggaaggcttcgacctgttctttgcgcgggtggaacgctgccagcgccgctacggaggcgaggtgtcggtggccatggaagggtacaacggctgggcgcgcccccctggataccctggtccgcagccacggctatcgcctgttcaacatcaataacctgaagctggcgcgcttcaaggagatcttcccggctgcggccaagaacgatcgcatcgatgcgcgcaaggggctcgaactgtttcagctgtgcgaccacctgccggtggcgcggggcgtgctccaggaagtggcggcaaccccgctggaaaacgaccaactcaaacgcctgacgcgccgacggcgcgccttggtcgaggagcgcagccggctgctctgtcgcatgcaggcagacttgcaggccgcttgcccgggtttgctggcgatcaccccaaacgccgacaacgtctggtttctgaacctcctcacgcacagcgatgacctgtgcaaactggcgcgcttgcgtgcaaccaccctgctgggcatcaaagggatcggccgcaagtatgccgcgctcatcaccgcttggcagaagtccgcccacttcagccatgacgtggcgtgggtggggcccatgattatcgaggatgcgcgccgtatcctggagttgcgggcggcgatcaaagcccttgaggcgcgctgtgccgagcgggtggcgcagtccgagatcgcccagtgcatcgattccattcccggcttcgggctggtgtgcgccgcggagatcgccggggagttgggcacggtcgcgcggtttgccaacgatggcagtctggcggtctatatgggcatggcgacgctggataacagctcgggcaaacaccgcggatcgaaaaacccgaaacacgtcaacacgcgggcgaaggcggcgatgatggtcggcatcgaccggcaccgcaaacaggtcccggaatcccagcgctactacgagaaaaacgaacgcagggaaagacgcacaaccaggccattcgcgcgcttggacgccatctctgccgcgtcattttttcgatgctgaagcagggacgctgctatgaaatcagagaggcgaaagaaaacagagactgaatgaaaaaacggttgaaaattcgagcgggat

SEQ ID NO: 8739 - DNA, 1611 bp, unidentified
  source 1..1611: mol_type = unassigned DNA; note = element_db5a70c
  misc_feature 1: note = core
  misc_feature 2..90: note = LE
  misc_feature 91..1131: note = CDS
  misc_feature 1132..1611: note = RE
  misc_feature 1373..1609: note = bridgeRNA
taatggaatggttcgccccgctccctaaacggcctcaaatggccatgatgtcagtgtcaaaccgacatcaaaacagaaacgaggcaaaccatgagcaagcatagcaaaaaaggcgaagtgaaagtattgggaattgatctggctaaacaaagttttcaactgcacggcgtagatgaagcaggtcagccggttttgaggaagaaactaagccgaaagcagctcagtgcctttgttgcaaatttgccggagtgccttatcgggctggaagcatgtggaggtgcccaccactgggtgagagtatttgagtcctatggacatacggtacgcatgatggcacctcagtttgttaaaccctatgtaaaatccaacaagaatgatgcagtggatgcggaagcgatttgtgaagcggtgcaacgacccagcatgcgctttgtgccggcgaaaggcattgagcagcaggatattcagagcctgcaccgtatacgcagtcaacttgtcgccaggcggacagcgcaaagtaaccagattagaggcctgttgatggaatacggagttatcatccccaaagggatcagctatgtacggaaacagttgccgctgattttggaagacgcagagaatggtctgagtgatttgttccgtgaactgcttaatgagctgtatgaagagattgtgcatctacaggagcgagtggaagtgatggagcaaaaactgcatcgactgtgtgcgcagaatgaagattgtcaacgtctactcacaataccaggtgttggtctgttgagcgcaacggcgctggtggccgccattggtgacatcggtgcattcaagagtggccgggaactggccgcctggctgggtctggttccacggcagcactccactggagggaaaacgaccctgatgggtatcagcaaacgcggagatagttacctgagaacgctattgatacatggtggccgcactgtcgtgcgagtggcgcataagtacgaggatcgaaagagccgttgggtcagtgagcttgatcaacggcgggggaaaaatatatccgccgtggcggttgccaacaagaatgcccgcactgcctgggcgctgttgagcaagaaaacaacctatcaggctgtggcggtatgaagggcgctgtgcgccctgtgctcaataggggcgctgcccctaaaccgcacggctttaccccgccctcgccgggaggcaggggcagaggtttctgcccctgcctgacagggtagatcgctggatgactatgtcaaggactactcgacgcaagcgtctgcgttcctccttgacatacccatccagctcagaaaacgagcaagtacatcatcggcaaatgccgggatgtttaaccgagcaagagaagagcaacgagttgcgtggataaagttcaaatgatggcataaaaggtagcacctgcatcctgtgaacctgctggggtctcgggcccattgagaggccgaagacctgatgaggttaggatgtgcggattccatcagggccagagacatatattgtctcacccaaaggccggatatatggacgcaatattctttttgtcacgatcgaactttttccttgcatcgcggggcgaaccatata

SEQ ID NO: 8740 - DNA, 1364 bp, unidentified
  source 1..1364: mol_type = unassigned DNA; note = element_db5d6eb
  misc_feature 1..2: note = core
  misc_feature 3..75: note = LE
  misc_feature 76..1107: note = CDS
  misc_feature 1108..1364: note = RE
  misc_feature 1080..1352: note = bridgeRNA
tgatggggtggacgccccccggcggcatcgatgtgccatagtggaggtgttgtcacaccactagaggaggcgtccgtgtcggaagttagcataatcggtctggatatcgcgaagaatgtttttcatgcgcacggcgcggatgcgagcgggcgggcgctgttcagccgcaagatcggccgagggaagctcctggagttctttgctgggcaccagcgttgtacggtcgcgctggaagccagtgggggagcgcaccattggggccgagagctcacacggttgggatacgaggtgaagctgatcccgccggcgtatgtgaagccgttcgtgaagcggaacaagaatgatgcggcggatgcggaggcgatctgcgaggccgcccagcgcccgagcatgcggttcgtggcgatcaagagtgaagagcagcaggcgtcaggcctagtgttccggacccgtgacctgctggtgcggcaacgtacccagctgatcaatgccatccgaggccatctgaccgaatatggctgggtagcgcccaaaggcccgtcgcacgtcgcgatgctcggcgatctgcttgaggacgagatgggctcgtcgctacccgaggcagccagggcgatgttccgcacgatgctcgacctgctggaggagctgaacgagaagatcggcgatctcgacaaggagattgcgcgccgggctcgtgaggatgccgtcgcgaggcggctgatgacgatccctggggttgggcccataacggccaccgcattggcggctcttgcgccgccggcagaaaccttcaccaagggacgggactttgcggcgtggctagggctggcgccaaggcagatgtcgacgggcggcaagcagaagctgggctcgatatccaaaatgggcgagcgcacactgcggcgactgctcatcataggttgcagtgcggtggtcctgcaggccagcaagcgaggcgcgcctaagggctcatggctagagcagatgatggcgaggaaaccgcgtatgctggtcacggttgcccttgccaacaagacagcgcggatcatctgggccgtgctagtgaaagacgaggattacagagctccggtcgcagccgcggcgtaagccaaggcggaccagaggtcgccggaaggcgtagtcggtcgaaggagagtatggcacaacagtcggcgagacggggccggaagaaccagggctttccaccgtgccgcgagcacgctgtgggtgatgtggttccggtccgcgaactcccatacgggcccgcagcctccgatgctgcatcagaggccggacagatggcagcatccgactacgtgcattacctccaaaaaaccgcttgcgtcttttggggcgtccacaga

SEQ ID NO: 8741 - DNA, 1361 bp, unidentified
  source 1..1361: mol_type = unassigned DNA; note = element_db5ecd8
  misc_feature 1: note = core
  misc_feature 2..71: note = LE
  misc_feature 72..1001: note = CDS
  misc_feature 1002..1361: note = RE
  misc_feature 1122..1351: note = bridgeRNA
tatgggatggcccacccctcgctttcctcaccctaggctgagggggcaactggaggaatgggagcgggtcaatgcagatcgcagtgctggggatcgacctgggcaagaacagctgcagcgtggtcggcctggatgcgggagggcgcgtgctcatgcggcggcgcctgcaccgggatgggatcgccaagctggcggcgggtatgccgggctgcgtagtggcgatggaggcctgctgtggagcgcaccacctcggccgcaggctgcgcgagcagggccacgaggtccggctgatgtcccctgagtacgtgcgcccctacgtgaaggcgcaaaagaacgacgaccgggatgcggaggcgattgccgaggcggcgacccgaccggccatgcggttcgtggagctcaagagcgaagcccagctcgacatgcagagcctgcatcgtgccagggaccgactggtgggggagcggacggccttgatcaaccagttgcgcgccatcctgctcgagcgtggcatcaccgtgccccagggacggcgcaagctggaactgttcctcgaagccttgctggtcgaggatcaggccgcgctcagcccgcgcacccggctgctggtggaggaccagcgggcggagtggcgtgaactggaccggcgcatcttggcttttgacgaggagttcgcgctgcacgcccgcaccgacgaggccgcccgtctgctgaccacgatcccgggtatcggccccctgaacgcgacggcgctggtcgccgcggttggcaaggctgaaacgttcggacgcggccgagatctggcggcgtggctaggtttggtgcccaggcagatgaccacaggcggcaaaccgaagctgctggggatcagcaagcgcggcaatgcgtacctgcgcaagatgctgatccacggtgcccgcgccgcgctgccgagcttgtcgacggccgaaacaccactgggtgactggctgcggggggactacgggcccgagcgcacgtgaacaccgtggtggtggcactggcggccaagctggcgcggatcatctgcgcggtgctgcgcagcgggcagcggttcgggatgcagggcacgagcatgtcgtagcgccagggatcggtcgttcgcgcccacccggcgcgagcggctggatgaggtctgcgggtggtggaagtaagatggcctgacagtcgatcggcgtactggaaacctgacgcaaaaaatggcgctcgacgccgtgaactttatgaggaccaggacgcgcggatctccatcttggccggggcgtcgctccgagaccggatacgttggcgtagactgatcagaccaggtcgcaaaactgcttgcggacggggtgggccatacg

SEQ ID NO: 8742 - DNA, 1210 bp, unidentified
  source 1..1210: mol_type = unassigned DNA; note = element_db5fbec
  misc_feature 1..4: note = core
  misc_feature 5..210: note = LE
  misc_feature 211..1182: note = CDS
  misc_feature 1183..1210: note = RE
  misc_feature 35..197: note = bridgeRNA
tcatcctatgcttatagtcgctaggttacaattgatacttctagcacaaaggcagaacacactattaattgtcatgcgtgtttaacaccgttcgaaatgtaagtacctgcctttatttacgagagttaagctgaacagttcgaaaggtcattatgaacctgtatttaggattgcgagctaagatctcactattaaagcaagaggtttaagatgaaaaaatttgtcggcattgatatttccaaagagacatttgatatttattttgagcaagaagataaaggctgtcatgtcaaattacatcagacagaagaggactacaaagtcttgcttcgtttgattggtaatgacgtaatttgcattatggaagcaacgggcaattatcatttaaagttagctaattttcttcatcaagcaggtataaaggttattgcagaaaacccattaaaaataaagaggttttcacaaatgagtttacaaagaactaaaacagataaagcagatgccaagcttatttatgagtatggacggcttattttatcctcaatagaactgcatttttggcagcctgataaaacggatataggtcatttaaaacaatatgataccgttcgccaccaactgataaagcaacgtacagcactgagtaatagtgaagaagcgttgaacgccttgactcatttaaatgacgaagtcacccaagtgctgagtgatatggttgctgctattaataaagccataaaacagcttgataaaggcatgcttaaactcgttaaagaacatcatgcagagacattttatttagttaccagtgtgccaggtgttggtcccaaaacggcgactatgatgatttgtttaacggatgggtttaagaaattttctcacgatcaagtcaagcaatttattagctatatagggatgagtccaagaacatttgaatctggaaccagtgttaaaggacgagcacatattagcaaagtcgggaatagtaggatgcgctctatgttgtacatgtgtagctggactgccaaaactaaaaacgaccaatgcgtggcattatacgaacgtttaactgagaaaggaaagcctgaaaaagtgataaaagtagccattgctcacaaacttatccgtcaaatttttggggttatcaaaagtggtgaacctttctcaaaagagtatgcttaatgataaaatggttgacattaagcacagt

SEQ ID NO: 8743 - DNA, 1429 bp, unidentified
  source 1..1429: mol_type = unassigned DNA; note = element_db624f8
  misc_feature 1..2: note = core
  misc_feature 3..120: note = LE
  misc_feature 121..1158: note = CDS
  misc_feature 1159..1429: note = RE
  misc_feature 1195..1424: note = bridgeRNA
agatggggtaacgggccggcgccgagtctgtcttttcaggcagggtggtcgtccctcacactgatggtgttgaaccggcgtcaggccttcgcctgcgccaagcctcaggaagggacgaccatggaccagtatgccggaattgatgtctcgttggaatcctccagcatctgcatcgtcgatgctcaaggcaagatcatcaaggaggccaaagtggccagcgaaccggaggcgctgatcgcctggtttgccgcgcacgagggaccggtcatccggatcggcctggaagccggtccactctcgcaatggctctatgctggcctgagagcggcagggtttgcagtggagttgctggagacccggcatgtccgcgatgctttcaaggccatgccggtcaagaccgaccgcaaggatgcccgcggcattgcccagctcatgcgactgggctggttcaggcccgtgcattgcaagtcgctgccggcccaggaggtgcgggcgcttctgaccagccgcaagctcctgcagggcaagcgccatgatgtcgagatgagcctgcgcggcgtgctgcggggcttcggcctgaaggtcgggccgaccacccccaggaccttcgaggcccgggtgcgtgagctggtcgagcatcatcccaccctcagcttgattgccgatgcgctgttgaaggcgtgggcgagcctggcgcaggaattccggcgcatcgagaagaagcttctggcgctggctcgtgccgacacccaggtgcgctgtctgatgacgacccctggggtcggagccctggtggcgctgaccttcacctcggccattgatgatccaggacgctttcgctcctcccgcgccgttggggcgcactttggtttgaccccgaagaagtaccagtccggcgagactgatgtcactgggcggatctcacggatcggcgatcatggcgtgcgcacggccctctatgaggcggctaacgtgatgctgacacggccggtcaaaggctcggccctcaagcgctgggctctgagcctggccaagcgcgctggcatgcgcaaggcgaaggtggcactggcccgcaaactggcggtcgtgctgcatacgatgatgcgccatggcaagccgttcagcctggtgggacaattgggagcggcgatggcataatggtcagcacaggagaatagagtttacacagtatccagtcgggctcagacaccaggcccggctggtgcgaggtcccatcgccgggacgatggatccggtcaggtcgctaagaacggagcagctctcaggataactgcgcgccctagattggccgaccgatccttatcagaccccatcaggcagcggccctggcgccgactgcggacagaagcaaaactccggcgacgggatgaagcacgcaagggattgacaaccaagggcccgttacaga

SEQ ID NO: 8744 - DNA, 1432 bp, unidentified
  source 1..1432: mol_type = unassigned DNA; note = element_db64b5d
  misc_feature 1..2: note = core
  misc_feature 3..123: note = LE
  misc_feature 124..1161: note = CDS
  misc_feature 1162..1432: note = RE
  misc_feature 1183..1381: note = bridgeRNA
agatggggtattcggcttagcgcctctcttcaaggcttcgtgtggtagaggcgctgcgcttcgagttgatgatagacgtggtctgttgagaacagccacaagcatcaggaaaggaagcgcagcatgaagtattatgccgggttggacgtttcggtgaaagagacgtcagtatgcatcatcgacgaagtcggcaagatttgccgtgaagtgaaagtcccaagccacccggatgaccttatccgggtcctgcaggacccagcctggcagctgacgcgcgtagggcttgaggctggaccactgtcgcaatggctgttcagcggactggcggaagccggcttgccgacgatctgcattgagacccggcacacgaaggcgtttctcaaggcgcaggtcaacaagagcgaccgcaatgatgcccgcggcattgcgcagatgatgcgggtcaatctgttccggccggtgcacgtcaagacgctgacgagccagaagcgccgtgtccttttgagcgcccgcaagttgctccaggagaaagcggtcgccttcgagaatgacatccgcggtttgttgcgcaactttggactcaaggtcggcgccgtcggtgcagtcaagtttgaagaacgaattcgcgaactcgtcgaggacgtgcccgagatccgcgacatcatcgagccgttgctggccgcccggcggaaactgcgcgaagagttcgtgaaactccaccggaagctgctgtcgatcgtccggggtgacgaggtctgccagcgcttgatgacgatccccggcgtgggacctgtcgtctctctggccttcagggccacaatcgatgttccggcccgcttcagcaactcgaaagctgttggtccagcattgggtctgacgccggtactcaatcagtctggcgaaagtcgtcgcgtcggccgcgtctcactctgcggcgacggcatgatgcgcacgctcctctatgaagccgcccaatgcctgctgacgcgtgtgacgaaatggtcctggttgaaagcctgggcaatgaatgtcgccaaacgacggggttgtcagaaagccgtcgtcgcgttgtctcggcgactggcagtgatcatgcatcgcatgtggagcaatgggaccgaattccgctggacgagggaaagtctgccggcagttgcttgaacgatattgggcaaggagtttagcattccgccagccggcggaaggacgtccttcgcgggacgatggatgagatgagttcgttgccgccctggttccgaccgcacattgcgatcaggacgcgctgtagattgttccgtcttgtccttctaaccccatattgggagggccgaggcgcgccgatcccggagagaagcaagagcccgcgaaagacatcagaagtcggcagagtagattgctcgaaagtgcttgacctcaacacgccgaatagaga

SEQ ID NO: 8745 - DNA, 1558 bp, unidentified
  source 1..1558: mol_type = unassigned DNA; note = element_db86798
  misc_feature 1..2: note = core
  misc_feature 3..274: note = LE
  misc_feature 275..1432: note = CDS
  misc_feature 1433..1558: note = RE
  misc_feature 3..252: note = bridgeRNA
cttgtatgataattacagaagcaaaattacatactttcctttcttttaattgtaggtgtatgtgactataatacattcagatgttgtggacttttcataattttctgtagttcaactactaaaaggagtgtattgccgtttcattatctgaattgtttatagttggatgtgccataggctgaaaccagcgtacgagtactcatttcaatcaagtctacgatgataatcgtgaacggatatcacatcatcaataataaggaaaggggtgcatcccatgatttatgtcggcattgatattgccaagctcaatcactttgcttctgtattatcttctgatggtaaagtcctcgtagaaccgttccaattcacaaatgacaacgatggcttctgtatgctgctctctgtcctgaatcagtatgacaaagacaacctcatcgttggtcttgagtcaacggcccactacggcaataatcttgttgaattccttgttacccggcattttccggtcagtgtgctcaaccctatccaaacgtcttgcatgcggaaaaacagaatccgtaagaccaagaccgataaggtggacaccgccattattgcccaaacgcttatgacgcagcctttcagacgattcacgcagtacgatctggatctgctacacttgaaaaacctgggccgattccgtcgtaaattgatgaagcagcgtacccgcaataaaatcatgctgacttcgtacctggatcaggcgttccctgagctgcagtacttctttaacggaatccatcataagtctgtctacgctatcctgaaggaggcgccctcgccggatacgattgcttccatgcatatgactcatctggctcatcttcttgcctcggcttctcatggccgtttcaagaaagacaaagctcaagaagtaagagttctcgcacggaagtctgtcggttccagcgacagttctatatctattcagataacccaaaccattgagcaaatcgagttactggatagccaaattgaagatgttgaatccaacatggaaaccattattcgttccatggattcagtcatcatgaccattcccggcatcagttgtttagaagccggaatgattctgggtgaaacaggagatgtgcatcgcttttcagcacccggcaagttgctggcatttgcggggctggatccttccatccatcaatcgggaaacttcaacgccactcatacccgaatgtccaaaagaggatcccgatacttacgatatgccctaatgtatgcagctcacaatgtggtacgaaataatgctgtattcaaacagctgtacgacaaaaagcgtgatgctggtctaaaccattatggggctttaggacactgtgccggcaagctggttcgcattatttataaaatgttaacagacaacgtcacatttaatctgtaagcagcttacgaacataccgttgtgaaaaagttcctgttggtgagctttattaaagttaccctattttaagaacctgtaaacaaattcatttttagttcagaaagtacttgacttttcatagttggt

SEQ ID NO: 8746 - DNA, 1374 bp, unidentified
  source 1..1374: mol_type = unassigned DNA; note = element_db94466
  misc_feature 1: note = core
  misc_feature 2..451: note = LE
  misc_feature 452..1258: note = CDS
  misc_feature 1259..1374: note = RE
  misc_feature 14..232: note = bridgeRNA
ctacttattcaatgggcggtaggacggtgcccggcggggtagcgtccaggcgcccggttcgtcgttccctttgcggctgcccacgccggtcgtgtggctctcatttggcctgcgcggaccgggcgtcgctttccgatcggagtggctcaagaggggaatgccccggctcgaagtagcggtgccctcccgatcgtttcccgttgattcccgggggcgccggaggatcgtcgaggcagatgagcagcgttgagaccagcccggaccgtgtggtgatcgggatggacccgcataagcggtcagtcacgatcgaggtgatggccggcgacgagaccgcaaccgggtctgggcgatcgagggctgcgccggaatcggtaagcacgtcgccgagcgcttgaccgctgccggtgagcaggtcgtcgatgttccaccgaagctgacagcccgagcgcgtgtgttcgcgaccgggcagggccgcaagaccgacgcgactgacgcgcattcagtggcgctggtcggcacccggatggccggactgcgcccgttcgtcgacgatgagcagctggcggtgctgcagacgctggtcgaccgccgccggtcgctgggcgatgaccacatccgcatgatctcccagctccaccaggtattgctgctgctcattcccggaggagccaaaaggttcctttccgcagcccaagccaaatcgctgctggccacggtccgcccgcgggatgccgccggcaaagcgagacgccgggtcgccgctgaactcatcgccgatctggaacgggtctatcggcgcagcaaagccgccgacaaagaactcgaggcgctcgtccgcgagaccggcaccagcctgatggacctgaaagggatcggaccgtccggcgccgcccggctgctcgtcgaagtcggcgacatcactcgcttccccagcaaggcgcacttcgggtcctggaccggcaccgcgccgatcgacgcgtcctccggcgaccacgtccggcaccggctttcccgcggcgggaaccggcagatcaaccgggtcctgcacaccatggccgtcgtccagctgcgccggccgaccccaggacgcgtctactgcgaccgccgcaagtccgaggcaaagacctcgatggaagcaatgcgagccctcaaacgacgcctgtccgacgtcgtctaccgcaccatgctccacgacgcgatcaaaggcgtcggtacttggccagacgggcccgggaggacacccggggacgactactgactccagcgcgaccgactcacaccccaacatcggcacttcagaaaagtcacttcccggacccgccgccaactaccctacggcccaccgccgagcggcgtcttgacatagaggggagc

SEQ ID NO: 8747 - DNA, 1721 bp, unidentified
  source 1..1721: mol_type = unassigned DNA; note = element_db963b0
  misc_feature 1..3: note = core
  misc_feature 4..248: note = LE
  misc_feature 249..1463: note = CDS
  misc_feature 1464..1721: note = RE
cttatacattaaactaagagcaggccctctcgacaaagggctggagcaagcggtacacttgctcgtatgaactgttgaacccgtcggggaaagtctcgtttttccactcggcacgaccgattcagaaagcttgcacttcctcgacgcagttcctgagtggaagcgatgatcagagagtagcgctgcgagcgccatagtataaggacccgccaactcaggaacgagtagtgccagacaggagggatcccatgtggtatgccgggatcgattgggctgatacgcatcacgacatcctggtgctggatgagcaaggccagaaggtcggcatagtccgggtcgcccatagcgccgaagggcttgccagcttgacgggctttttggagcgactcatcggaacgcagcccaaagagcaaatggcgtgcatcatcgagaccacgcatgggctgctgattgctgccctgctggaggcaggctggccggtctacccggtcaatccacgcaccgtggatcggcatcgggccgcctcgggtgccaagaccgatctgatcgatgcctatctgcttgccaagacgggacgggcggactttgccgacctgcggcggctgacgcctgatagcgagatggtggcagaactcaaagcgctcacccgcgatcaggatggcttgatccagatgcaaacgcggctggtcaaccaactcacggcctgtctcaaagcctactatccagtggcgctgtcgctgtttagcaagctgcaccaacccacgagtctggccttcttgcaggcgtatccgacgcccgcggcggcggcggcagcgacgcccgcacagctggcctcggttctcaagcaagccgggcatcccactcccgatcaggccgcagcgacgatcatgaccgcgctctcccagccccatctggtggccgataccgtcacgacgcgcaccaagtcgcggctgatgctggcggtggtcagtcaactgctgccgcttctggagcagatcgcggcctatgacaaggaggtgaacaccctttttttgacccatcctgaccacgacctgttcagcagcctgccgcgtgcgggcaagcgcctggctcctcgtctgctcgccgagatcggcgacgaccgcgaccgctatgacgctgccgccagcatccaggcgctgggcggaacctcgccggtcctctttgagagtggcaagtacagcaaagcccatcggcggctgggctgtatcaaacccttgcgcaacgccttgcagcagttcgcctggcaaagcacccagagcgaaccgtgggccagggactactaccagcgcaagcgcacggaaggcaagagccataccgtggcgctgcgcgcccttgccaatgtctgggtcaggatcatctttgccgtgtggcaacaccacaccagctatgaggccgccattttcgcggctgctcaacagcagcatgcccgcaaagccgcttagcagagaagggaggacgaagcgacacgccgtggcacggtgagcagcccacgaccagggcggttgttcgcttaccatcaggcagttgctttgctgaccatgccaacgagaggctgtcaccgaaagcggagcaggatgacagcagcaactggcatggggtactgccttctgctcagttgacgactcctcacatcgcatcatttccggttcttccttcctctgtttccccattcgatcactttagggcttgacatagagagt

SEQ ID NO: 8748 - DNA, 1583 bp, unidentified
  source 1..1583: mol_type = unassigned DNA; note = element_db9a146
  misc_feature 1: note = core
  misc_feature 2..281: note = LE
  misc_feature 282..1220: note = CDS
  misc_feature 1221..1583: note = RE
tgtatgatatatatataacaacttaatatatcatactctcctttctttactatttctctttttacaaatattttgtataatttaagtgtgatgactgtggactttttataattcttatagctttgactatttcagggagagtattgccacagtttcgtttgtattttttattagttggataagccatagctttttatgagtttttatgtcacgcaagtttattaagacgaatactagtggaagtggtcacagttgttattttgaaaggcggtgctttacacatgtattcatattttgttggcattgatattgccaaacacactcattgggcttcaataatgtcatctgatggagaaattatttctgatcctttttccttctcaaatgatattgaaggctttaaaaagtttacttctagtcttttttctttacccaaagaaaagatactaattggtttagaatctactgctcattacggcgaaaatatcatttcttatcttttttctttagattttaacatcggagttattaaccctatacagactgctagtctaagaaaatctaacataagaaaaactaagaatgacaaagttgacacattcataatcattaaagctcttactttaaataattactctctagtcacttctagagacatcaacattttaaaactcaaaggcttatgccgttcacgtcgtaacttagttactatgagaagtaaaactaaaatacaattagtatcttacgttgatcaaatatttcctaaactttcaaagttctttaaaggaaatatccatctaaatgtatcttatcagttacttaaacaattttcaagtcctaatgaaattaaatcattacatttaaccagacttactaacatattacacaataattcacgtggtaggtattcaaaacaagatgctatttatttaaaacaattagctaattgttctgttggaataaataatcctagtatttgtttacaaattaaacatgctatttctcaaattgaattgtataatttacaaattcaagaagttgaaaatttatacaaacaaattatcgatgaaatgaatactaaattacttacaatacctggaatgtcttacaatcaagcagctgttattcttagctcaattggagacattaaacgtttcaataaatcatgccaaattcttgcatatgcacggtttagatccttctgttattcaatctggtaactttaatgccaaaagcactagaatgtctaaaagatgttctggaatgtttagatatgctcttgtatattcagcacacaatgtagttaagaataacgctacttttaaatcatattacgatttaaaacgttctcaaggcaaaagtcactactgtgctttaggacacgttgctcacaaacttgttagagtaatttttaaaatgttaaatgaaaatatttcttttaacttagattaacaaaatatttatatttcaatgttctggaccgtttttaaaaaagtagtaaaaacggcttggttttgttgaccttttttagtattgaaaatttttttaaaatttctatttttctattgacttttcatagttgg

SEQ ID NO: 8749 - DNA, 1410 bp, unidentified
  source 1..1410: mol_type = unassigned DNA; note = element_db9f47a
  misc_feature 1..2: note = core
  misc_feature 3..90: note = LE
  misc_feature 91..1131: note = CDS
  misc_feature 1132..1410: note = RE
  misc_feature 1176..1406: note = bridgeRNA
ataatggaatggacgcccacttcctaagacggcatcaaagtgccaaagtagagtttctacaaactacttaactagaaagaggcgtccaaaatgaagattacaacaattggtatcgacttggcaaaggaagtatttcagattcatggagtagatgatcatggcaaagcagttttgcgcaaacaactgaagcgtcacgagatggcaaagttttttactcatatagaaccatgtttgattgggatggaagcctgcggtagtgcgcatcactgggcaagaaggctgaccgggtttggtcatgcggtaaagctgatggcaccacagtttgttaaaccgtatgttaagaccaacaagaatgatgttgccgatgcagaagctatctgtgaagcggtgggtcgacctaacatgcggtatgtgacggtcaagaatgtagagcaacaagcgattctctcagtacaccgtgctagacaggggtttgtgaaagcgagaacagcgcaaggtaaccagatacgcggattgctctctgagtttggtattgtcattccgcaagggattcaatctatcatcaaacgtatcccagaaatacttgaagatggagacagcggattgccaggtacaatgcgacggctgatagctcgtctcactgacaatctaaaagagatggaccgtcatgtggctgaattagaagcacaaattatgttgtggcatagacaaagtgaagccagtcggaagctggcagagattcctgggttgggtcccatcaccgcaagtgcaatcgtatcgacggtgggtgatgccaaggaattcagaaatggccggcaattggcggcatggctgggattggtacctaagcagaactccagtggtggcaagcagatgttgcttggtattagtaagcgcggcgatagctatctgcgcacattgttgatccacggtgcaagagctgtgattcaatatgcggaaaagaacaagccggcagaaagttggctcagaaagttgatggctcgacgtaataagaatgttgcagcggtagccctggcgaacaagaatgcgcgaatcatttgggcattgttggctaaagacaggatgttccaacctgattacaccacgacagctttggccgtcagtgcataaacaggttgactagaaaaagcagatatatcgaaagaaagaaggagtaaaaccaccgattgcacaggcaatcattaaatgatggcgagactagtcagaccgtgagtagcttaacctgcttttgacatggcactttcagtgcgtgaggatgataaggtgctactcagcatattccatcagggatagaagcgatgagcttcaaacaaaatccggatgtatggctgcaatctttaccgacttaaaatcattaaatgaaagcttggcaaatgtgggcgtccatgt

SEQ ID NO: 8750 - DNA, 1383 bp, unidentified
  source 1..1383: mol_type = unassigned DNA; note = element_dbab248
  misc_feature 1..2: note = core
  misc_feature 3..87: note = LE
  misc_feature 88..1116: note = CDS
  misc_feature 1117..1383: note = RE
  misc_feature 1147..1369: note = bridgeRNA
gatggggtggatggctcccgctcacggcatctgagtgccagacttgtggaagttgtcgaacaaccacgagcgaagggagccacccagatggagattacaacgatcggcctggatctcgccaagagcgtttttcaggttcacgcggttgacgccgaggggaaggtcatcgtccgcaaagctcttcgacgagcccaggttctgccgttcttcaagaccgcgccgccctgcctggtggggatcgaggcctgcggcacgtcgcaccattgggcgcgcgagctgaggcggctcggccacgaggtgcggctgatgccgccggcttacgtgaaaccctacgtgaagcgcggcaagaccgacgccaacgacgccgaggcgatctgcgaggcggtgacgcggccgacgatgcggttcgtggcgatcaagtccgagcagcagcaggcggccctggcgctgcaccggacccgagatctgctggtcaagcagcgcacccagctggtcaacatgatccgcggcctcctggctgagtttgggatcgagatggcgcgcggcctgcatcatgccctcgacctagccgcacgggttgctcaaggcgctgcgccggacgtgcccgagctggcggcgcgagtcatcaccggcctggcgggccagatcggcgatctgcaggtccgtctcacggcgctggagaaggagctgctgacctggcatcggacaaacgagctgtctcagcgcctcagcaccatccctggcgtcggcctgatctcggccacggcgcttgccgcctcagtcaccgacgccagccgcttccgctccgggcggcagtttgcggcctcgcttggcctaacaccgctgcagaactccagcggcggcaaggagcggatggggaggatctcacggatgggcgatcgatatctgagacgcctgctggtcgtcggcatgacctcgctcgtgcgccgtgcacgaacaagaccggactcggtcgacccgcgcatcgctgcgatgctggcgcgcaaacccgctcgcgtggtgacggtggccgcggccaatcgcaccgcccgtgtcgcctggtcgatcatggcccgcggcggcgtctaccgcgcgcctcagggcgtgaccgcctgacagattagctgatcgtcgacgaccagcttccggaggttgcgagcgcgatgtgaagtgatggcgaaccggtcagaccgggagctgggacaccccgcgtagtgtccaaggcgtcgaagcctgcaaagcagagtgggacccagcttgcggacaccatcagggccagcagtccttgaaacgactgcatcaacaggccggacacaagactgcacccgacccagccgccaaaacatcaaatcgagccttgcaacgcgggagccatccacacag

SEQ ID NO: 8751 - DNA, 1420 bp, unidentified
  source 1..1420: mol_type = unassigned DNA; note = element_dbaf7b6
  misc_feature 1: note = core
  misc_feature 2..132: note = LE
  misc_feature 133..1155: note = CDS
  misc_feature 1156..1420: note = RE
  misc_feature 1184..1416: note = bridgeRNA
atggtatggacgccaccctcccgatgccagggcgcagagagccatcaaagtggagacggatcctcgctgcaacggcatcggagtgccaaagtggaagtgtcgcaactcaccacatgagcaggaggatccgaaatgaaatatagcgtaatcggcatggatatcgccaaacgggtattccaattgcacaccgtccatcccgaaacggcggaggttgagcgcatcaagctgcaacgcgacgacgtgctgccctattttgtccggcgggcaccgagcctggtcgcgatggaggcgtgtggcagcgcgcactggtgggcgcgtaagcttgccgcgctggggcatgaggttcgcctgcttcaccccaagagcgtgcgtcccttcgtgttgcgcaacaagactgacgttgccgatgcgcgagccatctggaccgccgcacaacaaccggatgcccgctttgttgccgtcaagaccgaggcccaacaggcgatcctggccctgcatcgattgcgcgcccaactgctgaagtttcggatcatgcagaccaatgccctgcgcggcttgctgtacgagttcggggaagtgctgccggaaagccatgcggccctggccaaggccttgcctactgccttggccagtctggacacgcatgtgcccgccatgttgctcgacagcctgcgcgaacaatggagccgagtggtgagtgtggacaaggaaatcgccacgattgagcaccgtcttgccatcgttctgcgggattcgcccccctgtcaggcggtcgccgaaataccgggcgtgggtttactgacctcgacggccgccgtagccagtatcggtgatgcccataccttcaagtcaggccgggagttcgctgcctgggtcggactcgttccccggcaacgcggcacaggcggacgcgttcggcaactgggcatttccaaacgaggggatgtctatttgcgcaccctgctcatgcatggcgcacgtgccgtgatcttgcggtatcgacatgtcccctggctcgcggcgctgctcctgcgccggccctacaacgtggttgtggccgccgtggcaaacaaattggcgcgcaccctctgggccgtcctcgccaaaggcaaaccgtataacccggacgcgttcagcgccgtggcctcaacatgaggcctcgccagcaagcgcgggtttgaaaccgtttctcaaggagcgcaagcgattcatgcgtgatggcagacaggtcggaccgggacggaaacagcctgatagggaatgcgaactccgagttcgaaaatcagataaggcctccgtcagcggattccatcagggccagcaggcttactgcctgcaacaacaggccggatataagactgcatccttacctcaatgccaccagctaaaaatcacttgatctccgggtggcgtccatata

SEQ ID NO: 8752 - DNA, 1617 bp, unidentified
  source 1..1617: mol_type = unassigned DNA; note = element_dbb2771
  misc_feature 1..3: note = core
  misc_feature 4..268: note = LE
  misc_feature 269..1483: note = CDS
  misc_feature 1484..1617: note = RE
  misc_feature 13..288: note = bridgeRNA
tttgctacaatataattacggtcagggcacggcagccagccgtgtccttctccgtcttgttgcccaagctacaataagaggagtaattggcctgacgactggctctctggacatttgacgtccgattattaaacagtcagccatcctcttattgcggcgttcggttttggcaggttgagcctcgcgttcgtgtcactcagcaaattgaatcggcaatgagaaaaagatggtcgccaattgcgcaaattcaattttgggaggtatgcaaatgaacgcggtaggaattgatgtttccaaaggaaaaagcacggtggcaatcatacgcccgctcggcgagatagtggcttcaccctttgaagtcatccacaccgacagcgaactcagcaagctggcaaactcgcttaaaaacctaaacggtgagacgaaagtaataatggagtacacgggcagctactatcagcccatcgcctacgctctccatgaggcggggctgtacgtcagcacagtccacgccaagctgattcatgactttggcaacaacaccattcgcagggtcaagaccgacaaagctgacgccatcaaaatcgccaactatggtctatccaactggctggagctgccggaatacatacccgaagaggacgttcggcgaatgttaaaagcctacagtcgtcaatacgccaagtacaccaagctgaaaaccatgcttaaaaacaacttcatcgcattgacggatcaaacctttcccggagtaaatgagttgttctcatccaaggcgcgtgagagtgacggacatgaaaagtggatggacttcgccgccaagttttggcattgcgagtgcgtctgcggcctcacgcccaaagccttcgcggaacgttaccgcaagtggtgcaaacgggcgggctactatttcagccaggacaaagccgaagacatttacgtatctgcctgcggccattggtctgtcatgcccaagaacgaaatcaccaagctgctgatcactcaggccgtcgcccagttgaacgccatttccgaaacgctcgcgacggttttacgcgagatgaagcgacttgcggggatgctgccggaatatccagtcgtgtcggagctttatggcgccgggaatattcttggcccccagctcatggctgaaatcggcgacattacccgtttcacccacaaaggggctttagtctgttttgccggcctcgaacccccggagtaccaatccggcaagtttgagtccacaaacagaagtatatctaaaaccggctccccgcatttgcgcaggatactctttcaggtgatggactgttacctcaaacagtcgcccgccgacgagccagtgtatcaattccttgaccgcaaacgctccgagggcaaacattattactcctacatgacggcgggttcagctaaattcctgcgcatctactatgcccgtgttatggaatacctgaataagctggaccccgaagcataaccgtatattattccgaatctcccaaccggcggtgcgaaaatttttattcgttccgctctgctttgttatgctctttttccaccgctctttgctaaaatgttctttcattttagggcttgacttctattggcagg

SEQ ID NO: 8753 - DNA, 1356 bp, unidentified
  source 1..1356: mol_type = unassigned DNA; note = element_dbb55f3
  misc_feature 1..2: note = core
  misc_feature 3..68: note = LE
  misc_feature 69..1091: note = CDS
  misc_feature 1092..1356: note = RE
  misc_feature 1120..1342: note = bridgeRNA
tgatgacgtggacggctctccaccccttccgcaggatgatctgcggatgagccggaaggagagccacgatggggactgttacgacgatcggtttggatatcgccaagagcgtgttccaggttcacggtgttgatgcggcaggaggcgtcgtgcttcgccagcggctgacgcgaagccggatgctaaagttcttcgcgcagttgccgtcgtgtctgatcggtatcgaggcgtgcgcgtcgtcgcattattgggcgcgcgaactcgtcgcgctggggcacgatgtgaagctgatgccggcgcaatatgtgaagccgtacgtcaagcgcagcaagaacgacgcggcggatgccgaggcgatctgtgaagcggtgacgcgtccgacgatgcggttcgtcgggatcaagtcgcccgagcagcaaagcgcgatgatgctccaccgggtgcggctgatactgagccgccagcgaacgcagctgtcgaacgcgctacgggcgcacctagccgagttcgggatcgtggcgccgatcggcaggaacgggatcgaccagttgcttctcgtcatcgcggacacgagcgatgatcgcgttccagccgatgcgcggatgtgccttgagatgctggttgctcagctatgcatcgtcaaagagcaaatcctcgagaacgatcgccggatcatggcgagcgcgcgcgagaccgaactcggccggcgactgatggagataccaggcgtgggcccgctcgtcgccagtgcgatcgtcgcaaccgtgcctgatcctaaggtcttccgatcggggcgtgacctgtccgcatggatcggtctggtcccgcgtcaaaactccagcggcggcaaggagcggctcggcagcatctccaaggctgggcacggctatctgcgccagatgctgatcgtcggcgcgatggcggtcgtgcgctatgccgagcgcaacggaacgaagcgtccctggctggtgcaactgctcgcgcgtcgaaaggccaaggtcgcagccgtcgcgctcgccaacaagaccgcgcgcacgatctgggcgatgatggccagcggtgaacgctaccgcgaaccgctggtcgcttaagcaacacggcgcgggcaaccgcgctgcacgacgttggaaagggcggacatgagctgatgcacaaagccggttgaaaccgccggatcggtagagcccacttcgacccaagcacatcaagtgcgagctagtgatcgggacccgaaacgcgcgaatggcatcaagaccagcggcactgcatgccgcatcaacaggtcggacacatggccgcaccaaccagctacgcgatgctcaatacgctacttgccaacggagggccgtccacaca

SEQ ID NO: 8754 - DNA, 1499 bp, unidentified
  source 1..1499: mol_type = unassigned DNA; note = element_dbb980d
  misc_feature 1..2: note = core
  misc_feature 3..243: note = LE
  misc_feature 244..1479: note = CDS
  misc_feature 1480..1499: note = RE
  misc_feature 15..239: note = bridgeRNA
ctaataagagttgtcgggtccgccatccggcagacttggccgaaggtggccgccggcaggtgagcactgttgcttcctgggctttgagccctgacgaaagatcgtgcccctgccggtgaccgggagagttgatcgctgctgggatgtcgtgcccgccgggtggcgtgagcactgttttattaggtcgatgatggttctcccgcaggccgctgacataattcggcatcttggacgggagaggcgatgcggcttttcgtgggtgatgactgggcggaggaccatcacgacgtcgaggtgatggacgcggccgggaaggtgctggcgaagaagcggctgcccgagggcgtagcggggatgacgcagttgcacgagctgatcggccggcttgtacccgaggacgctgaggatgcggaggtggtgatcgggatcgggaccgaccgcggcccgtgggtcgccgcgctggtcgcggccgggtatgtggtgttcccggtgaacccgctgcaggcatcccggtaccgggagcggcacggggtgtccggcgccaagagcgatcggggtgactcgcacatgctggcggacatggtgcgcaccgattcccaccagctgcgtcccgcggccggggacagcccggaggcggaggggatcaaggtggtggctcgcacgcacaagacgctgatctgggaccgcacccgcgcggtgcagcggctgcggcaccagctgcgcgagtacttcccggcggcgctggaggcgttcgaggacctggacgcccgcgacaccctggagctgctgggcaaggcgccggacccggcccgggcgcggaggctgacccgcgcgcaggtcgccgcgacgctcaagcgcgcccgccgccgggacatcgcgggcaagaccgacgcgatcctggccgcgctgcgcggcgagcacctcggccagccggccgcgctgaccgccgcctacgccgccactgcccggtccctgatcgcggtgatcaccaccttgaacgagcaggttaaggccctggaagagcaggtgagggaccattttggccggcacccggacgctgagatctaccggtcccagcccggcatgggcgcgatcctcggtgcccgggtgctcggcgaattcggcgatgacctgcaccggtacgccgacggcaaagcccgcaagaactacgccgccaccagcccgatcacccgcgcatcggggaagaagaaagtggtcaccgcccggttcatccacaacgaccggctcatcgacgcgctcatgacccaggccttctcgtcgctgaatgcatcgcccggcgcccgcgccttctacgacgagctccgcgccaagggaaccgaacataacgacgccctccggcggctggcaaaccggctcgtcggcatcctgcacggatgcctgaagacccgcaccctctacgacgaggccaccgcctgggggcaccgggaaaacctccctcaatcttccgtagcggcttgacatctaagctcctgggatgt

SEQ ID NO: 8755 - DNA, 1610 bp, unidentified
  source 1..1610: mol_type = unassigned DNA; note = element_dbc6093
  misc_feature 1..2: note = core
  misc_feature 3..276: note = LE
  misc_feature 277..1491: note = CDS
  misc_feature 1492..1610: note = RE
  misc_feature 13..296: note = bridgeRNA
ctgttacaatataattgacgggtaaaaccttgcaagccagtaagggtttacacgtacttgttacttaagctatactgaaagcagtaattggattgacgttcaatactttgggactaagcgcccgccgaaaagactgtcatccatgctttcattatagcgttcggtttatgcaggttggaccacagtacgtgcgttcgtgtcaccaaacagattgaataggtaataagtaaagtgtggtttgcccaattacaattcaattcaggagatgcttttattatgaacgcagtaggtattgatgtttccaaaggtaagagtacagttgctgtactacgccccttcggagaagttgtagcttcgccttttgatgttgctcacaccggaagcgaattaaagtcattagctgactttttaaagaaacttcgcggtgagactaaggttgtcatggaggcaacaggaaactattatgaacccattgcccgctacctccacgaacaaaatatatttgtttccgtagtcaatcctgtgcttatcagtgacttcggtggaaacactttgagaaagcctaaaactgataagaaggactcattgaaaattgcctcctatgcgttaagctattggggtgacctgaaggaatatgttccacaggaagacttaagaaaatcattgaaactactgaacagacagtatctgcaggcttctaagttgaaaacaatgatgaataataatctgatatcattacttgacctgacttttccaggcatcaacaagttgttcacatctcctccaagagaatcagatggtcatgaaaagtggaacgactttgtattaacctttcctcactgtgatatgatatcaaagctcactatcaaggctttttcaaagaagtacaagaagtggtgtaccggtaattcttattacttcacagaagcatcgtgcgagaaaatatataaattctcaaaagaatgtatcagcagcgtttcttcaacagaatcaactgtgtttgctgttatacaagccgctcggatgctcaattcagccaccgagaattgtaatgctatccagcttgaaatgaaccgtgtagcagctcagctacccgaatacgagactgttatgtccatgtatggtgttggaaaagccatgggacctcagttgatagctgagattggagatccaagacgcttccatagcagaaaagcaatcacagcttacttcggttatgatagcgagaataatgattccggtcagaaaatatcaaaatcgaatacaatgacaaagaaaggtgcaggtgctctgcgaagaaccttattcatcatcatacagatattgttgaaaacaaagcctgtcgataatcctgtgtacaatttcctgataaagaaacaatccgaaggcaagcactactattcatacatgaacgcagctgctaacaaattccttcgtatttactatgcgaaagtaaaagaagtcttaactgctgcagatacaccaacgtaagatgcctattcaagaattcattttttcagactgcctcggcagtctttttgtcgtactcatttttgccttgaaaattttttctattttttcagtttaggtattgacttttatttgcaggt

SEQ ID NO: 8756 - DNA, 1431 bp, unidentified
  source 1..1431: mol_type = unassigned DNA; note = element_dbc9d86
  misc_feature 1..2: note = core
  misc_feature 3..120: note = LE
  misc_feature 121..1149: note = CDS
  misc_feature 1150..1431: note = RE
  misc_feature 1185..1385: note = bridgeRNA
agatggggtaatcggccggccagcttgtggatagctgaagatttgaggtgctgcgctcaggctgatggtgaaaacgaggtccgttgcaacggcctcaagcatcagaaggagaagcgcatcatggagcattttgctggactagacgtttcagtcaaggagacgagcgtctgcattgtggatgatacgggcaggatcgtgcgggaagtgaaggtgacgagcgaacccgaggcgttgctggcggtgctaacgaaccccgcctatcacttcaagcggattggattggaagccgggccgctgtcgcaatggctcttcagcgctctcgaagcaagcttgccggtgatctgtgttgagacgcggcacatgagggcggtgttgaaggcgcagatcaacaagacggaccgcaatgacgcgcgcggtatcgcgcagatgatgcgggcggggctttatcgcccggtgcatgtgaagacgttacgcagccagaagctgcgaacgctgctgatgcatcgtaagctgcttcagtcgaagaccatcgccatcgagaacgacctgcgcgccagtttacgcaacttcggtctcaaggtgggcatggtgggaacggtgaagttcgaggcgcgcatccaggagcttgttgcgaaccttcccgacctggttgtgctggtcgagccgctgctcattgtccggcgggtgcttcgcgagcagatcggtatcctgcaccgtcgcttgctgaccatcgtccgggacgatgatgtgtgccggcgcctaatgtcgatccccggtgtcggccccgtggtcgcgttgacctatcgcgtcaccgtcgatgtgtccgcccgtttcaggaactccaaggcggtcggggcggtgtttggactgacgccgtccaagcatcaatcgggcgagatcaaccgaaccggcgcgatatcacgatgcggagacgagatgatgcggatgatgctctacgaagcagcccaggtcatgctgctccgttcggtaaaatggtcctggctcaaggcctgggcgatgaagatcgccaagcaccgcgggatgaaaaaggcgatcgtagcgctggcgcgtcggttggccatgatcatgcaccgtatatgggttgacggcaccgagttccggtggacccgggaagtcgcagcggtatgagagccgtgcaggatcaaatgcaccaggagaaaacttgagttccaccgagcggtggagtgatgtccctctcgggacgatggatgagctgagttcgtcgacctgcttggacctgtcgttcgtctgacggcaaggccgccatagagattgttcccctcgtcctcgaatcccatgttgaaagggccttggtgccgattccgaagagaagcacgagcccgtaagcgacatcgacgctgtcgtggtggatagtttgaaagcgcttgaccttgaacggccgattagaga

SEQ ID NO: 8757 - DNA, 1356 bp, unidentified
  source 1..1356: mol_type = unassigned DNA; note = element_dbcf0b3
  misc_feature 1: note = core
  misc_feature 2..71: note = LE
  misc_feature 72..1097: note = CDS
  misc_feature 1098..1356: note = RE
  misc_feature 1124..1353: note = bridgeRNA
taatgggatggtccaccccgccccaccggataggttaggctggcagtgttcataccgaactggagacgatcatggacgacgtaacgctcgttggtatcgatctgggcaaacatagctttcaccttcatgggcaggacgctagaggcaacgctgtgttccgtaaaaagatgagccgaaaacaactcgtcgaattcttcgcaacattccatgcctgtactgtcgttatggaggcctgcgccggctcgcatcatatggcccgcaagctggccgaattcgggcacacggtgcgcctgatctcgccgcagttcgtcaggccattcgtcaaatcaaacaagaatgatttcgtcgacgccgaagcgatctgcgaagcagcgtcgcgcccggcgatgagattcgtatccccgaggacagaatcgcaacagacgctttcagtgctgcatcgtgtgcgtgaatcgatggtgcgcgagcgcaccagaaccgtcaaccagatgcatggctttctcctcgagtttggcatcagtctgccaattggaaagactgccgtcacacgtctggcggccgtacttgccacgaatgaactaccgccccggctagttgcgattctcgaacgcctccaccagcacttcaagtaccttgaggaacagatcggtgagattgaccaggagctcgcacgtcagctcgctgaggacgaggtcggacagcgcctgatgagcatcccgggagtcggtccggtcactgcaagcgcgttggccgcgaaaatgggcgacgcaaagcagtacggatgcagtcgtgattttgcggcatcggttgggctcgttccccggcaatacagtacgggcggcaagaccaatcttctcgggatcagccggcgcggcgacaaaaatgtcaggcgcctgctcgtcctgtgcgcccgagcctacatgcgaggcctggagaaacgaaccggtcgcctggcagactgggttcgcgcaatgctcgcccagcggcattcaaacgtggtggcgtgtgcgctggccaacaagctagcccgaaccgcctgggccattgttgcgcgccaaaccacattcgacgccggcttcacaagccacccactctgaacgagcacagctttatcattatttaccaatcatccaactggttttgcgacgactgaaaattgatgacgtgaacggcacaccggcccgacgaaaaacctgagtgccaaagaggcttttcgaagccgatccactgttaaggatcgtcaggcgcgaatctcatcgtggcgcggggaacaatccccacaacgacgccgaatagatttaagcaagccaactcgccatcgaagatcagggttgcaaaaatggggtggaccataga

SEQ ID NO: 8758 - DNA, 1536 bp, unidentified
  source 1..1536: mol_type = unassigned DNA; note = element_dbcf746
  misc_feature 1..2: note = core
  misc_feature 3..241: note = LE
  misc_feature 242..1417: note = CDS
  misc_feature 1418..1536: note = RE
  misc_feature 3..220: note = bridgeRNA
cttgtattatagagtagtagtttttaatgcccctctccaagggcatgtgctacactgtaagggatgctgtggattggtattttgctcctaccgcatgacggttcttgaaagactccaaccacagccctttacaggattgttaatcagtcagataccgctccgacggtttatgtgaaacaaggttacaagtgtaaagtgtcctgtggaaccagtatcaaataaacatttcggaggtatcatcatgatttgtgtgggtattgatattgccaaggacaagcacgactgctttatcctcagctcggaaagtgaagtcctggcagatgtcttcaccatccccaacaacgcagagggatttgatgccctgctgcaaaccattcgtcgctgtactcgtccggcagacaaaataaaagtaggacttgaggctaccggacattacagctacaacattctcgggtttcttcttgattgcagcctgccaacctatgtcataaaccctttgcacaccaatctctaccggaaaagtatgaccctgcgaaagaccaagactgaccgtgtcgatgcacgaaccattgcgactatgctaatgtctgatgtgaacctcaagtcctacacagacgcatcatatcacaacgaagaattaaagtcactaaccagatacagatttgacaaagctcgggaacgagcaaagctgaaatgctccgtttcccggctagtctatattttgtttccagcgctggaaaagttggttccaacactccatatgacatctgtttgcgcacttctcagcaattttccgggtgcaaagcagattgcgtccgtccacctgacacggctgacaaatcttctgcacgaggcatccaaaggccgctatggtcgcgacaaagccattgagattcggaacgcctccagaaattccattggttccaccatgcccgccaagtctctggagcttaagcataccattcgactcattggggaattggatgtggagattgatgaaatcgagaatgaaatcaattccataatagacgaagcccattctcctattacaacaatcccgggtatcggcaactgcatgggagccatgattctggcagaagttggtgacttctcaaacttcgcttccccagataagattctggcctatgcaggtctttcaccctcaacctaccagtcgggacagctttcaaattgctattcccacatggagaaacggggctctcgatacctgcgctatgctattttcaacgctacaaaatatgtctaccattgggatccgtccttcgttgcctatcttgctaagaagagggctgaaggcaaacactataacgttgccatatctcacgccgccaaaaagcttgttcggctgatctacgccatggagaagacccggcagccatacagacccgcagcataaccatttccggaatcttttctcagagcgccgtcaccgacgttctacttgccataccgtttttgcagtagcgactttttctacattgtcctcagattggggcttgacttttaatagttagt

SEQ ID NO: 8759 - DNA, 1407 bp, unidentified
  source 1..1407: mol_type = unassigned DNA; note = element_dbd7bdc
  misc_feature 1..2: note = core
  misc_feature 3..113: note = LE
  misc_feature 114..1154: note = CDS
  misc_feature 1155..1407: note = RE
  misc_feature 1171..1402: note = bridgeRNA
agatgccgtaatgggcctgcaccggggctgctttccgggtcggctttcttccagagtgatggcgtgacgcgcgggctcgagtggttcgggtccggccatcaggagatacggcgatggagcaccatgttgggattgacgtgtcgctgcagctgagcagcctgtgcgtgctgaatgctgacggcaaggtcgtgcgcgaggccaaggtcgcgagcgagccagaggcgctggtcggttttctgcgcggcctcgggctgccgatcgcccgtgtcggcctggaggccgggccgttgtcgcagtggctctacgacggtctgcgcgaggcagggtttgaggcggtgttgctggaaacacgccatgtgaaggcggcgctatcggcgatggccgtcaagaccgaccggcgggacgcccgcggcatcgcgcagctgctgcgcatggggtggtatcgacccgtgcaccgcaagtcggtgccctcgcaggaagtccgggcgttgctggctgctcgcaagcagctgcagaccaaggctatggacctggagcaaaccctgcgcggtctgttgcgcgggtttgggctgaaggttggcgacgtgagccgcggcaagctgccggcgcgtgttcgcgagctggcagccggacacgccatgctggagcggatcgtcgagccgatgttggtcgcgtgccaagcgatctggtgcgagttcaacaagctgcaccgcgaggtcctggcggtcgtcaaagccgacgaggtttgccgccggctgatgtcggtgcctggggtcggcgccgtggtgtcgctgacatatcgggcggcggtggacgacccgggacggttcaagaaatccaagtcggtcggcgccttctttggattcacgcccaggcggtatcagtcgggcgagacggacgtcactggcgggatcaccaaagtcggcgatgccgcggtgcgcacggccctgcatgatgcggccaacgtgctgctgtcgcgggtgacgaagttcagcgcgttgaagcgctgggccatggacgtcgccaagcgccggggcatgcggcgggcaaaggtggcgctggcgcgtaagctggccaccgtgctgcaccggatctgggtggacgggacggagttcgtctggggcaaggacccggccgcagcggccgccgcataacgccaaggaggcacacggttcggagcagggccaacgcggctcagctcccacgaagtcccgtctccgggacgcggagatggtgaggcaggttcggttgcagtggccaggagcgatcccgagactacgtccggtagattgctccgccactccctcttacagcatggagtggcggtctcgcgccgaccacggacagaagcacgaaaccggcgattggatgcactttggagcttgacgaccaagggcccattacaga

SEQ ID NO: 8760 - DNA, 1453 bp, unidentified
  source 1..1453: mol_type = unassigned DNA; note = element_dbddacf
  misc_feature 1..2: note = core
  misc_feature 3..85: note = LE
  misc_feature 86..1141: note = CDS
  misc_feature 1142..1453: note = RE
  misc_feature 1174..1438: note = bridgeRNA
tgatgaggtggacggcccctacccaagggcagcacaatgctgtagggggtatctagtattcaccactagaaggagggagccatccatggagagcatcagcatcatcggacttgacctggcgaaacgagtgttccaagtacacgggatcaatgcccagcaggaagtcgtggtgcaaaaacggctgcggcgcaatgaagtggtagcctggttcgcgaccatcgcgccatgcctagtgggcgtcgaagcgtgtgcgacggctcattactgggggagagaattgagcaaacttgggcatcaggtgaaactgatccctcccgcctatgtgaagccctacgtcagacggcagaagaatgaccgtgctgatgccgcggctatctgtgaggcggtgagtcgtcccaccatgcgcgtggtcgccgtcaagaccgtggatcaacaggccgtgcaggtgctgcaccggtcacgagaactgctgatccgacagcggacgcaggtcgggaatgcgctgcgagctcacctcgccgagtttgggttggtgtttccacaggggaatggagggttggcgctggcgattcgggcgatacacgagaggtcggatggaacgattcccacgttggcctacgacacgctgcgagcgctggttgagcagatcgacgcgttgaagaaagcggtcaccgggttagagcaccagatgctggcctggcatcgcactaccgcggacagtcaacggttggccaccattccagggatcggggtggtgaccgcgtctgccgtcctggcggcaatcggcactggaaagcaatttcggtcaggccgggagtttgccgcatggatcgggttggtcccacgccagcattccagtggaggcaaagaccggctggggcatatttccaagcaaggcaatcactatttgcggcagctgctcgttctaggagccacggcgcaactccacggtcagcgacgggaacgagcaccgggcggcgcgtggttcgatgcgctgttgaggcgcaagccaggacgagtggcgaccgtggcgctggccaacaagatggcgcgtgtggcctgggccgtgttgaccaagggtgggagctatcgaccgttgggagaaacgatgcctgaaggtgatggaatggtggcagcctgaggtcacgggcataaaaacggcgtgtcgcggagtggaactcgccgcacgacggacagcagaagtgtcaacggagatgatgacgaagacaaccggagtgttaccgcatatcggataaaaccgtcctgtgccaggcgaccatgatcgcggcgtactgattggtgttcgataggcggatctcatcagggccagttgccaccctgcggcactgctgcagatggtcaggcgacatcaacaggccggacacatgactgcaacacctgcgttgatctttccgtcccatttcctcttgacacatcgggggccgtccacaca

SEQ ID NO: 8761 - DNA, 1398 bp, unidentified
  source 1..1398: mol_type = unassigned DNA; note = element_dbe8f28
  misc_feature 1..2: note = core
  misc_feature 3..79: note = LE
  misc_feature 80..1126: note = CDS
  misc_feature 1127..1398: note = RE
  misc_feature 1124..1385: note = bridgeRNA
tgttggtgtggacggctccctacggcatcaagtgtgccagaatgagttcgttggagtactcaatcgagggaagccgcccgtgaaacagattattcgtattggaatagatacgtcaaaacgcgtttttcaattacatggcgtgaacgcaagcgaagagacggttcttcgcaagaagctttcgcgaaaggaaatggtgagattcttcgagaacgcgccgccaaccactattgcgcttgaagcttgcggcggttcccatcactgggcgaggctgttgggctcatttggccacgaggtgaagctgatcgcgccgcaactcgccaagccctatgtcaagcgcggcaagaacgatgcggcagatgcggaggcactgtgcgaggctatgagccggccgacaatgcgcttcgtgccggttaagaccgcggaccagcaggcagcacttatgctgcttggtgtacgcgagagattgatccgaaatcgcacgcagctttccaatatcatccgcggttatgcgatggaattcggtgtaatagcggccaagggtatatgcaggattgaacccctactggagcgtattgcagccgatgtatctctgccggagttggcgcgtgagctgttcgccatgcacggtcgggagtatcgagagctacttgcgaagatcaagctgattgaggagaagctcatggcttggcatcgttctgacgagtgcagccgccgtctagccgagatccctggcgtcggtccaatcagcgcttcgctgctgatgatgaagaccccagatccgaagatgtttaaatcgggccgtgattttgccgcctggatgggcctgacgccgaaagatcattcgactgcgggcaaggtccggctaggcgtaatcacccgtgccggcgatgagatgttgcgcagcgtgctagtggccggggcgacggctcttcttcagcatatccgacgagggcgcagcaagtacgcttctcgatggattgtcgaattgcttcaacgcaagaaaccgaagctggtcgccgtggcaattgccaacaagatcgcaaggatcgcgtggaagcttatggtgagtggagagagttatcgtgggcaaaaaggagatcccgttgtcgcaatgccgacaagataaagcccggccgccaggtgagcatacgctcgatgccaccgagttgggttgacgcgtgaaggaggcaaatggtctgatcggtcggtccgagtcgcgaaagattccgttagttccagtggcctttgtcaggtcggtgttctgtttggaaatcgcgctgcggaaaccatcttggccagtggtcctgtgcggccacacagacaggccgcacatatggaggcaagtgatccgatcaaacaaatctgccaaaacacttgcaagcgggagccgtccacata

SEQ ID NO: 8762 - DNA, 1416 bp, unidentified
  source 1..1416: mol_type = unassigned DNA; note = element_dbea7d4
  misc_feature 1: note = core
  misc_feature 2..89: note = LE
  misc_feature 90..1130: note = CDS
  misc_feature 1131..1416: note = RE
  misc_feature 1170..1406: note = bridgeRNA
taatgatatggacgcccccccacccttacggcatcagatgtgccaaagtggaagatgttaaacaccactgaacaggagaggaggcatccatgaacaagattacagtagtggggttagatttggcaaagaacgtatttcaagtgcacggtgccgatgcgcgcggccaagcggtggtgcgtaagccgctcaagcgcaaagacgtgctggcgtttttcgcgaagctgccgccgtgcctgatcggaatggaagcctgcggcggcgcgcatcattgggcgcgccgttttcaggcgcaggggcacacggtcaagctgatggcgccgcagtacgtgaagccgtttgtacagcggcacaagaccgacgcgcgggacgcgcaggcgatctgcgaagcggcgaaccgtgcctcgatccctacggtggcggtcaagaccacggaacaacaggcggtgctggcgctgcaccgggtgcggcaaagcctgatgaaagcgcgcgtcgcacagatcaaccagatacgcggcttgctaacggagtttggcatcgtactgccggtgggcgtgcgtaaacttaaggccgaattgccgggcgtgctggaagacggcgagaacgctctgcccgacatgctgcgcgccttattgcagagcctgcgtgagcacctgcacgtgttggaacagcacatcgcccagatcgaacaacgcctcacccactggcatcgcagcaacgacgccagtcgccggttggaagcattaccaggcgttggcatgctgaccgccacagcactggtggccgaagtcggcgacgccaaacacttcgcgcgcggccgccagttcgccgcctgggtgggactcaccccacgcgagcacagcagcggcgggcaatcgatacggcttggcatcagcaaacgcggcaaccgctatctgcgcaccctgctgattcacggcgcacgcgccgtactcaaagcgcggatgaacaagcccgaacacgtgcaggactgggcggtacgcgtgagcgatcggcgcggccacaacgtggcggcggtggcgcaggccaacaagacggcgcgccgggcgtgggcactgttgaccaaaggggaggagtttaatccggagtacgtgcgtgaacgcgcggcggcgtaatccgaacaaggtaagcgcgcaacactagaggagcacgtcaacgattgcgaaggcgattgtaaagtgatggcaacgacaggtcagaccgggatcggcacagctcgtttagcccaatgcacccacagtgcgataggttgcttgagcgccgatccgccgatcagcgaaactcatcatgggcccgcggcaatacgatgccgcactaacaggccggatgtatggctgcaatcgactactgttcgacgccaacacgaaacagtcaccttgcaaacgggggggtgtccatgta

SEQ ID NO: 8763 - DNA, 1350 bp, unidentified
  source 1..1350: mol_type = unassigned DNA; note = element_dbea998
  misc_feature 1..3: note = core
  misc_feature 4..84: note = LE
  misc_feature 85..1104: note = CDS
  misc_feature 1105..1350: note = RE
  misc_feature 1122..1337: note = bridgeRNA
ggatggtgtggatggttcctgcaccatcggcgtcggaacacgccatactgcagttgtcgtaaactgtttgaaaggagccaccccatgcaagttacaacaattggccttgatttggctaagaacattttccaagtccacggtgtcgctgaaaatggagatgttgcattcaaccgtgctttaagaagatcgcaaatgttgccgttctttgcacgtttagatccctgtcttgttggtattgaagcttgtggaaccagtcatcactgggcgcgcgaactgatcaagctgggtcataacgtcaagctgattccaccggtttacgtaaagccttatgtcaaacgcggcaaatcagatgctgttgatgctgccgccatctgcgaagctgtcactcgcccaacaatgcggtttgttgaagtgaagacacctgaacaacaggcaatactcgcggtccataggacccgtgatcttattgtccggcagcggacacaaacgatcaacatgctgcgggcgcaattggccgagtttggcgttatccttccccagggcgttggtcatgctattcaatttgcgaaggattatcttgacggagaacaaccagacctgcctgaagttgcgggcaatgtgatcgtcgagcttggtgaccagttgctgtttttacatggaaagattcaacgttgttcccgcgagatgatccagattgccaagtgtgagaaacgcgttgcactgcttcaaaccattccgggtgttgggccgattacggcctcagcaattgtagcaacggttggaagcggcaagcagttcaacaatggccgagagtttgctgcatggttaggactgacgccaatcaacaaatcaagcggtggaaaagaacgcctgggccgcatctcaaagatgggagaccagtacattcgccgcttaatttatttaggcatggtgtctcgcgtacggcagattgccaagacaccagaagcctttgatccatggtttgcagacatactcgcacgaaagccaaccaagttggcagcggtggctatggccaacaaaacagcgcgaataatctgggctgttttaacccgaaacgaaccttacaaagtaagagctatctaacaccagcgaccaagaacaagagattgcaagaccaatgaagtgatggaaaattgtcagccctaaaaccaagataccccgtgttttgtcctgaacgcttgctgttcgcactgcggaatggggcttggttcgtggaaaccatcagggccagcggtcatatgtgccgcgctaacaggccggacacaagactgcatctgacaatgtatcaatcaccaaaaaagggcttgcaaagcaggagccatccacaca

SEQ ID NO: 8764 - DNA, 1472 bp, unidentified
  source 1..1472: mol_type = unassigned DNA; note = element_dbeebb8
  misc_feature 1..4: note = core
  misc_feature 5..238: note = LE
  misc_feature 239..1456: note = CDS
  misc_feature 1457..1472: note = RE
gtcactggtgcacccttctcttgacggaggctggcatggtcttcgtcgtacgggatcggtgagggctggggtgacggcctgcggcggtcgctcctggagggcccgcatgacaccgccgcccccagctccccgagggcttgtgaccggcaacagagggacgcgccgccgagcgccagtcagtgaccgcccgggttgagctctcctcaccgacatgtcgctgccaccctgaggaggggacatgttctgcgggatcgactgggcgtccgagcgccatgccgtatgcgtgctcgacgacgccggccaccaggccaccgcctttgagatcgcccacaccgccgaggggttcgaccagctcctggcccgcctgcgccgctaccgcgacccggccacgctgccggtcgccatcgagcgacccgacggccggttggtcgatcggctgctggaagccggccacccggtcgtggcggtgcagcccaacgccatcaaggcctggcgggacgccgaggtgctgtcgggcgccaagaacgaccccggcgatgcggccctcatcgccgactacctgcgcctgcgccagcaccgactgcgcgtcctgcagccgttctcggccgagacccgggcgctgcgggcggtggtccgcacccgcgacgacctggtcgaccaacgcaccaccgccagcaaccagctcggcgcctgcctggacgccttctggcccggcgccaagggcgtgttcgccgacctggccagcccgatcaccctcgacttcctggcccgctacccgaccccggagtcggccgccagcctgagcgaacgccgcatggccgcgttcttgaccaagcacggctactgcggccgacgacccgccgccgagctgctggcccgcctgcgcgccgccccgcccgggctgtgcggcaccgtggaggtcgaggcccgccgtgacgcggtcctggccatggtcagggtgctgcgggcgctggtggccgcgatcaaggacctcgaccgcgcggtcgtcgcccacctgggtgagcacccggacgccgagatcttcacgtcgctgccacgctcgggtcggatcaacgccgcccaggtgctcgccgagtggggcgactgccgaccagcctacgtggacgccgaggcggtcgcctgcctggccggggcgacaccagtgaccaagcagtccggcaagcacaccgcggtcagcttccgctgggcgtgcaacaagcgcttccgccaagcgatctgcaccttcgccgacaactcccgccatggctcgccgtgggcggccaaggtctacgccgaggcgctcgcccgcggacacgaccacccccacgccatccgcgtcctggcccgggcgtggatccgggtgatctggcgctgctggatcgaccaggtcccctacgacccggccaagcacggcgccgcccacaagctgaccgaaatggccacttctgcggcgtgaggttgacacagagggt

SEQ ID NO: 8765 - DNA, 1183 bp, unidentified
  source 1..1183: mol_type = unassigned DNA; note = element_dbf8011
  misc_feature 1..2: note = core
  misc_feature 3..205: note = LE
  misc_feature 206..1168: note = CDS
  misc_feature 1169..1183: note = RE
  misc_feature 6..210: note = bridgeRNA
cttgtatctttaaaccagaccagcgcggtagagtctgaacgccgttgaggcggccagaccggcccgtgcagtttggtaggcgctggggtgatagagcccgtgactgagtacagaacgcatggccgccgcgctggtcttcgtgaagcccgaacggttacgcgcgccttgattgagcgcgcatgcacaagcaagggatctgaagatcatgtctgttacctctgtgacggtgggcatcgacgtggccaaggcgcacgtggatgtctgtgtgctgggtgccaagagcagcgcccagcggtttgacaacgatgccgaaggccactcggcgctggcggctgccctgcagcccctggacgtgggtctggtggtgatggaggccaccggcggctacgaggccgcgttagcgtgtgccctgcaggccacaggcctgcccgtggcggtcatcaacccgcgccaggcgcgcgacttcgccaaatccatgggacgcctggccaagaccgacgcggtggatgcgcgcacgctggccgagctggcagcggtgctgctgcgccgcgacgatctgcagcgcttcttgcgccccctggccgatgagcgccagcagtggctcgcggccctggtcacgcgcaggcgccagttgctgaccatgctccattcggagcgccaacggctgcagatcacgcccaagaagctgcacgccagcatcgaggccatcgaggcggcgatcaaggcgcagctcgatgagatcgaagagcagatggtcacgcatgtgcgcgagcactttggggagctcgacacgctgctgcagtcggctgcgggagtcggcccggtggccagtgccacgatgattgccgagctgccagagctgggccggctgaaccggcgcgagatcgctgcattggtgggcgtggcgcccatggccaatgactccggcggcagcaagggcaggcggcgcgtacaaggcgggcgcttcgagatccgccgcgtgctgtacatggcaacgctcacggccacccgctacaacccggccatcaaggccttctacgagcgtctgaaggccgctggcaagttgcccaaggtcgccctggtcgcttgcatgcgcaagttgctcaccacgctcaacgccatggtgcgcactggaaaaccttgggacaagtcgcttcattgcgcttgacttcgaagacggtta

SEQ ID NO: 8766 - DNA, 1710 bp, unidentified
  source 1..1710: mol_type = unassigned DNA; note = element_dbfa3a5
  misc_feature 1: note = core
  misc_feature 2..356: note = LE
  misc_feature 357..1643: note = CDS
  misc_feature 1644..1710: note = RE
tttaaacatgccgttgcggcatgccctccttgcgtcgttcctgccttcggcacaaacaatgcatctttgtttacgggttactttttatttcattttgtgttaaaatccagttagagatatcagtatactacagagcacgactgagggagtggtgaaagaccatcttatcccgcatttatatatgtgccgtcatcctcttgtaagcacaaacaattgggacttcgagcccgtacacttatcattttagacgttggcacttgatgcctctggaaaccccgtttccatgataagtcttttcgcttggatgacagtcaatgctgatgtctctttttgctctctttgaaaggaggtatcacatggattttgaagtgaaacaccttatctgtgctgggctggatgttcacaaaaaaacggttgttgctgctgtctgcattacggatcctgtcactttggaagcaacttataaagtgaaatccttctccaccaacaattcacagattgcagctatgcgtgactggcttctctcgtataactgtctgcatgtctgcatggaatccaccggtaaatactggatccctgtttttaacatccttgagccgcatatgcacgttatccttactcatcccaagtatgtcaaagccataaagggtaagaaaactgacaaacgtgatgcaaaatggattgccaatctttttcgctttgatatcgttaaagcttcttttattccacctgctgatatcagggctctccgtgagctttccagatatcgtctcaaactttcctatatgcgttccgctgagaaaaaccgctaccagaatagtatgactatttcacgtatccgtattgactgtgtcctcactgatccatttggaaaaaccgcctcatccattatgaattatcttctttcagacgttccttttgacgaaaaggaatgtgcaaaactgattcatggtggcatcaaagtttctaatgaagagatttttgacagcatacgcggttttgagatattatcggaacaacgctttaagatgtcccacgcaaaacagcacatggaacttctcagctcctatatggatgaaattgaaaccgaattattccgcctcagccgcccgtacgatgaagtaatcaaacgtatttcaaggatcgctggttttactgagcgttctgctttgtttgtcatttcagaaatcggtgctgatatgggggtttttgaatcggataaacatctttgttcctgggctggtcttacccctgcgaataatgagagtgccaacaaaaagaaatctacccgttgttcaaaagccggtcaatatctaaagcctttactcatccagtgtgcacttgctgctgtaaaaagcaggaaaaatccttattacgccatcaaatataatcgactggcgaaacggcgtggcaggaaaaaagcaatcattgccatagcccgaatgatgcttacaagcatttatcacatgattcttaataatgaagaatggaaaccagatgattacgaagccatcatccatccatcaaaacctgaaaaagttgcgcttacacttgataacgtaattcagttcctcggagagcagggagctgatccggaaacactaaaactccttcaacagcaatgtgctgttcattctggataaatcttaaaaaccagattttccacacaagggacgtttatggtctattttcggctcattgcttcacact

SEQ ID NO: 8767 - DNA, 1454 bp, unidentified
  source 1..1454: mol_type = unassigned DNA; note = element_dbfacbf
  misc_feature 1..2: note = core
  misc_feature 3..222: note = LE
  misc_feature 223..1434: note = CDS
  misc_feature 1435..1454: note = RE
  misc_feature 9..221: note = bridgeRNA
ctaatagcggcagagccgccaagatggggcggttcgaccgagccctcggtgggtgagcactccgagcctctgagcgtcgaagctctaggtctagacagtgtccccaccgggaggcaaggagagaagacgaccggtgggatgttgtgcctggagcactgctctattaggacgtcgcggctctccttggctcggggttgacgcgcgcccgcaaaggagatgccgatggtctttgttggaatcgattgggcggaggcccaccacgatgtctgcctggtcgacgacgccgggcaggtgctgaccaaacgaagagtggcagaaggactcgaaggcgtcaccaagctccacgccctcatcgccgagcacgctgaggagccgggctcggtcgtggtcggaatcgagactgaccgcggcctgctcgtcggctctttgctggcagccggctaccaggtcttcgccatcaatcctttggccgcgagtcgatatcgagaccgccacgcgacctcgggcgccaagtcagatccgggtgacgctcgagtcctggctgacttagttcggaccgaccgccatcaacatcggacggtggccggagactctgagcttgccgaggcggtcaaggtcctggcccgagctcatcaaagcctggtctggactcgacagcgccaagtcaatcagctgcgcaacgcgctgcgcgagttctacccggcagctttggctgccttcgatgacctcgattccggggacgccatcgcagtcttggaactggcgcccacgccccgccgaggccgcggtctatctcgggccaaaatcacctccgcgctacggcgtggcggccgcgagcgcaacctcgaggcgaaggcgagccagatccagaacttgttgcgactaccgcagctggaagcgccggcgctggttgcccaagcctatggccacagcgtcgctgctagcgtggccgtaatcaagcagctcagccagcaaatcgcagccctcgagcaggagctggccgtgagttttgaaaggcacccggacgccgagatctacctcagtctgcctggactcggtcgtatcctcggcgcccgggctttagccgagttcggtgacgaccggactcgattcgcacatcctaaggcgcgcaagaactacgccggcaccgcacccatcaccaaggcctccggaacccgcaaagtcgtccttgctcgggtgacccgcaaccgacggcttgctgacgcctgttaccagtgggccttcgccgctctcacaaggtccgaaggcgcccggcgccgatatgactcactgcgcgcccgcgggcagactcaccaccaggctctccgtgctctcggcaaccgactggtcggcatcctgcacggctgcctgaccaacaagcagacctatcgcgaggacgtcgcctggcgggcggcagccctgattgccgcttgacatttccagccgtgggatgt

SEQ ID NO: 8768 - DNA, 1192 bp, unidentified
  source 1..1192: mol_type = unassigned DNA; note = element_dc03ed0
  misc_feature 1..2: note = core
  misc_feature 3..220: note = LE
  misc_feature 221..1171: note = CDS
  misc_feature 1172..1192: note = RE
  misc_feature 63..231: note = bridgeRNA
cttatatctttcagatcattcaaacttcagtggtcaaggcgtggttgccagccttgattgctgaactggttgactcaccaccgtgcagcctgtgcctcctgcgagcccgagctcgaatcgcagcccagggcgcacggtggtggtctgtttgttctgccgcatcccgaatggttgaccgaacacatttcgtattcataaggctgggagccacaggacttgtatgagtgaacccgtttatgtaggtatcgacgtggccaagcgcaccttcgaggtggccaccactggtcaagcacagaccttcagtcttggcaacgatgaggccgggcatgcccagctgtgccaactgctggcgccgctgtcgccgcgcctggtgctgctggaggccaccggcggctacgagcaggacctggcgcttgccttgtccgcggcaggcttgcgtgtgtcggtgatcaatccgcgccaagcacgcgactttgcccgttgcatgggcaaactggccaagaccgatcgcatcgatgcgcaggcgctgcgcggctttgcagccttgctggacgcccagggtcacgagccgcgcatgctggccgacgagcagcagcgcgagttgaccgccctggtggtgcgccgccgccaactcgtagccatgctggtggccgaacgccagcgactggccctggcacatcccaaggccaagcccagcatcctgcagatcatggctaccattgccgagcaactcaacgacctggacgggcagctcaaggagcatgtcctggcacaccacgccgatctggcggccttgctgacctcggtcaagggcgtgggtcccaccacggccagcacgctgctggcgcaactgcccgagttgggccagctcaatcgcaagcagatcacctcgctggtgggcttggcccccatcaatcgggactcgggcacgctgcgtggacagcgccacatcttcggcgctcgcgccgacgtgcgccgcgtgctgttcgtggccgccttggtaggcacgcgcttcaatcccgtgctcaaagccttctatgcaaggctgctggccgccggcaagcccaaaaaggtcgctctgctcgcctgcatgcacaagctgttggtcatcttgaacgccatcgctcgcaccaagtcgccttggcgcaacgaacttgctgaagcggtttgacttagtcattcaagatggttg

SEQ ID NO: 8769 - DNA, 1550 bp, unidentified
  source 1..1550: mol_type = unassigned DNA; note = element_dc045b5
  misc_feature 1..2: note = core
  misc_feature 3..166: note = LE
  misc_feature 167..1426: note = CDS
  misc_feature 1427..1550: note = RE
cttgtatgatgtttatagaagctaaacacatactttcctttctttttatttgtgacttataatacattcagatgctgtggactttagattttttcgtgtagcccaactactttaaggagtgtattgccacggttttatctgaatcatttataagctggatgtgccaatgggttattcccgccagagcacttatttcaatcaagtctatgagggtaaacacctgtggtattgtcacagtgtcaacactcagaaaggagcttttatgatttatgtaggcattgatattgccaaactcaaccattttgcctctgccttatcttcagatggtgaaataatgcttcaaccgttcaaatttacaaatgactatgatggcttccatcttctcactcagaaacttgaatcattcaattctgatgacatcatcataggtcttgaatcaacggcccattatggcagcaaccttgttgaattccttgtcataaacaactacaaggtctgtgtcataaaccctattcagacttcttcaatgcgtaaaaacaacattcgtaagactaaaactgataaggttgatacttttattattgctaaaactttgatattgaatcctcaccgtctcttcactatgcaggatatctctatcatgcatctaaaacaactgggacgtttcagaatgaaactcattaagaaacgtactcaagcgaagattcaacttacatcctacgtggatcaggctttccctgaactccagtatttctttaaatctggcatacatcagaagtctgtgtatgcggttctaaaagaagctccaacaacagatgctattatttctatgcacttgacccatctgtcgcatcttcttgaaactacctcccacggacattttaagaagagtactgcaactgaattaaggattctggcacagaggtctgtcggttccagcgacagctctatatctactcagataacccagaccatcgatttagttgagttactggatagccaggttaataaggttgaatccgatatggaagctgttgttacttccttggactctgtcattatgaccattccaggcattggatttatcaatggaggaatgatactaggtgagattggcgatatctctcgcttctctaacccttcaaaagtgcttgcattctctggtctcgatcctacggtttatcaatcaggtaactttaatgccagtcatacaaagatgtctaagagaggctctcgccctctaagatatgctttaatcaatgcagcacacaacgttgtcagaaacaataaaacctttaaagcgtactatgatcaaaagatttctgaaggtaagtcccattacaatgccctgggccactgtgccggaaaactggttcgcatcatctataagatgcttactgacaacgttgaatttaaactagattaataactgaccattaacatatattttgaaaagcacccttgtggagctctattaaggttagccttcttctggtcagaataataaaagtaattttttgttaatttatacttgacttttcatagctggt

SEQ ID NO: 8770 - DNA, 1384 bp, unidentified
  source 1..1384: mol_type = unassigned DNA; note = element_dc0bddf
  misc_feature 1..2: note = core
  misc_feature 3..129: note = LE
  misc_feature 130..1152: note = CDS
  misc_feature 1153..1384: note = RE
  misc_feature 1167..1353: note = bridgeRNA
acatggggtaatcgcgggagcgagctacctcaatcagcgatgacgtagaggaaggtggctgttccccggtagatggaagtgcgggctcacgactgacagccgggcccatacatcggacggagaacagccatgggtgagtatgtcgggctcgatgtttcgctgaaagagacggcggtatctattcgacgcgcgggtaagcgtatctggcgcggcaagtgcgcctcggacccgcagattcttgcggcgctgatccgcaagcacgcagccgtgcccgagcgggtggtgttcgagaccggtccgctgtcggtctggttcttccatgcgctgagcgcagaggggctgccggcgatctgtatcgacgcgcgccatgcgaaggccgccctcgacatggcggctaacaagacggatgcgaacgatgccgacggcttggctcacctggcagaggttgggttctacaaggaggtgcgggtaaagagcttcgacagcatgctctcgcgcacgctggtcgcggcgcggactcgcctggtgcggattggcaccgagctgtcgaaccaggttcggggcttgatgaagacgttcgggctggtcgtcccgcccgtgagcggcagcaagttcgagcgtcaggttgaggctttgctggccgacaatgccgacctcggctgcatcatccggccactgcttgaggcttggcacgccgttcgccttcgcgccgcggagcttggacgcaaactgctggcggacgcccggcgcagcgatgcctgccagctgctaatgtccattcccggcgtcggcgtcgtgaccgccacttcgttcatcaccgcgatcgaggacccgaccaacttcaagcggtcgcgatctgtcggcgcctgggtcggattgactacccggcgctaccagtcgggcgagatcgactatggcggccatatctcgcggcgaggcgacagccatttgcgcgggctgctctatgaagccgcgaccgtactgctggtgcggagccgatccgagtgcgacctgcgcaaatgggggctagagcttcgcgagcggctcggcttcaaacgcgctgcggtcgccgtcgcccgcaagctggccgtcatcatgcacagcatgttgatcaccggcgagccgttcagggagacaagcgtcacagcctgacacccaagctcgtccgcgtcgcaaggcgctgcgagacgtcctgccgggacgtaggccgaccaactccgcgacattcgttgcatccgacgcctacggcaacggaatgcgtcatgaaccttggaggggtcgccccgcgaagccccatcatgcggcggcacatgccgaccgcgaagacgaccatgctcccggcaacgatatctcagataacccttgcacccgacgcgattagacg

SEQ ID NO: 8771 - DNA, 1449 bp, unidentified
  source 1..1449: mol_type = unassigned DNA; note = element_dc0c76a
  misc_feature 1..2: note = core
  misc_feature 3..161: note = LE
  misc_feature 162..1196: note = CDS
  misc_feature 1197..1449: note = RE
  misc_feature 1213..1444: note = bridgeRNA
agatggggtaacgggccggccgatccagccgcccgctcgctacggcgcaatttgagagcgcgctcgcgggcggcttttctggaaggcggtcgtccctcaagctgatggtgtcaaaaaccggagtcgggcaggcccgctccaagcatcatcgagggacgaccatgtactactatgcaggaattgacgtgtctttggaatgctcgagtgtttgcgttgtcgatggcacaggcaagattttgcgcgaggcaaaggtagccagcgagcccgaggcactgatcgcctggttccgatcgcaaggtctggggcttgagcggatcgggcttgaagcaggtcccttgtcgcaatggctgtacgcggctctgcgagaggcgggctttgcggttgagcttctggagacacggcacgtccgcgatgccttcaaggcgatgccggtgaagtcggaccgcaatgatgcgcgtgggatcgcgcaactgatgcggctgggctggttccgcccggtgcactgcaagtcgatggaggcgcaggagatgcgtgcggttctgacggcgcgcaagctgctgcagtcgaagctgcgcgacgtcgagaacagcctgcgcggcgtgctccggggctttggcctgaaggtcggcaagaccaccgaatgcacgtttgccgaacgcatccgggagctggttgccggccatcccgggctggaattggtagcaaaggcgctgctcgaagcccatgcggtgctgcggcgcgagttcaatggcctggataagtgcacgcagaagctcgcccgggcgcacccatcggccaagcttctcatgacaacgccggccgttggcccgatcgtggctctcacctatgcctctgcgatcgacgatccaaaaagattcagttcatcgaaggcaaccggtgcgcattttgggctcactccgaagaaataccagtcagggcaaaccgattacacaggccgcatcagcaagatcggcgatgcttccgtgcgcgaggcgctctaccaggccgcccacgtcatgctgaccaagccggtcaagaattgctcggcgctcaagagctgggccatgcggatcgccaaacgtgcgggcatgcgcaaggctaaggtggcgttggcgcgcaagctcgccgttatcctgcatcgcatgctcgccgacgcaaagccgttcaaccccgtggccaaggccgcggcaacctaaccaaggagtatcaatcggttctgggcgggccacgacaccaggctctcccgagcgaagtccctcgccgggacgatggatccggtcaggccgccatccgggaagtcggctcacaaccacgcttccgtagattggccggccggctcctctcatgcaccccataaggtgacggtcaccgcaccgatcccgtacagaagcaagtgcccggcaagcggataacgcaaaaagggattgaccaatcaaggcccgttacaga

SEQ ID NO: 8772 - DNA, 1309 bp, unidentified
  source 1..1309: mol_type = unassigned DNA; note = element_dc199ea
  misc_feature 1..3: note = core
  misc_feature 4..213: note = LE
  misc_feature 214..1179: note = CDS
  misc_feature 1180..1309: note = RE
  misc_feature 36..199: note = bridgeRNA
cattgtatattatttaatcgttatacttttgcataaagtttcaacatcagagtgtggaataagaccgatgtttcattagtcataaagaccgttgaatatgtttcgcccccacactcttacatcagaaaccggatagttcaatgggctttcagaccccgcattcgcaatgatggctcatgatgtaatgatgttgtttaattaaagttttagactatgacctacgttggaatcgatgtcagcaaggcgactttcgttgtcgcttattcgtctgccaagacaggcaggacaaaaacattcaagaacacggtaaaaggtgtacatgagttcatccagaccatttcagcagccgaacaccactgcgttttggaagccaccggcaattacagcgcattgctcgtttacctgctctccgaagccgggattaccgtcagccttgagaatccgctgaagataaagaacttcgcccgtgtcatgctatccgtcaccaagacggacgagattgatgcccgtctgatagccctgtacggcgagaggatgcagccggctccttacaagttacgcagcgattcaatcctcatcctgaagcagaaacgcacggtactgcgccaactcaaaaagcagcttgtggcaacgcacaacctcaaaggttccctggaggttcttccttctttcgaccctgaatgcaagaaaaccatcgaaaagacgattgcattcctcgaaaagcaaatcaaggcgatggaagagaaaatcacttccttggcgcaaagtgagtacaagaaacagatggacttgctcacttccatcaaaggtattggtgtcacgctggcagccgcactcattgtagccaccggaggattctcctactttgataatgccaagcaactgacccgttatctaggcttgtcgcctacttaccaacaatccggtacgtcagtcaatgtcaaagatcacatcaaccgaaacggggattcaaacctcagaagccaactctatgtggcggcattctcatcgttcaggtgtaataccgagtgcaaggcatgtttcgaccgtttgcggtctaatggcaagccgggcaaggtggcgatcgtcgctgtcgccaacaagctcgtaaggcaagccttcgcggtagtcacgcaaggaaaaccgtatgtcgatgggttcaagtccgaaaagacataaatactcatctgcggagggaacgccatgcggcaaggggctgagcagtcagccccgacgagctttccatgcacgacaacctgcatgattatgctaattatcgttaaccgtattcatttttcttattatagtt

SEQ ID NO: 8773 - DNA, 1212 bp, unidentified
  source 1..1212: mol_type = unassigned DNA; note = element_dc1a206
  misc_feature 1: note = core
  misc_feature 2..214: note = LE
  misc_feature 215..1186: note = CDS
  misc_feature 1187..1212: note = RE
  misc_feature 36..205: note = bridgeRNA
tcttaagtttacaatctattaattttatagtatttaatcagaaagaacaaaagagagaattaaggttagtatacacggtgaagctatagacttcgacaacattgataatcctctctctttttctactaagatttcgttcagttctatgagtatattaaactcgatttcaagttgttgaaacgtcagtagctggttctttccaaaaacatttcttatgaataaagataaaaaaatttatggagttgacatcagtaaagcagtctttgatgtgtattgtgaatctacaggtcaccatcaatttaacaatgatgaaaaaggctttaaaagttttctaaagcacttacctcagggagtattagtggttatggaagctacaggttattaccattacaggttagctcagtttttatttaagtcaaatattttagtttcggtagtgaatcctttgtctgttaaacgctttatccagatgaaactggctaaagtaaaaacagataagagtgatgcgaaagctattagcgaatatggtcaaatgaatgaagtcccattatatacagctttaacagatattcaaagtgagtgtttgcaattgtttagattgttagatagttatttaaaacatagaacagccacaaagaataagttaaaaggggaggaagtattaggtgttccatcaaagtttgtatatcgctcattgaagcgaaacttgaagcatttaaacaaagaagtagatgtcttggaatctagattgttagagttagtaaagcaagatcagcaacatcaattaacgttattaaaaagtattccaggcatgggtgtaaagaccgccttgtttttaatagtagtaacagatggctttaagaagtttgaaacggcatcacagttatgtagttatgttggtattacaccaacaataagagaatcaggaagcagtgttagaggtagaagtaggattagtaaggttggtgttggtaataagaagttaagaaacttgttgtttttatgtgctttttcagcttgtaaacacaacaaaggatgtcgagaactttatgagagaatagttaataaaggaaagagtaaaaagctagcgttaattgcagtatcaaacaagttgttaaaacaagcatttgcaattgctaaatcgggattgccttatgatgaaaactttgtttcaaaattagcttaaaacagcttgttttttaactcagttct

SEQ ID NO: 8774 - DNA, 1277 bp, unidentified
  source 1..1277: mol_type = unassigned DNA; note = element_dc1ec2a
  misc_feature 1..2: note = core
  misc_feature 3..232: note = LE
  misc_feature 233..1267: note = CDS
  misc_feature 1268..1277: note = RE
  misc_feature 25..244: note = bridgeRNA
ctgacttgtttatatgcgcccagcatccaggccccacggcccatagggtgcgaggccggcgaccggttggctcccacgctccttgcccaccattcgggtgtggctctctcatagcgtgccggccggccaccgaccgccgtcggcgtggctcgatagaggcgtgaggcgctccctggaactcaggttgcccgccgcggtgctcaaccgtccgggcagctcgaggaggtaccaggtgatcacgatcggcatcgacccgcacaagtccacccacacggccgtcgcgctcgacgccgatgggcgcagcctcgaggcgctgcgggtgccagcgacgcgcgcgaccgccgagcgactcctgcgctgggccggccgctggccagatcggacctgggcggtcgaaggggcttcggggctgcgacgcctcctcgcccagcggctcgtcgccgccgacgagaccgtggtggacgtgccggcgacactggccgcccgggcccgcctcctcgatcgcggccacgggcgcaagaccgacgccctcgacgcgacgtgcgtcgctcgggttgccatgagccaggctgggttgcgccgcgtctgcccggaggaccacacggccgtgctgcggctcctgtcggaccgccgcgacgagctcaccggggagcgccgccgcgtcgtcaatcgtctccatcggctgctccgcgatctgcgccccggcggtgcgccgacggagctctccaccgcggccgcggcgaggctgctcggccggatccgtccgacgaccgtggtcgacctcgagcgcaagctgatggcccgcgctctggtggccgacctgcggcggatcgaccgggcgctcgccgagaacaggactcgctgtgcgaatgccgtcgccgcgagcgggacgacactgacggcgatcttcggcatcagcgacgtcctcgcggcgaagatcctcggccacgtcggcgacgtcgatcgcttccggtctgacgattccttcgccagctactcgggcacggcccccatcgaggtctcgagcggcgaagtcacccggcaccgcctctcgcggaacggaaaccgggcgctcaacaacgccctgcacctggccgctcgtgtccagacgatgcaccccgggctcggtcgggaccactacgagcgcaagcttgccgagcacaagtcgtcgagggaggctcttcgcagcctcaagcgccagctggcgaaggtcgtctatcgccgtctcgttgccgatcatgtccaccgcccggcccttgcctcttgacatagaggcg

SEQ ID NO: 8775 - DNA, 1357 bp, unidentified
  source 1..1357: mol_type = unassigned DNA; note = element_dc36af7
  misc_feature 1..2: note = core
  misc_feature 3..65: note = LE
  misc_feature 66..1100: note = CDS
  misc_feature 1101..1357: note = RE
  misc_feature 1107..1346: note = bridgeRNA
ttatggaatggcccgccccttaacctacggcgctatgatggcgccggaacggtaggagaggaccgatgacgaagacacctatcgccgtgctcgggatcgatctgggcaagaacagctgcagtttagccggcatggataccaccggcgcagtggtgctgcgcaaacggatgacgcgggatgcgatcgtgacgttcgcgacgaccttgccatcatgcgtcatcgcgatggaggcgtgctgcggtgcccacttccttggcaggacgctggcgcttcatggacacacgatatggctgatgtcgccggaaaatgtccagccctacgtcaaggcgcagaagaccgatgaccgcgatgccgaggcgatcgccgaagccgcgacgcgctcgacgatgcgcttcgtatcgctgaagagcgaagcgcagctcgacctccagatcctgcaccgggtgcgcgagcggctggtcaatgcgcgcacggcgctgatcaaccagttgcgtgcggtgctgctcgagcgcgggatcatcctgcccaaggggcgcatcaacctgatgcgtcgcctcgaagagctcatggctggcgatccggccgtcagcgctcgcaccggcgcgttgctggccgaccttcgtgcagagtgggcggggctcgaccaacggatcaaggcctatgacgatgagctcgcggcgctgactcgtgaggatgagcaggcgcggcggctggcgaccatccctggtatcggcgtcatcaacgcgaccgccttgcttgccgccgtcggcgacggcagcgccttcgccaaggggcgtgatctggcggcatggcttggcctgacgccgcggcaacactcgaccggcggaaagacgaagctgctggggatcagcaagcgcgggaacggttatctgcgcaagcaactgatccacggtgctcgcgccgccatgccgcatctcgctgctaggccaagccaactcggcggctggttgcaggccatgctgacgcgcgctcatcccaatgtcgtggtggtggcgctggccgcgaaactggcacgtatcgcgtgggccgtgctgcggcatgaaaaggatttcgatcggcaagcgcccgtcgctgcctgatcgtcaaagattgcggacggcgccaatgccggtcgctcacaatgtctgcgtgaggtgaactgaagatggcataacgggtcgtaccggcagtctggaaacctggttctaaatgtggtgcctggcaccggcgcttttatgaggaccagactgtgcggatatccagcttggccagggcttcagccttgagacgggatacgttgatgcagaccatcatgccgtctttgacaaaccccttgcggacggggcgggccatacgt

SEQ ID NO: 8776 - DNA, 1303 bp, unidentified
  source 1..1303: mol_type = unassigned DNA; note = element_dc397ae
  misc_feature 1..2: note = core
  misc_feature 3..189: note = LE
  misc_feature 190..1146: note = CDS
  misc_feature 1147..1303: note = RE
  misc_feature 28..202: note = bridgeRNA
cttgtgtccgaaaaatttggcagaatgtgcgaacgggcggttgccgaccaaccgcccgtcgctggaactgagcccgtaccgacccaaggcgatcgagcctgagggagagcgagggacagatccggtgtcttcctcaacccgaacagttgcatgggctttgagcccgaaccgagcaaggaagggagctggatgatggcacaaaatgatctcgttgtcgtcggcatcgatgttgccaaggataaggtggatgcgtgtattcggtcgctgtcgctgcggcagacgagtccgggcacggtgcagggtcagcgcaagctgatcgcgtggctttgcaagcacagggtgagcaaggcggtgatggaggcgagcgggggttatgagcgcggttgggccaaggcgttgcgcggggccggcatcgaggtgcggatcgttgatcccaagcgggtgcgcagctttgcgaagtcggccgggcggctggcgaagaatgatgcgatcgatgcggagatgatcgcctggttcgccgagacgttctgcgaggcgccgggccagacctacgatgcagcgcgcgaggaactccagaaactggtaaacgcgcgccagggactgctcgaaatccagaccaaaatccaaaacagagatgagcatgttgcgccggcgccggtgcaaaaaatgcacgcgaggctcctgaagagggtgaccaccgaactggcccggctcgaggccgcgattgctgccacgattaaggccacgccgcattttgccgagcgcgccgagatcatcgagagtgtgcctgggctcgccgggacaaccgccgcaaacctcatcgtgggaatgccggaactgggtcaggtgagcaacaagatcgccccggccttgctgggcgcagctccttacgacgacgatagcggccggcgccggggcgaacgccatatcaagggcggccgccgcaaggtgcgaaatgccttcttcatgccttgcctcggggccgccacgcagcacaacgccgtgctcaagagcttctatcaacgcctgctggccaaaggaaaggagaagaaggtcgcgctcatcgcctgcatgcgcaagctgatcgtgattctcaacaccatgctcgcgcgcggtgagaaatgggatgccactcgctacgcgtagagctaagcgagcgctcctcgcgctcggtctccgaccgagcgcttgcaagccatcaagaccggtgagcggacggggtcagggccgtcagccgccgaaggcgggggcgcgcagcgccagccttgagcccggccgagcaccggtctattcagcacagttg

SEQ ID NO: 8777 - DNA, 1198 bp, unidentified
  source 1..1198: mol_type = unassigned DNA; note = element_dc3af94
  misc_feature 1..2: note = core
  misc_feature 3..187: note = LE
  misc_feature 188..1168: note = CDS
  misc_feature 1169..1198: note = RE
  misc_feature 16..195: note = bridgeRNA
cttgtatctctccccgaatatctgattagctatcagatgttcacagaatccggtgaagctgggcccacccaatgcactctgatgcagttccgtagatcagactcccggattctttttattctctcaggttgaatggtatccaagcacctgcctcgcagtgatgctgaatggacaagggtaataagagatgcactacgttggaatcgatgtcagcaaagccaaactcgactgctgctggttacgtgacgttgaaaagaacaaagttaaaaccaaagtttttaagaacaccctggcggatcatgacgcattgtgtggctggctgaaggcacagaccaaagccgatccggcggatatccgtgtcgttatcgaagctaccggcatctatcacgaatcgctggcctatgcgctttatgacgctggctttcagatctgcgtagtaaaccctgccagaacacatgagttctccaacagcctcggatctgtgcataaaaccgatgccaaagacagtctgatgctggcgcaatacagctgcagaatgcagccggaacgatggcaaccagaagctgaagaaatccgcgaactgaaagctctgatcgcccgtcttgaggcattggaagcggatctgcagcgggaaaccaaccgactggaaaaagccgagttcaatcgcacgtctgaacgggtaattgagtctttaacgctgatgattgagcgtctgcaagaagagaaagcgcgtctggaaaaagatatcgatgatcacatcgatcgccatccgcaactgaaaaaagatcgtgagctgatggccagcatcccaggtgttggcgatgttgtctcacgtatgatgctgagccttatccacagccggtcgttcaataatgcccgacaagtatcggcgttcgttggactgattccacgtatccaggaatccggtcaatggaaaggtcgtagccggttaagcaaacaggggccatcaagaatccgcgcgaaactgtatatggcatcggtggtctgcgtgcagtggaatccggatataaaagcccaatatcagcgtctgctggcgaatggaaaaagtaaaatgcaggcacttggcgcagcaatgcgcaagctggtgcagatttgctttggtgttgtaaaacaccagagcgaataccgcccacaggtacctatttaaggtgttgtggacggttgggagagatggtat

SEQ ID NO: 8778 - DNA, 1387 bp, unidentified
  source 1..1387: mol_type = unassigned DNA; note = element_dc53461
  misc_feature 1..2: note = core
  misc_feature 3..85: note = LE
  misc_feature 86..1114: note = CDS
  misc_feature 1115..1387: note = RE
  misc_feature 1088..1374: note = bridgeRNA
tgatggcgtggatgccctctcccgacggcatcgcaatgtgccaatgtgatgagtgctgaagccatcacaaagggagagagcatccatgtctgaggttaccatcatcggaatcgatctggcaaagcgcgtcttccagcttcatggcgcgcgccacaacggatcggtcgcttttcggaagaagctgtcccgggttcagctattggcgttcatcgctcagcatcccaagtgcgttatcgccatggaagcctgcgcgacggcacatggctggggtcgcgaattcgggaagctgggacacgaggtccgcttgatcccgccagtctatgtgaagcccttcgtcaagcgtcagaaaaacgacgccgccgatgccgaggcgatcgttgaggcggcgttgcgtccgaccatgcgctttgttgccgtgaagacggaagttcagcaggcccgtgcgatgctgtttcgcactcggcagatgtttgttggccagcgcacccagatgatcaacgccttgcgtggtcatttggccgagcatggcctggtcgcggctcgagggcccgcccatctcaagcggcttgcggacgccatcgcagacgaagacatggctctgcccgacgacgttctggagcttggccgactttatcttgaacagattgatggcctgaccgcccgggtcgcggagcttgacggaaagatgaagcgtgctgccacggaagccaatctggcgcgtcgggcgcaaaccatgcctggggtcggtcctgtcacggctttggcgatcgaaacatttgcacctgacttggccaccttcaagcgtgggcgcgattttgctgcctggctcgggctcgtgccgaaacagcactcgacgggcgggaaagcacggctcgggaagacatcgaagatgggccagcgcgatatccgcacgcttctggtgtccggcgccatggccgtccttcaggcggtcgagcggttcgatacgccgaagaacggctggctgaaacgcctgctgacccgcaagccacgcatggtcgccgccatcgcgtttgcgaacaagatggcgcgtgccctctgggcgatgctgacgaaacaagaggattatcggaacccggtggcggagttggtctgagcgcatcgcgtttgccaatccgtcggggcacgtcgggggtgtgaggaggtcattgaacagtaagggcaaaggatcgaccagatccgggtcagagaaagcagtctttgtgcaggagccaacgagctcggtttgttgatatgcctctggtccgcgcatcgccataccggccagcggccatgtcagtgccgcagagaaaggcctgatacatgaccgcacccgatcacacgctcgaaccgttcaaaaatgtcttgcaccaacgggggcatccataca

SEQ ID NO: 8779 - DNA, 1544 bp, unidentified
  source 1..1544: mol_type = unassigned DNA; note = element_dc5e148
  misc_feature 1..2: note = core
  misc_feature 3..243: note = LE
  misc_feature 244..1416: note = CDS
  misc_feature 1417..1544: note = RE
  misc_feature 3..223: note = bridgeRNA
ctcgtattattagatttgtagtttttatagaccctcatcaaggtcttataatcttacacagacgctgtggattagtcttttttcctaacgctttgacgttttacaggaggcaataaccacagccgtttgtttaagcggtaattagttagataacgcatgacgtttcatttagcacgaggttacgtaggaacaaacaagtctgtggatcaaagcagtgtcaaatctatatctggaggttctgctatgttttacgcaggaattgatgtggcaatggataaacacgattgtgttgtcctggattctgacggtgatgttgtcgttgaagtctttacctttgagaacagccgtgacgggtttaagactctcaagaaagttctccaatcttgttctaagaatcccaagaagataaaagtaggactggaggctaccggtcactacagcgataatcttctggctttcttgaacaaaattggctacgaccccatattgttcaacccgttacatactaatcttttcagaaaaggtctaagccttagaaagacgaaaacggatcacgtcgatgcgcacaccattgcgactatgctgaggacggaagatctcaagtcctactcgcaaccatcttaccaccttaacgagctaaaatcactaacccggtatcgttcaaatcttgtttcggactgtagtcggtgcaaggtatcgcttgccaggctatgtcagatcctgtttcctgaactaaaggccattgttccaacactgcatatgagctctgtatatactcttctttcggaattgccttcagcggataagatcgccaagtgcaatcttactcatcttactgcattgctctcttcagcctctaaaggacactatggtcgcgataaagctgttgagataagagaactcgccaggacatccatcggaattaagagtctcgtcaaagaactggaacttcagcagacaattgacctcatccaagtctatcttcaacagattgaagtcgttgaagaagagattaatgagcttatggatgacatcgaaagtccgataacttccattcccggcatcgccaatcgtatggctgctgtgattcttgctgagacaaacaacttccatgactttgaacgtgcagaacaagtcctcgcattcgccggattagagccatctgtttatcagtcaggccagcttacgtcctcacattcaaagatggttaaacgaggatccaaatatcttcgctacgcaatctttaacgccacaaagtatgtatgcaattgggatccgacattccatgcctaccttgccaagaagcgtgcagaaggcaaaccgtataacgtcgccgtttctcatgcagcaaagaaactgacaagagtgatgttccatctcgtaaaaacaaacaaggagttcgtaccccaggcataaaccacagcagatccatatcacttgtttcccaaagcacctcgtgggtgcttactttgttatgcaattatcaaggatcgatgtaactagcgtttacgctacatttttcttattgacttttaatagttagt

SEQ ID NO: 8780 - DNA, 1396 bp, unidentified
  source 1..1396: mol_type = unassigned DNA; note = element_dc63494
  misc_feature 1..2: note = core
  misc_feature 3..135: note = LE
  misc_feature 136..1125: note = CDS
  misc_feature 1126..1396: note = RE
  misc_feature 1165..1383: note = bridgeRNA
tgatgaggtggatggctcccgctcccggcatcgaagtgccaaacaggtggctgtctgagtcgccaccaatgagaggagccatccgccatacaggttaccacaatcggtcttgatcttgcgaagcaggtgttccaggtgcacggcatcgatgcacagggcaacgcggtaatccgtaaagccctgcggcgcgcgaatgttctgccgttctttgcggagcttccgccgtgcctgatcggcatcgaagcctgcagttcagcgcatcactgggcccgcgagttcatgaagctcggccatacggtgaagttgatgccgccgtcttatgtgaaaccctatgtgaagcgcggcaagaccgatgcagcagatgccaaagcgatttgtgaggcggtcaggcgtccgaccatgcgcttcgtcccggtgaagagcccggatcagcaagcggtcctcatgcttcatcgcgtgcgggcgcttctcatgtgccagcggacgatggcggtgaatgcgttgcgcggtcatcttgctgagtttgggatcgtcgctggccaaggtgcaaagaacctcagggagctgatcgagcgcgtcttcgcagcagacccggaccaatcggagattccgcagcttgcccacattgcgctcggcctgctcgtcacgcaattgaatcatcttcaggtgcaggtgagggcgattgaggtcgaactgctcgtctggcacagaacgagcccggcgagcaaacggctggaaacgatcccgggcgtaggcttcatcacggcaacggccatcgcggcgacggtcacggacccgacgcacttcaaatccagccgtcagtttgctgcctggctggggctcacacccaaacagaactccagcggaggtaaggagcggcttggcggtatctccaagatgggggatagatacctgcgcacactgctcgttgtcggcgcgacttcagtcatgcgatatgcgcgcgacaacggggccgtcagcgcggtctggatcaataagcttctcgccaagaagccggcccgactcgtatcggtcgcgcttgccaacaagacagcgcggatcgcatgggcacttctcgtcaaacaggaggattaccgtaccccattgatgcctgccgttgcttaatcggggcccaaagggttccgaggagtaggtcgatgttctcgaactgggaagggtgatgatggtgtgatgcaaaatggtcgatgcccaaggatcgggaaaacccgtttagagtcgtgcgcaaaacgcgagaaactgattgggatccgatccgcagacttcatcagggccagcgacactcaaatgtcgcacacaaaggccggacatatgactgcacccgaccagtttgccgaaacgctcatcaaaacccttgcctgcgggagccatccacata

SEQ ID NO: 8781 - DNA, 1542 bp, unidentified
  source 1..1542: mol_type = unassigned DNA; note = element_dc663f7
  misc_feature 1..11: note = core
  misc_feature 12..242: note = LE
  misc_feature 243..1415: note = CDS
  misc_feature 1416..1542: note = RE
  misc_feature 3..222: note = bridgeRNA
ctcctattatcagatttgtagtttttatagaccctcatcaaggtcttataatgctcacagacgctgtggattagtcctgatcacctaacgcttgacgttttaaaggaggcaataaccacagctgtttgtttaagtggtaattagttagataacgcatgacgtttcatttagcacgaggttacacaggaacaaacaagtctgtggatcaaagcagtgtcaaatattcatttggaggttctgctatgttttacgcgggaattgatgtggcaatggataagcacgattgtgttgtcctggattctgacggtaatgttgtctttgaagtttttacctttgagaacagccgcgaaggatttaagactcttaagaaagttcttcaatcttgttccaaaaatcctaagaaaattaaagtagggctggaagctaccggtcactacagcgataatcttctggaattcttgaacagtatcggtttcgcccccgtgttgttcaatccgttacatactaatcttttcagaaaaggtctaagccttagaaagacgaaaacggatcacgtcgatgcgcataccattgcgattatgctgagaaccgaagatctcaagtcctactcgcaacaatcttaccatcttgcagagttgaaatcactaacccgttatcgttccatgcttgtttctgactgtagccgtcacaagatatcgctcgtcagactatgtcagattttgttccctgaacttaagaatcttgtcccttctctgcaccagtcttctgtatacaccttgctttctgaattgccttcagcggataagattgccaattgcaacctcacacatcttacagccctgctctcaagcgcttcaaagggacactatggtcgcgataaagctattgagataagagatactgccagagcatccattggcataaagagtgtagtcaaagaattggaacttcaacagaccatcgagcttattcagatctaccagcaacagatcgaggctgttgaggaacagattaataatctcatggatgaaattgatagcccaatcacttccattcccggcattgccaatcgaatggctgctgtaatccttgctgagacaaataacttccaagactttgaacgcgcggaacaagtcctcgcattcgccggattggaaccgtctgtataccagtcaggacaactgacgtcaacgcattcaaagatggttaaacgcggttctaaatatcttcgctatgcaatcttcaatgcaacaaagtatgtatgtcattgggatccgacgtttaaagcttatctggcaaagaaacgagccgaaggcaagccatataacgttgccgtatctcatgcagccaagaaactgaccagagttatgttccatctcgcaaaaacaaacaaggagttcgttccacaagcataaaccacagcaattcataccacttgttttccaaagcacctcgtgggtgcttgattcgttatgcaattatcaaggtgcgatgcaactagcgtttacgctacatttttcttgttgacttttaatagttagt

SEQ ID NO: 8782 - DNA, 1153 bp, unidentified
  source 1..1153: mol_type = unassigned DNA; note = element_dc6675f
  misc_feature 1..2: note = core
  misc_feature 3..208: note = LE
  misc_feature 209..1141: note = CDS
  misc_feature 1142..1153: note = RE
  misc_feature 13..211: note = bridgeRNA
cttgtcttatgacttctctcggctcctttgggataaaggagccgctgcccggcacggcatttatgccgggcagcggcgggggtcggatcgagggaaaccaggtgccgcaacaccgaggcgtagtatgatcgcccccgtcttttcatctgtcctgaacggatacccggtccttgggaccggatgacaagcagaggaagacgaagagaccatgcagcatatcattggagtcgacatctcgaaacctacccttgatgccttccggctgagcccagccgagcatcgccagttcccgaacgaccgcgccgggtgcgcggcgctgatccgctggatcggcaaacccgcagcacgggtcgtgttcgagccgaccggcgcctatcaccggcttttcgaagccactctggtcgcggccgggatcgaggccgtaaaggtcaatccccgtgccgcgcgccgttttgccgaggcaaccggacggctggccaagaccgatcggatcgatgcggccatcctcgcacggatgggtgcggttctcgaccttgaagggcgtcctgcgaaatccgaaaccctgcatgatctcagagagttgagcgtcgcgcgacaagcactcgtcaaggaccgcatcgccacgaccaaccgcgagcagatcgccgtgaacccgctgatccggcgccagctcagggcccgcctgaaacaaatcggcgcacaactgaaagaaatcgatgcaacgatcgcagcgctgaccgtcggcgatcccgaactgtcgcgccgtcgggatatcctcacctccattcccggcatcggatcggtcacggccatggcgatcctgaccgaaatgcccgagttgggccagttggacaacaagcaggctgccagcctggcaggcctcgccccaatgacgcgccaatcggggacatggaccggccgcgcccgcattcgcggtggtcgcgccggtttgcgccgcgcgctctatatgccggcactggtcgcactacgcttcaacgacgatctcgctcggaaataccaggatctcaaggatgccggaaaaccgtcaaaggttgccatcaccgcgatcatgcgcaagctgctgatcctcgcaaacgcgctgctccgcgacggccggaaatggaacgaaaaagccgcttgatcaaaacggata

SEQ ID NO: 8783 - DNA, 1744 bp, unidentified
  source 1..1744: mol_type = unassigned DNA; note = element_dc6f28a
  misc_feature 1..2: note = core
  misc_feature 3..360: note = LE
  misc_feature 361..1587: note = CDS
  misc_feature 1588..1744: note = RE
  misc_feature 61..336: note = bridgeRNA
ctcgtataatatgatttgcagaccgttttgtaagtgtgtctgcttagtgcacttgttagattagatatcagcaggcttagagatgcccatgatacaatagctgtaggacagcagggttaagttctgaaatctcccgttgaaccgaaaggttgcttcatggaaagtccgttcccctgagccggaagttagctgcaaactcattggctgtttgcccgagtgtaggccgccctttcagcagtgagggatatcgcatcggcctgctctggaatgattctgataggcgaggttgcggatgctccggttatcatgggtatctcaaagcctgctggcctaaaatctccatgcggggaggtgaaaattatgaacccattattcgttggtattgatgtgagcagcaggaacaatgtggcctacctgatgaaaccagacggcagcaagtactccagtttttctgtgcagaacaaccttggcggggctaaactgttgtcagaaagaatcgtatcggcactcggctccatgcagctcagtgatgttgtgatcggtctggaggccacctctatctacggggacagccttgtctacgctctccgagaagatggcagactggggaagttccagcgaaagattcatgtccttaaccccaagcaggtgcggaaattcaaggaagcctatcctgacctgcctaagaacgactgggtggacgcctttgtgattgccgaccatctgcgttttggcagaatcgccagggaggtctacatggatgattaccgttacaaagcactccaaaccctgacgcgggccagatttgaggtcattcaaaatctgactcgtgaaaaacagcggtttgccaactacctgtttctcaaatgctccggcatggcccaagataaggatattgctaattccagctccaccacgattgcgctcatggagcgctttgaaacagtggatgatctggcaaactctgatctggaagaactgaccgccttcgttacagaaacagggcgtggaagatttgcagatccagctgccacggccaaagcggtgcgagctgctgccaagggctcctatcgtctacccaaaacggtaaatgacaccgtgaatcaggccatgtctgtctccattgcctctatgcgggccttgaaagagcaagtcaaggttttggacaaggccattgagcagcagtttgaaatcatccccaataccctgacttccattcccggcattggcaaggtttactccgccggcatcatcgctgaaatcggcgacattcaccggtttgattctcaagcctccgttgccaagtttgccggccttgtctggcacaaaaatcagtccggtgaatttgaagcggagcattcccgaatgattaaatccggcaaccgctatctccgctactatctgctggaagccgccaactctgtgagaagatgcgactccgagttccggcgctactacgacctcaaatttaaagaggtcaacaagtaccagcataaacgcgcactcgctttaactgccagaaaactggttcggttggtctttcggctgctgaaggacaaccgcctgtatatcccgccggagagctgagtacaccactcgcaactctggcgctcccgccctgtttcaaaaaatcttagggggcagggcttaggttcgtgttgccttttttctgcctacgcaactgttttcctgcatttattctcgatttttcctgccatcaccctcttgacttcataccattaga

SEQ ID NO: 8784 - DNA, 1456 bp, unidentified
  source 1..1456: mol_type = unassigned DNA; note = element_dc790d4
  misc_feature 1..2: note = core
  misc_feature 3..254: note = LE
  misc_feature 255..1448: note = CDS
  misc_feature 1449..1456: note = RE
  misc_feature 37..239: note = bridgeRNA
ctcatatctttgtttcctattcaaatataataaaaatacctttgattaataactaacaataaacaaagcaaagttgccaaattgtgacgtggctagatacgttttcaagacgatattgactaacaggtaaatcaactttgttttattacattcaagtcacaataagtacttaagcgcttgatttcggattaagacgctgtataaaaatgagctaagaccaatgtgatatttgtttattaaaaaataaataaattatgaccataaagtattccatcgggcttgatatttcaagtaaaaaagtaaacggaagtattagtttaattaatgagagtcaaaaagttactgtaaagtcaagtattgtatttaacaatactataaaaggattttcggagttattactttggattaaaaagtggcatatagaacccgaaattccactggtgatttgcatggaagccacaggagtttatcacgagaactacgctcttttcctgtttgaaaaagggtataatgtttcgataattctccccaacaaagccaagcattatttaatttcaatggggttgaagtccaaaaacgattctatagatgcaaaaggattgtcaaaaatgggagctgagcaatgccttgatttatggcaacccgctggtaaatatttttatgaactccgccaatatacccgccaacaccagaacttacaagaacaaaaaacagtcattaacaatcaattacacgccttagaatttggtatgtatgacatcaaacccgttgtaaaacaactcaagaaggtagtccaactctttaacaaacaaatcaaagagctagaaaagattataaaaaaccatctggaaagcgatcaaatcgttaaacaaaaagtggataacatttgccaaataaaaggaattggaatcctaacgttagccactattttagcagaaactaatggctttgaattgttcaagaattacaaacaattggttagttattctggttttgatgtagtagagagcgagtctggaagtagcgttacgggtaaaaccaggatttccaaaaaagggaattcacacattcgtcgggcactatttatgccagcatttacggcagtgaagtaccaagagccagcgttttttgaactttatgaacgaacctatgctaaacacgccatcaaaatgaaaagctatgtagcggttcaaaaaaaacttctcacgaccatttatcatctatggaaaaaaaacgaaaaatataatcccaactacattcttactatccaagaaaaggatcaggagctttcttctttactcggctttgaaaaagccgcatcaatacaaaaaaatagccccaatcaagttgaggctatacaaggtaaacatccagtgaaaatcacagtaggcttcctctttactaatacaaatttagaaaaatatagtcaagtaaaatttgttttttaagatagtac

SEQ ID NO: 8785 - DNA, 1581 bp, unidentified
  source 1..1581: mol_type = unassigned DNA; note = element_dc7c344
  misc_feature 1..2: note = core
  misc_feature 3..248: note = LE
  misc_feature 249..1424: note = CDS
  misc_feature 1425..1581: note = RE
  misc_feature 5..228: note = bridgeRNA
ctactattatataaagtcatagtctttctttaccttttctacaggttcgactatgctattttaagatactgtggattggtttatcacctcctaccacttgatggtttaaacgaggctccaaccacagtctctttgttcatttgttaatcagttagttaccgcatgacggtttatcaagaagtaggttacaatcacaaagagctctgcggatcttaaaacagtatcaatacattttaaggaggccctatatgatttttgtaggtattgatgtcgctaaagataaacatgactgttttatcaccaactcggatggtgaagtcctctttcagtcctttactattgccaataaccttttcggatttgacgatctttatcagaaagttgtttccgttatggaaaatgtatccaaagtaaaagtaggactggaagccactggacactatagttacaatctcctcggatatctctttgataaaggtttcccgacctacattatcaacccgttacatacaaatctgtacagaaaaagtctaagccttagacagacaaaaacggataaagtggatgcccggacgattgcttctatgctcatgtctgatgtgaacttaaagtcctactcagacacatcttatcataacgaagaattaaagtcactaacccgttatcgttttgataaagtaaaagaacgctctgcattaaaggtctctatttcccgccttgtctgcatccttttcccagagttagaaaaacttgttcctgttctgcactgcagttccgtttattccatgctgtatgaattcccaggggccaaacaggtcgctgctgcacatctcaccagactttctaatcttcttgataaagcttctaaaggacattacaaaaaagatactgccattacttttagagaagcagcaagaaattccattggatcaaatatgcccgcaaaatctttggaattaaaacacaccattagactgatccgtgaattagactctgaaattgacgagattgaaaatgaaatcaaggtcattatggatagaatcagttcgccgattctcagtatccctggaatcagttatcggatgggcgctatgatcattgctgaaataggtgactttacccgttttgattcacctgataagattcttgcctatgctggtttatctccatctacctatcaatccggtcaaatggataactctcatgccaggatggaaaaacgcggttcaaaatatctacgatatgcattgtttaatgcaatgatttatgtgtgtacctgggatcctacgttcaagacatatcttgccaagaaaagatccgaaggaaaacactattatgttgcagtttcacatgcagccaaaaaacttgtccgagtaatataccaacttgagaaatcaaggcagccatatcagaaacagttttgacaatccctatatcatctcttctttaaagagcacctgaaaagatgctctattcgtcatgcaattttcaaggttctgatttcgatgaaatattcatcgctacacttcataaaagtttgatctttttcaatttaactattgactttctctaatagttagt

SEQ ID NO: 8786 - DNA, 1152 bp, unidentified
  source 1..1152: mol_type = unassigned DNA; note = element_dc7d0f9
  misc_feature 1..3: note = core
  misc_feature 4..211: note = LE
  misc_feature 212..1129: note = CDS
  misc_feature 1130..1152: note = RE
  misc_feature 23..194: note = bridgeRNA
gcttgtgtctagatctagggataaactctggggtgagagaggtggatggcaagctgtgagtccgcggtgctaaaagcacgtgtgggagccaagctgccatccacctttccactctggcccataagcccgaacagttggacgagcgccactcgaatcacaagcgtgggcaaagccagagcactctcactcctgagtgtaagagggttttgccatgatttcctgggtcggcatcgatatctccaaatcaaacctggttgtatgggttcaacctcaaggtgaaggttttgaccttcccaatacgtcagaaggctttgttgagctgattgagcgcctgagccagtacgaggttgaccgggttctgctggaggccaccggtgggtacgaatgcaaggtcatggcggcgctgcaaggcgccaacttcaaagtgcttagaatcaatccccgccgggccagagccttcgccgtggccatgggcaagaatgccaagaccgaccccatcgacgcggccgtgctggcggacttcgctgaagtgctgcatgcatcccgcgacaagatcatttcgccggaacgtgaagcgctgcgcgagctgatccagttgcgcgagcagtttgttcagcaacgagacgacaacaagcgccggcttcagcaagttcaactacccgctgttaccgtggcgatcaaaggtcttgttcactacctgcaagtgcagatcaagcagctcgataaaaccatccatcagagcatgcatgagctggatgccgaaaaagccgagcgactcatttccgttaaaggcatcggtacggtggccacagccagcttgctggtttatctgcccgaattgggagcgcttgatcgtcgtgaagtggcggccttggcgggaattgcgccgtacaacgacgacagtggcaatcacagcggaaaacgtcaaatctacggaggcagagcccgcgtcagacgtgcgctttacctgtcttgctgggtcgtgatccgtcatcagccagacttcaaggcacgttatgacgctcttcgggagcgaggcaagagcgcgaaagtcgcgctcatcgcctgcatgcggatcctactgatcaggctgaatgccatgttgcgggacggcaccgagtggcggtgacgagtggctgggggaagacagtt

SEQ ID NO: 8787 - DNA, 1541 bp, unidentified
  source 1..1541: mol_type = unassigned DNA; note = element_dc801cd
  misc_feature 1..2: note = core
  misc_feature 3..120: note = LE
  misc_feature 121..1209: note = CDS
  misc_feature 1210..1541: note = RE
  misc_feature 1248..1513: note = bridgeRNA
agacggtatgagtggtccgagcggcatagcccgggtcgcacgggcggggcctcgctatgaaagtcgtgggttaccgcgcagattgccctgcccggcctatccacattcataggaggccccgtgttcaccgagcgtacgagtgttggcctggacgtgcacgcacgatcgatccgcgcgagcgcgatcgacacggtcaccggcgagctgttcgagcagaccctgtccccgggcgaggactaccggccggtcatggactggatcacccgcctgcccggcccggtcgcggtggcctacgaggccggcccgaccgggttcggtctggcccgtgtgctggccggggcgggcatcaggtgcgtggtcgcggcaccgtcgaagatcaaccgggcccccggggaccgggtcaagaccgacgcccgtgacgcgcgcctgctcgcccgcctgctgcgcctcgacgacctggccgcggtggtcgtgcccacgatcgagcaggaatcggcgcgtgacctggtgcgcctgcggttcgacaaccggtccgacctcatgagcgcccgtcaccggctgggcaagctactactgcgccacgggcacgtgtatgccggcgcgaaggcgtggaccggcgcgcacgagcagtggatgaacagcatccacttcacccaccccggtacccgtatcgcgttcgccgagtcccgcgagctcgtcacccacctgcaagcccgacgcgaccgtctcgacgcacagatcgggctcctggccgccaattcctcgttcaccccggtggtgacccggctgtgctgcctgcgcgggatcgcgaccctgaccgggttcgccctggcggtcgagatcggggactggacccgcttcaccggctcgagcatcggatccttcctcggcctgacccccaccgagcactcctccggcggcacccgccgccagggcgggatcaccaaggccggcaacacccacgcccgccgcctgctggtcgagtccgcctggctgcacaagccccgctacatcgtgggcaaggtcctgcaagaacgctggaacgccgccacgccagccgcgcgcgagcgagccgacctcgccaaccggcgcctgcaccaccggtggacccagttcgacgcccgcggcaagaagcacaccgtcgccaccaccgcgatcgcccgcgaactcgccggctggtgctggtccctcgccgtcctgcccgactaacccacgccaccccgaccaactgccggggtcaaccaagcttgccgccccgtgaccgacgcgtccgtgcgcagcgcgaggagcgacccacgaatcggctgtgagcagcccgcgacgggccacgctcgacctcagacacccgatggtcccgctcctgccgaacaacccgtcatgcggtaaccaacccgcgcgtatcagtcttgaccgcgcgtcgacaacgacacgctgcaccaccgcaccacggcacaccggcgacaagagagaagcacccgccccggaccacggtccgaggcgggtgcttcgacctgccacttgacagaagcggactacatatc

SEQ ID NO: 8788 - DNA, 1539 bp, unidentified
  source 1..1539: mol_type = unassigned DNA; note = element_dc84032
  misc_feature 1: note = core
  misc_feature 2..227: note = LE
  misc_feature 228..1475: note = CDS
  misc_feature 1476..1539: note = RE
  misc_feature 13..237: note = bridgeRNA
ctacttgttgtatggacgtacggctctggcctggccaggctgggtcgaggtgtctggcggggtggctctctcatcggctgcccacggctatttggtgtggctctcacatggcgtgcgtcccgccgggcaccgtgacgaggtgaggctcaagaggggtctgcccagctcgaagtagcgctgccctcctcgtcgacaacagtgtgctcggagacgagggagtcaaggctatggggcgtgtggtgatcggaatggatccgcataagcggtcggcgacgatcgatgtgtgtgacgagcgagagcgggtgctggcgaccggccggttcggcaccgaccgagacggctatcggcagctgctggccgccggccggaagtggccgcatcggctgtgggcggtggagggctgtcagggggtcggccgtcatctggcgcagcggctggtcgcggacggtgaaccggtcgtggacgtgccggcaaaactttcggcgcgggccagggtgttctccaccgggcaagggcgtaagaccgacgcgaccgacgcgcattcagtcgccgtcgtcgcgttgcgcaccccgggcttgcgggccgtggatgtcgatggtcagacggtggcgctgcggctgctggccgaccggcgcgacgagctcggagccgcccggacgttgacggtgaaccgactgcatcggctgctggtggagctgatccccggtggggcgaagacgttcctgtccgcgacgcaggccaaggctctgctggccggggtccgcccgcgcgacgtggtcggcaagacccgacggcgactggccgcggagctcatcgtcgacctcgacgggattgacaagaagatcaaggcggcgaacaagcagctgctcgagctcatcgaggcgaccggcagcagcctgctcaccctcaacgggatcgggccgtctggtgccgcccggctcctcggcgatgttggtgacgtaacccgtttcccgacccgcggtcacttcgcctcctggaacggcaccgccccgatcgacgcctccgccggtgagcagaaccgccaccggctgtcgcgggccgggaaccggcggatcaaccgggtcctgcacatcatggccatcgtccagttacgcaacgacaccgaaggccgggcgtactaccggcgcagactcgccgccggcaaaacatcgatggaagcgatccgggtgctgaaacggcggctgtccgacgtggtctaccgccagctcgtcgccgaccagaagcgcctacgtcaggtgaaacggacggacccgggaggacaagcgggggcggctacaaactccagcgcggccggcttcaaccccaacgccgacgcttcggagaagtcacttcccgggcccgccaccggcgagattacccggactggggcacccattccagaccgttcttcgtcccgatcccgccgccctttaacagcgccgacccgcagccgacgtcaagcgcagtctgcttgacgacggcgaggaccggcgcaccatcttcaggcgggaacgacgggcccttgacacagaggggtgc

SEQ ID NO: 8789 - DNA, 1388 bp, unidentified
  source 1..1388: mol_type = unassigned DNA; note = element_dc8cbab
  misc_feature 1..2: note = core
  misc_feature 3..88: note = LE
  misc_feature 89..1114: note = CDS
  misc_feature 1115..1388: note = RE
  misc_feature 1088..1375: note = bridgeRNA
agatggtatggttgccgccctccccagacggcatcgcaatgtgccaagatggtggtgttgaaagccacgaagcgaggaggacggcgagatgattgatacaatgattggggtagatctggcaaagcgtgttttccagctccacggagcgacgaaggcgggagaggtgaagttccgcaagaagctgacacgcgaccagttccgggccttcatggcggagcagcccgccgccctggtcgtgttcgaggcctgcgggagcgcgagctactgggcccgggagatggaagcactcggtcacgaggtccggctgatcgcgccgcagtatgtccggcctttcgtgaagcgccagaaaaacgatgcggccgatgcggaagcaatcgtgatcgcggcacgccagcctgagatgcggttcgtggcgccgaaaacagcggaccagcaggccaaggcggtgctgttccgcggccgtgagcggcttgtccatcagcgcacggaactggtgaacgcgctgcgggccgtcctctacgaatacgggcacgtgtttcccgtcggtttctgccacgtgaagcgcatcgcggctgtgttggaggatcctcgctgcgacctgcccgcccttgtcatcgcggagtgccaggacgtgctggcgcagattgctgagaaaacagagaggatcgaagcgaagactaaagccctgaaggcgctcgcggccgagacgaataccgcacggcggctgcagacgatgccgggtgtcggcccccttacggctctggcggtcgaggccttcgcgccagacatggcgcagttcaaatccggtcgggattttgccgcttggctggggctggtgccgcgccagcactcgaccggcggcaaggcgcggctgggacgaatatccaaggccggccagtccgacatccggcggctattgatcatcggggcgatgacgcggatcatgggtcgcgcgcgcgacagggtgtcggccgagagctggatcgggcaaaagctcgcgagcaagccgaagatgctgatcgggatcgcgctggccaacaagatggcccgccaaatctgggcgatgctgacgaagaacgaagattatcgggatccggcgctggcgacggcatgaccaccgtgtcgtgaccagccagcgacggtgccaagggggagtgtgagaagccgatgacctgaatgggcgcaacgatcgaacagatcgggatgaggaaaaccagtatccgtcttggagcttaaaactcgcgatcaagttttggacctcatccgcagatcaccatatcggcccgcggcttctgaaatcgccgcacatgaaggcctgaaagaagaccgcactcgatcacacgccaatacggttaaaagcctcttgcatcgcgggcggcaaccaaaga

SEQ ID NO: 8790 - DNA, 1379 bp, unidentified
  source 1..1379: mol_type = unassigned DNA; note = element_dc8f0b6
  misc_feature 1: note = core
  misc_feature 2..86: note = LE
  misc_feature 87..1112: note = CDS
  misc_feature 1113..1379: note = RE
  misc_feature 1144..1377: note = bridgeRNA
taatggaatggtccacctctcccataacggcttcaaatgagccatgatgtaaatatcaaacaaacatcagaagagagaggcagaccatgaagcataataacgcaaaaaaagcagccgtagtattaggcattgatctagcaaaaagtagttttcatcttcatggagtggatgagcatgaaaatgttgttttaactaaaaagctaacacgcactaagctttatgcatttatagcgcaaatgcctgtttgcctcattggtatagaagcttgtggtggtgctaattattggaaacgggtttttgagcgctatggtcatacggtaaaaatgatgtcacctcaattcgttaagccctatgtgaaatcgaataagaacgatgcgattgatgctgaagcaatatgtgaagcggtacaaaggcccaatatgcgatttgctccatcaaaaacagttgagcagcaagatattcaaagtttacatcgtatccgcagccagcttgttgccagaaggacagctcaagctaatcaaattcgaggcctgcttatggagtacggcattatcatacctaaaggcatatcttatgtgcgtaaagaaataccaggtattctggaaaacgctgaaaatgaactaacgctattatttagagcgttgctgaaagatctatacgatgagatggtgcacttagatgagcgcgttgaacgtttggaagatgagctaaaaataacctgtcgaaacaatgctgattgtcagcgtttattaaccattcctggcatcggtttactgagcgcaaccgcccttattgcagccattggtgatatacgtgtttttaaaaatggacgagaattagccgcctggttagggttagtgccacgacaacatagtaccggtggtaagcccactttactcggtatcagtaaacgcggtgatgcctatttaagaacgttattaattcacggtggccgagccattgtaagagtggctgacaaatatcaggataaacgaagtgaatggataggtaagctagaacagcgacgcggtcataatattacggctgtcgcggttgccgcgcgtattgcttgggcattattaaccagacaaagccattatcaggttgtctaatttgactgcaaaataaaatccaacaagcgaaaaaatcaatgaattgcgaagatgaaagataaatgatggcataaaaggtaacacctgtgcatccaccaatctgaacgggacaagggctagtaaaagccgtactactgataagatggatgcacgcaaattccatcgggccagagactggaatacatctcataaaaaggccggatatatgggagcaaaactttttagctacattgttattttatcttgcaatacgaggtggcccatata

SEQ ID NO: 8791 - DNA, 1623 bp, unidentified
  source 1..1623: mol_type = unassigned DNA; note = element_dc8fcb4
  misc_feature 1..2: note = core
  misc_feature 3..276: note = LE
  misc_feature 277..1482: note = CDS
  misc_feature 1483..1623: note = RE
  misc_feature 14..296: note = bridgeRNA
ctcctacaatataaattaaggtgatgggcacggtagccagccgtgtctttttccttttcaatgccgaagctgttagaatagaaaggaatggtctgacaaataattccatgaaccaatacgttcgtaaaggagtcagtcagccgcctttctcattcgcagcattcgatttgcgcaggttgttccgtcggtattccgatgcgtgcgtgtcactcaggagattgaacaggcgttgagtaaaaagcggtatgccatatcattatctcaggaggatttattatgaactcggtcagaattgatgtttcaaaaggaaaatctacggttgcagccttgcgccctatgggtgaagtagctttgcctcccactgaatatcttcacacggagcttgagcttgaaaagctggcttacactattcttgctctcggtgaagacacaagagtcgttatggaggctacaggtcgttatcacaagcctgttgccaaagcgcttcacgaatatgggatttatgtatgtgttctgaatcccattttaatccaccagagcggtggaggttcggttataaaggtcaagtccgataaaaaggacgccattaaaatcgctaaatacggacttgacaattgggttgacctgagagaatacacacctgtggatgctctcagacaacagttaaagctattcagcagacaatacaatctttatatgaagaactctgttgccttgtcgaataaccttatctctttaactgacaagttttttcctggtgttaacgagctgttctcaagtcccgaaaaagctgacggacaccggaaatgggttgattttgtcgaaactttctggcattgcgactgtatttctcttgtcagcgaaaaagcatttattgagcgttaccgtaaatggtgtaaacgtaagggttatcatttcagtgttgagaaagcttttaatttgtacgcatcaagttgcggtaacaccgtaacactttcaaagaatgatactacaaaacggctgattacaaccgcagctaaacagcttacatctttcaactgtcagcttgctgttttcaggaatgaaatgatttctattgccagacagcttcccgaatttgatactgttttaaatatgttcggggtcggggaaatttccgctgttaatctgattgcagaaatcggcgatgtcaggcgttttccaaacagaaattcattagtcggctttgcaggtgttgatccgtgcgttgaccaatccggcaagcatttttctaaaagcaaccctacaacaaaacgtggttctgctattctgcgaaaaactctttttcaggttatcagcacttacgtgaagcgttcgcctgtggatgagccagtttatcagtttatttgcaaaaagcgtgccgagggtaaaccctactatgtttgcactactgccgccgctaacaaatttcttcgcatttactacgctcgtgttaaagagtgtcttaatgactatctcttttaactgaaaataattgaatcttgttttcttttatcaggctgaaaatttttactgtattttcggcttgctttgctataccctttttctgctatcaaaaaaatttgaagtttttttcattttagggcttgacttttatttgcagga

SEQ ID NO: 8792 - DNA, 1411 bp, unidentified
  source 1..1411: mol_type = unassigned DNA; note = element_dc92bc8
  misc_feature 1: note = core
  misc_feature 2..92: note = LE
  misc_feature 93..1133: note = CDS
  misc_feature 1134..1411: note = RE
  misc_feature 1182..1406: note = bridgeRNA
taatggaatggacgcccacttcctaacacggcatttaagtgccaaagtagtggtggcattactaccactagacatagaaaggggcatccgaaatgaagattacgacaattggcattgatttggcaaaggtagtttttcagattcacggtgtggatgagcgcggcaaagtggcgttgcgcaagcaactgaagcgtgccgagatgtctggctacttcgccaacctggagccgtgcctgatcggcatggaagcatgcggcagcgcccatcactgggcgaggaagctggaaggatatgggcacacggtcaagttgatggcccctcagttcgtcaagccctatgtcaaaacgaacaagaacgatatggccgatgcggaagcgatctgtgaagcggtcagtagaccgaacatgcgcttcgtcgccctgaagaatgtcgaacaacaagcgattctgtctgtgcatcgcgcgcgtcagggattcgtcaaagcccgaacggcgcagggcaaccagatacggggcttgctctccgagtttgggatcatcattgcgcaaggaataggcgccattgcaaaacgcgtcccggagattctggaagacggcgagaacggattgccaggcacgatgcgcaacctgatcgaacggctaacggagaacctgaaagagatggatcgccaggccaaagaacttgaagcgcaaatacaactgtggcaccgcgacaatgcagcgagccgcaagctggcagaaataccggggctggggccgatcacggcgagcgcgatcgtggcgaccgtgggcgatgcgcgggaattcaagaatggccgccagttggctgcgtggatgggactggtacccaaacagaattccagtggcggcaagcagaatctgctgggcatcagcaaacggggcgacacctacctgcgcaccttgatgatccacggcgcaagatcggtcgttcgggttgccgagaagaaagcggaaccgggaagctggatgagaaagttgatggatcgtcgcaacaagaacgtggcagcggttgcgctggcgaacaagaatgcccggatcgtgtgggcgctgctggcccatgatcgaatgttccgcctcgattacattccggcagccacggctgccggaatgtaatcgaggcggttgagtaaaaccagttattaacgagttgaaggagcaataccaccgattgcataggcaatcatgaagtgatggcgagactggtcagaccgtgagtggcaaaacctacgaggtccacagtgcgtgaagcacgctatagtgatcaggagctactcagcgtattccatcagggatagaggcgattgcctcattaaaaatccggatgtatggctgcaatctttaccttctcaaaatcatcgattgaaagcttggcaaaagtgggcgtccatgta

SEQ ID NO: 8793 - DNA, 1496 bp, unidentified
  source 1..1496: mol_type = unassigned DNA; note = element_dc9d4f8
  misc_feature 1..4: note = core
  misc_feature 5..241: note = LE
  misc_feature 242..1480: note = CDS
  misc_feature 1481..1496: note = RE
gtcactagggcaccatccttagcaggggcaccgatacggtgctctttgttgggactcggcgggagccggggtgacggcctggttcggtcgcccgtgaagggccaccatgacactgccgcccccggctttcgcggggctgcagaccggcaacagagggatgcgccgcagagcgccagttagtgaccatccgggagccagcctcgccgccgccgggccgtcgctgccaccttgaggagtcgagttgtcgcttgcgctgcctgaagccctgttcttcaccgggatcgactgggccgccgccacccacgccgtgtgcgtgatggacgcggccgggaagatcatgactgagttcacgatcgagcactccgctgacgggatcgccgcgctgatccgccgcctggcccgctacggcgatccggccgatatgccggcggggatcgagcggccgaacgggcagctggtggatctgctgctggaggccgggcacccggtggtcccggtcagcccgaacgcgatcaaggcctggcgggagggcgaggtgctgtccggagccaagtccgacgccggggacgccgcggtgatcgccgagtacctgcggctgcgccagcaccgcctgagggtcgccgccccctactccgaccagaccaaggcgctgcgcactctcatgcgcacccgcgatgacgtcgtggtgatgcgggtcgcggccaccaatcagctctcggcgctgctggatgcgcactggcccggcgccagggccatcttcgccgacgtcgagtcgcccatcagcctggcgttcctcacccgttacccgaccccggccgcagcccgccacctcggcgagaagcgcatcaccgcgttctgcgccagccagggctactccggcaagcggccagccgccgtgctgctcgcgcgcctgcgctccgccccggccggaacaaccggcccggcccttaccgtgacgctgcgggacgccgtcctggccctcgtcgccgtgctgacggcgctgaacaccgcagtcaaggacctcgaccgttccgccgccgcccggctcggggagcatccggacggcgagatcttcacgtcgctgccaaggtcgggtcaggtcaacgccgcccagatgctcgccgagtggggcgactgccgccaagcctacgacggacccgacgccgtcgccgccctggccgggtgcacccccgtcaccaaacagtccggcaagcaccgcgacgtgaccttccgctgggcctgcaacaagcggttccgccaggcgatgaccaccttcgccggcaacagccgccacgccagcccctgggccgcgaaaatctacgacgacgcccgcgccgcaggcaaagaccacccccacgccgtccgcatcctcgcccgcgcctggatccgcgtgatctggccctgctggctcaaccacacgccctgcgaccccgcccggcacggcgcagccgcagccctcgcagaaccaatcgctgcatgaggttgacacagggggt

SEQ ID NO: 8794 - DNA, 1427 bp, unidentified
  source 1..1427: mol_type = unassigned DNA; note = element_dc9eee4
  misc_feature 1..4: note = core
  misc_feature 5..201: note = LE
  misc_feature 202..1413: note = CDS
  misc_feature 1414..1427: note = RE
  misc_feature 1..188: note = bridgeRNA
ttccgtaagactgtggacggcctcaggggggtcgggtgtggctgaggtcgccttgcgctctggtcgctgactgggaatgtccgcccgatccttcggggtgccctggctgctgattgagatgtgcgctcggtcgctggttacggatgcgtcagcggggtgtccacggggtcgttgtcagctgatcggagcgaggaaagggacatgggcgtggtgccagtttggaacggggcttgggttggggtcgacatcgggaagaggcatcactgggcgtgcgcgctcgacgctgatggcacgacgttgctgtcggtcaagatcgcgaacgacgaggccgagatcctcgcgctcatcgcgacagtgcgcgagctggcggcccaggccgtgtgggcggtcgacatcatcggtgcgccatccgcactgatgttggcgttgctggcccagacgggtcagtcggtgcggtacgtctccgggcgggtggtcgcggcgatgagcagtgcctataccggtgagggcaagacggacgccaaggacgccttcgtaatcgccgagacagcccgcatccgtcgcgaccttgccgtcatcgacggcgacacggacctggtccgcgagctggccgtgctgaccgggcaccgcaatgatctgattgccgaccgcgtgcggatgctcaaccggctgcgggacctgatgaccagcgtctttcccagcttggagcgagagttcgactacgcatcctgcaagggagcactggtgctgctgaccggctactcgagcccgacgcggatccgccgcctcggccaaacacggctgaccgggtggctgcgccaacgcaaggtgcgcaacgcggccgatgtcgccgccagagccgtcacagccgcccgtgctcaagtcactgtgctccccggacaagacatcgctgcgagcatcatcgccgagctcgccaccaacgtcctcgccctcgatgagcgcctcaagagcctcgatgcccagatcgcggggacgttcgagcggcacccgcaggccgcgatcatccaatcgatgcccggcttcggtccgcttctcggcgcttcgcttctcgtcggcgctggtgcccttcatgccttccccagcgctggtcacctcgccgccgcggcagggctggtgccggtgcccaacgattccggtcgccgtgccggcaacctgcaccggccgaagcgatacagccgtccgctgcgccatgtcctctacctgtcggcacaaaccagcatgatgcgcgctgggccgaaccgggactactacctcaagaaacgcgagcacggccgcacccacagccaagccgtcatcgccctcgcccgccgccgcgtcgacgtcctctgggcactgctacgcgacagccgaacctggacaccagcaccacccgccctcgctcaggcggcttgacaacaccattgaga

SEQ ID NO: 8795 - DNA, 1372 bp, unidentified
  source 1..1372: mol_type = unassigned DNA; note = element_dca3204
  misc_feature 1..2: note = core
  misc_feature 3..75: note = LE
  misc_feature 76..1110: note = CDS
  misc_feature 1111..1372: note = RE
  misc_feature 1083..1360: note = bridgeRNA
tgatggggtggacgccccccgacggcatctatgtgccgaagtggaggtgttgatcaccacttgagggaggcgtccgtgttggaagttagcacagtcggtctggatatcgccaaaagtgtttttcatgcgcatggggctgacgagcgcggtgcgacggtgttcagtcgcaagctgacgcggggcaagctgctcgagttctttgcggggcagccacgatgcgtggtggcgctggaggcatgtggcggcgcgcatcactgggcgcgcgagttgcaggcgatgggtcacgaagtgcggctgatcccgccggcgtacgtgaagccgtttgtaaagcggcacaagaatgacgcgatagacgcggaggcgatctgcgaggcagcgcagcggcccggcatgcgcttcgtggcggtgaagtgtgaagagcagcaggcggcagggctggtgttccgcacgcgcgacctggttgtgcggcagcggactcagctcatcaatgcgatccgcggtcacctgacggaatatggctgggtggcaccgcgcggcaccgcgcacatgaccttgctcgcggatatgctcgacgacgaggagatggcgtcgaccttgcctgcggcggcactgccgatgttcaggctcatggtcgacctgctggccgagctcgacaagcgcgttgccacgctcgatcgcgagatcgcacgacgtgcaaaggaggacgaggcggcgaggcggctgatgactattcccggcatcggcccgatcgccgctacggcaatcctcgcgctcgctccgcccgttgagaccttccgcaagagccgcgactttgccgcctggctcgggcttgcgccacgacagcactcgaccggcggcaagcagcggctgggcagcatctcaaagatgggagagcgcacgataaggcggctgctcatcatcggcggcagctcggtggtgcggcaggcatgtcgccacggcgcgccagcaggctcctggctggagcggatgctcgcacgcaaacctcgcatgctcgtctcggtggcgctcgccaacaagatggcgcgcatggtctgggcgttgctcacgagggaagaggattacagggctccggcagtggcagcggcataaagccgcggcggcagccagaggcgtcggggacgtaggcggatcgaaggagggtatggcacaacagtcagcgagacggggccggaagaaccagtgaatggcagagcgctacccaagcgcgattagctgaaatggatccggcccgcgaactcccatactggcccgcagctatggcgctgctcatcgaggccggacagatgacagcatccgactacgtgccaacatacccgaatttaccgcttgcatccgaaggggcgtccacaga

SEQ ID NO: 8796 - DNA, 1218 bp, unidentified
  source 1..1218: mol_type = unassigned DNA; note = element_dca96ce
  misc_feature 1..2: note = core
  misc_feature 3..207: note = LE
  misc_feature 208..1215: note = CDS
  misc_feature 1216..1218: note = RE
  misc_feature 42..197: note = bridgeRNA
taccttaggtttgaattattatttttaaatctaaaaaagtcatataattgaaaacctgtcagcgatccagcgatagccttagtcatagaactatcccgatatttggaactgacaggtttaaagaaccaagacctgtataagatatcagtctcgaccttttaaggttcttaggtaaaggttcttaatttaaaaacttaaaccaaagctatgaaatccaagtcatttataggaatcgatgtgagcaaattatcacttgatatctgtttgatcaccgaagagggcgaaattaaaaattttaaggccaacaacaccgttgggcatctaaaaaagttgttcaagctgatcgcccaagatgtggatgttgaagaaaccctggtctgtgccgaatacaccggccattactcgaacatattaaaaagctattgccttgacaatggggttgcactgtggttggaaagcggtgcggagataaagttgcgctctggggtccaaaggtgtaaatcggataaaatcgacgcgcagcggatagccgagtacgctatgaggcactctgacaaggccctccttcagactttggaggatgaagtcatttcggagagcaaactattattatccgaaagaaaactctatgttggtgaaagggcaaagtacaggacacagttaaaggacctgggaggttttgttgaaaagtctatttttaaagagaggagcaagcggctcaaaagacacgtcgccctactgaccaagtcgatagaagagatcgaccggacaataaaggaattgttcagtacagaaatactattggcacaccaaagcaagatccttacctctattccaggtgtgggggaccaagtggccatacataccattgtggccacaaatggatttacaaagttcaaaaatgggaggaaatttgcctgccacgtcggtgtagcccccttttccttccattcaggaacaagtcaaagatcaaggaacaaagtatcccacagggccaataaagagcttaagaccctcttccatatggccgctctgtccgcaataaaaatgaagggggagttccatgattattttaaaagaaaagtagctgagggaaaaaataaaatgacggtaatcaatgcggtacgggccaaaataatcaacaggatctttactttgatcaaagaaaacagaaaatatgaaaaaaactataatttacccttggtcaatccataagaa

SEQ ID NO: 8797 - DNA, 1384 bp, unidentified
  source 1..1384: mol_type = unassigned DNA; note = element_dcb39ee
  misc_feature 1..3: note = core
  misc_feature 4..86: note = LE
  misc_feature 87..1115: note = CDS
  misc_feature 1116..1384: note = RE
  misc_feature 1089..1372: note = bridgeRNA
atgatggagtggatgccccctcctgacggcatcgcgatgtgccaaagtggtgatgttttcccatcccacgaacggagagagcatccatggaaaaggttagcatcatcggtcttgatcttgcaaagcggtccttccaggcgcatggcgccctcgccgacggctgcgtggcgttccgcaagaagctttcccgagaaaaagttctgggtttctttgccgagcagccgcgctgcatcgtcgccatggaggcctgcgggagcgcgcgccactgggggcgagccatccgcgacctcggccacgaggttcgattgatcccaccaatatacgtcaagcccttcgtcaagcgccaaaagaacgacgcggctgattcggaagcgattgccgaggcggcgagccggccgacgatgcgctttgttgcggtcaagaccgaggaacagcaggcgcgcgccatgcttttccggacgcgagatcttttggtccggcagcgcacgcaactgactaacgcgctccgcggtcatttgtcggagcacggcgtcgtcgccgcgcagggaccggcgaatgtgaaagttcttaaagaggcggtcgaggatcaaccgacatcgcttccgcttctcgtcgtggaactggcgcgtgtcttccttgatcagatcgaagggctgtcgaaaaggatctccgaacttgagaaggtgacggttcaccaagccgcatgcggagaaacgacacggcgtctgcggacgatgccgggcgtcggcccaatcacggccctggcgatcgcaaccttcgcgccgccgatggatgtcttcaaacgaggtcgcgatttcgccgcctggctcgggcttgtcccccggcaacattcgaccggaggcaaacaggttcttgggaaaatctcgaagatgggccagcgcgacattcgtcgcctgctgatcatcggcgcgatggccgtcgttcgctcggcatcgcggaagggtgcgccggagggaagctggctacagcgcatgttggcgcgcaaaccaaagatgctggtggcgattgcgctcgccaacaaaatggcgcgctcagtctgggccatgctggcgaagggagaagatttccgaattcctgtggttgcggcgtcctgatcgatgatcggacgccgtggcttgggaacgtcaggcgtgtgacgaggtcgacgaacggtaaggtcaaatgatcggtcagatccggacccggaaacgcaattaatgccatagagttcaaagctcgttcgaatgatttgcgcctggtccgcgtatctccataccggccagcggccatatcgggccgcatcaaaaggcctgatacatgaccgcacccgatcacgtggtcgagccgctcaaaaaacttcttgcgcgaacgggggcatccatac

SEQ ID NO: 8798 - DNA, 1610 bp, unidentified
  source 1..1610: mol_type = unassigned DNA; note = element_dcba8b7
  misc_feature 1..2: note = core
  misc_feature 3..280: note = LE
  misc_feature 281..1492: note = CDS
  misc_feature 1493..1610: note = RE
  misc_feature 14..300: note = bridgeRNA
ctactacaatataaatatggttaatatctcctacatccagtaggaaattacccatcttgttgcttaagctgttagaatgataagagcaatcggtatatcgtctccttttttggactttgcgtccgtaaaaaagactgataaccagctcctcattcgcagcgttcgttttatgcaggttgaatcgccttcggtgcattcgtgtcacaccccagtagattgaataggcaatgagtaaaactggttctgatccattgcaatttttctacaaggagtgttaattatgaatgcagtaggtattgatgtttctaaaggcaaaagcatggtcgctattcttcgcccttatggggaactcgttgaagctcccttcgaagtaaagcacacatccagtgagattcagtccctgattcagaccgttcaatccattgacggcgagtcacgcatcgttatggaacatacaggccgttactacgagcctctattctgtcaacttgccggggccggtctctttgtcactgccgtgaatcccaaattgattaaggatttcggcacgaactcccttcgcaaggtgaagtcggacaaggcggatgccatcaaaatcgcaaaatatgctcttgacagctggtccgacttgaaacagtatagtgttatggacgaaatcagaaaacagcttaaaaccatgaatcgccagctcgacttctacatgaagcataagacttccatgaagaacaacttcatcggccttctcgatcagacattccctggcgtaaacaactacttcagcagtccagctcgcgaagacgggagccagaaatgggtggattttgccacaacatactggcatgtggattgcgtccgaaacatgtcccgtagtgctttcatcagccattatcaaaactggtgcaagcgcaaggagtacaacttcagccaatcaaaagccgaagaaatctacgaagcagcaaaggaactggttccggtactccctaaggacgacgtgacgaaattcatcgtgaaacaggctgccggtcagcttgcagatgcgtctgaaagggttgcacaattgaaggtgaagatggatgaaactgcatccaaacttccggaatatcccattgtcatggcaatgtacggcgtaggttcttctcttggtccacagttgatggccgagatcggagatgtatcccgcttcacccacaagggtgctctgactgcatttgctggcgtagatcccggcgtaaacgagtccggtacctatgagcaaaagagtgtgcctgtaagcaagcgtggatctgccccgcttcgaaaagcattgtttcaggtcatggactgcctcatcaagcatatgccgcaggatgacccggtctacctctttatggacaagaagcgcacggagggcaagccctactatgtctacatgaccgccggggcgaacaaatttttgcgcatctactatggtcgagtaaaagagtatttgctctctctaaagcagcccgaataatttgaatattttcccaatagaccggcaccggtgtggtggtctgtttttcgtgcctaaaatccaaaccgcataaaattttcaatttttataaatttagccttgactttttatttgcagg

SEQ ID NO: 8799 - DNA, 1333 bp, unidentified
  source 1..1333: mol_type = unassigned DNA; note = element_dcbcbbb
  misc_feature 1..2: note = core
  misc_feature 3..257: note = LE
  misc_feature 258..1319: note = CDS
  misc_feature 1320..1333: note = RE
ccgacttatcttcgtgtcatcggtccgtggtcgggttagctgcccgtagcgttccgtagcagaccggaagggctgactcgtgtaattcctgtcgcccgctcgttgggttgaccctactggggtgtgtccgccctcccggtctgcgttcgcggagtgactgaagagaggcgtgaccccaagctgctgtgagaggtgcttgaagtcggattgtcctccgcggattccccaatccggagtagagaagggaaccgtcttccatgatcgtcatcggcatcgatccccacaagtccagccacaccgccaccgcggtcgacccagtcaccaacaccgatctcggctcgatccgcatcgacgccacccgcaccggctacaaggtgctgatctcttgggccaagtcctggccgacgcgcaaatgggcggtcgagaacgccgagggacttggccaccacctggcgcagtggctgctggtgctcggcgaactcgttttcgacgtcccgaccacctccaccgcccggatccgggaactttcccgcggcggtcgacggaagaacgaccgcatcgacgccgcagcagcggcgtgtgtcgccgtcctgcagggcgacgcccgcccgctcgaccgggagggcccgactgatatcctggcgctgctcgacgagcgtcgaacgaatatgtccaacagtcggactcgtctcgtcaatcagttgcacgcgttgctgcgacagctgtttgccggcggtgcaccgacctcgttgaccgcggcctcggccaccaccctgctgcgaggctttcgtgcccgcagcgaagtcgaccgaactcgcgtcggcctgtgccgagatctgatcgccgacatccgccgcctcgacgaccagctcgccgcgaacgagaagcacatgtcccaggcgctcgacaagcacggcacccgcctacgcgaaatcgacgggatcggaccagtgaccgccacccgactgatcggacgcacgggacgcgccagccgattcccgactgccgccgcctacgccaactacaacggcacggcaccggtgcagattgccagcgccgacaccgaccgccaccgcctctcccgctacggcgaccgacaactcaacagcgcgctctacaccgtcgccatggtccagacccggatgcccgccagcgccggccgcgcgtactacgacaagaaaatcgacgaaggcaagagcccccgagccgcaacccgcagcctgaaacggcacctctccgatcacgtctggcgcaccatactcgccgacgagaaacgcagccaccggcaacgcgagagggaacgcgcaagcgcggcttgacaaatagagaggca

SEQ ID NO: 8800 - DNA, 1353 bp, unidentified
  source 1..1353: mol_type = unassigned DNA; note = element_dccaeb5
  misc_feature 1..2: note = core
  misc_feature 3..80: note = LE
  misc_feature 81..1103: note = CDS
  misc_feature 1104..1353: note = RE
  misc_feature 1107..1343: note = bridgeRNA
ttatggatggcccgccccttacccaagccgatccgctgtatgctggcggtatcgctcagacaaggggaaggagtgaagccatgaagattgcggtgcttggaatcgacctgggcaaaaacagctgcagcctggtcggtctggatcagaatggtcaggtcgtcgtgcggcggcgtatgcaccgggagacggtgatcgcttttgcgtccagactgccggcctgtatcgtcgccatggaagcctgctgtggcgcgcatcatatggggcgctcactcgccgcgcaggggcacacggttcgactgatgtcaccggaatacgtgcgcccctatgtcaaagcccagaagaacgatgaccgtgatgctgaagccatcgcagaagccgccacacgcccgaccatgcgctttgtcgaattgaagtcagaggatcagctcgacatgcagacccttcaccgcgtgcgcgaccgcctcgttgcggagcgaacctccctgatgaaccagatcaggagtgttcttctggaacgaggatacgttgtgccgcaggggcgggcaaagctcgccggccggctagccgagatcgtagccgacccggcatgcatgctcagtcttcgcatacgccacctcatcgccgagatgcgggagcggtgggaattgcttgatcagcggattacagctcttgacgacgagttccaccagcactgccgcagcaatgatcaggcccggcggttaacgagcatcccgggcattggctcgctgaatgccacagccctcgtagccgctgtcggggatgcccatactttcgcccggggccgcgacctggctgcttggcttggtctggttccacgccaagccaccacgggtggcaagcctcggcttctggggatcagcaaacgaggcagcaagtacctgcgcaagatgctgattcagggggcgcgagcggccttgccaacactccgcaatacgaacacgcgacttggtgtctggctgagggggctgcttgggcgagcgcatcccaatatcgccgtagtggcacttgcggcgaaaatggcccggattgtctgggcgctcctgcgtcacgagcgctcgtaccaagccgctgccgcggcttaaggaggaactggctggcgcggaaatcgctggctgacgaagtctgtgggtggtgagaggaagatggcctgacagtcgaccggtggcctggaaccctatggcgaaaaatggcactcgatgccggcccctttatgaggaccaggacgcgcggatctccatcttggccaacagcgcagctggaaggccggatacgtttatgcagactgctcaagccagccgagacaaaccacttgccgacggggcgggccatacg

SEQ ID NO: 8801 - DNA, 1418 bp, unidentified
  source 1..1418: mol_type = unassigned DNA; note = element_dcd294e
  misc_feature 1: note = core
  misc_feature 2..61: note = LE
  misc_feature 62..1090: note = CDS
  misc_feature 1091..1418: note = RE
  misc_feature 1187..1409: note = bridgeRNA
tactggaatggtccgccgctagtcccagggacggactatcttgtttggcaggaggctcaccatggatatcgcaaccatcggcatcgatctgagtaagacgacatttcacgtcattggattgaacgcgcggggcgaaatcgtgcttcgcagaaaactctcccgtaagcagttgctgctctacactgccaaccggcagcagatgctgatcggcatggaagcctgcgggggagcacattatctcggccgcgcactgcgagagcaggggcatgatgtgcggctgatgccggcccagtatgtgaagccatacgtcaagaccaataagaacgactacctcgacgccgaagcgattgccgaagccgttcagcgaccgacgatgcggtttgtgcccatcaagactgatgagcaactggatttgcaggccctgcaccgggtccgcgatcgatgggtggcaaggaggacggcggtgatgaaccagatgcgtgggtttctcctcgaacgcggcgtcgtgatccgcaaaggaccttcgtatctcgtagcacaagtgcaagagattcttgtgggcggaggtactttcttctctgcaaggttgcggggattacttcgggagctgaagcaggaatgggatgaactggacaaacgcatagagcagaccaatgccgaacttcagcgcatcgcaaaacaggatgatgcttgccaccggctaatggaagtgcctggtgtcggtcccctggtttcgacggcgctggttgctgcgatcggcaacggcgtcaccttccgaaaaggaagagacctctccgcctggctggggctggttccccgtcagcactccaccgggggcaagccaaagctgctgggtatcagcaaacatggaaacgaatatcttcggcgcatgttcctgcacggcgctcgatccgtggtgatgcaaatgcaacgaaagccatcggccttggcaacgtggctcacggacttaactcagcgaactcaccggaatgtcgccattgttgctctggccaacaagatggcacgcatcgcgtgggcaattttgagcaagggcacccattactgcgcacctgctctggcaacagtttgaaaagcagggctggataagacgcccgctgatgcgggcttggaaatcgcatccgcgattcccactttcccaaccctgctactgcggcaaggttttataaccccatcgggtttgcgagacggatcaatgagtgagtgaatggtctcaaccggcgttgctcaagcctgtgtgcggaagagaactttctgaagttcgatccactatttagaccagcggcgtgcggactccattatggccaggagcattgctccaaaaacaggccggatacattcgagcagaccaatcccacccacccagagattttgcttgcaatctggcggcggaccataca

SEQ ID NO: 8802 - DNA, 1498 bp, unidentified
  source 1..1498: mol_type = unassigned DNA; note = element_dcd62dc
  misc_feature 1..2: note = core
  misc_feature 3..201: note = LE
  misc_feature 202..1476: note = CDS
  misc_feature 1477..1498: note = RE
  misc_feature 6..201: note = bridgeRNA
ctgatggctttaccctcctgagtcatggggtcgcccctgggaatgcttcggccgcttgtcccttgaggactgatgtgagacggcatcccaggggcagacccttggaggcccgacgcccacaagggtgtcgtcctgtgaggactggtccatcagcacggcgccgcgcctccgtccggatcggagtcgagcaaaggaggcatggtgcttggggttgggatcgactgggcggaggcgttccaccttgtcgccttgggtcggcctggcgaggaggtgatccagatccgccgggtcgagcacaccccagccgcggtcgccgggctgctggcccacatcgccaccctggaacccgacccggccgaggtccgcgtcgtgctcgagacccgtcacggcgccttggtcgaacggctggttgacaccgggttcacggtcctgccggtcaacccggacctggtcgcacggcgccgagggccggcccgcaagaaggacgacgccgaggatgcccgcatctgctgtgtgctggcccttgaccgctacacgtcgttgcggccgctcatcccccatggggagctggccgccgagctcagggcgatcgcccgcgacgacgagcgcgccgcccgagaccagcggcggctgctcaaccggctgcgagccgacctgctggccaccttcccggccgcgctccaggtggccggtgatgacctgggcgccccgaccatcctcaagctgctggagcgctggccgacccaccagaccctggcgaccgcgtcgtgggaggaactgctggacttcgcccgcgccgctcaccacggctggcccgagcgcttcgccgaccaggtcgcccaggcactggccgccgaccacttcaccccacgggactacctggtccgcgccaaggccgacaccatccgcctggccgctgtccagctgctggccatcgggacccagcgtcgcgcctgggagcgcaggatgggagcgctgttgctgggcgccccccggagaggacgggccaacgccccccgaccagaggagctcgaccaggggcaggcgttccctggcggcaaggtctacctgagctttcccggcctcggtgaccgcctcgccgccagggtcgccggcgagatcggcgaccatcccaaccaattcgggtcgccgaacgccctggcatgttatgccggcaaggctccggtcacccgccgctcgggcaagagcgagctggtcgtcgcctgccggctggcctgcaaccgctacctggccggcgccgtccagcagtgggcgttctgctcgctgcaggaatcggtgtgggccagggagttctacgacgcccagcgcacccgcggcaagacccaccaggccgccctgcgggccctcggcaaccgctggctggagatcctctggcactgtctcatgcgcggccagctgtacgacgaacccctccacatcgccaaccgtaaccgcgccctcggacgggccgcctgagcaggtggttgacaaagggtgt

SEQ ID NO: 8803 - DNA, 1340 bp, unidentified
  source 1..1340: mol_type = unassigned DNA; note = element_dd00e55
  misc_feature 1..2: note = core
  misc_feature 3..79: note = LE
  misc_feature 80..1102: note = CDS
  misc_feature 1103..1340: note = RE
  misc_feature 1112..1327: note = bridgeRNA
tgatgggatggacgcctcctgttcgggcgatgtttgcgccataatggaagttgcagaacttcgtcaacaggaggcgactatgacatatattacgacaattgagctggatctggcaaagacagtgtttcaggttcacggtgccgataaggatggcaggccggtgctgcgcaggaaactacgccggggacaggtactcggcttttttgccgggatctcctcgtgccgggtcgggctggaggcctgcggcagtgcgcattactgggcgcgtgagttgcaggcacttgatcatgatgtatgcctgattccgccgcaatatgtaaaaccatttgtgaagaccaacaagaacgatgcctgtgatgcagaggcgatctgtgaggcgctgctgcgaccgacgatgcacttcgccccgatcaagagcgctgagcagcaatccgtactggtgctacaccaggcaagagaacttttggtgcgccagcgcaccatgctgatcaacgcgcttcggggtcattgcgcggagttcgggctgatctctgcacaaggcgcctccaaagtgaccgacctgatacacatcatccatgatcgagaggatacccgtcttcccgatctggcacgcgaagctctcggtcttttggttgagcaactcactacagtccgggcccaggtcaaggcattggaagcaaggcttctagcttggcatcggttaaacgaggcaagtcgacgactggaaacgatccccggggttggcgtgatcaccgcaacggccctggtagcgacgatcggtgacggcagccagttccactcgggacggcaactctcagcctggctcggtcttgttccccggcaaccatcgagcggcggcaagaccaggctgggacgaatatcaaaacggggagatgggtatatccggcgtctgcttgtacacggcgcccgaactgtgctgcgttggcgccgcgcgaggccggaaacaggtaccgggtggaccgatcaacttctggtccgtcgaccaaccaatgtcgtccttgttgcgatggctaacaagacggcgcgggtcgcctgggcactgctcaggcatcagcgcgattatcaggcggtatcggcgtaacgggcaggaccagattgcgagggtactcacgatgtgatggcgaaacagggtctaccgggagcgatcaaacccgaggcattgtctgagttcaaagctcgatcttctgactgggcgtcgctcctccggattccatcagggccagcggtcaaagcaccgcaacaaaaggccggatacatgactgcaaacccgtcccgccaccaaatcagaaatctcttgtatttcaggagccgtccataca

SEQ ID NO: 8804 - DNA, 1394 bp, unidentified
  source 1..1394: mol_type = unassigned DNA; note = element_dd1615e
  misc_feature 1: note = core
  misc_feature 2..115: note = LE
  misc_feature 116..1000: note = CDS
  misc_feature 1001..1394: note = RE
  misc_feature 1160..1392: note = bridgeRNA
taatggtatgaaccctctccacttcacttacggcttcaaatgagccaatacagggttgattaaaacttctatatacagaaagagagagggtcacatcaatactataacaatcggattggatatcgccaaatcaacttttcatttagtttggatgagctctacgggcaaagtgttaaaaagaaaacagctttcacgacaaaaagttgctgactattttgcaaacttagaagcgtgtactgtagtaatggaagcctgtggtagtacgcattattggtcacgtgtgataagtcgttgtggtcatgaagtcaaagccattgcgcctcagttcgttagcgcttatcgcaaaggaaacaaaaatgattataacgatgcagaagcgatagccgaggctgcacaacgacaaaacatgcgttttgtgccgttgaaatcattagagcaacaagatattcaaatgttgcacagaattagagagcggttgattaaaaacagaaccgtattgagtaatcaaattcgtggattactccccgaatatggtttagtgatgcctaaaggcattagtcacctaacagcacatttacctcgttttctagaagatactcccaatgaattgagtaccccagctcgccgttactttcttgggttaagtgaagaacttgatgaaatatccgttcaaataaaatcggttgatagtgaagtgttagggataaataagcagtatgaagtttgtcagcgattaagcaccatgacaggcatagggccggttgtcgctactgctttttatgcaggtattggagacggcaaagcctttaataatggtcgacatgtttcagcttggttggggttagtgctaggacaacattcaacgggaggaaagctaactttcttgggtatttctaaacggggtaatacttacttaagaacacaattaatcaatggagcaagagctgctttgagacattgtgaaaataaaaccgaccaagtaagtgtttgggcaaggtaattgaaagagcgcagcaattttaatagtgctaccgttgctttagccaataaaatggctcgaatggcgtgagcgatgctgcaccaccaagaagattataaatttaaaagcgtagccaatggatagaagaaaatatttttagaaaaagaaagtaaaaaacaaccttgtaacattgctagataatagagattgaagggatacagctcagcactgccctataggaaaccttttaataccacgggctaatataagccgcgaaattgatgaggtgataggagcggaaatccatcagggctagaggcatcaaatgatacttcagctaaaagccgaatatatggctgcaatgcactctatttcaacgatttaaattgtcttgcaatcggagaggatccatata

SEQ ID NO: 8805 - DNA, 1439 bp, unidentified
  source 1..1439: mol_type = unassigned DNA; note = element_dd17a09
  misc_feature 1..4: note = core
  misc_feature 5..204: note = LE
  misc_feature 205..1425: note = CDS
  misc_feature 1426..1439: note = RE
  misc_feature 1..194: note = bridgeRNA
ctccgtaagttgttagtcggcccgggtgggtcggatgtggctgatggtgttttgtccttggtggctccgagggagtggccgtccggctctccggggcgctctggccgctgattgagatccgcgttctggtcgctgtttacggagatgtcggcggggcgttcctcgggctgaccgatggtggccgagaacgaggaggttcggatgatggccgctgaactggaggcagcagggccccgtttgtgggcgggtatcgatgcgggcaagggtcatcactgggtgtgcgtggtcgacggcgccggggagaccgtgtggtcggggaaggtgatcaacgatgagacggtgatcctcgacaccctgggagcggtcgtcgcgctcgggggtgagatcacgtggggcatcgacatcactggtactgcgtccgggctgctgttgacgttgctggccgcgcatgcgcagaccgtccggtacgtgcccgggcgcacggttaaccggatgtctggcgcctatcggggtgaggcgaagaccgatgctcgtgacgcctacgtcatcgccgagaccgtccgccatcgatccgacctggcgccggtggaggttcccgcggagatcgtcgccgagctgcggctgctggtcgcgctgcgcgcggacctcgtcgccgaccgggtgcggctgatcaaccgcctccgggacaccctcaccgggtacttcccgggcctggagcgcgcgttcgatttcggtcgacgcaagggagcgatcgtgctgctgacccgatatcagaccccggacggactgcgccgggcaggtcgcgtccgggtcgcgtcctggctcgcgaaacggaaggtccgctcggcggcggagatcgccgacaccgcgctggacgccgcagacgctcagcacaccaccgtcccagggcagaagatcgccgcgcagatcgtggccgaacacgctcgcgccctgcttgccctggacgcccggatcaccacgatcgacgcccaagtcgatgacacgttccacgcccacccgcaggccgcgatcatcgaatcgatgcccggcatcggcccgatcctcggcgcggaactcatcgtcgcggccggcgacctgagcgcctacgccgacgcgggccggctcgcgtcggctgccggcctggtccccgttccccgggactccggccgccgcaccggcaacatgcaccgcccgaagcgctacaaccggaccctgagacgcgtgttctacctgtccgcgcagaccgcgatcgtccgagacggaccaaaccgcgacttctacctgaagaaacgcgccgaaggcagcaagcacgtctccgcgctcctcgcactcgcccgcagacgagtcgacgtcctctacgcgcttctgcgagacaaccgcacattcacgatcgaggacccagcgaagaccgcgaccgcggcttgacatcttcattgaga

SEQ ID NO: 8806 - DNA, 1365 bp, unidentified
  source 1..1365: mol_type = unassigned DNA; note = element_dd229b8
  misc_feature 1..2: note = core
  misc_feature 3..75: note = LE
  misc_feature 76..1101: note = CDS
  misc_feature 1102..1365: note = RE
  misc_feature 1077..1352: note = bridgeRNA
tgatggggtggacgccccccgacggcatcgatgtgccaaagtggaggtgttgaacaccacttgagggaggcgtccatggaaaaagctagcactatcggattggatctggcgaagaatgtttttcaggcgcatggggcggatgcatctggcgccgtcacgttccgcaagaagctgcggcgcgcgcaagtgctggagtttttctcaagccagccgccatgcacggtggcgatggaggcctgcggaggggcgcatttctggggtcgcgaactcggcaagctcggccatgccgtgcgattgatcccaccggcctatgtcaagccttttgtaaagcggcagaagaacgacgccgctgacgccgaggcgatttgtgaagccgtccagcgcccgactatgcgcttcgtggcgatcaaaagcgaggccgcgcaagccgcggcggtggtgtttcgcacccgtgatgtcctggtgcgtcagcgtacgcagatcatcaacgccctgcgggggcatcttaccgagttcgggctggtcgtcgcccaaggtccggcccacgtcgccaagctcgttatggcggtgcaggatccggaacattctctcccggaggcggcgcgcccaattctttgcgtcttggtcgatatgctgggtttgctggaccaacggatcaagctcctggacgtcgagatcgctcggcgcgccaaagaagacgacctggcgcgccgcctgatgagcgtccccggcgtggggccggtgatcgcgacggcggtcgcggcgctggcgccgccggctgacacgttcaaacggggtcgcgactttgcggcctggctggggctcacgccgctgcaacactccacaggcgggaaacagaaactcggcggaacctcgaagatgggcgaccgaacgctgcggcgtctgctcatcatcggcgcgagcgctgtcgtgcgttgggcggcgcgaaaggggcctccggcgggatcgtggcttgcgggcatgctcgcgcgcaagccgccaatgctggtgagggttgcattggcgaacaagatggcccgcatcatttgggctttgatggccaagggcgggatttaccgggctccggtcgcggcggcgtaaccgcgctcgcggtcgtgggcagtcgtaggcgtaggaaggtcaaacggaaagtatggcgcaacggtcggcgagacgggatcgggaaaaccagtttgcaccggcgtgcataaagcacgtggctctgatttggacccgatccgcgaactcccatacgggcccgcggcgcgtgaagagctgcattagaggccggacacatgtcagcacccgacgacgcgctgcagctatccagaagattctccttgcgccgatgggggcgtccacaca

SEQ ID NO: 8807 - DNA, 1327 bp, unidentified
  source 1..1327: mol_type = unassigned DNA; note = element_dd25e7d
  misc_feature 1: note = core
  misc_feature 2..70: note = LE
  misc_feature 71..1111: note = CDS
  misc_feature 1112..1327: note = RE
  misc_feature 1110..1315: note = bridgeRNA
ctatgtatggactcctccaacctaatttcttaggttggaaggtcgaccaaaaccctattggagtccatacatgtcctattcaactacagttggcgtcgaccttgcaaagaatgtcatccaagtctccgttgtttccaagcgcggtaaagagcttctcaaccgatcgttaacacgtcgcaagtttgcggagtttctgtgtaaacaaaagcctgcgctggttgcgttcgaggcgtgtgcgacctcgcactattgggcgagagctgcacaacggcacggacacaccgcacgcatcattccggccaaggcagtggcgccattccggcaaggccacaagacggacagcaacgatgcgcttgcagtggctgaagcggcacggcgaccgaacatcaaagaagcgccgatgaagacgctggatcagcaaggtctacaagccatccagcgttcccgcgagctactggtgcaagagagcacggcactgtcgaaccacttgcgtggtttgctgatggagtttggcgaagtgataccgaagggttttgccgctctgcaacgcaggttgccagagatccttgaggatggtgacaacgaagtgcccgacatgtatcggccggcgctgcaccgactttattatcgcttccttgagctgcgttcggatatccgggcaatggacgcggaggtcaaagcgctcgtaaagcagcaccctggttgccgtcgactaacggcactcgaaggtgtgggtccgatcagcgcggtgttgttgtacgcatcactgggcaccggcgaagcattctctggcagtcgcgagttcgctgcttacctcggcctgacaccgaggcaactgagcagcggtggcaagaccaacatcgtgggcctgagcaagaagatcggcaatcgtcagctgcgctcagtgttgatccagggcgcacgctcttacgtgaacaaactcaaagaacccaagacacccaaagaccgctggttgatggaactcatcgagcgcgctggtcctggcaaggccacggtagctttagccaacaagaatgctcgcaccgcatgggcgctgctgacgcaaggaacagaataccaacgacaagcgcagcccacggtggttgcgtaaggagtcccgcaaacagaagaccatgatcagataaagatatccgctccggtagaacctgttccgctttgaggccgtagagtccattgacccttagaggaaccggagtgcgcatacatagtgggccaggagatagcgtctccaacaataggccgaatatacatacgcgtctaaattctgatcaaagtaactgtttgctagactggaggagtccatata

SEQ ID NO: 8808 - DNA, 1661 bp, unidentified
  source 1..1661: mol_type = unassigned DNA; note = element_dd320ba
  misc_feature 1: note = core
  misc_feature 2..148: note = LE
  misc_feature 149..1411: note = CDS
  misc_feature 1412..1661: note = RE
tagcacctacggaaggaagaactggagccaccgagggagcgatgcgcgcagcttttttgctgcaagcgcgcatcgtccgaggtggccatggccagtcgaagtacctctagaatgtgagtgttcacaactcattccggagagaccgaccatgaccagtcagaattctatacctgccgatgccgtgttggtagccatcgacatcgccaaggttcgcaatgaagtgttgatcgaagcacccggtcataaacgccgccgtcggttgtctgttctcaatacgcgtgcagaacatgaccatctgatcgagattttgcaatcatatgaccgaccggtggtctgcgcctttgaggcaacgggtaactatcatcgtccgatcgcttggcggttggtggaagccggcttcgaaacgcggttggtgtcgtcgctggcgcttgcccgcacgcgagaagccttgcacaacagttgggataaaaacgatcctaaggatgcgcaggtgatcctgcacatgttgaggatccattcgacgcaggtctatcacgatcccttgcgcgctggcatcaacgacgttcaggaattgtcgaagacacacgaagccattgctaacgcaaagaccgagatacaacatcgcatcctgacgcattacctgccgctgtattttccagagatcgagcgtttccggggtaacagtcgcagcgactggttcttcgcgttcctcgatgccttccccacaccatcgagcatcacgatactgacgaaggagaagttcgtcgaagcggcatgggatgttgtcggcaggaaagtcagcaagtcacagattttaatggatatttatgagactgcccgcacctctattggcttgccattgccgctggatgcgcctgcaattcgcatgtttcggatggttgtcgccgaagctcgcagcttgatccgccaacgcaacgagatcgaagcacaggccgatgagctgctgcgacacagccgtgattatcagatcctgcggcagattcccgggatcggtccgatcaacgcgctaacaatcattgcggaggctggggacctacgccgctttcatcatcaccgtcagtttctcaaattctgcgggctggatctgtcgacacagcaatcgggccagtatcgcggccagacccggctttccaaattcggcaacgcgcggctgcggcgaaccctgtggattgctgggcaagttgccatccgccagcgtgagaacggcttccgacataaattcgaacgctacatcgcgagagatcgtgacaatcctgatctgcgccgcaaggcaatgaccgctattaccgccaagatggcgcgtgtcgtacacgctgtcatcaaaaacggttcagattaccggcccttcgttgaagggcgggtaccaggtggaagaacctctgtcagttagagccgtgagggcatccttcggatgatcctgtagacaatgcttgggtcttccacctggatcagaagctcgtgttaaggacggtgagggccaaaatgatggaccctgtgtttgctatggacgagaccttttcccatgccagtggaagccgcctggttcgacgatgtgacttgacgagcgtcatgcagcgtgagcatgctgacgagcagagaaactttgtctgccaagcccattttcttccgcacttaggacg

SEQ ID NO: 8809 - DNA, 1434 bp, unidentified
  source 1..1434: mol_type = unassigned DNA; note = element_dd3766d
  misc_feature 1..2: note = core
  misc_feature 3..128: note = LE
  misc_feature 129..1166: note = CDS
  misc_feature 1167..1434: note = RE
  misc_feature 1188..1386: note = bridgeRNA
agatggggtattcggctcggcacctcatcttttggcggcttgaaactgtggcaggggtgctgcgcttcgagtgatgataaaacgtggtccgtacaaaacagccacaagcatcagaaaggaagcgcagcgtgaaccactatgttggattagacgtctctgtgaaagagacttccgtgtgcatcgttgatgaagcgggaacggtttgcaaagaggtaaaagtcaccagccatcctgatgatctcatcgcggttctcagcaattctggttggcgtttggtgcgtattggccttgaagcggggccattgtcgcaatggttattcgaaggtcttgccaacgccggcctaccggctgtttgcatcgaaacacgccacaccaaagccttcctcaaggccacagtgaataaaaccgatcgtaatgatgcccggggtattgcccaaatgatgcgggttaacctgtttcgtcctgtgcatgtcaaaacagtgtcgagccagcaacgacgcgccttactcactgctcgtaagctaatatccaataaggcaagagatatcgagaatgacatccgcgggttactgcgtaacttcggtctcaaggttggggtcatcgggcgaattggttttgcagcccggatacgggagcttcttgaaggtgtgcccgagctgcagcacatcattgaaccgttgctcgaggcaagacagcaactttgggagacctttacaactctgcaccgaagactgctatcgatcgttcgagacgatgcgacctgccgacgtttaatgaccattccaggcgttggaccggtggtggctttgggcttcgtcagcacgatcgacatacctggccgcttcaaaaactccaaggcggttggtcctgcgctggggctaaccccggttttgaatcaatcgggcgagagtagccgtgtcggccgtgtctcgctgtgtggtgacgaaatgatgagaacactgctctatgaggcggcccaagtcatgctgactgtggtcagaaaatggtcttggctcaaagcatgggcgatgaatatcgctaaacgccgtggccaccagaaagcgatcgtggcgctggcgcgtcggcttgcggtgataatgcaccgcatctggagcgacggcacagagttccaatggtcaaagagtggcagaccggcaaagccctgaaactacctacgacgaaacaacaaggttccactgaccggtggaaaaatgtccttcgcgggacgatgaaggaagtgagtccgctatggaacttgtgccggccggatcatccgaccaggacgcgacttagattgttccacttctttctactgaccccataatgggaggggcgagacccgatcccgaagagaagcaaggccccgtgaacgacgtcaaatgccggtgtaaatgcaagctcggtagcgcttgacttcaatacgccgaatagaga

SEQ ID NO: 8810 - DNA, 1435 bp, unidentified
  source 1..1435: mol_type = unassigned DNA; note = element_dd3d237
  misc_feature 1..2: note = core
  misc_feature 3..121: note = LE
  misc_feature 122..1153: note = CDS
  misc_feature 1154..1435: note = RE
  misc_feature 1189..1388: note = bridgeRNA
agatggggtaatcggccggcgagcttgtggatagctgaagattttgggtgctgcgcttcaggctgatggtggaaacgaggtccgttgttatggcctcaagcatcagaaggagaagcgcagcatggaccattttgccggactggacgtttcggtcaaggagaccagcgtctgcattgtggatgacacgggcaggatcttgcgggaagtgaaggtcgcgagcgagcctgaagctctactgcaagtgctgaggaaccgcgcttaccgcttcaagcggattgggctggaagctgggccgctgtcgcaatggcttttcagcgctctcgccgaagccggcttgccggtgatctgtgttgagacgcggcacatgcaggcggtgctgaaggcgcagatcaacaagacggaccgcaacgatgctcgcggcattgcgcagatgattcgggtggggctttaccgtccggtgcatgtgaagacgcaacgcagtcagaaactgcggatgctgctgacccatcggaagctgctgcagtcgaaggccatcgccatcgagaacgacctgcgcggtactttacgcaacttcggccttaaagtcggaatggtcgggaaggtgaagttcgaggcccgcatcaaggagctggtcgagaacctccccgacttggccgagttggtcgaaccactgctcattgtccggcgggcgctgagcgaacagaccgtcatcctgcatcgccgtttgctggccatcgtccgggatgacgaggtgtgccggcgcctgatgacggtcccaggtgtcggccccgtggtggcgctaacctatcgcgccaccgtcgacgtgcctgctcgcttccgcaactccaaggcggtcggggcggtgtttgggctgacgccgtccaagtatcaatcgggcgagatcgatcggagcggcagaatatcacgctgcggagacgagatgatgcgaatgatgctctacgaagcggcccaggtcatgctgctgcgttcggcgaaatggtcatggctcaaggcctgggcgatgaagatcgccaggcaccgcgggatgaagaaggcgatcgtggcgctggcgcgtcggttggccgtgatcatgcaccgcatatgggttgacggcaccgagttccgttggacccgagagctcgcagtgccatgagggctgtacaggatcaaatgcgataggagaaaactcgagctccaccgagcggtggaaagatgtccctcgcgggacgatggatgagatgagtccgtcagtctgcttggacctaccgtacgtctgacggcaaggccgttcttcagattgttccatctcgtcctcgaaacccattatggaagagcctggtgctgattccggagagaagcacgagcccgcgggcgacgtcgacgctgtgatggtggatagtctgaaagcgcttgaccccgaacggccgattagaga

SEQ ID NO: 8811 - DNA, 1593 bp, unidentified
  source 1..1593: mol_type = unassigned DNA; note = element_dd47c95
  misc_feature 1..2: note = core
  misc_feature 3..239: note = LE
  misc_feature 240..1463: note = CDS
  misc_feature 1464..1593: note = RE
  misc_feature 11..259: note = bridgeRNA
ttagtaccataaatagtgtaagaaaggaagtaattcctatcttgcactatttttgtataatgaagaagtagtatgacgaggctgttttagggtttaaacatccgccataaaaactgtcaactaccttttcattattcatattcggttaagcaggttgggcaaagcgcccgtgtcacaagctaaaatgagtgtaatggtgcaggtagaaactacaaaataaaaagaaagaaggaaaaaatatgatatctgtaggaatagacatatcaaaagagaaaataacagtttgtgcattagaacaaggaagcaaaataatttggaaacccttcgatgtttctctaaacaaaacagaaatagaaaaattaatagagaaactagaaaaattaaaagaagaaataaaaataacaatggaagcaacaggaaaatatcatctaccaatactttatgaattaaaagatagaggctactttgtaacagtaataaatccattaaaaatgaaacaattctgtagagcattaaactttaggaaagcaaaaaatgacaagatagatgcaaaacaaatagcagaatatggactaatgtattggaaagaattagaagaatacaaaatagataaagagaactacagagtcctaaaagaattaaacagaaactaccaacattatatgaatctaagaatcaatcaaatgaactacatagatcaaacaatacatcaaacatttccaggaataaaaaaactaataccacataattcaggagacttttcaaaagacaaactattagactttctagaaaaatggtggcataaagacctaataatagaaaacacagaagaagaatttgtagaagaatacaaaacttgggcaaaagaaaagagataccatccaaatgtaaacaaagcaaaagccatttacaaaatagcagaagatagtatctcaacacaaccttcccataactcaaaaatagaaacgaatatcagagaaggaataaacctgataaaacaaataaatcagattctaaaaaatattttatcacaaatgatagaaatatccgagcccctagaagaatatcaagaagcaaaaaaattttcaggcatatcagaaaaattagcagtacaaatagtagcagaacttggagacctaagaaaatttaaaaataaaaaaagcctaatatccttcataggaatagacgcaccaccatacgaatcaggaaactttaaagcagatcaaagaaaaataagcaaaagaggaaatgcaatactaagaaaagtaggctatcaagccatgaaatgtatgatgagttcgaaaaatccagaaaacgaaatatataattacatgataaaaaaagaaaaagaaggaaaagccaaaaaagtttgtaaatttgcaggattaaacaaattcttaagaatctactatgcaagagttatggaatcaaaagcccagaaacaagaattaaaagtagcataagatttagaataacactaaaaagcaagccgattgattacactcggtttgtttgccatgcgctaatttaattactcaaacaatcaaataacctgaaattaatttcaggttaagcttgacttttgttagcagg

SEQ ID NO: 8812 - DNA, 1569 bp, unidentified
  source 1..1569: mol_type = unassigned DNA; note = element_dd4826a
  misc_feature 1..2: note = core
  misc_feature 3..246: note = LE
  misc_feature 247..1425: note = CDS
  misc_feature 1426..1569: note = RE
  misc_feature 3..226: note = bridgeRNA
ctcgtattataaagtagtagtgtttatagaccctctccaaggtctatatgctatactgttggagatactgtggattgtttaaaacctcctaccattcgatggtttacgaaaggctacaaccacagtctctttgtatagttgttaatcagttagataccgcatgacggtttatttagaacgaggttacaatcgcaaagagtacctgtggctctaaacagtatcaaatttattcaaaggagatttcttatgatttacgttggaattgatgttgccaaagataagcacgactgctttctcacaaattcagatggtgaagtattattcaaatcttttaccatacctaacaatcgtaaggggtttgaaaccttatttcaaagagtcgaatccgcttcagatgatttaaccaaagtaaaagtaggactggaagccaccggacactacagttacaatcttctgggatttcttcttgataaaggtctgaccacctacgttatcaatccgttacataccaatctttacagaaaaagtctcagccttagaaagacgaaaacggataaagttgattcccgtaccattgccactatgatgatgtctgatatgaacttaaagtcctactcagatacatcttaccacaacgaggaattaaagtcacttactcgttatcgttttgataaggtaaaggaacgggcaaaactgaaaagttccgtttcaagactaatctgtattctctttcctgaactggaaaaactcgttcctacacttcatatagcatccgtttatgctttgctttctgaatttccaagtgcagatgctgttgcaaatgcacacctcacacgactttccaacctgctctctgagagttctaagggcagatacgggaaagatactgccgtcatgtttcgtgacgctgcaagaagttccatcggttctcatatgcctgccaagtctttggaactcaaacataccattaaactcatccaggaattaacggctgagattgatgagatcgaagcagccatcaagcggatcatggatgaagagatccaatcgccaatccttaccatccctggcatcagttaccggatgggtgcaatgatccttgctgaaatcggagatttcagccgttttgattccgcagataagatccttgcatatgcaggaatgtctccttccacttatcaatccgggcagttagataactgttattctcatatggagaaacgaggttccagatacctccggtacgccctttataatgccacaaaatatgtctgtcactgggataaatcttttggtgcatatcttgaaaagaaacgctcggaaggcaagcattataatgtcgcattatctcatgccgctaagaagcttgtgcgcttaatttttgcaatggaaaaatcaggaaaagcatacctgccagtagcttaattttttctgtaactatctccttttagagtgccagcaacgacactctgtttgtcatgcagttttcaaggttcaactatatctgaaatgcatttttgcaattcattcaaaaacctttcattttagacttgacttttaatagttagt

SEQ ID NO: 8813 - DNA, 1507 bp, unidentified
  source 1..1507: mol_type = unassigned DNA; note = element_dd4b66a
  misc_feature 1..2: note = core
  misc_feature 3..245: note = LE
  misc_feature 246..1487: note = CDS
  misc_feature 1488..1507: note = RE
  misc_feature 6..238: note = bridgeRNA
ctaatgagaccagccgggtttccctctgggaggcttggctagcagcggccggcgggtcagcactcgctctaccgggctctcaattcgaggcctactgacagatcgtgcgcccgccggttcgccggtgactggactgctgatgggatgtcgtgcccgcttcggcgtgagcacttgatcattaggttgcaggtgtcgccggatcgctgtgcgttccttgtccggcgagcatggaggagttgctgagggtgttgctgttcatcggggacgactgggctgaagatcatcacgatcttgaggtcgaggacgagacgggacggcggctggcgaaggcccgcctgccggaggggttggagggaatcagccgactacacgcactggtcgccgaacacgccccggcggaatgggcggaactgccgagcgaggaagtcgcaagtcgggtgtacatcgggatcgagaccgaccgcggcccgtgggtgacggcgttgcaggcggccggctatcaggtgttggcgatcaacccgttgtcctcggcgcggtatcgggagcggtactccacctctggcgccaaaagcgacgcgggtgatgcgcacgtcttggccgagatcgtccggctggatcgtgaccatcaccggcagatcgccggggacaccgatctggtggacgcggtgaagctggtcgcccgggcgcatcagaccgcgatctgggagcgcacccgtcaggtgctgcgactgagatccacgctgcgcgagtacttcccggccgccatcgaggccttcgaggatctggcggcgaaggacacgctgctgctgctggcccgggcgccgtctccggcgcgggtcgcgaggctgacccgcagccaggtcgtgtccgcgttacgggccgcccgccggcatcacgtcgaggccaaggcggacgcggtgttggcggtgttgcgggcgcctggtttgcgtcaacccgcgacgaccgaggctgcttacgcggccgtcgtcgtcggccagatcggcatcatcggggccttgaacgaacagatcacgcagctgcaggaggtggtggccgagcattttggtcggcacccggacgctgatatctatctcagccagccgggcttcggtgtggtcctggcggctcgcgcgctcggcgagttcggcgacgacaagaagcggttccacgacgcccgggcccggaagaactattccgggcagagcccgatcacccgggcgtcgggcaagaagacagttgtgctggccaggtacgccaccaaccggcgcctcggcgcagcgctacacgcgcaagcgttctccgcgctcgcggcatcacctggcgcgcgggcctactacgacgcgctccgcgcacggaagataggccaccacgccgcgctgcggcagctcgcgaaccggctcgtcggcattctgcacggctgcctcaaaaccggcacgaaatacgacgaaaacacggcctggcaccatcaaatcaccgccgccgcttgacacgaaacggcatgggatgt

SEQ ID NO: 8814 - DNA, 1417 bp, unidentified
  source 1..1417: mol_type = unassigned DNA; note = element_dd52d80
  misc_feature 1: note = core
  misc_feature 2..134: note = LE
  misc_feature 135..1154: note = CDS
  misc_feature 1155..1417: note = RE
  misc_feature 1174..1415: note = bridgeRNA
atgtaatggacgcctccctcccgccgcgggtacctgagggccgaagagataacggagccctcgcgatacctgacggcatcaaagtgccaaagtggtggtgttgcaacgaccacaaacggtacggagggctcgagatgaagattacgacatatggcctggatttggcgaaacgggtgttccaactgcactgggtcgatatggaaacgggcgagatttgtcggcggcagctaaagcgcgccgaggtggcggagttcttcgccaaccgggcgccggcggtcattgcgatggaagcgtgtggcagcgcgcactactgggcgaggcagtttgccgccctgggacacgaggtcaggctcatcgcggcgcagttcgtgcggcccttcgtgaagagcaacaagaccgatgcggccgatgcccacgcgatctgggaagcggcgcagcgaccggggatgaagttcgtggcggtcaagagcgaaggtcagcaggcagtgctgacactgcaccgcatgcgtgagctgctggtcaagatgcggacgatgcagatcaaccaattgcgcggtctgctgtacgaattcggcgcggagctgccgcccggacggcagaaggggttggcgcggattccgacggaactggcgaagctcgaagaggcgttgccggccatggtgattgaggtcatgcatggccaactcgagcggatcgcagccttggacgaggacattgccgagatcgagcggaagctgtctgcatggaagaaggaggatgccgccagcaggaagctgatggacatccccggcgtggggctgctgacggcaacggcggcggtggccaccatcggcgacgccggagcgttcaagtccggtcgcgaatttgccgccttcctcggcctggtgccgcgacagtgcggcaccggcgggcgcgtgaagctgttgggcatcagcaagcgcggcgacgtgtatttgcgcaccctgctcattcacggggcacgttcggtgatcacgcgtcagaaaacgcatgagccctggctggacaacctgctggcgcgacggccgttcaatgccgccgtggtggcactggccaacaagatggcacgcacgatctgggcgctgctcgccctcgaccggacgtatcagaaaggttacgcggctacagccgcgtagaagatcaacgcaccacaaggagtggatcgctgaaaggttgcgcaggttgatgtgcgattgatggcgtaacaggtcggaccgcggggaagcaaacctgcatgggcgcaggcccttcgaggactcccaggagatgaggcctttcccggcgaattccatcagggccagcagacttcggtctgcacgacaggccggatataagtctgcagccggatcctagaagccagcatcaagcatcacttgccaaaccgggaggcgtccatata

SEQ ID NO: 8815 - DNA, 1559 bp, unidentified
  source 1..1559: mol_type = unassigned DNA; note = element_dd556c7
  misc_feature 1..3: note = core
  misc_feature 4..284: note = LE
  misc_feature 285..1448: note = CDS
  misc_feature 1449..1559: note = RE
  misc_feature 50..264: note = bridgeRNA
cacgtataataaaaaccatctcgaaaggggtggttttcattatatctcctttctcgcaaaattggttgtacagcaggagtagctacctgcggtataatcaggccaagcactgtggatctgtatctattggattacggcttgactgttatgaggtgactcagaccacagtggcttgcctgcattggtgatcagttggttaacgcttgacgtttctatttgcgtgaatacataggcaagtcgtctgtggagacaacagtgctaatttatcttaagggaggtaactcatgtactacatcggcatcgacatttccaagtacaaacacgactgcgctgtcgtcgatgatctcggcgacgtagtcacaccctcgtggtcgtttaccaatgactgcgagggcttttctctcttcaagcaactattggacgatcttgaaggtgaaaagaagatagggcttgaatccaccggtcactatgggcaaaacctgaagctgttcctcgaatccaacggcttccccttcatggagttcaatccgctcctgatctccagattcgttcgcagcaaatccctcaggaatacgaaaacagattccattgacgcacaaagcattgcccgctatgtgatgacggtagagtacaagccctatccaccatcattttaccacctggacaagctgaagtcactcacaagatttcgtgacagtctggtgcggcaacgcagccgccagcttgtagagcttaccaatgtcctggacaaggtttttcccgagtttaagcccttctttaaggggaggctctctgcgactgctctgtacattctgtcccattaccagacgccggagaagatcgccagcatgaacgctcgttcgtatgaacctctgcgcaagctgtctcgtggccgcttttccatgtcggatttcgttcagctcaaggctttggctaagaacacggttggcatttcaaatgactatttgctggatcagatgaacatcctgttggatatctattctcagatggacgccaaggttgatgagctggactgccagatcaaagaatgtgtgcgggacattgacccgcccattctctcgctgcccggcatcggtgagctttccgccgccgtcatcctttccgaatttggtgacttcagcaaattcgacaacccttctaaaatgctctcttatgctggattggagccggggtattaccaatccggccaatctgagcacaccggccacatggtcaagcatggatcgtcgcaactgcgatatgcgctgatgaactgctgccttcctctcgttaccaatgagccaacctttgcagagtattatgccaagaaacgggcggagggaaagcctcatcgcgtggccatgacccatgtagccaaaaagctcttgagggtcatctacaccttgcagacaaaagatatcctgtacgatccttcgctgcttcgctgatcttcatcggttattgctttggaaaagccctcttctgagggcttggtttcgtgcgcccttttttgcctactcaattttttcgcttcagaggcttgacttcctatagttggt

SEQ ID NO: 8816 - DNA, 1567 bp, unidentified
  source 1..1567: mol_type = unassigned DNA; note = element_dd6282e
  misc_feature 1..2: note = core
  misc_feature 3..269: note = LE
  misc_feature 270..1436: note = CDS
  misc_feature 1437..1567: note = RE
  misc_feature 3..245: note = bridgeRNA
cttgtatgatgtttatagaagcaaaaacaacatattcctttcatttttcttgagctgtggtttaatacattcagatactgtggacttttgattttatcctgtagcttgactactcaacaggagtgtattgccgctacttttatctgaattgtttatagctggatgttgccggagtgtttcactctgagtacttatttcaatcaagtctacgatgataatcgttggtggatatcacggtatcagactttatgaaagggaggtacaacctcatgatttacctaggcattgatattgccaaacttaaccatttcgccgctgcggtctcttcgcagggcgagatactcatcgagccattcaaattcacaaatgactatgatggcttctatctgctgctttctaaactggtaccacttgaccaggacagcatcatcattggtcttgaatcaacggcacactatggtgacatccttgttcgttttttaataagcaaggattttaaagtgtgtgttctaaatcctatcaagacttcggctatgcgtaagaacaacgtacgcaagaccaagactgataaagtcgacacgtttgttattgctaaaacccttatgatgcaggattctttaaggtttctgaccttaaaggatctggattatatcgaactcaaggaactcggcagattccggcagaagactgtaaaacagcgtacccgtctaaaaatacagctgacttcttacatggatcaggtattcccggagctccagtatttctttaagtccggtgtgcatcaaaactctgtttacgctctccttaaggaggctcccacaccgaatgcgattgcttccatgcatatgactcatcttgctcatatccttgaatgtgcttcccacggccatttcaaaaaggatacagccagagatttaagagttctcgcacaaaagtcggtcggtatcaatgacagtgccttatctattcaaataactcagaccattgaacagattgagttattggatagccagttattccatacagagcttgaaatggcaaaccttgtcacctgccttcactctgtgatcatgaccatcccgggcattgggactaccaatggcggaatgatacttggtgagattggcgatatccatctcttctctacaccgggcaaattgcttgcatttgccggattggatccgtctgtttatcagtctggtaacttacaggctaagaagacccggatgtccaaacgaggctcgcgtgttcttcgttacgctctcgtaaatgcagcacataatgttgtaatgaacaatgcgactttcaaagcttactacgatgccaagagagccgaaggccggactcactataatgcccttgggcactgtgccggcaaacttgtcagggtcatctggaagatgctcactgacgaagtggaatttaacctcgaataagaggtctgcataccaatatcgatagattttgaacaagcacctttagggacctttattaaagttacccttttttaccatcgattagaaaaatgaatgttcgcctaatttatacttgacttttcatagctagt

SEQ ID NO: 8817 - DNA, 1503 bp, unidentified
  source 1..1503: mol_type = unassigned DNA; note = element_dd6c200
  misc_feature 1..2: note = core
  misc_feature 3..253: note = LE
  misc_feature 254..1483: note = CDS
  misc_feature 1484..1503: note = RE
  misc_feature 6..241: note = bridgeRNA
ctaatgagatgtagcgggtcggtagatcgtgcagactcgcttctggtagcggctggcaggtgagcactggttgagcccggacttcgagtcctgatctgagatcgtgcccctgctggtcggccgggaggaatggatcgctgctgggatgtcgtgcccgccgcgtgtcggtgtgagcactgattcattaggtcgccgacgttctccctgctcgctgccggattggttgtccgacaacgatgaacggggaactgctgtgctgttggtcggtgatgactgggccgaggaccaccacgatgtcgagttgatgaacgaggccgggaaacggctggtcaaggctcgtcttcccgaagggatcgccgggatcacccggctacacaccatgatcggcgaatacgtcgatgacggcgacgatgccacgcaggtgcggatcgggatcgaaaccgatcgcggcccgtgggtcgcggcgttgatcgcggccggctacaccgtgtacgcggtgaacccgttgcaggcggcccgattccgtgagcgccgcagtgtctctggggcgaaaagcgatgccgccgacgcgcacaccctggctgacatggtccgcaccgacgcccaccaactgcgcccggtcgccggggatagtcccgccgctgaagcggtgaaagttgttgcccgagcgcataaaacgttgatctgggaacgcacccgccacacccagcggttacggtacaggttgcgcgagtacttccccgccgcattggaggcgttcgaggacctcgatgcccccgacaccctcgagctgctcggcaaggcccccgaccccgcggcggcaagcaggttgtcgctcaaccagatcaaggccgcgatgaagcgcgctggacgtcgcggtgacatagacgccaaagccgcacgcatccaagcgatcctgcgcagtgagcaattgggccgcgacccggtgatcgtcgcggcctacgcggcgggcacccgtgccgtggtggcggtcctgaccactctcgacgcgcaggtgaaactcctgcaaggggaggtcgagacttcttttggccggcacccggccgctgagatcatcttgtcccagccaggattgggcaagatcctcggtgcccgggtgctcgccgagttcggagacgacccccaccgttacaccactgccaaggctcgtaagaactacgccgcgaccagccccatcacccgtgcttcggggaaaatgaaggtcgtcgcggccaggttcttgcatcaggaccgcctcgtcgatgcgctgacgacccaagccttctgcgcgctcaaaccttcacccggggcccgcgcctactacgacaagcaacgcgcccgaggcctgacccacagtgccgccctgcgccaggttgccaaccggctcgtcggcatcctgcacggctgcctcaaatcccacaccctctacgacgaagccaccgcctgggcacaccacaaccaagaccaacaagccgcagcttgacaaaccaaaagctgggatgt

SEQ ID NO: 8818 - DNA, 1448 bp, unidentified
  source 1..1448: mol_type = unassigned DNA; note = element_dd83b5c
  misc_feature 1..2: note = core
  misc_feature 3..224: note = LE
  misc_feature 225..1433: note = CDS
  misc_feature 1434..1448: note = RE
  misc_feature 10..218: note = bridgeRNA
gccctacctttcaagtcaacctccggtcgtccggaatgatcgggggacgcaggcggggcagggatggttttcatgctggctgccctcgatggctcaggtggctgagccccctgtcccgcctccttgttctgaccgctgattaggcactgcgatcgatcgctatgtagggcgttgacggcggagcggggacgcgtcataccggcaccgagggaagcgagggatcgatgagagtggccgtcgggatcgacgtcgccaaggagtttcactgggtcgcgatcgtgctcgccgacggtggcaaggtgctgctgtcgcaacgggtggacaacgacccggacagcatcgatgggctgatcacccatctgcgggctgtcgccgccgagcacggcgacctcacggtgggcatcgacctgatgggcggagtggccagcctgctcaccgcgctgttgcttgacgccgggatccggctggtgcacgtgcccggactggtggtcaaccgggcccgccgcgccaccaagggcggcgaggccaagtccgacccgcgcgacgcccagaccatcgccgatcagctgcggctgcgcgacgactggcgcgtggtggaccagcccgacgaggtgtcgcttgacctgcggctgctggtgtcgcgccgccgggagctggtggtcgagcagacccgccgcctcaaccggctgcgcgaaaccctgaccagcctgtttcccggcctggaacgcgccgtggacgtcaccaacctcggcgacctgcacttgctggcccgctacgccaccccggccgagattcgccgggccggacgccgccgcatcaccgagcacctgctgcgccgcggagtccgccgctcctacgccgaatccctggtcaccaaggcgatcggtgccgccgaggcccagcacaccgtagtgcccggcgaggcgcggatggccgagttcgtgcgcgagttcgccgccgaggctgtcgctgcccggcgccgcatcgccgacctcgacgaccagatcagcgccgacctcgacgcccaccctgacgcggccctcatccgcagcctgcccggcatgggggccaccctcaccggggaattcctcgccgaggcaggcgacctgacccgcttcaccaccggcgaccagctggcctccgccgccggcctggcgccggtgctgcaacagtccggcaaggtgcgctacctgcgccgcgccaccgccggcagcaagaccctcaagttcgtcttctaccagtcggcgttctgcgccatccagcgcgacccggccagcaaggccttctacgcccgcaaacgcgccgagggcaaacgacaccaccaggccctcatcgcgctggcccgacgacgcatcaacgtcctgcacgcactgctgcgcacccgccagccctaccaacccgactaccggcgaaacacggctaccgctgcttgacaaacacattaggca

SEQ ID NO: 8819 - DNA, 1467 bp, unidentified
  source 1..1467: mol_type = unassigned DNA; note = element_dd9090a
  misc_feature 1: note = core
  misc_feature 2..227: note = LE
  misc_feature 228..1454: note = CDS
  misc_feature 1455..1467: note = RE
  misc_feature 13..251: note = bridgeRNA
ctactaagagacttcacgcaggatcgacgtctggccagactcggtccaggtgttcggcgggacgctctctctatcggctgcccacccttgtttggtgtggctctcatctgggctgcgactcgccggacgccgtgacgaggcgtggctccagaggggactgcccagctcgtagtagcaatgcccacctcgccgtcctgatggttccaaccctgcgacgaggtgagcagatgaatgaaacgaagagcgtgatcatcggggtcgatcctcacaagctgtcagccacgatcgaggtcgtcgacaccgctgagcaactgctcgggggcggtcggttccccacagacaaggccggctacgccgcgatgtggcgttatgcgaagcagtggcccgaccggctctgggcggtcgagggagccaacggggccggtcgtccgctggcccagcggttggtcgagaacggcgaacacgtggtcgatgtaccagccaagctcgcggcccgggtcaggctcttcgacaccggccacaaccgcaagaccgacgccctcgatgcccactccatcgcgatcgtcgcggtccgcaccgcggggctgcgggtcgtcgccgccgatggcgagctcgaggcactacggatgttggccgaccgccgcgacgagctcgctggtcagcggatccagacggtcaaccggctacaacggctgctcagcgaactgatccccgggcaacgtaagaaggacctctctgcccttcaggccaaggcgatgctggccacggtgcgtcctcgcgacattgccgggaagacccgccgccggatcgccgccgaggagatcgccgacctggtcgcggtcgatgcgaagctgaagaagatgaaggccgagctcaaggcagcggtcatcgcccgcggttcgaccctgatggacatccacggtgtcggtccggtggtcgcggcccggatcctggccgacgtcggggatgtgaccaggttcgccgaccggaaccggttcgcgtcctggaccggcaccgcacccatcgacgcctcctccggtgagcagatccgacaccgcctgtcccgggccggcaaccggcggatgaaccacatgctccacgtcgccgcgatcgtccaacttcgcaacgacaccgaaggccgcgcctactaccgccgcaaacaggccaccaagaccaacatggaagccctgcggtgtctcaaacgacgcctgtccgacgtggtctaccgacagctcgtcgccgacgacaccaccatcacagccccgccatatgaccaaccaggtgcggatccgggagggcactgcggggcgactcaagaatccagcgcggccgacctgcccccgcacatcgacacttcggataagccacttcccggacccgcgcacccgacgctacgcccacccgtccaccgccgaaagcctcaacgatcccgagttccgatacccgccccttgacacagaggggagc

SEQ ID NO: 8820 - DNA, 1178 bp, unidentified
  source 1..1178: mol_type = unassigned DNA; note = element_dd91dc0
  misc_feature 1..2: note = core
  misc_feature 3..207: note = LE
  misc_feature 208..1155: note = CDS
  misc_feature 1156..1178: note = RE
  misc_feature 3..183: note = bridgeRNA
cttgtatggtaggacttgaagggaggaggagggactcagttcgcttctgactgtttacgcagtacagacctgtgggagatttcacccctcctcctttcacccaagcgccgataaagaatgcttatggctcgcgacctacgatagaaacaagcctgcgcctctgggtggtcccttcaagttctcaaaccttatcccggagattgcgccatggcaatgctggttgcccagactaaacctgtcgtcggagtagacgtcgccaaaaatgagctggtgatctatcaggaccagtccgaccgacttgaagcgattcccaacaccaaggcggctatcagcaagtggttgcgtaccttggctggaacggtgtcaatcgctgtcgaagccaccaatacctatcacgtactgttcgccgacatggcttacgaggccggctgcaccatctacatgatcgatggctaccaactgagccattaccgaaaaggcgtcaatgtacgcgccaagacggatgcgctggacgctcgtttgcttgcccgatatttgaagaaagaggccgacgagctgcacccctgggtaccgccgtgcccgctttatcgtcagttgctgagcctgtttcgtcgtcgtgcggcgttggtccaggcgcgtaccggactggttcagagctggtccaatgagcccctgttgaaaacagcgttcgcggcgcagatcaattcgatgaagcgccttgaagcgctggtcgagaagaagatcaaggatgtcctgcagcgagccgggttgatgggacaggtcagtcgttgcatgaaagtagaaggtatcggctttctgacggcggcccggctggtcactacttttcagcgaggcgaattcagcaacgccaacgccttcatcgcctttttaggcctggacctcagggtgtccaaatccggacaaagtgacgggccgcgccgcctgaccaagcgtggcgatccggaagcccgtcggctgcttcataacgcggccatgtctggcagccgtacagccgcttggaagccgttttatgaagagcagagaaagcgtggcttcagcaccactcaagccttggtcatgctggcaaggaagatggcccgagtcgtattcgccctgttaaaaacccagagcgaataccggtcaaaggcggcttaaggggtttcccaaaaccatagaat

SEQ ID NO: 8821 - DNA, 1460 bp, unidentified
  source 1..1460: mol_type = unassigned DNA; note = element_dd96de3
  misc_feature 1..2: note = core
  misc_feature 3..227: note = LE
  misc_feature 228..1439: note = CDS
  misc_feature 1440..1460: note = RE
  misc_feature 7..225: note = bridgeRNA
ctaataggagcagaacctcctcgagaatagggaggttgtccgagtcgccagcggtcgagcacttctgtcggcgaggccactgagccttacgtctagatggtgccgccgccggtcgacgaggagggaagacgacctgtgggatgtcgggccgttggagccctgctctattagcgcgtcgccactctcctcctactcggtggcttcgacgggcatgtgaggagggtgcgatggtcttcgttggagttgactgggccgaggcccatcacgatgtctgtgtaatcgacgcggcgggcatggtgctcggcaagcggcgcgtcccggatgggatcgagggcgttcgccagatccacgaattggtcggggcccatgcccaggagcccgagcagatagttgtcggtatcgagaccgaccgtggcctgctggtgggcgctctggtggccgccggctaccgggtctacgccatcaacccgctctcggccagccgctaccgggagcgccacgtcacctcccgcgccaagtcggaccccggcgacgccaggatgctggcggaactggtccggaccgaccgtcacaaccaccgtcaggtggccggggactccgagttggcggaggcgatcaaggtgctggcgcggggtcagcaggacttggtctggtcccgccaacgctttgtaaatcggctccgtaacaccctccgcgagttctaccccgccgccctggaggccttcaaggacctcgactccggggagacattggcgctcctggagcgagcgccgaacccctgggaagggcgtcggctctcccaggccaagatcgtttcagctctccgggcggccggccggcagcggaacttggaggcccgggcagccgagatccagaccgccctccgctccgagcagctggaggctccggcgcgggtcgggagcgcttacgccatggtggtcaagagcacggtagctgtgctcaggaacatgaaccaggagctggcccagctcgaatcggagctctcccggtcttttgaaggacacccggacgccgaaacctaccggagtctcccaggacttggcgtcatcctcagcgcccgggtgctggccgagttcggtgatgacccgaaccggttcgaccatcctaagtctcgcaaggcctacgccggcaccgcccccatcaccagggcctcgggcacccgtcaggtcgtgctcgcccgagtggctcgcaaccgacgcctggccgatgcctgctacctgtgggcgttcgcaagcctcaaccgctcagcgggtgcccggcgttactacgacaccctgcgtggccgcggccagacccaccatcaggcccttcgcgcgatggcgaaccgttgggtcggcatcctgcacggttgtcttcgctatcactccgcctaccgagaggaggtagcctggccagcttccctcgaggtcgccgcttgactttttacggacgtgggatgt

SEQ ID NO: 8822 - DNA, 1627 bp, unidentified
  source 1..1627: mol_type = unassigned DNA; note = element_dd99d6d
  misc_feature 1: note = core
  misc_feature 2..284: note = LE
  misc_feature 285..1505: note = CDS
  misc_feature 1506..1627: note = RE
  misc_feature 14..310: note = bridgeRNA
cctactacaatatatttatggttaatatcccttacagccagtaaggaattatccatcttgttgcttaagctgttagaatgttaagagcaatcggtatagcggatttctccctgggctttgcgcccgtaaaacagtctgctaaccagctcttcattcgcagcgttcgttttatgcaggttgatccaccttttaggtgcgttcgtgtcacaccacagtagattgaataggcaatgagcaaaactggtataaaccaattgtaatccattacgaggagtgacttttttatgaatatgaacgcagtaggtattgatgtctccaaaagaaaaagcacaatagcagttctccgtcctggcggcgaagtccttatgaaaccttttgatattccccataaatccgcagattttcaaactctggtaaacaagctaaaaggtctggatggcgaaacccgcattgtcatggaatgcaccggtcactactatgaacccgttgccagggaattagctcaggctgacttttttgtgagtgctgtgaatcctcagatcatcaacaactttcaggggcaggacaatccgctccgtaaagtcaaaacagataaggcggattccgtaaaaatcgcacgctatactcttgacagctgggcaaatctgaaacagtatactcttatggatgaattacgttcccagcttaaaacgatgaatcgtcagtttgacttctacacaaaacataaaactgccatgaagaacaacctgatcgctcttatcgaccagacctatccaggtgccaatacctattttgacagtcccgcccgagacgacggcagccagaaatgggtggattttcttgatacttactggcatgtggattgtgttcgcaaaatgtccctaaacgccttcacagaccattatcagaaatggtgctgccgcaggaagtacaacttcagcaaagccaaagcggaagaaatctacggagcagccaaggaactgattcccgtacttccaaaggacaactttaccaaatgtatcatcaaacaggccgttgcgcaggtaaatgctgcttcacagaccgctgaacggctgcgtgcccttatgaacgaaactgcctccaaactaccagaatatccggttgtcatggctatgaaaggtgtcggtccatctcttgggcctcagcttatggccgaaatcggcgatgtgacacgcttcacccataaaggtgctgttaccgcattcgcgggtgttgatccgggtgtaaatgattcaggagattattctcggaaaagcgtacatgcttccaaacacggttcaccagtgttgcggaaaactttgtttcaagtcatggacatcctgatcaaaacaaaacccgatgatgctgtatatttgtttatgaataaaaagcgcacggaaggcaagccttattacgtctacatgactgctggagccaataaatttttacgggtgtactatggaaaggtaaaagaatatctctccacacttccacagtcgaattaacaccatctcatactttttctctcagaccggcatactttggcggtcttattgtgatatctatttttcaacctgtataaaattttcaatattcatcaaaataagcttgactttttatttgcagg

SEQ ID NO: 8823 - DNA, 1441 bp, unidentified
  source 1..1441: mol_type = unassigned DNA; note = element_dd9f202
  misc_feature 1..2: note = core
  misc_feature 3..41: note = LE
  misc_feature 42..1184: note = CDS
  misc_feature 1185..1441: note = RE
  misc_feature 1192..1439: note = bridgeRNA
agatgagatgaacgccgcccgtcctttggcaggagggcgagatggaggagcagaggagggaggatcccccgtccgtacggcatcgatgtgccagagtggagatgttcagtaaccactcacgggacaggggatccgttatgcaagttacgacgtatggcgtggatttggcaaagcgcgtgtttcaggtgcactgggtcgagccggacagcggcgaggtgaagcgcaagatgctcgcgcgcggagagtttgcagccttctttgcccgcagaagtgcgggactggtggcgatggaggcttgtggctcagcgcaccactgggggcgcgcgctgcaagccctggggcaccaggtgcgactgataccgacacagtttgtccgtccgttcgtcaagagcaataagaccgacgcggccgacgcccaggcgatctgggaagcagcgcagcggcccgagatgcgcttcgtggcgctcaagagcgaactgcagcaggcggtgctgggactgcaccgggtgcgagggcagctggtaaagatgcgcacgatgcaggccaatcaggtgcgtgggctgctgtatgagttcggcgtggtggtgccacggagctggcgggcactgctggcgcaggcggggccgatcctggccgaggacactcgttgcgaggttcccgagctgatccgcggcgagctgcaacaacagctggagggcttgcgggagttgacgcgccggattgagcagctcgagcgctcgatcggcacctaccgccagcaggatgagcagtgtcggcgcatcgaggcgatccctggagtgggcccgctgagctcaacggccgtgctggccactatcggggacgcacgcacgttccgctccggccggcagtttgcggccttcctgggcctggtgccgcgtcagtctggcaccggcggacgggtgaggctcttagggatcagtaagcgcggcgatccatatctacgcaccctgctgatccatggtgcgcgagcggtggtgaaccacagtagccggccaggacgtacgccgccgcagtggctgcgggagctgctgtcacggcgccctaagaacgtggccatcgtcgcactggcgaacaagatcgcgcgcacgatctgggcgctgttggctcatggtcgtacgtttgatcatagctggggacaggcgcagcctgtctctgtggcgtaactaaccggaggaacagccaaccgaattgagcgatgcaacactcgtgatggcagaacgggtcggaccgtgaggaagtaagcctgaatagctgctcggactttcaagtccttcaaggagatgaggccttcctcagcggatcttcatcagggccacgcagagcccagatctctgcagcagtaggccggatataagattgcatccgcaccttctatgcctgacgaacagagcatctgcccaatacgggcggcgttcatata

SEQ ID NO: 8824 - DNA, 1424 bp, unidentified
  source 1..1424: mol_type = unassigned DNA; note = element_dda75f4
  misc_feature 1..4: note = core
  misc_feature 5..582: note = LE
  misc_feature 583..1410: note = CDS
  misc_feature 1411..1424: note = RE
  misc_feature 1..194: note = bridgeRNA
ctccgtaagttgttaggcggcccgggagggccgggtgtggcttatggttctctgccatcagtggcttcgaaggagtggccgcccggctctccggggcgccctggctgctgattgagatgtgcgcgcttcgtgcggtcgctgattacggagatgacagcggggcgttcctcgggccgacggcatgccgtgcggaacgaggaggggtgagtgagcgagcgaaggacccaggtctgggccggcatcgatgcgggtaagggccaccactgggccgcagcggtcgacgagaccggctcgacgctgtggtcgaagaagatcgacaacgacgaagcggcgatcctgaccgcgatgggcgagatcctggacctcgcggacaagatgtcctgggcggtggacatctccggaacgtcctccgcgctgctgctggccctgctcgcagcccacggccagcaggccgtctacgtccccggccgcaccgtcaaccgcatgtcgggcgcctaccggggcgaggcgaagaccgacgctcgcgacgcctaagtcatcgccgagacctcccgccagcgacgggacttcgccaccatcgacgtgcccgcccagctggccgcggacctggcgctgctgaccgcccaccgctcggacctggtggccgaccgggtacggatgatcaaccgcctccgcgacgtactgaccggggtcttccccgccctggaacgggccttcgacttcagctcgcacaagggcgcgctggtcttgctcaccgggtaccagacgccagccgccctgcggcgccgcggtcgggcccggctcaccgcctggcttgccggccgcagcgtccggggcgccgacacggtcgcggccaccgccctcgaagcggcacaggcccagcagacttccctgcccggtgaggacgtcgccgcgcagatcgtggcggatctggcggcgcagatcccggcactggacgaccggctgaagcgggtcgaccagcagatccgtgagacgttccgcagtcatccgcaggccgagatcatcgagtccctgcccggcatgggtccgatactcggcgccgagttcgtcgtcgcggcaggcgacctcacggcctacacggacgccggccacctggcctcggcggccggcctggtgcccgtccctcgcgactccggccgacgcaccggcaacctgcaccgcccccaacgctacagccgccgcctgcgccgggtgttctacatgtccgcgcagaccagcatcatccgcgacgggccgaaccgggacttctacctcaagaagcgcgccgagggctgcaagcacgtccaggccgtcatcgccctcgcccgccgacgagccagcgtgctgtgggccctcctgcgtgatgaacgagtcttcacccccaccccacccgccacgcaagcggcttgacttcgtcattgaga

SEQ ID NO: 8825 - DNA, 1346 bp, unidentified
  source 1..1346: mol_type = unassigned DNA; note = element_dda9b6b
  misc_feature 1: note = core
  misc_feature 2..64: note = LE
  misc_feature 65..1090: note = CDS
  misc_feature 1091..1346: note = RE
  misc_feature 1116..1343: note = bridgeRNA
taatgggatggtcaccctccaccgaacaccgtaataatgtgttctctttggacggagatcagtcatggacacagtgaccctcattggaattgatctgggcaagcattccttccatctgcatggacaggaccggcacgggcgagaggtactccgcaagaagtgcaatcgcaagcaactgatggaattccttgccaaatcccaaccttgcactgtagtcatggaggcatgcgccggtgcgcatcacatggcacgtcaactcgtcaccttcggacatcaggtcaagctgatctcgccacagttcgttaagccgttcgttaaggcaaacaagaacgacttcatcgatgccgaagcaatctgtgaagcagcttcccgcccatccatgcggtttgtgacacctaagaccgaagaacagcaggtactgggcgcctggcaccgggtacgggaatcacttgtgcgtgaccaagtgaagacgaccaaccagatacacggatttctgctggagttcggcatcagcttgtccactggtccaggcgtaatcaaacgcctgccttccgtgctggcagaacaccgcctgccagcacggctggtggtcctgctcgagcggctacatgcacaatacaaatactttgatgagcagatcaaggaggttgagaatgaactggcacgactgctcaaggatgacgacctgggcacgcggctgatgacgattcccggagtcgggccgatcacagccagcctgttgtcggccgaactgggcgatggcaagcaatattcctgcggtcgagacttcgctgctagtttaggtctcgtgccgcggcagtacagtacgggcggcaaaccaactctactgggaatcagtaagcgcggcgacaaggcgatccgacgcctgatggttcaatgtgcacgttcctacatgatttgggtgcatcgaaagaccgggtgcatggccgaatgggtaaggtcgatgctcacgcgccgtcatcccaacgtagtggcctgtgcattagccaacaagctggcacgtacagtatgggcactggcggccaagcacatggtattcaaagaaccaacggcaacagttcgtagctgagccgctctcgaacaagcaacaaaggtagtaacgatctggttttgcgactgaaggaaattgatgacggaaacggcaaaccggcctggaaaaaaacctgtaagttcaaatggctttcgaagccgcggacattttttaggattcccaggcgcgattctcatcgtggcgcgaagtaggaacttcaaacagacgccgaatagattcgagcaagccaacaccgccaacaatccgaggttgcaaatcggagggtgaccataga

SEQ ID NO: 8826 - DNA, 1449 bp, unidentified
  source 1..1449: mol_type = unassigned DNA; note = element_ddbd507
  misc_feature 1..2: note = core
  misc_feature 3..123: note = LE
  misc_feature 124..1092: note = CDS
  misc_feature 1093..1449: note = RE
  misc_feature 1207..1400: note = bridgeRNA
agatggggtaatcggcttcgtgccccatcttcaccgatcggaggaaggtgctgcgcaccgagctgatgataaaacgtggtctgtatgaaacagccacaaacatcagaaagaggaagcgcagccatgaaacattacgccggcctcgatgtctcggtcaaagaaaccagcgtttgtattgtcgatgcaagcggcaagacctgccgggagaaaaaggtagtgtctcacccgcaggacttggttgccatcctgcgtgatcccgcgctcagcttggaacgggtgggacttgaggccgggccaatgtcgcaatggctgttcgaaggactggcaaaggccggccttccggtattctgcatcgagacgcgccacacgaaggccttcttaaaggcttcgcaaacgaacaagagtgatcgcaacgatgcgcgcggcattgcgcaaatgatgcgggtcggtcttttcaagagcgtacacgtgaagacgcttacgagccagaagcgccgcgctctgttgacggctcgctcgctgttacaggaaaaagcgatcgctctcgagaacgatatgcgtgggctgctgcgcaatttcgggctgaaggtcggcgtcgtctccgggggtacgttcgaggagaagatacgcgaactcattgaggcggaccccgatctggcggaaatcatggaacctttgctcgctggacggcgcaagctgcgcgaagaattcgccaaactggacaagaaggttgcccacgaggcgaggtgtgatgaagtttgcaagcggctgatgacggtgcctggggtcggaccggttgtctcgctcgcctatgtctcgacgatcgacattcccagtcggttccgccattcgcgggcggtgggagccgtactggggctcacgccggtgctcaaccagtccggcgaaagcaaacggatcggtcatgtctccctatgcggggatgccatgatgcgagcgcttctgtatgaggcggcgcagacgatgctgacgcgtgtggtgaaatggtgctggctcaaagcatgggcaatgaacattgccaggcggcatggcagaaagaaagccaacgtttggcgcgcaggcttgctgtggtgatgcatcggatgtgggtggacggctcagagttccgctggacgcgggaggagacagccggcgccatgcccgcataaagtagtcagttctaaacgcaatcaaagaaagagaaattcaaagctccgcctcgcggaggaagacgtccttcgcggacgatggtgatgtgagttcgtggccgtcgcttataccgatgatccgtcatcaggatgcagcatagattggaccacatcatctactggaccccatcgtgggagggcctagtgccgatcccggagagaagcgcgggccgcgaagaaacgttgaacgccgcacaagtgggacagctcgaaaagcgcttgacctcaacacgccgattagaga

SEQ ID NO: 8827 - DNA, 1478 bp, unidentified
  source 1..1478: mol_type = unassigned DNA; note = element_ddbd524
  misc_feature 1..5: note = core
  misc_feature 6..244: note = LE
  misc_feature 245..1456: note = CDS
  misc_feature 1457..1478: note = RE
  misc_feature 40..213: note = bridgeRNA
ctcattgggcaacctcacacctggcagttagtgtgggtgcgttttttccgtgcgctcgccgtgaccgccttcttcgctggccgcttgacggcccgcatgagacttgcggcgcggcgggagccgggagaccccgtcggactacaggaagttgcgccgtgggtagccgcccagagcgccggtcaatgagcaatccgcaaggtctcccagcacggatagtgatactccaactgcggggaggttcgccatgaggatctacatcggtctggactggggcagtcagcaacacgccgtctgcgcccttgacgctcaagggcagcggctcacgcagttcatgatcggccacgatcgcgccggccttgcggagctgcgccagcggctggctaaaatctctgcctccagtgagatcagcgtcgcgattgagcgtcctacgggtctgctcgttgatacccttgtcgaggccggctacaccgtagtaccgatccatcccaatacagtaaaagccactcgaccccgttaccacatagccggtggtaaaaccgacagcagcgacgccttccttttggctgacctgctgcgaaccgatggacatcgcttccacccactcaccccagagtccgatgcgatcaaggcactgcgcgcctgggttagaacgcgcgatgatctggtggccgcacgcctcgccttggctaatcagctgcgcgccttgctggacagtttctgggccggcgccagcgtgatcttcgccgacctcgactcgcccatcgcactcgccttcctcagtcgttatcccactccgagttctgcggctcatttgggcgagaaacgcctcgccagcttcctcgcccagcatcactactgcggacgccgccccctccccgaactgctcgcccgtctgaagggggccccctgcggccactgcggacccctcgagtccgaggccaaaggcgagctggtgcgttccctcgccgccgtcctctccactctccttgagcagctcaaacagctcaccgcccgcatcgaacacgaaatcgcctctctcgaggatggccaacacctcatgagcttcccgcgcatcggtcgcgtcaacgccgctcagctcctcgctgagctcggttccgtccgcgagcgcttccccaccgacgccgccctcgccggcgaagccggtgtcagccccgtcacccgccaaagcggcaaaagtcacgccgtcgtgttccgctgggcctgcaacaagcgcctgcgagccgccctcaccaccttcgccgacaactccagacatgcctcgccctgggccgcctcgctctacgcaaaagctcgtgctcgcggaatcgaccatccccacgcgatccgcatcctcggccgcgcttggctgcgtgttatctggcgaacctggatcgatcacaaaccctatgaccccaccaagcaccgcaacgccgtaccacttctcacccccgcttaacttcggggttgacacaggaagt

SEQ ID NO: 8828 - DNA, 1180 bp, unidentified
  source 1..1180: mol_type = unassigned DNA; note = element_ddc1989
  misc_feature 1..2: note = core
  misc_feature 3..199: note = LE
  misc_feature 200..1165: note = CDS
  misc_feature 1166..1180: note = RE
  misc_feature 6..204: note = bridgeRNA
cttgtatgtttaaaccagaccagtacggtaaagtctgacggtagccagacaagaccgtgcagtttgtccgccgcttgggcgttcgagcccgtgactgagtaaagagcgcacggtcgccgtgctggtcttcccgaaacccgaacggttacgcgccccggcaccgccgagtgcgcatgtacaagcatgggatccgaagatcatgtctgctccttccttcgtcacggttggcatcgatgtggccaaagcccacgtcgatgtcgccttgctgggcgcccgtctggacgctcaacgcttcaacaatgacgccgacggccatacggcgctggccacggcattacagccattgggcatcgatctggtcgtcatggaagcgaccggtggctatgaagccgaattggcctgcgctctgcaaggtgctggcttgccggtggccgtcgtcaatccccgccaggctcgtgacttcgcgcgtgccatgggcaagctcgccaagaccgattccatcgacgcccgcatgctcgccgaaatggcctcggtgctggtgcgtcgtgaagatctgtcccgcttgctgcgccccgtctccgacgagcgccagcagtggcttgctgctctgctgacgcgcaggcgccagttgatcaccatgctcttatccgagcggcagcggctgcaaatcacgcccgagcgtttgcatcccagtttgcaggccatcatcgccgccattcaggcccagctcgacgacatcgatgctcaaatggtcggccacgttcgcgaacactttgctgaactcgaccgattgctgcaatcgactcgcggcatcggcccggtatccagtgcctgcctgattgctcaactgccggaactgggcaagctcaatcgtcgccagattgcggcactcgtgggcgttgcccctgtcgcttgcgattcgggctcgcgccaaggacgacgacgtgtgcagggcgggcgctttgaaattcgccgcgtgctgtacatggcgacgctcactgcaacccgccacaacccggctatcaaggccttccatcaacgtctcaaagcagccggcaaactgcccaaggtcgcgctggttgcctgcatgcgcaagctcctgaccatgctcaatgccatggtcaaatccaacaccctttgggacgattcgcttcatctcgcttgactcgagacacggtta

SEQ ID NO: 8829 - DNA, 1241 bp, unidentified
  source 1..1241: mol_type = unassigned DNA; note = element_ddc8a6a
  misc_feature 1..3: note = core
  misc_feature 4..229: note = LE
  misc_feature 230..1219: note = CDS
  misc_feature 1220..1241: note = RE
  misc_feature 51..203: note = bridgeRNA
gctattagattagcaactttaaataagtagtattaaattagatataactgaagaaccaaaggaaatgaggtgaactagttcgagaatcaaattaatgatttatcctgagcattagtcctcaattcctctgggttcatgtaccatttagaatgttaagtataaagacttattaatagcgatagtacgaaccctattggtcctcagtatttatttccttaattataaaagtatgaaaaagttgtttattggactcgatgtttcgaaagatgtttttgatttttgtgcacttaatgatttaggtgaacaagaatcttctaaaaaagtatttcaaaattcaaagcaaggaatagatcaattttgtaaatcattgaaaaaatggaatgattctgatattttgatatgcttagagcatacaggtcattatggctatttattgagttatgaattagcaaaaagaaatttgaaatatgctttaatcaatcctctagaaataaaaaattctatagggatgaccagaggaaaaaatgatgcgattgacgcctatcgtattgcttattacgcattgacacattatcgcaaaattaaacctcatgttttacctattgaagatcttcaaaagttaaaggcactaatgggaatccgtgatggatatgtaaaaataatcgtgcagttaaaaaacagtcttaaagcccttgagattatcaatgagtcggtaaacataaagtcacaaataaatgaccataaacttttgattaagagatttgaaaaatcaattgataaggtggaaaagcaaatgatggagatcattaacaaaaatgaggatataaaaaaggcctttactaagataaatacagtaataggtgttgggatgctaactgcgataaaatgcatcattgaaactgataacttcaccaaatttaaagatggtcgtaagtttagttgtcattgtggcttagctccatttgaatatcagtcaggaagtagtgtcagaggaaggacaagaacaagttctctcaacaataaagaattaaaatcaatcctttttaaagctgctgccactgctatacaacatgacccacaactaaaaggatattacctaagaaaactagatcaaggcaagcataaattatctgttttgaatgctgtagctaacaaaattgtactaagaatatttgctgttgttaaaagagaggaaccttttgtaaaattaattgcttaaatagttggttttatcttagaat

SEQ ID NO: 8830 - DNA, 1357 bp, unidentified
  source 1..1357: mol_type = unassigned DNA; note = element_ddcf338
  misc_feature 1..3: note = core
  misc_feature 4..87: note = LE
  misc_feature 88..1020: note = CDS
  misc_feature 1021..1357: note = RE
  misc_feature 1125..1344: note = bridgeRNA
ggatggggtggatggcacctgcttcaaccggcgtcgcaatgcgccatactgcagttgtcgttaactgcttatgagaggagccacccaatgcatgttacaacagtaggcctagatttagccaagagtgtttttcaagtgcacgagatcacccatgacggaaccgttgcgttcaatcggtctttgcgccgggctcagttgctggggttcttcgaacgcttggagccatgtttagtcggcatggaagcttgcggatcaagccattattgggcacgcgaacttagcaagctgggccacgaagtgaaactgatcgcaccagtttacgtgaaaccatatgtcaaacgcgggaagtctgacgcagctgatgcagaggcgatctgcgaagccgtcacccgcccaacaatgcgttttgtcgagatcaaatctcctgagcagcaagccattctatcgctgcatcgggcaagagatctgattgttcgccaaagaacccaagcgatcaacatgcttcgcggtttgttggcagagttcggaattgtctttgctcagggtgtcggacacgcgatccaatttgcaaagcgagtgaccgggggacattcacctgagcttccgcaggccgcccgcgatgtaattttggacctcagcgaacaacttctggctctgcatctgcgggtgaattggtacggccgtcgcatgactgcggcggcaaaattggagccgcgaatagcattgcttcaaactatcccaggcatcggcccaatcaccgcctctgcgatcgtggcgactgtggggagtggcaaacagttccaaagcggtagagatttgtcagcttggctgggcctgacgccaattaacaaatcaacaggtggcaaggagcgtctgggacgcatatcaaaaatgggcgaccgctacattcgacgacttatggtcgttggtatgacgtcccgcatcaaacagacaaaagcgcaccagagcggtttgatccttggttcgctgacatcctgcaacgaaagccagccaagctagcggcgattgccatggcaaacaaaaccgcaaggatcatttgggcggtgctctcgcgcgctgaaccctacgaagtacgaacagcctgaaacgaaagggagcgaacgacgagatagcaagaccaatgaagtgatggcggacaagtcagccgcaaaatcaagacaccctgggctttgtccaggacgataactgtccgtctgcgagaatggggacttgatctgcggaaaccatcaaggccagcggacttgagctccgcgcgaacaggccgaacacaagaccgtatctgacaaatcgctaattacttcgaaaaaagtcttgctttgcaggcgccatccacaca

SEQ ID NO: 8831 - DNA, 1357 bp, unidentified
  source 1..1357: mol_type = unassigned DNA; note = element_ddd3523
  misc_feature 1..2: note = core
  misc_feature 3..76: note = LE
  misc_feature 77..1105: note = CDS
  misc_feature 1106..1357: note = RE
  misc_feature 1109..1347: note = bridgeRNA
ttatggatggcccgcccctcaccgggctgcactgctaggtttgcagtacggccaccacgagggacggagcgaagctatgagcatcgcagtactggggatcgatctgggtaagaacagctgcagcctcgtcgggctggatgcaggcggccgggtcgtgctgcggcggcggatgcgccgtgagacggtgctcgccttcggggcgaagctgccgccctgcgtggtcgctatggaagcgtgctgcggcgcgcatcacatgggccgcgtcctcgccggccagggccacgccgttcggctgatgtcgccggagtacgtgcgtccctacgtcaaggcgcacaagaacgacgatcgcgacgccgaggcgatcgctgaagcggctacgcgcccgaccatgcgcttcgtggctctcaagtcggaagctcaactcgacatgcagaccctgcaccgggtccgtgaccaactcgtcggcgagcgtacggccttgatgaaccagatccgtgccatcttgctggagcggggtcacatcgtgccgcaaggccgtgcgaagctcgcggcctgcctggcggacttgctcggcgacgaggctgccccctctctcacgccgcgcatccgtgccctcgtcgcggatgtccgcgagcgctggcagttcctcgaccagcggattgccgcgctcgatgccgagtttgccgaccacgttcggacggatgagagcgcgcgccggctgaccacgatccccggcattggcgcgctcaacgcgacggctctcgttgcggccatcggcgatgtcgccacgtttgcacgaggtcgcgatttggctgcatggctcggtctggtgccgcgacaggtgacgaccggagggcggccgaagctcctcggcatcaccaagcggggcagcaagtacctgcgcaagatgctgatccagggcgcgcgagctgcaatgccgacgttgcggcagagtgagacgcagttggggcggtggctacgcggattgctggcgcgggctcacgccaacacggccgtcgcggccctcgccgccaagatggcgcgcatcgtctgggcgttgctgcgccacggtcgcgtctatcaggcgacggctgtcgcggtctgatccgagttcgggccgcgcggcacgcgccggccttccgatgtctgcgagcggtgagaggaagatggcctgacagtcgaccggtgttctggaagcctccggcgtaaaatggcgctcgacgccgtcccctttatgaggaccagaacgcgcggatctccatcttggccaacggcagtgccggaaggccggatacgtttatgcagactgctcagaccagcggatccaaagccacttgcggacggggcgggccatacg

SEQ ID NO: 8832 - DNA, 1587 bp, unidentified
  source 1..1587: mol_type = unassigned DNA; note = element_ddd4b32
  misc_feature 1..2: note = core
  misc_feature 3..74: note = LE
  misc_feature 75..1238: note = CDS
  misc_feature 1239..1587: note = RE
  misc_feature 1290..1505: note = bridgeRNA
agaagctatgcgggtgagcggcgagggcaggagatagcaccatcgtcgttgcatgaaaccgatggatgtgccccatgagccaagttaatgacctgagccgttgcctcgccgcctttgatcagaataccactcttacggtggtcgttgagctgagtcaggagagctggctggtggccggattggttcccggcgttgatcgccaaccattgaagaagcaggaccccgatccggtgacgctgcttcggcttctggaacgctggcgggccgaggcggagacgacgggccgggcgattgaacggattgccctcgcctttgaagcgggacgcgacgggttttggctggcgcggtggctgcaggctcgcggcatcgaagtgcatgtcatccattcgacgagcgtcgcagtgtcgcgcgagcaccgccgtgcgaagaccgaccggctggacacggcgatgctcatgcgggtgttcctgggttggctgcgcggcgagcgcgggcactgcgggatggtcgcgattccgacgctcgaggaagaggatgcaaagcgtccgagccgtgagcgggaaagcctggtcggcgagcgcacccggatcgtcaaccgaatgaagtcggcgctggcgcggctcggcatccgcggcttcaaaccggagttacgcaaagcgccgcaaaggatcgaggctctgcgcacgccggaggatatgccgatccccccgaatatgctcgacgagctccgccgcgacatggctcggctcgccgttgttcgagagcagatcgacgcgatcgaacgcgcccgcctcacgcgtctggaacaagcgccggcgacggggccacatgcgatggtgcgcctcttggcccgcgtcatcggcgtcggcgtcgagacggcggacatgctggttcaggaggtgctctcccgaaaacttcgagaccgacgggccgtggcgcggtatgtcggcctcacgggctcaccggacgagagcggcaagaggcgacgggagaagggactggccaaggcgggcaatgcccgagtgcgccgtggcctgatccaacttgcctggcggttcctcaggttccagagggacagcgcgcttgcccaatggtaccgggcgcggaccgagggtccgaagggcgcgcgcaagacaactatgatcgtggcgctcgcccggaagctgctcatcgcgctgtggcgcatggtcacgaccggcgaaaccccggcgggcgttgtgttgcggcaggcggcctgagcgccgcttgatcgtcgaggagcggaaacacacagtttcggcgcccggtcgtgcttttgtgttcaggccgatgctaacgatccgaggtggcggtgccccgaacaactccatggcttcgatgccgtcggcagaatgggcccgccgcctcggagccacgccgctgaagcgattggctgcttcatggtccgggtccttgcggatccaaccgaatacaaggtcgcggcgcgatgctttgcgcccaatagcgagctcccctcgggtcgttcccacagtgcctgagcctgtcgagcggctgaagcaaaggaggtcggaaggggcatcaagagcttgacagaaaattccccataca

SEQ ID NO: 8833 - DNA, 1430 bp, unidentified
  source 1..1430: mol_type = unassigned DNA; note = element_ddd98a8
  misc_feature 1..2: note = core
  misc_feature 3..95: note = LE
  misc_feature 96..1127: note = CDS
  misc_feature 1128..1430: note = RE
  misc_feature 1201..1427: note = bridgeRNA
taatgaaatggactccaccctcctaacaacggcatcatgatgtgccaagcgtgccagatgggctggcacgcgacaattaagagagggagtccaccatgaatgctactgcaaaagtaatcggtttggatattgccaagaacgtgtttgttgcggttggtcgagatgcacatggcaaaattgttttgaaacgcatgctgtctcgtggcgacgtgctcagtacatttgccaacatgccagccacggtgatcggcattgaaagttgcgcaggttcgcattattgggcgcgcaagctgcttgctcatggacatgatgtcaagctgatcgccgctcagcatacaagagcttacgtcagtggcaacaagaacgacactaatgatgcagcaggcattgctgaagcgaggtcacgtgaatcgaccaaatatgtgccaatcaataccgaagcacaacaggatttgcaaatgctgcatcgtgccaggcaagcgctgatgcaagagcgcaccgcgatgatatgccgcattcgcgcctttgcctgcgaatatgggcaagtgtttgcagtgggcgtagcaaaattcctgaagggcgtcacggcatggttagccgaaatagagaatggcttgtcaggttccgcattggctactttcacagaactgaaagcgcaacttgatgacaaagatgcgcgaattgctgtctacgatgcgcggctgacagaagccgctaaagaggatgaacgcgccaagaaattaatggcgatgcctggcattggcaaactcacagccaccgcagtgctggcggcggtggccgatgcgcatcacttcaacaatggccgcgatttcgctgccaatctgggtttggtgccgcgagaacatagtagtggcggcaaacagcggttgtttggcataaccaaacgtggcgacaagtatttgcgtacgctactcattcacggcgcgcgcagcgcgttgctgtgggcaggtgaaaaaccggacaagatgctacgctgggcacttaaacttgccgaacggcgcagtttcaatgtggctgttgtggcgcttgccaacaagatggcacgtgttatatgggcgatattggcgcatggtcgtgagtatgttccggtctggtcgaaagcatgaccagaccggcttgatagatattatgtaatattgattaactgaagcactgttttttgagttgagtaaagcctgccaagtttgcgaaagtgaagaaagattgatgcccaacaggtcggaccgacgtcgggtgaatccgtttagcgtactggccttcgaggccgttaaagtataaggattccggcgtgcgtattgcatcagggccagagcaatagaccgctcaactcataggccgtatagatacatgcaagcttaccctacaggccgatatcaatttttacttgcaaaacgggtggagcccataga

SEQ ID NO: 8834 - DNA, 1228 bp, unidentified
  source 1..1228: mol_type = unassigned DNA; note = element_dddc85d
  misc_feature 1: note = core
  misc_feature 2..225: note = LE
  misc_feature 226..1197: note = CDS
  misc_feature 1198..1228: note = RE
  misc_feature 45..214: note = bridgeRNA
tcttaagttagcatttaaataaaaaagactaatttaaacatataaaatagaaagcacaaaagagaggaataaggttaatttatacggagagacttcagatctcgtcaacattgtaaatcccctctcttttctacacagatttcgaacagttctgtgaggctttaagacctcgattttaagtcgttgaaactcgcgtagtatgtcctttcaaaaaaataatttgttatgaataaagatattaaatattttggtattgacattagttatttagtttttgatgtcacagattcagatggtaattattatcagtttaaaaacaaggtctcaggctttaaagcgtttagaaaactcttaaattctgagagtcattgtgtgatggaagctacaggttactatcattatcagttggcttattatttgtttgaagaaggtctaaatgtttcagtagaaaatccgttgtctgtaaaacgatttatccagatgcgactatccaaggttaagacagataagagtgattcaaaacttatatgttcttatgctgagcaagtagagttaaaactttggaaaggtagttctaaggaagtacaggagtgtcttcaaattaccagaaccctttctgtatatacaaaacagcgaacaatgataaagaataaacttcatggtgaatctgttttaggggagccaagtaaagccattgtgagatctttaaagcgtagtttaaaacatttagataaagagatgtccagcttagaagagttattgctagttttagtaaaagaggctcataaagatttatttactcgaataaaaaccataccaggaatcggaaaaaaaacatctattatgttaatcgttttaacaggtggttttgaacgcttttcgagtgcagcagaattatgtagttacgcaggattaactccagtgattaggcaaagtggaagtagtataaaaggacgaccacgcattagtaaaatgggcaatcaaaaactcaggaatttattatttatgtgcagttttacagcttgtaaatacaacaaagcatgcagggatatttatgaacgattagtagcaaaaggaaagagtaaaaaattagcattaatcgcggtatgtaataagctactaaaacaagcttttgctattgcaaaatcgggtttaatatttgacaaggaatataaaagtacactagtgaaaaattaataagattttacttgttttttagcacagtact

SEQ ID NO: 8835 - DNA, 1148 bp, unidentified
  source 1..1148: mol_type = unassigned DNA; note = element_ddf3bd5
  misc_feature 1..2: note = core
  misc_feature 3..194: note = LE
  misc_feature 195..1136: note = CDS
  misc_feature 1137..1148: note = RE
  misc_feature 48..199: note = bridgeRNA
cttgtgtgtctggaatcgtgcattgttgaggggtgccacggaccaggtgcttgcctgatccgtggcggcggtcgagagcccgtcacccctcaggtagcctaaaccgtggatgagctggggcccgaccgccttcttttgtgaacccgaacagttgcaaggggcaagcccccgcacacaaggaagggaccgagaagatggctgcaggaacggttcaggatgtcggcatcgacgttgccaagcgatggctcgacgtggccgtgttccagacgcaggaacaagcgcgtttcgacaacgacaaggacggatgggtcaagctgagcaagtggctgaaaggccgcaacgtgcgcgccatcggcatggagccgagtggaggctatgagcgcggcgtggccaaggcgctgcgcaaggcgggtttaccggccaggaacgtcaatccgcacaagctgcgccactatgcccgcgcgcttggccgactggccaagaacgaccgcatcgatgccctgctgattgcacgctataccgccgaactgccgacccggccggtgcagtgcgacccaatcgccgagcaactggccgatctggtcgtggcccgcaggcagctcagcgacgacaaggtcagcctggccaatcagctcgagcaggtccgcgagccgacggtcaagcgcatcttcacccagcgtctgcgccgcattgagttcgatatcgcactgctggccaagcgcatggccgatcttgtcgccagccagccggcgttcgcggccagggaccgcctgatccagtccttccacggtgccggtccggtgttcagccataccgtgctggccttggcgccggagatagggcagcagcggcgcgaaatcgcagcccttgctggcctggccccatacgacttcgacagcggcaccttcaaaggccgccgcattatctggggcggtcgtcacgccgtgcgcagggtggtctatatggctgccctcaccgccagtcgctcaaatcccgtcctcaaggccttccaccagcgtctcatcgccaagggcaaggagcccaaggtcgctctcgtcgccgtggcacgaaagatcctgaccatcctcagcgcgatgatccaaaacaacgaaccttggaatccaaacaggtcctgacgaacacagttg

SEQ ID NO: 8836 - DNA, 1141 bp, unidentified
  source 1..1141: mol_type = unassigned DNA; note = element_ddf83e6
  misc_feature 1..4: note = core
  misc_feature 5..188: note = LE
  misc_feature 189..1130: note = CDS
  misc_feature 1131..1141: note = RE
  misc_feature 20..192: note = bridgeRNA
cttgtgtggacgatttgtggtttacttggatgcatcagccgggcagcgcaagcccggctgatgcaggcaggcggccgttttttcgggctggtttagacagccgaggtcaagcaaggccctgcctgctccctttgaccccgaacggttgatcgggcttttgcccgcaccacaagcctgggagcaaggccatgatacacgatatcgccgtcgtcggcatcgacgtttccaagcagtacttcgacatccatatccaccccaccggcaaaagctttcgttgcggctcgtcaccggatgagatcgcacagctggcccggcgccttagggaactgggaccggtagccgtcggcctcgaagcctcgggcggttatgaaagcaggctggccgatggtcttcatgccgccggccttgaggtttatgtcgtcgcccccgcccgcgtgcgcggctttgcccgcgccatcggtcaactggcaaagaccgaccggatcgatgcggccatgatcgctcgctatctgatggcggtgcggtccaacctcacccctcacgcgcctgatccttcttgccgcaggctgagtgcgatcggcgcccaccgccgacgcctgctggccgaaaagagcgggctcgtcagccagctcgacactatcgacgaaccgctggtgcgcgacctgatcgaggaacgcctgcggactatcgcacaggatatcgccacattggatgcggcaatcggtgatgtgctggcgcagacgccgcggttgcgcaaaagccatgcgcgccttcgccaggtcaccggcgtcgggccggtcctggcaacggcactgcttgccgacatgccggaactgggcaaagtctcctcaaaggtcgccgccgcccttctcggtgtcgcaccctatgcgcgccagtcgggcgcatcggaccgaaacggacgatgtgcgggcggcagaaagcacctgcgcgacatcgcctacatggccgtgctcagcgccatcaaggtcagggaccctgtcctcggcggcttctatcaaaggctcagaacgcgcggtaagcccttcaaactcgccatgatcgcaaccgtgcgaaaactcatcacgatcctcaacgctatcgctcgatcagaccctgctttccagcaataactccacggttg

SEQ ID NO: 8837 - DNA, 1606 bp, unidentified
  source 1..1606: mol_type = unassigned DNA; note = element_ddf8e83
  misc_feature 1: note = core
  misc_feature 2..283: note = LE
  misc_feature 284..1495: note = CDS
  misc_feature 1496..1606: note = RE
  misc_feature 17..303: note = bridgeRNA
cctcctgttactatagatttagggactaaaacatgacaaccagccatgttttcgccacattgttgcctaagctgatagaatgaaagagcaatgggtctgacggaaacctccaaggactaaccacgtccgtatttaagtcagtcagccagcctctcattcgcagcgttcgatttatgcaggtagaaccactgtcaaccagtgcgtccgtgtcatcaaacagatagaatcggcaatgatagaaggctggcctgccaattgttaatctgtaatgggagcgtgtttgatgaacgcagtaggaattgatgtttccaaaggtaagagcatgattgctgttgtccgtccctttggagaagtggtcgttaaaccgtatgaggtgcctcacaccaccagtgaactccgtaaactggcaggctacctgaaaagcctggacggtgaaacaagggccattctagagcatacggggcgatattacgaaccagtagctcagatactccataactcaggaatctttgtctgcgcagtcaatccgaagctcattaaggattacggcaacaactccctccggcgtgtcaaaacggataaagccgactccatgaagatcgctcggtatggtcttgacaactggatagaactacgtcaacatactcctatggatacgattcgttaccaactgaaaactatgaaccggcaatatggtctatacaacaagagcaagattgctatgaagaataacctcattgcccttcttgatcagacctatcctggagctaatgcacttttctccagccccacccgtgaggatggcagccagaagtgggtggactttgctgcgtctttctggcatgtggactgtgttcggtgtatgggacagactgcatttattaagcgttaccatacatggtgccagcggcatgggtacaatttcaactctgtgaaagcctctgaaatccatacgcaagcgaagaacttaattgccatgctccccaaggattccttgaccaagctactgcttcggcaagctattgatcagctaaacgtcacagctagaacggttgaattgcttcgcacagaaatgaagcggctggctcagcaacttcctgaatatcctgtcgtaatgtcactgtacggcgttggagagtcgcttgggccacaactcatggccgaaattggcgatgtgatgcgcttcgagcgccgcaactctttaaccgcctttgccggcgttgaccctggtgcaaaccagtccggtagatacgaggccaagagcagctccgtttctaaacacggctccccggagctacggaaaacgctttttctggtgatggatgtgcttattaagaaagctccgtctgacgacccggtgttttgcttcatggacaagaagcgtgccgaaggtaaaccgtacttcgtctacatgaccgccggggctaacaagtttctacgtatttactatgggaaagtgaaggaatacttggcttcgcttactacaaccgaatagtcccctgcaattcacttgtcagccagcgctttttgcggtggcttgtttgtggtgcatatttttactggctcatttctttttcaattcaccacttgacttttactttgcagg

SEQ ID NO: 8838 - DNA, 1347 bp, unidentified
  source 1..1347: mol_type = unassigned DNA; note = element_ddfd43e
  misc_feature 1: note = core
  misc_feature 2..64: note = LE
  misc_feature 65..1093: note = CDS
  misc_feature 1094..1347: note = RE
  misc_feature 1117..1335: note = bridgeRNA
tgatgccgtggacggctccccatcccccgccgcaccgtgaggtcggcagagatggaggagcgccatggaagaggtcgtcacggtgggcttggatatcgccaagtcagtgttccaggtccacggcgtcgatgctgagggccgggtcgtcgtgcagcggaaactttcgcgggcgaagctgctcccgttcttcgagaagctgccgccttgtcttatcgggatcgaagcctgcgccacggcgcaccactggggtcgccggctgaccgagctcggccacgaggtgaagctgatgccgccctcgtacgtgaagccgtacctgaagcggcagaagaacgatgccgctgacgcggaggcgatctgcgaggcggtgaccaggccgagcatgcgctttgtcgaggtcaagagcccagcgcagcagagcgagctggtgatccaccgcacgcggatgaccctgatgcgccatcggatcgagctctccaacacgatccgggcgcacatggccgagttcgggctggcggcgccgatcggccggatgggcttgcagggtctgatcgagatcgtgcgagacgaagctgatgagcgcgtgccagcgagcgcgcggatctgcctgaagctgttggccgaccagctcgtcctggtgaatcgccaggtgctcgagaccgaccggctgatccttgccagcgcccgggccacagaggtcggccggcggctgatggccgtgcccggcgtcgggccggtgctggccagcgccatcgtcgccagcgtgccggatccccacgccttcaagaccggccgcaacctcgcagcctggatcggcttggtgccgaagcagaactccagcggcggcaaggcgcggctgggcgggatcaccaagcagggcaaccgatacctgcgccagctgctggtcatcggcgcgctggcggtgatccgctacgccgagcgacacgggacccggcggccctggctcgtgcagctgatggcgcggcggaccacgaagatcgcggcggtggcgctggccaacaagaccgcccggatgatctgggcgatcatgaccagcggcgaggtctaccgggagccggtgccgcacgccgcgtagagatcaggcgccgctgcgccggacaagcttgggaagggcgacgaaggagtgatgtgaaccggtcgaaccgggaagcgggagaacccaatgcgccagagggccttcaagcccgtgcttttggtcgggacccagcttcgcggagggcatcatggccagcggacctagcgccgcaccaacaggtcgaagacatggccgcaccgaccagcctcacagaactctcagatcaaccttgccaacggggagccgtccagaca

SEQ ID NO: 8839 - DNA, 1442 bp, unidentified
  source 1..1442: mol_type = unassigned DNA; note = element_de018ba
  misc_feature 1..2: note = core
  misc_feature 3..230: note = LE
  misc_feature 231..1289: note = CDS
  misc_feature 1290..1442: note = RE
  misc_feature 10..223: note = bridgeRNA
gctctaccttcttgatcgggttgatcgagccattcgtagggttgggtcgcccaggggtgctgggtgtggctatcaggcggctgccgtctcgtggtttccctggcttcgccgcccggcaccccacgacgactcggccgccgattaggaagtgcgaacaagtcgctgtgtagagcaatgccggcgaggtcgtccgtggtacgcacagaacgaacacgtacgtcaggagcgcgatgagccggatatgggcggggatcgacagcggcaagggccaccatcacggcctcgccctggacgaggacggcaagacgctgctgtcgcggcgggtggccaacgacgagcccgagctgctgaaactgatcggtgacgtcctggacctggccgacggccgtcaggtcacctgggccatcgacatgaccggcggcgagcccgcgctgctgctgaccctgctggtcggccacggccaggaggtcctctacatgcccggccgactggtgaaccgggcctccgacggctaccgcggcgagggcaagaccgacgcccgcgacgcctacgtcatcgccgaccaggccaggatgcgccgcgacctgcggcccatccgccccagcgacgaagccgccatcgaactcaagctgctgaccggacgccgagccgacctggtcgaggaccgcacccgcgccgtcaaccgcctccgcggcaccctgctgagcatgttcccggccctggaacgggccctggacatgaccaacaccggcccgctcaggcccctgacgggctatcagaccccggccgcaatccggcgcgcaggcaccgcgcggctgacgaagtggctggccaaccgcaaggtccgcagcgcgagagccctggccgaagcggcggtcgaggccgccgagcgccagcacaccgccgttccaggcgagaagaccatcgccaagctggtccacaccctcgccgaggaggtgatggccctcaacgagcagatctccgagatggacaagctcatcgagggccggtttcgcgagcacgagctcgccgacatcgtcctgagcgtcccgggcatcggcaccgtgctgggtgccgagttcctcgccgccgtcggcggcagcctggacgagttcgactccccggacgccctggcggccttcgccggcgtcgcccccgcacctcgcgactcgggcaacgtcagcggcaacctccaccggccgctcgtctatcaccgaagactccagcgggtcttctacacctcggcgctggtcagcatccgctacgacccgaactcgcggaagttctaggaccgcaaacgcgccgaggggaagaaacacgtctaggccgtgctcgccctcgcccgccgacgcgtcaacgtcatctgggccctgatccgtgaccgacggtgctacgaagtgacaccaccggtcaccactgccgcttgacaacagcattaggaa

SEQ ID NO: 8840 - DNA, 1343 bp, unidentified
  source 1..1343: mol_type = unassigned DNA; note = element_de11ad3
  misc_feature 1..2: note = core
  misc_feature 3..82: note = LE
  misc_feature 83..1093: note = CDS
  misc_feature 1094..1343: note = RE
  misc_feature 1101..1339: note = bridgeRNA
ttaatgagatggtcagcctgaccgagaagccctgcaggtttacgcttgcagggcttttcttgttttcggcggaggatctctcatgaacaagatgacgcttctcggtatcgacattggcaaacacagttttcacctgcatggccaggacgccaaaggtcatcaggtattgcgcaagaaaaccaaccgcggccaattgctcagcacattggcccggttaccggcctgcacggtggtgatggagtcgtgcggcggcgcccactggctggctcgacaggtcggtgcattgggccacgaggtgaagctgatcgcctcgcagaacgtcaaaccgttcgtcaaaggcaacaaaagcgacttcattaatgccgaagcgatttgcgaggcggcgagccgccccgcgatgcacttctgctcgatcaaaaccgcagagcagcaaacgcttttagccctgcatcgtgtccgagattccttgattggtcatcgcaccgtcgcgaccaaccagattcatggctttttgctggaattcggcatcagctcacccattggcgcaactgcattgcaccgcgtgccggcgctgctggacgatgcacagcacacggttccattgtgtctgaagggcgtggtgatgcgcctccatcatcaaattcaactgctgaatgatgagatcaaggacatcgagtccgatctaaagcaacagttgaaagacgatgctggaagtcgtttgcggagtattcctggcatcggccccatcaccgccagtgcggtattggccgatgtaggcgtcgaactatcgaagtggacgcgattttgccgcttcgctagggctggtgccgaggcaatattcgacgggcggaaagacagtgctactggggatcagcaagcgcgcgacaagcacatccgccaactgctggtgcagggcgcgcgatccatgcagcatatcgataagcgggaagacgcccttgggccttgggttcgggagcttctgacgcgtcgacactccaatgtcgtcgcgtgcgcgctggcgaacaaactggcgcgaatcgtgtgggcggtgctggccaaaggcggccagtacgcccctcatccgaatgcttgaacgtacagctttactatcggcttttgcgacgtcactgattgatgacagtaaacggcaaacggcccgactgagaacctggcaataaaatcagttttagaggctgagggttttttcaggacagtcgggagcggctactcatcgagggccgagcgttgttgacgcaacgctcaccacgagcccggatacattagcgcaagccagctttaccgaaaacagcccatgaggttgcgggagatgggctgaccataca

SEQ ID NO: 8841 - DNA, 1232 bp, unidentified
  source 1..1232: mol_type = unassigned DNA; note = element_de219a2
  misc_feature 1..2: note = core
  misc_feature 3..252: note = LE
  misc_feature 253..1224: note = CDS
  misc_feature 1225..1232: note = RE
  misc_feature 6..199: note = bridgeRNA
cttatatcttgattctgaactccaaaaaaggcaggatccccgactgatcatcgggagggcaatgaggaagtcgagcgatccctgaggcttaaagcctgtccggcagattgaactcctcgctgtccgtactcgtcattgtagttcgaacggtatacttaggcctagagcttgtatgaataaggttgaacaagacgcgtatcctccgctcgatcataacgggttgttgttattattaatttatgggtatttactatgtataaaatagtggtcggtgtcgatattgccaagctcaagtttgacgtagccagcctaacggatggcaagtacaaacataaaaccttcaccaacgatgaacaaggctatgcagccttcctcagttggttgctcgcgctatttgccaacgataagcctatgatttgcatggaggcaaccggggcttatagcatcccattggcggactacatgatcagtcaaggttatcctgtcagtgtcgttaatcccgccaaaatcaaggcatttgccaacagcgagttgagccgaaccaaaacagataagtcggatgctaaactcatcgctcgttatgccttcaccatgcgaccctcgctttggactcctccgccccaaaatattcgcgtactgcaagctttagtacgccgtgttgaacatttactggaaatgattcaaatggagcgcaaccgccaggataccgcggatgctaatgtcgttgattccattaaaatcgtcctggcaacactggaggcggaactgaaagcgacacgcaaagctattcatgatcatatcgacaacgatccagagctaaaaaaacgccgcgatttgctgattaccattcctggtatagctgaggctagcatcgcccatttacttgttgttctcagcgatcatcatggttttacctcggccaaacaggtcgttgcattcactgggcttgctcctctcttacgagagtcgggtcagtggtcaggcaaaacacgcatagccaaaaacggtgacgctgccttacgtaaggctctgtatatgccagctctttcttcatggcgacataaccctgtcattcgtgcgttctgtcttcgccttaaagctaatggcaagaatggtaaagccattgtctgcgccgccatgcgtaaactcatccaccttagctttgctatcttaaaatcaggtgaacctttcgaccccaattttaccttgcaaaaattagtttaagacggtat

SEQ ID NO: 8842 - DNA, 1139 bp, unidentified
  source 1..1139: mol_type = unassigned DNA; note = element_de32267
  misc_feature 1..2: note = core
  misc_feature 3..191: note = LE
  misc_feature 192..1127: note = CDS
  misc_feature 1128..1139: note = RE
  misc_feature 15..201: note = bridgeRNA
cttgtatcttaattctaatgtattatagacacaagggaaagatacggtagaccgtttaatctctgggttttaaagatcgttaaggagcttggtcgccgtatctatcctcctcaaataaacccgaacagttgtgtggagccgcggaagcgagcccgaattaaacgcaagaatgggaatcaggaggaaaatcaatggaaccagtatatgccgggatagatgtctcaaaagctactatcgacgtggcaataacaggagaaaaggaggtacaaagttttagtaatgatgaagtaggcgtgatgaagctggtcagctatttgaagattaagtcaccggtgctaacgatagcagaagctaccggggggttagagaaattattagccggatacctgactgaagcagggttacagttagcaatagtcaatccgaaacgggtccgtgactttgccaaagcgaaagggaaactagctaaaaccgataatattgatgcccgcatcatggcggaatttgcgctggatatcaaaccaatagtccgaccgttagccgataaagacacagaagaaataaaggcaatcatgacacgtcggcaccaggtaagggagatgataactgcagagcggaaccgtctatatctctctaacaccgcagtaaagccgtcaatcgaagagcatattgaatggatgaagaatcaattgaaagacattgataagaatctggaagaccagatcaaaaagagcccgatatggaaagaaaaggatgcattgctaagaagcgtacccggagtggggaaaataacttcgatcacattgatgggctcattacctgagttagggaaactaaaccgcaaagagatcgctgcgttagtgggcgtagcgccagtcaacagagacagtggcacaatgcgaggaaggcgtaccattttaggtggccgtgctagagtaagaacacggctttatatggcagctctttcggcgactaagcataatccggtcatcaaagaatattacaatcatttattaaaattgggcaaagcgaagaaattggctttaacggcatgcatgaggaaactgctgactatacttaacgcgatggtgaaaaacaatcagaaatggcaatgtaaaacaatatagtcaagacagttg

SEQ ID NO: 8843 - DNA, 1356 bp, unidentified
  source 1..1356: mol_type = unassigned DNA; note = element_de448ad
  misc_feature 1..3: note = core
  misc_feature 4..74: note = LE
  misc_feature 75..1103: note = CDS
  misc_feature 1104..1356: note = RE
  misc_feature 1099..1342: note = bridgeRNA
tgatgggggagacggtcccgctccaacccggttcgtcgtatgatgaatagccaactcaaccaggagccattgatatgattgccagcacaatcggccttgatctggccaagcataactttcacgtccatgcggtggatgccgcgggtttagtgattaaaaccgctgcgctccggcgaagcgagatgatcaagttctttcagagtgctaagccatgccttgttggcatggaagcttgcgctaccgcacactactgggcccgcgaactgacgaagcttggccacgaagtcaaattgatcccgccttcgtacgttaagccgtttgtacggcgcggcgctaagaatgatgctgcggacgctgcagccatctgcgaagccgtccgtcgacctgatatgcgtttcgttgcgatcaaatcggaagccaaccagggcttcctgatgttacatcgagctcgaggtctgctggtgagacaacggaccatggcagtatgtgcgatccgcgctcaccttgctgagtttggaattatcttcggtcaaggtcgacaacgcatcgagaccataatcccttcgatagaggaagtcgcagcgtcgttaccagaacatgcccggttcgcattgaacagtcttatgcgaacggtcggcgagttgaacacgcagatagagggaattgagacgaagctggcggaagtgggccgatcagatccagtctccaatctgctatcttcgatcccaggtgtcggcccaatcacgtctacggctatcgctgcgaccgttccgaacgcgagaatgtttcgctctggtcgagagtttgccgcctggctgggcttgaccccacgtcaaaactccagcggtggcacaactcgattaggaggcataacgaagcaaggagatgcgtacctgcgtcatctgcttgtgatcggtgccagaaacatcgttcggtatccaaaagcgcgagcgaaagtcggcggagcttggatcgacgctttgctgcaacgacggcgtcctatgattgtggccgtcgccgtggccaacaagcttgcccggatcatctgggcgatgatgacgaatggagaaatgttcagagaggcacacgttaaggccgcataaggccgcaacccaatccagttggtgtaaggtgcagaagcaacagatggtcatccagcggagctgaggatcgagcaaacccggagagctttaggcgccattcaagcgcgacccgttgatgaggcctcgatccgcgtactccatcagggccagcgaccattgtatcggtcgcagttaaaggccgaatacatgaacgcacccgaatgatgacctgaacttgcagaaagcctcttgcgcccgcggggccgtctataca

SEQ ID NO: 8844 - DNA, 1413 bp, unidentified
  source 1..1413: mol_type = unassigned DNA; note = element_de4e197
  misc_feature 1..2: note = core
  misc_feature 3..121: note = LE
  misc_feature 122..1159: note = CDS
  misc_feature 1160..1413: note = RE
  misc_feature 1195..1384: note = bridgeRNA
agatggggtaacgggccagcgccccgggggctctagcggcaaagagtggtcatccctcaaactgatggtgtcaataaccggattcggcgcgagccgctccaagcatcatcgagggatgaccatggaccattatgcaggaatcgacgtgtcattggaatgctcgagcgtttgcgttgtcgacacggctggcaagattgttcgagagggcaaagtggcaagcgagccggcggcgctgatcgcctggttgaggttgctcggcttcgatctggcacggatcgggctggaggctggcccgttatcgcaatggctatacgcggcgatgcgggaagctggcctggcagttgagctgttggagacccggcatgtgcacgccgccttcaaggtgatgccggtaaagtcggatcgcaacgacgcgcgcggcatcgcgcaactgatgcggctcggctggttccgcccggttcattgcaaatcgatcgcagcgcaggaggtgcgggcaatgctcaccgcgcgcaagcttgtgcaatcgaagctgcgcgacatcgagaacagtctgcgcgggatattgcgcggcttcgggctgaaggtcggaaagaccactgagcgcagctttgcagggcgggcgcaagagctggtggccggccatccagccctggagacgattgtcgaggccctgctcgcggtacacgccgtgctcaagcgcgagttcgacagttttgagaagcgcgtgcggaccatggcgcgcgcgcatcagcagactaagttgttaatgacaacgccggccatcggccccgtcatagcgctcacctacgcctctgccatcgacgatccaggacggttcaagtcgtcgaaggcggcagggcctcattttgggctcaccccgaagaagtaccaatccggcgagaccgactacaccggccgcatcagcaaaatcggcgacgcctcggtgcgcgaagcgctctatcaggcggctcacattatgctgaccaagccggttaagggctgctcagaactcaagagttgggcgatgcggatcgccaagcgggccggcatgcgcaaggccaaggtggcgcttgtgcgcaagctcgcagtcatcctgcatcgtatgctcgccgatggacaagttttcaatccagccgccaggacggtgaccgcggcttaataacaagggagatcgaggtttcgggcgggccacgacaccaggcctttcccggagcgacgtccctcgccgggacgatggatcaggccaggccgccatccgggacgtggcatacgaccacgcatcagtagattggccgacctgctcctccacggaccccatcaggtggcggccttcagcgccgaccccgtacagaagcaagtccccggcgagcggatgacgcaaaaagggattgactaatcgaggcccgttacaga

SEQ ID NO: 8845 - DNA, 1459 bp, unidentified
  source 1..1459: mol_type = unassigned DNA; note = element_de5da10
  misc_feature 1..2: note = core
  misc_feature 3..142: note = LE
  misc_feature 143..1177: note = CDS
  misc_feature 1178..1459: note = RE
  misc_feature 1198..1457: note = bridgeRNA
agatggtatggacgcctcccacctcgacgacgtgatggcgggcccctgagagaatgcgcaaatgcagagggggcctggccatcaacggcatcaagtgccaaagtggagtttctaatcaaccactgagagatggaggcccccaatgaatgttacgacatttggcgtggatattgcgcagaacgtgatgcaagtgcactgggtggatggccagacgggcgaagtcgggcggcgagcgctcaagcgctcgcaactggcgcccttttttgcccgtcaggggccgtgccggatcgtgcttgaggcgtgcggcggcggtcattattggggccgtacgttgtcggcgctgggccatgaggtgcggctgatccatgcgcgccatgtgcgcccgtatgtgcgcggcaacaaggacgatgctgccgatgcgcaagccatctggagcgccgcgcagcaacctgatcggcgctgggtgccgataaaaagcgaagagcagcaagccgtgctgtcactgcatcgggtgcggtcgcagtggatcaaggttcgaacgcagacgatcaacagcttgcgcggcttgctgtacgagttcggtgtggtgctgcccggcggtcgccaggcgggcgtcaaggccattggggtccatcgcgcccagatcgatgcgcaggtgccggcgctgatgcatgcgatgatcgatggacagctgcgcatgctgagccagatcgatgagcgcatcgatgcgatcgaggcgcaactgcacgcgcttgagaagcagctcgatagcgcccgtcgggtgcgtcagattcccggcgtcgggctgctcggggccacggccttggcggcggtactgggtgacgatgccaagggctatcgcaatgcccgcgagtttgccgcgtgcctgggcttggtgccttgccaccggggcaccggtggcaaggtcgtcatagggcgattgagcaagcgcggcgatccgtacctgcgcaccttgctcatgcacggggcgcgcgcggtgatcttcagctcgaagaccaaaagtgcatggttgcaacagctgttggcgcgtcgacccgttaatgtggtggtggcggcgctggccaacaagatcgcccgcacggcctgggcgctggtggcgcatgggcgtgagtaccaggcgggaggcttcgcgcacgcgccggcaccccaaccataacactcccacttcaaggagatgatgccgcaaagagtgcgtcactcgaatcaatgaaatgatggcaaccgcggtcggtccgcgggtcggtcaagctgaattccgccttgagccaggcacacgcccagctcgcccgaaagatgagctccgaccccgcaaatacccatcaaggccagcagtcggtttatccgtcactgcacaaacaggccggatataagactgcaaccgttctcgccacgccacgcagttcaaaaattcgattgccactcgggaggcgtccatata

SEQ ID NO: 8846 - DNA, 1306 bp, unidentified
  source 1..1306: mol_type = unassigned DNA; note = element_de65188
  misc_feature 1..2: note = core
  misc_feature 3..191: note = LE
  misc_feature 192..1151: note = CDS
  misc_feature 1152..1306: note = RE
  misc_feature 28..201: note = bridgeRNA
cttgtgtccaggaaatctgtcagaatgtgcgaacgggcggttgcgcaccaaccgcccgttgctggaactgagcccgttgcgcccaaaggcgaccgagcctgtgtcagagcgagggacagctccggtgtcttcctcaacccgaacagttgcaagggcttcgagcccgaaccgagcaaggaagggagtggatgatggcacaaaatgctcatgttgtcgtgggtatcgatgtcgccaaggacaaggtggatgcgtgcattcgtgcgttgggattacggcaaaccctcccgagcacgacccaggggcaccgtaagctggtcgcctggcttcgcaagcaccaggcgaacaaggcggtgatggaggcgagtggcggctatgagcgtgcctgggccaaggtgctgcgcgacgccggcatcgaagttcggatcgtcgaccccaaacgggtccgcagcttcgcgctatcagccggacggctggccaagaacgatacgatcgatgccgagatgattgcctggttcgccgagacattcagcgatgcgccgggccagaaacacgatgcggcacaagaggagctgcaggcactcgtaaaggcgcgcttaagcctgattgattttaggatgcgcttggtcagccaaagcgagcatgccgcgccgggattggtgcagaaggcgcatgcccgcatcttgaagaacctggcctgcgagattgccaagctcgaggccgccatctgcgccaaaatcaagtccatgccggattttgcggaacgcgccgagatcatcgagagtgtgccggggttcgccgagacgagttcggcaaacctccttgcaggaatgccggagcttggtcaggtgagcaacaagatcgccgcggccttgatcggggtcgccccctatgacgacgacagcggaaagcgccgcggcgagcgccacatcaagggaggccgccgctgggtccgtaacgccatctacatgccctgtgttggcgcagccacgctgaacaatcccgtgctgaaggcctactatcagcgcctgattgccaaaggaaaagagccgaagattgccatcatcgccggcatgcgcaagctgatcatcatcctcaacaccatgatcgcacgacggcagaaatgggatcccagccgttacgcgttgagctgacgagcgcgcccaccgcgatcggttccgcgaccgagcgcttgcaaagccgacagaccggtgaacgggcggggtcaaggccgcagccgccgtaggcgggggcgcgccagcgccagccttgaggccggccgatcaccgggctacttccagcacagttg

SEQ ID NO: 8847 - DNA, 1487 bp, unidentified
  source 1..1487: mol_type = unassigned DNA; note = element_de67184
  misc_feature 1..2: note = core
  misc_feature 3..248: note = LE
  misc_feature 249..1466: note = CDS
  misc_feature 1467..1487: note = RE
ctaatgggggctaccgggctggcctgcaggggcggactcggttccggtagcgcccagcgggtgagcacttgcttagccaggcggtcgatgcctgaacgtagaccgtgcccccgctggccgcgaggaggacaggaccgctgatggggtggcgtgcccgctggtagctggcgtgagcactgatccattaggccgctggcgtccttctccgtgctgccgctgacatcggatgccgggcgcgggaggtggcagtgctgttcgctggtgatgactggtcggaagatcatcatgatgtggaggtgcaggaccagccgggccgggtgctggggcgggcccggctcgcggagggcgttgcggggatcacccggttccatgagctgatcggccggttcgctgatccggatgccgggccggaccaggtgatgatcgggatcgagactgaccggggcccgtgggtggccgcgctgatcgccgcaggttacatcgtgtatgcggtcaacccgcggcaggcggcccggtaccgggagcggcaatcgacctcgggagccaagagcgacgccggggatgcgcacatgctggcggatatggtgcgcaccgactcgcatcagttgcgggcggtggcgggggatagcagccaggcccaggcggtcaaggtggtggctcgcgctcatcaggccctgatctgggaacgcacccggcacgtactgcggctgcgttccgcgctgcgggagttcttccccggcgccctggaggccttcgatgacctgaccgcccccgacgccctcgaactgctggccagggcgccggacccggccagcgcggcccggctgagcatcgcgcagatcaccgcggcgctgaagcgggcccgccgccgcaacaccgcggacaaggcgacgcggatccaggctgccctgcgtggccagcagctggcccagccccaggtcgccgctgctgcctacgccgctaccgtgcgggccgccgccgcggtgatcagcgtcctgaacgagcagatcgcggtgatggaggcccaggtggagtcccattttggcgagcacccggacgctgagatcatcgtgtcccagccgggcctggggaaggtcctcggcgcccgggtgctcgccgagtccggggacgacccggaccgctacaccgacgccagcgcacgcaaaaactacgtcggcaccagccccatcacccgcgcgtccggtaagaagaaggccgtgctcgcccggtacgtgcgcaaccgtcacctcgccgatgcgctccatcagcaggccttctgcgcactgaccgcctccccgggcgcccgcgcctactacgacgagctccgcggccgcggcaccagccaccatgccgccctgcgccagctcgccagccgcctggccggcatcctgcacgggtgcctcaaaaccggcaccccctacgacgaggtaaccgcctggcagcaccggctcgaagacgccgcttgacaaacaaacgccatggggtgt

SEQ ID NO: 8848 - DNA, 1350 bp, unidentified
  source 1..1350: mol_type = unassigned DNA; note = element_de671ca
  misc_feature 1..2: note = core
  misc_feature 3..54: note = LE
  misc_feature 55..1107: note = CDS
  misc_feature 1108..1350: note = RE
  misc_feature 1122..1337: note = bridgeRNA
tgatggggtggatggctcctgctccaaccagcgtcgtaatgcgctatactgcaggtgtctaaatctgcttatgagaggagccaccccatccacgttaccacaatcggccttgatctggccaagaacgtttttcaagttcacgggattacactggacgacgaggtcgccttcaaccgtccattgagacgagcacagttgctgccgtttttctctaagcttaatccctgcctgattggtatggaggcttgcagcagtgcgcatcattgggcacgcgagttgacgaattttggccacgacgttcggttgatcccaccgatatatgtgaagccatacgtaaagcggggcaagtccgacgcgattgatgcggaggccatttgtgaggccgtcacccgaccaacaatgcggtttgttgcgatcaagacggtcgaacagcaatccctattgtcagtccatcgtgcgcggagcctcttggttcggcagcgcacccaactcatcaatggtctacgcggaatggtcgccgaatttggtgtgtatatcgcgcgaggtctcgctcgggtcatcggttttgccgagaacatactgactggcgaagttttggagctgcctgatatcgcgaacgaggtgatccacaacatgtgcgaacatcttatggcattgcatgcacgcgtccactggtatgaagatcgcctgaagcaggttgcaaaagaagatgcgcgagtgcggctgttgcgcacaatacccggcgtcggcgcagtgacggcctcggcaatcatcgccagcattggtgatggccatcagttcagcaacggccgcgagtttgcagcatggctgggactgacgcccgcgaataaatccagcggcggcaaagagaagctcgggcgcattacaaaaatgggcgatcaatacttacgatcattgttggtcgttggcatgacttcgctcgtccgacagaccaagtcgcacccggaacgggcaagcaagtggctgacttcgctgctggaacgcaaaccggcacgcgtcgcaactgtcgccatggcaaacaagaccgcacggatcgtctgggccgttttgacccgcaacgaaccttatacaccgcacactgcctaaaaggagaaagaacaacgagttagcaagacccgcgagatgatggtgcataagtctgccgccaaaaccaagacaccccgccgaatgtcccgggcgcaattgcccgctaagctgtaagggacttggtttgcggaacccatcagggccagcggtcaaaaccgcgcaaacaggccggacacatgactgcttctgacaaatgcacaaatctgatcaaatatgtcttgctatgcaggagccatccacaca

SEQ ID NO: 8849 - DNA, 1440 bp, unidentified
  source 1..1440: mol_type = unassigned DNA; note = element_de706e2
  misc_feature 1: note = core
  misc_feature 2..226: note = LE
  misc_feature 227..1426: note = CDS
  misc_feature 1427..1440: note = RE
  misc_feature 13..241: note = bridgeRNA
ctactagacgattgtcggtagggccggcgtctggccagactcggtccaggtgatcggcgggtggctctccatgcggctgcccaccagcgtcaccggtgtggctctctatcggtctgcggcccgccggtcaccgtgacgaggcgtggctcaagaagggactgccctgctcgtagtagcactgcccacctcgccgtccatcggttcgagatcaggcgggagcaagagcatggaacgcatcgtcatcggggtcgatccccacaagctgtcggcgacgatcgaggtcgtcgacgaccacgaacgcaagctcgggcagggccggttcaccaccaacagggccgggtacgcggcgatgctgacgtacgtccgggcgtggccggggcggacgtgggcggtcgagggcgccaacggcgcgggccggccgctggcgcaacggctgctcgaggccggtgaggacgtcgtcgacgtcccggccaagctcgccgcccgggtccggctcttcgacaccgggcacaaccgcaagaccgacgcccacgacgcgcactccatcgcgatggtcgcggtgcgcacccagggcctgcgggtgctggccctagtcggtgagctcgaggcgctgcggatgctggccgaccggcgtgaagccctcagcaggcggcgggtccagaccgtggaccggctccaggccttgttggccgaactgcttccggggcaggcgaagaaggacatcaccaccggccaggccaaggcgatgctggcctcggtccgcccgcgggacatcgcgggcaagacccggcgccggatcgcggccgaggagctgtccgagctggtcgcggtcgaggcgacgatgaagaaggccaacgccgagctcaaggcgatggtcctggcccgcgggtcgcacctgatggacctgcgcggtgtcggcccggtggtcgccgcccgggtcctggccgacgtgggcgacgtctcccggttcgccgaccgcaaccggttcgcgtcctggaccggcaccgcaccgctcgatgcgtcctccggcgagcagagccgccaccgcctctcccgggccgggaaccgccgggtcaaccacatgatccacatcgccgcgatctcccagatccgcctggacaccgacgggcaggcctactaccggcgtaagcgcgccgaaggcaaacgacccctggaggcgatccgctgcctcaagcgcaggatctccgacgccatcttccgccagctcgtcaccgacgccacagccgcccggcgcgaagacatggacgcgggcccgggagggcaccgcggggcgactcaagaatccagcgcggccggctcgcacccgcacaccgacacttcggatcagccacttcccggacccgcaccaacgacgctacgcccagccgccgcggcacggaagacccacctcgaagcgaccggttgacaacagaagggagc

SEQ ID NO: 8850 - DNA, 1617 bp, unidentified
  source 1..1617: mol_type = unassigned DNA; note = element_de75dec
  misc_feature 1..7: note = core
  misc_feature 8..275: note = LE
  misc_feature 276..1487: note = CDS
  misc_feature 1488..1617: note = RE
  misc_feature 29..253: note = bridgeRNA
ccccccgttaccttttaagtagccccgccatccgtcaggatagaaggggtcgctggcctgaggaccccggcatgattgatgcccccagtcatcatgatccggggggtgtagtcaccggggttcgaaggcaccagggaaatcgctgataggggccagaaccactggcagaacacatgccttgagcccgaccgtaacgtggatgccgaacccaggagccacagcaccaccggccagccgaaccacaaccaaatatccggtcacatgagtcgaagaagatgagtgacatgatcaccaaccacgctgacatcgacgtattcatcggcatcgatgtcggcaaacacaaccaccacgccgtcgcactcgaccgcgacggcaaacagctcttgtcgaaggcactgccgcagaacgaaaccaaactccgggctttgctcgaccggctgcgcaagcacggaactctgctggttgtcgtcgaccagcccgccaccatcggggccctgccggtcgcggtcgcccaagccgagtccatcacggtcgcctatctgcccgggttggcgatgcgccgcatcgccgacctacaccccggtgaggcaaaaacggatgcacgcgatgccgcgatcatcgctgaagccgcccgcacgatgccccacactttgcggggtatccgggtggcggatgagaacgtcgccgagttgtcgatgctgtgtggctatgacgatgacctcgcgaaacaggccacggcgacgtcgaatcggatccggggtctgctcacccagatccaccccgagctggagaccgtcatcggtccccacttggatcatcccgccatgctggcgctgctggcgaagtacccgacaccgaaagcgttgcggcatgccggcaaacaccgcgtcgagacactgctgcgcaagcaggcgcccagggcgtggaagcggtgggcgacagcgatcttcaccgcgctcgacgggcagaccgtggtggtgtcgggcaccgacgccgccggcctcgtcctgccccaactggcgacctcgttggcgcagacacgccagtcgcgagacgaagtcttcgcccgcatcgaggagctagtcgaagcgcatccgcttttcgaactcctgacgtcgatgccggcagtcggcgtcaggacagcagcgaggatcctgaccgaggtggtgggtaaggacttcgagtctgccgggcacctcgcatcgtatgccgggctggcaccggtgacatggcggtcaggaacatcgattcggggtgatcactcgtcgcggcggggcaacaagatcctcaaacgagccctgttcttgtcggctttcgcggcgttgaaggatccgttgtcgagggcgtattacgacaagaaacgtgccgagcataagaagcacaaccaggccctgatcgctttggcgcgcaggcgctgcaacgtcctgtacgcgatgctgcgtgatggtgcctacttccacacacccgaggcgaccacagctgcctgaatcgacctatcgcgaggtgcctgaccagttcgggagacggttcccgggccgatcatccctgccgtttcgggcccaccagatattcttgaagaaactcgtacctgccccttgacttaaaacataggggcac

SEQ ID NO: 8851 - DNA, 1200 bp, unidentified
  source 1..1200: mol_type = unassigned DNA; note = element_de7b7f7
  misc_feature 1..2: note = core
  misc_feature 3..177: note = LE
  misc_feature 178..1197: note = CDS
  misc_feature 1198..1200: note = RE
  misc_feature 40..200: note = bridgeRNA
tcctttagatttgctttttgaaatttaattaaatttatgattgagaaaggaagcaaaagtaaactattcgttcctctgagtttgtgactcatatcttgattaagactttcgcttccctttcatcaaagactcagatagaaatttgggctgaagacccgttatcaaggagttgagcttatgatgaatttctcaaatcatttgttgaatcgtaaaagcaaagttatgaaaaacattattattggcattgatatcagcagtaagactttggatatctgtattaaaaatgagacagtaagctacttttccattgaaaataaagtacctgttattaaacgtttcttcaaaagctactcgggagaaaaggtaattatagctatggaaaatacaggcagatataattggaatctgtttgaagtacttgaaaaatttgattttaaagtttatgtaatatcagctttacatatcaaaaaaagtataggacttgttagaggtaaaaatgataaaattgatgctcttcgtatttgtaatttcatcgaaaaaaatcatcaggaaagcagagaatggaagccaggttcttgttcgattaaaaagataaaaatactgttaaccgaaagagcttcaagaataaaaattaaaaagcagctaatagtgcagcagcatgattacaaactcatgaaaagtattggcttagataaacagctaaaagacctaaacaataagcttcttaaagatattgacgtccaaattaagataatagaaaatgatattgaaaatataatccaaaaccaagagagtcttaatcaacaacagaaattgattaaatctgttcctggagtaggtcaggttttatcatggacattgttgtcaaaaacagaaggatttacaactataactgatcctaggaaaatggcatgttacagcggagtagttccttttgattttcaatctgggacatcattaaaaagaaggcctggagtatcaatgcttgctgataaaaatctaaaaactattctgcatatggcagcgatgagtgcgatccgatcagataatgatttaagaacatactacattagaaaagttgatgaaggaaagaataaaatgagcgttttaaacgctgtgagaaataaaataatccatcgagtttttgcggtaataaaaaaccaaatcccttatcaaaaagatttggttttatcatagaaa

SEQ ID NO: 8852 - DNA, 1539 bp, unidentified
  source 1..1539: mol_type = unassigned DNA; note = element_de81ccb
  misc_feature 1..2: note = core
  misc_feature 3..243: note = LE
  misc_feature 244..1422: note = CDS
  misc_feature 1423..1539: note = RE
  misc_feature 3..219: note = bridgeRNA
cttgtattatagagtagtagtcattaaggcccctctccaagggctgtgctacactgtaagggatgctgtggattggtggtgtcctcctaccacaagatggtttgggagaggttccaaccacagccccttacatttttgttaatcagttaaataccacccagacggttgatgtagaacaaggctacaaaagtaaggtgtcctgtggatgcagcatcacaaatttgaccaccggaggtttttgctatggtaatttctgttggtatcgatgtctcaaaggataaacacgactgcttcattctcaattcggaaggtgaagtcctggcggaggtgttcaccattcccaatacgatggacgggttcaactgtctgttacaaaaaatccaggacagtaccacaccacaggacaaaataaaagtagggcttgaggcaaccggacattacagttacaatctgctcgggtttcttcttgacaatggtctgtccacctatgtcctgaatcccttacgcacaaacatttaccgaaagagcctcagcctaagaaagaccaaaaccgatcgggtggatgcacgaacgattgcttctatgctgttatccgatgcgggcctcaaaccctacacagatacagcataccacaatgaggaattaaagtcactcaccagataccgttttgataaggtaaaagagcgttccaaactgaaaagttctattgcccggctgatctgcatcttgttcccggagctggagaagttagtgccaagtcttcacatggcctctgtctacgccctgctggaggagttcccaggtgctaaacagattgccgcagctcatttgacgaggctgaaaacactgctcgaaaccgcttctaagggccgctacaaacggaacatggctcttgaaatccgagatgccgccagaaactctattggcgcttggatgcctgccaagtcccttgaattgcagcacaccatccgcctcatccgtgaactggatgccgagattgctgaaattgaggaacagattcagtccttgatggaggaactggattctcccattaccaccatccctggtatgggtttccgcatggctgccatgattttggccgaggtgggcgatttctctcgctttgactccccggacaagctgttagcttatgccggtatgtctccgtctacctaccagtccggccaactcaagaattgctacccgcacatggaaaagcgaggttctcgatacttacgctatgcactttacaacgcaaccaagtatgtctgccactgggacccgacttttgccgcctatctcgccaaaaaacgggcagagggtaaacactacaatgtcgctctttcccatgctgccaaaaagttagtgcgcctcatatttgctatggagaaatccagagcaccgtaccatatggcggcctgattacccctctttaatagttagccggggcctctcacggcctctgctttgctattccctttttgaaccatcttttttccattaccattcacttttgggggttgacttttaatagttaat

SEQ ID NO: 8853 - DNA, 1561 bp, unidentified
  source 1..1561: mol_type = unassigned DNA; note = element_de82eae
  misc_feature 1..3: note = core
  misc_feature 4..243: note = LE
  misc_feature 244..1437: note = CDS
  misc_feature 1438..1561: note = RE
  misc_feature 7..263: note = bridgeRNA
attcgtaatatatagagtgaagagtatacaactctttgctcttttattttatgatgaaggtgattggcctacgaaatttcaaattgggacaccacgcccggagaaaaatgtgttagccagccttcattattctgcattcgattcagcaagttgggacctgtgctcccgtttaaccaacgaatatgaatggattctgaagagctgtatccaatcaaaatactataagttaaaggaggtacctttatgattgctgttggtattgatgtttccaagtcaaagagtacggttgccattctaaactctgatggcagcctacgaatcaagccttatgacatgaaacacaatcaccctgaaatgaatgcacttattaactatctaaatgaactggatgaacccatcatcatcttgatggagtatacagggcactatcactatccagttcttaagaaacttactgatgagcattttcctgtctgtttagtaaatccgtatcagatgaaaaaatatggtgatacggagttgcgtcgtagtaagactgacaaaaaagatgctatcagaatcgctacttatgctttggaaaaatcttatcagttagttccgtattctgttgatgaccaaaagtatgttgacttaaaaatgttatccagacaatacagtcaaagaatgtctacactcactatcaacaaagtatatttagcaaatttgctagatcaaaccatgccgggaatcacatccattctccccctaaggagcagagaccctgaaaccagtctcagtatgatgtttatcaaaaaatacaagtcctttgattacatctgcaaaatgggaaaatctcgattccttgacagttactctcgcctggtcaagaaatcacgtaatcgaaatgcttcgcaccttggtcttgccatctatgaactagccaccagcagtatcactaccaatggcgaaaacgaatatactgtgttagcacaaacccaatgcattgaccttgttgcagaagctcaacgttcagccgattgcatcatcgcacaaatgcagacaattgccgaaaccttacctgaatataaaatacttcgaaatatgcccggtgttggtgaacgtcttggtccacttattctggctgaaatcggtaatgtcagacgttttcacagtggaaaagctttaaatgcttatgccggaaacgatgccccaccatatcagtcaggaaattttgaaagccacaatcgacacatatcaaaacgtgggaatgcggctctcagaaaatactgttttgaggttatgcaggctctcaaactgataaaacctcaagatgatcctgtatatctttttctgctaaaaaaagaacaggaagggaaacatttcaacgttgccaaaatggctgccgtgaataagttccttagaatttactatgccagagtaatggaactcgaacagtaaatctgattacattattatatatttttcaaaaatctacaataggtaggtttattaaagttacccatttttaggagtaaaagttttctcaaaaacttttaaaaattacttgacttacattagcaag

SEQ ID NO: 8854 - DNA, 1526 bp, unidentified
  source 1..1526: mol_type = unassigned DNA; note = element_de83e8d
  misc_feature 1: note = core
  misc_feature 2..274: note = LE
  misc_feature 275..1324: note = CDS
  misc_feature 1325..1526: note = RE
  misc_feature 62..273: note = bridgeRNA
cagagagatgatggaggggtgctccggccgtactggcatccaccggctcgaggggtgggtgtgtctacggtcggtttcgtctcccggctggtctgacccacgaatcggctgacacctctggttgtactgcgaacgatccgtcggccggctgggagacggcactcaccggtcgggtggggaacggttccggatctgcgccaacagttccgggctcccgcaccctcccggcaagtgcgtgccacccctttgaacccattgcaaggaagggatggccatgaccatcgtagagaagacatgtccggtgaccgccggtgtcgacacgcatgccgatgtgcacgttgccgccgtcgttgacggcgttggaggagtgctcggcatcgagtcgttcacaaccaccgaggccggctgcgtgcagttgatcggctggctgcgcgcccatgggagcgtgaacctggttggggtggagggcaccggctcgtatggggccgggctgacccgccagttggagcgggccgggatcgcggtggtcgaagtcgatcgcccgaaccggcaggtgcgacgccgcgaaggcaagtccgaccccgtcgacgcggtggtcgccgccagggcggcgttgtcgggtcaggcgctcgggctgcccaaggcgcgcactggtgatgtcgaggcgatccgggtactgatggtcgctcgtcgctcggcgacgtcggaacggatcgctgcgctgtgtcagctgcgccatctgtgcttcaccgccgacgaccaggtgcggcgacgcttcgaacggctctcggtcgcccagctgaccgctgccgcggcggcgctgcgaccgcgtccgggcgacacggtgcgctactcgacgctgctcgccatgcgcaccctcgcccgccgggtcgcctacctcgacgacgagctcgacaacctcgccgtcgtcgtgcgcccgctcgtggagcgcagctcgcccgggctgctggcgatgcacggcgtcggctacgacgtcgccgccaagctgctcgtcgccgccggcgataaccccgagcgcctccgctccgaagcagccttcgcccacctctgcggcgtcgccccgctcgaggcctcctcgggcaagacccgccggcaccggctcaaccgaggcggtgaccgtcaagccaacaacgccctctaccgcatcgtcatcacccgcatggcatcgcacccaccgacgaagatctacctcgcccggcgccgcgccgaaggcaagtcgaccggcgagatcgtccgcatcctcaagcgctacgtcgcccgcgaagccttcaaacacctccgagccggcgccgtcacagactgaaccctcgtccaccatcaggtgacggcctgaccccctcgaatcggccaacgccggcacgccggctgttccacgaacgaagcgtcgaccgccaccccacaccacccgcgcgggccgtgacctaccaggagcctgccctcgaaccacgagtggccgatctctgtcctgtccactccgcgcccgcaccttgacaacacaggagcat

SEQ ID NO: 8855 - DNA, 1533 bp, unidentified
  source 1..1533: mol_type = unassigned DNA; note = element_de87e14
  misc_feature 1..2: note = core
  misc_feature 3..241: note = LE
  misc_feature 242..1408: note = CDS
  misc_feature 1409..1533: note = RE
  misc_feature 3..221: note = bridgeRNA
cttgtataatgaacatgcagttaagtcatggtcattaccctttcctttttattgtataatttacatagtgttgtggattggttaaatcacctacagcttgactgtttaactgaggctccaaccacatctctgtgtttatttgtttattagttagataacgctttgacgtttaatctcgggcaaggatacataacatagaacaatgtggaacacaacataataatttaaggatgtgttttttatgatctttgtaggtatcgacgttgctaaagataaacatgactgttttattgtctcttctgatggtgaggttttgaaaaatgtattcacctttaagaatgacttagagggttttaactcttttcttgctgctattcccgatgtcccaaaagacacaataagagtgggtcttgaagctactggtcactacagcttgaacttaatgaattttatcaccaataatcaactaccgctagttgttcttaatcctctccaaactaaccttttcagaaaagctcatactcttagaaaaagcaagacagataagattgatgctaaaattattgctcttatgctgcagtcaggaaacttctctccccactcaaacttatcataccatttgagtgagttgaagtcattaactagacataaatctaggataaaaaagaacctatcaagatacaaagtttctcttaatagaatacttgatatcatgtttcctgagttatcctctgtggtatattctctcaatcaaaaatcaatctatgctcttttaaaggctttcccttcaaaaaaagctattgctactgcccatcttactaagcttactaatgttttaaaaaaaagttcttatggtaagtatggtaagagcaaagctctattgataagagaaactgctagcagttctattggtactgacagccgtgctttatcttttgaactttctcaaacaatttctttcattgaaatctatacttcacaaatcaataaaattaatcatgaaattaaaagcataatggatgaattacaaagtcctatattatctgtcccaggaatctcttatggattaggttcagttattatttctgaaatcggaagtattaaaaactttgactctccatacaaattacttgcttttgcaggtcttgatccatcaacttatcaatcaggcaaatttgctgcttctaacatgaaaatggttaaacgaggctctccttatcttagatgggctctcttagaggctgcaagactaattgctatgagagacaaaactttcaaagaatactacctaaagaaaaaagctgaaggcaaacatcattatgttgcactctctcatgtagctaaaaaactagttagagttatttattacttactatctaacaatactgtctttgttcctcaaacctaacatcttttattaagcaacagaattcttaaaaaggtagtgtgtctaccttgttttgccatgctcttttttaggtgcttttattttaactttcgtctcaaatttatgcttgacttcatatagttagt

SEQ ID NO: 8856 - DNA, 1523 bp, unidentified
  source 1..1523: mol_type = unassigned DNA; note = element_de9178e
  misc_feature 1..2: note = core
  misc_feature 3..256: note = LE
  misc_feature 257..1483: note = CDS
  misc_feature 1484..1523: note = RE
  misc_feature 65..215: note = bridgeRNA
cttatattgggtctgttgcagattatcatactagagatcaagtttatgtgacagcgatttcaagagcttgctggaatgaggaccatcgaagcctaatccctctgacgaggatcaagggcagacagtcccgtcccgtaagagaacggatctgaggttcaatagaaagtcgtccctttgttgaggaccgatataaggcgaactttccgttcaccgctattggaatgggcaggacacactgaaggaggagaaagataaagtgaagcgatactatttgggagtggattggtccgatgagtttcatcaggtgtgggccattgatcccgagggcaacaaagtcatcgagaagaaggtcttggagaatgtcggcgggctggccgagtttggtcgttggctcgatgagacccgggctaaggggatcgagctgtgggcggccatcgagaagccggcgggacggattgtggattttctgttggaccacggggtggtggtctatccggtcaatcccaaggcgttggatcgggtcagggatcgctttcgcatgagccagtctaagagtgactcttttgacgcttacgtattggcggagtttctgcggaccgatcatgttcatttgcgagctctggagcctagttcggagcaggcccaagaacttaagatgctcacccgcgatcaccaccggctgatgcgccataagactcggctcatcaatcagatcgaggtaacgctcaaagagtattaccctcgccccctggaggtcttttctaatctggaatcgaagatcgcgttggattttatcacccagtatccgactccacgggcactgtctgatctgacccgtcgaaaatggaatcgctttgccaagcgcgaacaccatctcggtgaggcgcgctgtaaagagctgtgggagaagctggaccagccgcagttggggattccagaacacgtggtcagagccaaggcgcaattgcttttggtgctggtcgctcagcttaaggccttggctcaggcggtcgagagctacagcgagaaggtccaaagttttttcgtctctatgccggtggctaagcttgcgcagacactgccgggaggaaaaagtggcaccaccgtagccatgctttgggctgagttgggcgatgccacgagtcgatggcaatcctttcgccaccttcaggctgaagcgggaggagtcccggtaaccaaagcgagtggtaagagtcgtgtggtacagtttcgatttgcctgtaacaaactgctgcgctacgcctcgtactggttgtcgtttaactcgctcaatcgctgtgagtgggcgaacaaatactatcgcgaccaacgggcgaaaggacatcatcatccccaagcgcttagggctttggcagcgaagtggttgaaaattattttcaccatgtggagagacgataagccgtacgatgaaaactatcacttagcgaacatcgcccgtcagacgatacgccaggcggcatgaaacaaaataaacagagggcttgacaagtttcatagaaagt

SEQ ID NO: 8857 - DNA, 1435 bp, unidentified
  source 1..1435: mol_type = unassigned DNA; note = element_de99482
  misc_feature 1..3: note = core
  misc_feature 4..80: note = LE
  misc_feature 81..1157: note = CDS
  misc_feature 1158..1435: note = RE
  misc_feature 1169..1421: note = bridgeRNA
tgatggggtggacggcgccccgacggcatcaagcgtgccaagatgagtgttgtcgccaacccatctgagggaagccgtccatgggcaaatctagagaggatttttcgaaagtcacgcgggtcgggctcgacttggcgaagaccgtgtttcaggtccacgcggtcgacgcagtgggcggggtggtggcgacgcggaagctgaggcgaggcggcgtcgccgagttcttcggccggctcgcgccctgtttggtggcgatggaggcctgcgcgagcgctcatcactggggccgcgagatcgcggcgctcgggcacgaggtgaggctgatcccgccggcgcatgtgaagccctatgtgaggcgcaacaagacggatgcggcggacgcggcggcgatctgcgaggcggcgatgcggcctgggcagcgcttcgtgccgctgcgcgggatggagaaccaggccgagctgatgcgccatcgcgtgcgcgagctgctctccagccagcgcacggcgctgctcaacgcgttgcgcgggcatctttccgagatcgggatcgtcgcgccgcagggggcgcagcacgcttatcggctgaagcggctgctcgccgacggggccgacgagaacggcgagatcgtggttcccgcaagcgtgcgcggggcgctcgcgccgctcggggctgagatcgaggcgctcgacgccgccatcggcgagatcgacgacgaactcgccgcgaaagccaaggccgacgaaagggcgcggcggctgatgacgattccggggatcggcccggtgatcgcgaccgccatcgtcgccaccgtgcgcgacgtcgagagctttgccggcgggcgggagttttccgccttcctcggcctcacgccgcgccagcgttcgagcggcggcaaggcgcgctcggggcgcatcagcaagatgggcgatcgatacctgcgcaagctcttggtcgtcggcgcgaccgccgcgctctgccacgccggcggccacgacgacgcgctgagacgctgggcgaaggacacgctgaagcgcaaggccggcctcaaatacgccttcaagctgactgcggtcgccctcgccaacaagctcgcgcgcatcgccttcgcgcttctgcgctcgggcgccgtctacgacgaccggcccgtcgcggcctgacggccgcaaagaggctcgacgggaaaagcttcgccgcaaggcggaaaagggtcgggagcgtcagcgacgtgatgtgagacaacggacagggttcggaagcccgagcatgtgtcggcgccatttcgagcgcgatacggtgatgggggcgaagaaccgaagcggaccgaacatcagggccagcggggcgaacactcccgcacaaacaggccgtagacatgaccgcgcccgagacctcacgccacccgccaagcttcttgacacggggcgccgtccagaca

SEQ ID NO: 8858 - DNA, 1445 bp, unidentified
  source 1..1445: mol_type = unassigned DNA; note = element_deb09e5
  misc_feature 1: note = core
  misc_feature 2..146: note = LE
  misc_feature 147..1166: note = CDS
  misc_feature 1167..1445: note = RE
  misc_feature 1204..1442: note = bridgeRNA
atggtatggacgcctcccacctagaatgactcggtgcacgaatactgaagtgggggacgaaggtggagcggaccctgccggttccaacggcatcgaagtgccccaggtggaagataagatcttcagaggcaaccggagggtccgagatgaagcttagcgtggtcggaattgatatcgcaaaacgtgtatttcaggtgcattgggtggagacggaaagcggtgaagttgtgagcgtccaactcaagcgcgaaaggttcttggagcactttgcaaaccgcgcgccgtgcctgatcggcatggaggcatgtggcgggtcacagcactgggctcgcgagctgcagaagctcgggcaccaagtgaagctgctctcggggcggatggtcaagccgtttgtgggcgggaacaagaatgatgccgccgatgcacgcgcgatctggactgcgatgcaacagccgggcatcaaatcggtggcagtcaagagtgaggcacagcaggcgatcctcgcattacatcggatgcgagcacaactggtgaagtttcgcaccgcgcagatcaacggcctgcgtgggctactgaccgaatacggggaagtgatgcctcagggtcgagcggggatcgaacgcgatattcctgccgctctggggcgcttggctcagcgcttgcccgctgtcgttatcgacactctgcgcgagcagtatgcgcgcctcgggcagcttgatcagcaagtgcagagcatcgaacggcgcctgcggcaatggcatagcgaagagccggcgagccggcgaattgccgagatccccggggtcggagtcctgacagctacggcggcgatagccacgatgggcgatgcgagggtcttcaagtccggccgcgagtttgccgcatggctgggtctggtgccgcgccagagcggtaccggggggcgcgtccgtctgctcggtatcagcaaacgcggcgatacgtaccttcgaacgcttctgatccacggtgcgcgcgccgcgatgacccacagtaaagagccgtcccagtgggcaaagggtattgccgagcgccgaccgaagaatgtcgcgatcgttgcgctggcaaacaagatggcacgcactatctgggctttatcggcccacgggcgggcatatcaatcggggtatgtgagtcggcccatgtaaggctcagcattgctgagcttcaactaaacagaatgaggtgggtagccaaggattaagcaaggttgtcacacaatgtgatggcaaacaggtcagaccgggacccgccaagcctgtatggtcgcttgagcttcgagctcactcggagaaatgaggcgcggatcagcggaatccatcagggcccgcaggcttcggtctgcaatacaggccggatataaaactgcagctgcgcttgtcgatcatcacataaaaatgaccttgcgatcggggggcgtccatata

SEQ ID NO: 8859 - DNA, 1393 bp, unidentified
  source 1..1393: mol_type = unassigned DNA; note = element_debbe4b
  misc_feature 1: note = core
  misc_feature 2..292: note = LE
  misc_feature 293..1378: note = CDS
  misc_feature 1379..1393: note = RE
  misc_feature 1..294: note = bridgeRNA
cagtaagaatacgggtaccagatgtttccgggcagtcaccgtttcgaaagtgggggctttcgggagaggtctggtgccgtagagcgttccgggcgacctgacccacactccgatcgactcaatgtctttccctggacccgtcggtcttctggaactgccgaacggcgaggtttcacctcgtcgatacgtgtgactcaagaagggcctgacgccctgtcactttactgtcttgtccaggtatccgatgttggtgagatcgcccatatcccatcggcaaccggagcgaggctgtatgaaagaagaacaggctactgttggccgtcggagcatcgtaggcggcgttgatacgcataaggatctgcatttcgcggctgtcgttgacgaacatgatcgacttctcggcagcgaatgcttcccaaccacgcggcacggctacaagcagatgttgctttggatgcgctcattcggtgagcttgtccgggtcggcgtcgagtgcaccgggagctatggcgcgggcttgctgcgctacctgcagcaggcccatgtaactgtgctggaggtaaccgtaccggataagagcgaccggcgcaaacgtggcaaggacgatacgctggacgcctgcaacgcggctcatgctgccttcgccggcgtgcgtacggtcacgcccaagacgcgcgatggcatgattgaatcgctacgcgttctgaaagtctgccggaagacggccatttcggcgcgtcgcgtcgctttacagctaatccacagtaccatcatcagcgcgcccgatgaattacgtgaatcactacgcgcgatgacacgaatgcagctcatccgaacattggctgcgtggcgtccggatctgtccgactatcggaacctgacctctgcctgccgaattgcactgaagtcactgggacgtcggtatctggagttgcacgacgagattgctgacctcgacgtcatgatcgcgacgctcgtggacgaacttgctcctgatcttgtctcgcgaaattcgattggttacgagtcggcttcgcaactgttactgaccgctggcgataacagcgaccggcttcagtcagaagccagcttcgctgccctatgtggcgtgaaccccgtcccggcgtcttccggtaaggtgacgcgacatcgactaaatcgtggtggagatcgcgcagccaacagcgccttgcacatcattgccatcggtcgcttgagaaccgacgctcgcacaaaggcctacatcgccaaacgcgtcagcgaggggcattcgaaacttgaagcgatccgctgcctcaagcgctatatcgcgcgggaggtctactacgtaatccagcaacgcaaccgccagatcacacagactcaaattaccccttgacctttagaagggcgt

SEQ ID NO: 8860 - DNA, 1554 bp, unidentified
  source 1..1554: mol_type = unassigned DNA; note = element_debe787
  misc_feature 1..2: note = core
  misc_feature 3..250: note = LE
  misc_feature 251..1474: note = CDS
  misc_feature 1475..1554: note = RE
  misc_feature 78..247: note = bridgeRNA
aacttcatgcagcatcacattcttgcaccacgatgaatgaaaacggagtgcaatgacctgctgcgtatggtaaaattaatatgcacggcacaaaatcggcttttttggcgctacgagcgcgcgcataaaactggttttgctctcctgttgaatcacaaattgtcccagccgaatggcatcaaggacgtatagcaaaataattgcttttaggagagcacgccgtgacaacttttataaggagcgtttggttatggaagttgtctatcggtgttgttgtgggattgatgtgcataagaaagtcatcgtagcctgtctggtgaatggcggcgaacaggagctgcgagaattcggcacaaccaccagcgaaatcaagactttggcaaattggctcacagaatcaggctgtgagatgattgccatggaaagcacaggtgtattttggaaacctctgtacaatttgtttgagttaatggatttggatgcaatgattgtcaacgccgcacacatgaaagccttgccaggacgcaagacggacgtgaaagatgcggaatggatcgcagacctgcttcggcatggcctgttgaaagccagctatattcctaaccgggagcaacgtgaattgcgtgagattacccgttaccgcaaaagcctgacggaagaacgctgccgggaagtaaaccgtctgcaaaaaattctggaaggtgccaatatcaagctggattctgtagtgaaagacatcaccggcaaaagtgcccgtaaacttctccagcggattattgatgatgatattccagacagtgatgaggtctccaaactggttcatggacggatgcgtccgaagctggaacagatcgttgcttcaatcgaaggaattaccacaccgctgcagagaaaactgttggcgcagattatcgatcatattgatgacctgaaccgtcggattggtgaactggataagttggtgcaggagtatatggccgaatatgaagcagcgattaaggcaatagacgaaatccctggcattgccagacgaagtgcagaagttattctggcggaaattggattggatatgggcagattccccagtgcagcacatctctgctcatgggctggtgtctgtcccggtaactaccagagcgcaggaagaagagaacatggtaagacgacgaaaggaaataaggcactcaaaacgattctgacgcaatgtgcaaagtctgcaaaaaccgtaaagagttcgtatttctttgcacagtaccagcgaatttctgctagacgtggcaaaaatcgagccacgcttgcagtcgcccattccatgctgatcgccatataccacattcttaaaaacaagactgctttccatgatctcggttctgactactacgattcttttaaccgcgacagaaagataaacagctatctcaaacgactgaaagcacttggatgggaacctgatgccatccccagttccgcctgaatgcgctattgcatagcgcaagctgcctgccgaaaggcgggagccgttttgcgccctttttaggggtacgttttcataac

SEQ ID NO: 8861 - DNA, 1256 bp, unidentified
  source 1..1256: mol_type = unassigned DNA; note = element_dec1331
  misc_feature 1..2: note = core
  misc_feature 3..248: note = LE
  misc_feature 249..1241: note = CDS
  misc_feature 1242..1256: note = RE
  misc_feature 12..192: note = bridgeRNA
cttgtatcttgttccctgtagtggttagctaccgctacacgagacagaggcaaactcgatgtcacccttaaggctctgaccttggtttgtagattgggtcctctgtctcaccttcccgccaacgatagacactgaacggtagcctggggctcgaccctgtatgtacaaggatagtgggcggaagttggcgtgtgcggttgttctgtttttttcttccttcctttttctttctgatcactgatttcatcatgttctatttgggtatcgatgttgccaaggccaagctcgattgctgtctgttgctgagcattgaggatggcaagcgcaagaccaagtcggtggccaacaccgcccggggtttctcggatcttttgcgctggattgacaagcaaggcctcgagcgcagtcaggtacgggggctcatggaaggcaccggggtgtatcacacaccagccgccacggcgttgagcgaggcacaggtcagtgtgagcatcctcaatccggcccgtgtgcgcgagtacgccaaatctatgggtatgcagaccaagaacgacaaggccgacagcattgtcatcgccctgtatggggccaagcaccccgagaagcttatcgtctgggaagcccctagtctgcaggcccgaaccctgcaggccttgctggcccgccgcgaagcgctcgagcgcgatctgcaacgcgaacgtaaccgccaggagaaggccgacttcatcgatacgccagagcgtattaccaagtcacttgaagagtcgattgccttccttaaggagcagatcaagaaactctccaaggatatcgacgggcatatcaagcgctattccgaactcaaagaacagatggctctgctgaccagcattccggctgtcggcccaaagactggcgcgcagatgctctctattctgcaccatcaccgctttgagcgccctgaacagctcagcgcctacatcggcctcaatccggtcgaattcacctcgggcagctcggtgtttcaccgtccccatctctccaaagctgggcccggcagagtccgcgctgtcctttacatggcagcagtggtcgccacacgtcacaaccccgtaatcaaggcccaataccagcgcctgatctcccgtggaaagtccaagatgtctgccttgggcgctgccatgcgcaaactcgttcatctatgctttggcgttctgaagaaccgtacccctttcaacccaaattatgcgtttggtgattgacaggcaagacggtat

SEQ ID NO: 8862 - DNA, 1403 bp, unidentified
  source 1..1403: mol_type = unassigned DNA; note = element_dec4eee
  misc_feature 1: note = core
  misc_feature 2..226: note = LE
  misc_feature 227..1390: note = CDS
  misc_feature 1391..1403: note = RE
  misc_feature 14..241: note = bridgeRNA
ctacttgtttacttgcctcacggcccgggcccggccaggctcggtcgaggtgttcggcggggcgctcgcattgcggctgtctgctgctggctggcaagactcacatctggcatgcgttcccgtcgttcaccgtggcgtggagaggctcaagaggggtctgcccagctcaaagtagcgttgccctccccgccggtttatcaccggtttccaggcaagggggaagtacatggggcacgtggtcatcgggatggatccgcacaagcggtcagccacgatcgagatcattgacgaccggcagaaggtgctgtccgggggccggttcggcactgaccgggacggctaccgggcgatgctggccgcgggccggaagttcggggaccgcatctgggcggtggagggctgcaacggcatcggccgccacatcgcgcagcgcctggtcgccgatggtgaaccggtcgtcgatgtgcccgcgaaactgtccgcccgggcccgggtcttctccaccggccaggggcgcaagaccgacccggtcgatgcgcattcggtggcgctggccgggctgcacagcccaggcctgcgggtcatcaccgccgatgatgcgatggtggcgctgcggctgctcgccgaccgccgcgatgagctgggcgtcgcccgctcgcagacggtgaatcggctgcaccggctgctgctggaactgctccccggcggagcgaagaagttcctgtccgccgcgcaggccaaggacctgctggccaccgtgcgcccgcgggacatcgcgggcaagacccgccgccggctcgccgccgagatggtcaccgagctcacgcggatcgacaagcgcatcaagaccgccgacaccgagctcaaagagctggtgaccgcgaccggcagcagcctgctgcagctgcacggcatcggcccctccggcgccgcccggctcctcggcgacgtcggtgacatcgcccggttcgctgacaaaggcaggttcgcatcctggaacggcaccgcccccctggatgcttccagcggcgaccaggtccgccaccggctgtcgcgggccggcaaccggcggatcaaccggaccctgcacatcatggccatcgtcgcgctgcgcaacgacaccgaaggccgcgcctactaccggcgcaaactcgccgccgggaaaaccaccatggaagccctgcgctgcctgaagagacggctgtccgacgtcgtctgccagcagatgcggaccgacgcgaaacgcctggcagcgggtccgggaggacacacgggggcgtcttctcaatccagcgcggccgactcacaccccggcatcggcacttcggataagtcacttcccggacccgccaccagcaagcttagaacccgactgccaaccgcgtcttgacacagaggggagc

SEQ ID NO: 8863 - DNA, 1583 bp, unidentified
  source 1..1583: mol_type = unassigned DNA; note = element_dec66c9
  misc_feature 1..2: note = core
  misc_feature 3..621: note = LE
  misc_feature 622..1479: note = CDS
  misc_feature 1480..1583: note = RE
  misc_feature 13..262: note = bridgeRNA
ctcgtatgatgaagttaggtttttaggaaagggatttacctataaacccaagggtattttaactgtagtaagaatactcttacttgtagatagagtgtcaccgaccacctccctgaatccttgtattcgtcctgaagactggtgcctctgtctaataagtggtttacgaatgagttggatgttgatgaccactggtcattcttcgtatctcttacgaggcagtaacgcttattagataggaggatacacggttatctcacatttatgaaataaggagtgaatctcatgtattatatcggtattgatatcgccaaattcaagcactatgcttccattattgatcagacaggaaaaacactaacaaaacctatttcatttcaaaatcatacagagggtggaaataaacttttagattggatacatcaatacgtcgacacccctactgatgtattaatcggaatggaggcgactggacactactgactagctctctattcctttcttttagagaagggattttctgtcattgttttaaatccccttcagacaaatgcttggagaaaaggaacagaaattagaaaacgtaagactgattccattgacgcaaccttaattgcagacgtgattcgctttggacgatttacagagacacctttagctaatgaaaccatgctggcattaaaacaattgagtcgtttcagaaactcccttgtacatagcgtgagtgatttaaaacgaaaagctattgtggtattagatcagacatttccagaataccatacggtattttctgatatttttggcaaaacatctgccgaagttttaatggaatatactacccctagtgattttgaacatgtctccgtagatcaattaactgaaatgatggaaaaagctagtcgcaagaagattggcgaaaataaggcaaaacatctccttcaaatcgcttcacaatcctttggtgtgacattttgtaaagatgctttttcttttcaattaaaaatgttactcgaacaaattaaatttattgaagagcaaattaaacattgtgaacaacaaatgggggagtacttagttgaactgaatacccctatcacgaccatccctggaattggctccattttaggagccactattttaagtgaaattggtgatattcatcgttttgataaacccgctaaacttgttgcttatgcaggaattgatgcctctatctctcaatcagggcaatacgaagcatcgaaaagtagcatgtctaaacgcggttcctctcaccttagacgggcattatttcaagccgccatttcaggatatcggagcgatccagttttaaaagccttttatgaaaaaaagagagcacaaggaaaacattattacgtctgtattggagctgtagctagaaagttgtgttacattatctatgccgttctgaaaaataataaaccttacgagattcatcatcatacacccaaaaaataaccttttcatttttttaacttcttagggtttatttggtttgccttttttctgaaacaacatcaaatattttcattggatttcacccttgacttttcatagttggt

SEQ ID NO: 8864 - DNA, 1305 bp, unidentified
  source 1..1305: mol_type = unassigned DNA; note = element_decaff4
  misc_feature 1: note = core
  misc_feature 2..244: note = LE
  misc_feature 245..1294: note = CDS
  misc_feature 1295..1305: note = RE
  misc_feature 22..209: note = bridgeRNA
ctcagtgtcagggtgggcggtgcagtgagatcccgcgctcggctcgggatagcctccgaccgacggcgggctggctcctagcatccgtgtcgccccgcgagcgggatgacctccatgcgttgtgccgcccgccgccggcgaaggcctgccggcgtgacttcataggagcttgcttcagccccactgaggcgtgtccgccggtggtctcaccatcccggtgtgcgtccagaaagggggaccagaggtgatcgtagtggggatcgatccgcacaaacagacccacaccgccgtcgcggtggatggagcgacggactgcgtgctcgccgagctcacggtcagggctcgctcccaagggttcgagcgtttggtcgcctgggcacgccgcttgggtgaggagcgactgttcgccgtggaggacggccggcacgtctccggggctttggagcgccacctgatcgcccgtggggagcgctccgtccgcgtgccgccgcgcatgatgggcgagtcccgccggaccgatcgcatctggggcaagtccgacccggtcgacgcgaccgcggtggcccgcgccgcgcttcgccatcccgatctgcccgaagcgacgctcgccggagccgagcgggagatcggactgcttgtggcgcaccgtgagtcgctggtgcgggagcgcaccgacaagatctgcaagctgcgctggctgctgcacgacatcgaccccgagctcgccccggtaccaagaagcctcaaccggttcgtcacgctcgatcggctcgctctcacgctcgagaagatggcgagagggatcgacgtcgagatctgtctcgatctcatcgcgcggtgccgggagatcaccacccgcgcgaacgagctcgagcgagcgatcaccgcgctcgtgcttacccacgcccccgcgctactgcagatcccggggtgcgcggcactgacggccgccaagatcgtggccgagaccgcccaggtgggacgcttcccgaccgaggggcacttcgcccgctacgcgggtacggccccgatcccggcctcctccggtgccaggcaccgccaacggttcaaccgccggggcaaccggcagctcaacacggcggtgcaccggatcgccgtcacccagatccggatgcatgagccagcgaaggactacatcgcgaggaagcgggccgagggcaagaccaagacggaggcgatcagagccctcaaacggcacatcaccagggtggtgttcaagaccttgacatcgatgaaccagccgaccgaccgcttgaccgcggtcgcggcttgacataggagcaa

SEQ ID NO: 8865 - DNA, 1418 bp, unidentified
  source 1..1418: mol_type = unassigned DNA; note = element_deccc27
  misc_feature 1..4: note = core
  misc_feature 5..201: note = LE
  misc_feature 202..1404: note = CDS
  misc_feature 1405..1418: note = RE
  misc_feature 1..188: note = bridgeRNA
ctccgtaagttgttaggcggcccgggagggccggatgtggctgatggtggcttgccagttgtggctccacaggagtggccgtccggctctccggggcgccctggctgctgattgagatgtgcgcttcggtcgctgattacggagatgacagcggggtgttcctcgggccgacggcatgccgtatggaacgaggaggggcaagtgagcgagcgacgggcccggatctgggccggcatcgacgcgggtaagggccaccactgggcggcggtggtcgacgagaccggcgcgaccctgtggtcgaagaagatcgccaacgacgagtcggcgatcctgaccgcgctcggcgagatcctggagctgggcgacgaggtccactgggcggtggacatctccggcacgtcctccgccctgctgctggccctgctcgtagcccatgggcagcaggccgtctacgtgcccggccgcacggtcaaccgcatgtccggcgcctaccgcggcgaggcgaagaccgacgcccgtgacgcctacgtcatcgccgagaccgcccggcaccgccgggacttcgccaccatcggcgtgcccgcccaactggccgccgatctcgcgctgctgaccgcccaccgctctgacctggttgccgaccgggtgaggatgatcaaccgtctccgtgacgtgctgaccggcgtctttcctgccctggaacgagccttcgactactcggcccacaagggggccctggtgctgctgaccggctaccagacccccgccgcgatccgccgacgcggccgggcccggctcacagcctggttggcgaaccgcgccgtgcgcggcgccgacgtcgtcgcgaccaccgcgctggaggctgcccaggcccagcagaccgcgctgcccggcgaggacgtcgccgcccagatcgtcgccgacctggccgcgcagatcctggccctggacgaccggctcaagcgcatcgacaagcagatccgtgaaacgttccgcagccacccgcaggcggagatcatcgagtcgttgcccggcatgggccccatactcggcgccgagttcgtcgtcgccgcaggcgacctgaccgcctacgcagacgcaggtcacctggcgtcggcggccgggctcgtgtccgtgccacgcgactccggacgacgcaccggcaacttgcaccggcccaagcgttacagccgccgcctgcgacgggtgttctacatgtccgcgcagaccagcatcatccgcgagggcccgaaccgggacttctacctcaagaagcggggcgaggggtgcaagcatgttcaggccgtcatcgccctggctcgccgacgagcgagcgtgttgtgggcgctgctgcgtgacggacgggtgttcacctccgccccgccggtcacgcaggcggcttgacttcgtcattgaga

SEQ ID NO: 8866 - DNA, 1399 bp, unidentified
  source 1..1399: mol_type = unassigned DNA; note = element_decd46b
  misc_feature 1..2: note = core
  misc_feature 3..80: note = LE
  misc_feature 81..1118: note = CDS
  misc_feature 1119..1399: note = RE
  misc_feature 1116..1386: note = bridgeRNA
tgttggggtggacggcccccgaacggcatcgaaatgtgccagtgtgaggttgttaagatctcaaacaaagggagccgcccatggaaaagattactcgcatcggcgttgatacgtcaaagcatgtctttcaactgcatggcgtgaacagtgacgagaagccggtcttacgcaagaaaatgcgccgcaaagagatgattgacttcttcaggatctgctcgccgaccgtgatcgccatcgaggcctgcggtggctcccatcattgggctcggctgttgacctcgctcggacatgaggtgaagttgatcgcgccgcaactagtcaagccttacgtcaaaagaagcaagaacgatgccgccgacgccgaagccctgtgcgaggcgatgagccggccgactatgcggtttgtgccagtcaagtcggtcgatgagcaagccgtactcatgctcgttggcgtccgggatcgtttgatccgcaaccgcacccagctcgccaatgccattcgtggttatgccgctgaattcggcatttctgccgccaaagggctggcccatgttcccttactgcttgagaggataaaagctgacgagaccgtcccggagcttgcacgggaactgtttgccagccaggcggaggaatacgcccggctggaagagaagattgccgacgtggatgcgaagctgaaggcatggcaacgtaatgacgagcgtagcaaacgtctcaacaccgttcccggcattggcccgatcggcgcggcgctcctgatcatgaagacaccagcgccggagctgttccaatccggccgccagttcgcagcctggatcgggttgacgccgaaagatcactcgaccggcggcaagctgcggctcggctgtatcacgcgagcgggtgatgaggcattgcgagcggcgctggtggtcggggcaacttcggtcattcagcacgcacggcgaaccggtaaggcgtctgtctggctgactgaactgctcaagcgcaagccgtcgaagctggcagccatcgctctcgccaacaagatggcgcggatagcctggaagatcatggtgtcgagcgaaacatacaatgcaaaatcggcatctgcggtcatggcagacgtcgcatgaagatcggccaggatcgaagagtttaaaactggaatccgtgttgagttgctgatgccggaacttgcaagatagcagcagatggtgtgatcgatcgatccacggcgcgagatactccgtgtaagcccatggcctcctacaaggtcgcttatgtgtttggaactcacgttgcggaaaccaccttggccagcgttcatgcgcgagcgcacaacaggccggacgtatggacgcaagggatgcggtcaaatctaaaagtatcttgcgagcagggggccgtccacgta

SEQ ID NO: 8867 - DNA, 1180 bp, unidentified
  source 1..1180: mol_type = unassigned DNA; note = element_decfd27
  misc_feature 1..2: note = core
  misc_feature 3..206: note = LE
  misc_feature 207..1157: note = CDS
  misc_feature 1158..1180: note = RE
  misc_feature 3..181: note = bridgeRNA
cttgtatgctggtacttgaagggaggaggagggacaaggctcgattctgactgttagcgcagtacagatccgtgggagatttcgcccctcctcctttcacccaagcgccgataaagaatgcatctggctagaccgacgataggaacaagcctgcgcctctgggtgagcccttcaagtgctcaaaaccatatctcggggggtgttcaatggcaatgtcggtttctgtttccaagccaatcgtgggcgtggatgtcgccaaaaatgaactgatgatctaccagcccgaactggatctgcttgagacgctttccaacaacaacaagccagccatcaagaaatggctgaaagccttgccggcaccggtcgacgtagcgattgagtcgaccaatatctatcacttggagttcgccgatctggcccatgatgccggctgcacgatttacatggtcggtggctatgaactaagccactaccgcaaaggtgtgaaggttcgcgccaaaaccgacgcgctggatgcaaagctgctcgcccgttatctgaaaaacgaatatgaagagcttcacccatggactcccccatcgccgctgtatcgtcaactcttgagccttttccgccggcgcgccgcgctggttcaggcacgagttggcctggtacagagctgggcaaatgaaccgctgctcaaagccgcttttgccgagcaaatagcctcaatgcagaggcttgaagtgctggtcgagaagatgatcaacgaccaccttaaagaggccggtctacttgcccatctaaggcgctgcatgaaagttgaaggcataggctttttgactggagctcgcctgatcgcggcgtttcagcggggcgagtttaaaaacgctgacgcattcatcgcttttttggggatggatttacgggtttcacagtcgggacagaaggacggtcgccgcagtctgacaaaacgaggtgatccggaggcgcgccgacttttgcacaatgcagccatgtcggccagccgaacggcgacctggaaaggcttttatgaagagcaacgagctaaagggttcagcaccactcaggcactggtgattctggcccgtaaacttgctcgggtcgtattcgcactactgaaggggcagagcgaataccagccgaaagcaggttgagggcttcccctcaaccatagaat

SEQ ID NO: 8868 - DNA, 1337 bp, unidentified
  source 1..1337: mol_type = unassigned DNA; note = element_ded1906
  misc_feature 1..2: note = core
  misc_feature 3..70: note = LE
  misc_feature 71..1111: note = CDS
  misc_feature 1112..1337: note = RE
  misc_feature 1101..1322: note = bridgeRNA
agatgtatggactcctctccccccagggagtacggtacagatacatctgataaaactgtggagagcagatatggaagacaatcttttacttgcaatcgacttagcgaaaaactcatttcaagtttgctatatgagaaacaacggtgaagttcttttaaacaaagctattagtcgtaacagtttgattaaactgctaactggaaagaagaggttttccttggtagccatggaagcttgtggtggtgctcactattgggcccgcttagccaaaggaaacggccatgaggtaaaaatcatccaacctcgatcagttaaagggctacaacttaagcaaaagacggataagaacgatgcttatgcagtaggtgttgctgctcttctccctcatatattcagttgtaatttgatgtctgaagatgagcaagggttgcagtgcttagatcgagctcgagcattacaattagcacagcgaacagctctcagtaatcagatgcgtgggttcctaaacgaatatggcatcgtgttgcctaaaggaatagcccctttagtaaaacggatcccagaaatattagaagatgccgaaaatggcttgcctgatagtttacgccaggtactagcttcacaagctgatatcctagcgatgcaaacagaacaaatagaatactacgactgtttgattgcagaacacatcaaacaaaacaaaatttgccaaaagctgagtaaactggagggtgtcggcccaattgtagcgttaggtctaatgatacgtttaggtgacggtaaagaatttacacacagtagggatgcatctgcttgtattggattaacaccgaaacaacactctacaggtggtaaagaacggattgggcatatttctaaaagttgtgcagataagcgcttgagaagtctcttgtatcaaggagcaatgtccatagtgtacaaagtaacacttcgtgctccaacaacagagaaagaacgatggctaaaatctatcgtagagcggcgtggtaagaaaatagccgcaatagctatggcaaataaaactgttagaacagccgttgcactcataaaaagtgatagtgactaccaaccattgccgattcaagcgtaattatcgttaaataaaattttaattcaatggcttgcataaaataaagcgataagaaaaccaatggaattcagctccgcactaaagtattcggatactgcactatagacttgaaccattggggcgaacacatcaaagggcaggaatagctatccaaaaagagcccgtatataagtgcgcaactatcgtcatattttaaaggcattgattaaaacgaggagtccatata

SEQ ID NO: 8869 - DNA, 1599 bp, unidentified
  source 1..1599: mol_type = unassigned DNA; note = element_ded28c5
  misc_feature 1..3: note = core
  misc_feature 4..229: note = LE
  misc_feature 230..1492: note = CDS
  misc_feature 1493..1599: note = RE
  misc_feature 11..189: note = bridgeRNA
cttctatgatatttgatgatacaatataagcataaacaactattttctttaaaaaatgagtgggtagtagaacgcttattctttctgaacttttaagttcgtttaaaagtttgttcgctacccactttccgcccataaatccgatacttgattgacctttcaaggccgtattagaaggatgattgcaaaaggcggatcctcaaacaatactaaagcgaggtgaaaaaatatgtattttgtaggtattgatatttctaaaaactcttttcattactacatctccgattcaggtaggaccaaaatcgatagtggtaaattcaaacagaatatgagtggtttcaccactttcgacaaaattcttaaaaagttcaacaaaagagagattataattggtatggaatccacttctatttaccatcaacatttgttttcttatttacttaaacacgattatgatgtccatatcattaatccccttttgttgaaagaattcagaaaaagtgaaactcttcgccattctaaaaacgacaacattgattccaagctgatctccatttggctgaaagaaaagtatccagacaacatcccttcttctaaggagatagataatttcactcaatactctcgcgagatcattaacctttctgaggagatttcaagggttaagaatgaaatcaaacgttatgtctaccttttgttccctgaattggaatcttttcaatctaatatctttatcaagagtttaatgaatttattgtataacttcccttctgcaaggaagatcgctacaaccaacaaaaaacagcttattgatgcgatgaagatagataatcaattgtatttcgatgaaaataagttggaccaaatcattgaactttctaaaaattcaatagcaagtggcaacgatgcgcatgagttagctcttcaaaaaagaatagaattgttgttcaaacttgaatcagatcaaaagctcttcaaagaaaaattgaaagaaactttgaacaattcatcaaacgatgtaattaaaaaccaggtagaattaatacaatctcttgatggtttcaatgaaacagctttaaatattgtagcagaaacaggagatattaaccgattctattctgcttctgccctggtggctttcgttggcatcgatcctcgtacagaggaatcaggtcaaatgaaaaaaggctggttcatcaatagaaaaggtaacagatacctaagaaaagctgtttacatcgctgccatcgttgctattcaaaacaatgaatacttcaagaattattacatgaaactacgtactcgaggtaaatcacatactgttgctgtgttagccgtagcgggaaaattgttgagaataatatattcactggtaaagagtgggaaaaaatatgattctgactatcattacaaattacaaaatcaagaactgagagctcatggcaattatacagcaaaaaaattaaaaaggaaaagagaaatagtaacctgaataaacaacaactgctactttcaacctagaagtatgactgaatgaggattttttaaatagaaaatatttaaaatttttttaattaaataggggactatcatacttga

SEQ ID NO: 8870 - DNA, 1436 bp, unidentified
  source 1..1436: mol_type = unassigned DNA; note = element_ded61a7
  misc_feature 1..2: note = core
  misc_feature 3..121: note = LE
  misc_feature 122..1153: note = CDS
  misc_feature 1154..1436: note = RE
  misc_feature 1189..1389: note = bridgeRNA
agatggggtaatcggccgaccagcttgtggatagctgaagattgtgggtgctgcgcttcaggctgatggtgaaacgaggttcgcgttgagcggcctcaagcatcagaaggagaagcgcagcatggaccattttgctggactggacgtatcggtcaaggagaccagcgtctgcattgtggatgactcgggcaagatcgttcgggaagtaaaggtggcgagcgagccgcaagttctgctggcggtgctgaggaaccccgcctaccacttcaagcggattggcttggaagctgggccgctgtcgcaatggctttacagcgcgttcgccgaagcgggcttgccggtgatctgtgttgagacgcggcacatgcgggccgtgctgaaggcgcagatcaacaagacggatcgcaacgatgcacgcggcatcgcgcagatgatgcgggtggggctttaccgcccggtgcatgtgaagacgttacgcagccagaaactgcgaatgctgctgacccatcgcaagctgctgcagtcgaaagcgatcgccctcgagaacgacctgcgcagcactttgcgcaacttcggcctcaaggtcgggatggttggggcggtaaagttcgagggacggatcaaggagttggttgagaacttgcccgacctggccgtgttggtggaaccgctcctcgttgtccggcgggtgcttcatgagcagatcgtcatcctacaccgtcgcttgctgaccatcgttcgggacgatgacgtgtgccggcgcctgatgacggtccccggtgtcggtccggtggtggcactgacctatcgtgccaccgtcgacgtgccggctcgctttaagaactccaaggcagtcggtgcgtcgtttggactgacgccgtcccggcaccaatccggcgaaagcgaccggcctggcggcatatcgcggtgcggggacgagatgatgcgggtgatgctctacgaagcggcccaggtcatgctgacccgcaccagcaagtggtcctggctcaaggcctgggcgatgaagatcgccaggcaccgcggtaggaagaaggcgatcgtggcgctggcacgccggttggccgtgatcatgcatcgcctgtgggttgacggcaccgagttccgctggacccgggaggtcgtagcggcatgagggccgtacaggatcaattacgataggagaacactcgaactccaccgagcggtggaatgatgtccctcgcgggacgatggatgaggtgagttcgttcggtcgcttggacctgccattcgtctgacggcaaggccgatcacaagattgttccgcctcgtcctcgaatcccatgatggaacggccgtagtgccgattccgaagagaagcacgagcccgcgagcgacatcgacactgcagcggtggatagcctgaaagcgcttgaccccaaacggccgattagaga

SEQ ID NO: 8871 - DNA, 1339 bp, unidentified
  source 1..1339: mol_type = unassigned DNA; note = element_deeafc8
  misc_feature 1: note = core
  misc_feature 2..265: note = LE
  misc_feature 266..1333: note = CDS
  misc_feature 1334..1339: note = RE
  misc_feature 13..259: note = bridgeRNA
ctgtgagaatccagtccgcagtctggtgattgctgctgggctgtaggccggtgaccgcgagcgtgaccctaatactgactgacttcgtgtcttccgcgggacttgtccgcttgtggttgccggccccggcccagtgggagtttgtggcctgatcaggagcttgaccaccggcgattgctgcgccggtgtgtcccatcacagtcctgccgtctccgcctggaccgggaaccggttacgtccccctccgggcaaaggagatgaacgcatgaccagtctgcaggagttcgccgaggtcgtcatcggggtcgacacccacgtggcgacccacagcgccgctgcggtcgatgcccgcaccggcggcgtgctggccgagctgacggtgccagccacccctgacggctaccaggccctggtggatttcgccggcgagcatgccgggctgcgggcctgggccatcgagggcaccggcgggcacggcgccgggctggccaggctgctggccggccgcggtgagctggtggtggagctggaccgccccgagcgcacccagcggcgtcacggcgccaagtccgacccgctggatgccattcgcgccgctcgtgaggcgctgtcgcgggccaagctcggcacaccccgctcggccggggaccggcaggccctgtcggtgctgctcgccgcccgccggtccgcggtagacgccggcaccgacgcccagcggcagctattcagcctggtgatcgccgccccggagtgcctgcgcgggcgattccgcggccacaggctgcccgccatgctccgcctggccgcccagatacgcatcagcccccgctgggataccgagacggccaccaccgcccgggtgctgcacgacctggcccagcgcgcccacgccctgggcgccgaggccgcccggcaccagaaggacatcctggccatcgtccgccgctggcggcccgacctgcttgcccagttcggggtcggccctatcaccgccgccacgatcttgtgcgcctggtcccaccccggccgggtccgctccgaggccgccttcgccatgctcggcggcgccgcccccatccccgcagacagcggcagcggccgcaccccggtgcgcttccggctcaaccgctacggtgaccgccagctcaaccgcaccctgcacaccatcgcgctggcccgcctgcgctacgaccccgccacccaggcctacgcccagcggcgcaccgccgaaggcaaaaccccccgcgagatcaaacgctgcctcaagcgctacatcgcccgagacctctaccgcctcctcgaaaacccaccacgaccgcttgacaatccataggagcgt

SEQ ID NO: 8872 - DNA, 1160 bp, unidentified
  source 1..1160: mol_type = unassigned DNA; note = element_deed161
  misc_feature 1..2: note = core
  misc_feature 3..206: note = LE
  misc_feature 207..1154: note = CDS
  misc_feature 1155..1160: note = RE
  misc_feature 12..212: note = bridgeRNA
cttgtcttatgacatttccgcctgctggggcatcatgagatgcccgatccggggtggccaccccggatcgggcggaaggggatggatcgaagttgtctcggtcgttgagggccgtcgattagtgtgatcacccctttcttttccaacaggcctggacggaaaccagggcttcgggcccggatgacaagaataggacagcggaaaagatggaaaactccctaccacaaacggttggcatcgacatctccaaagcaacccttgatgtgtttgcccatcccacgggctgtgagcgacagttcgcaaattcggccaaggggcacaaagaactgataagctggctcgcccagtggcagatcgagcggatcgcctatgaagccactggcgcgtatcaccgtcagttggagcaggcgctgacagatctgccctgcgtaaaattgaatccggcccgcgcacgccggtttgcccaggctgcgggcacgctcgccaaaaccgacaagattgacgcggcgatcctggctcgcatggccacgacacttcagcctccgatccgcccggcaactacgccgcaacaggctaggctcgccgagttaatcagcgctcgcgatggcctgatccgcgataagattgccatccagaatcaagcaaagaacctgacggtgccgctgctcaagcggcagtataagcatcgtctagcccagatcgacaggcatatcgagcaggttgatgcagaaattgctgcgggcatcgcggctgacccggcgctggcgcgccgccaccaaattatctctagcattgctggcgtcggcatacgtaccgccgatcaactggttgccactatgcccgaactgggcgcgctcgatcccaagcaagctgcttccctcgctggccttgctcctgtcactcgccaatcgggacaatggaaagggcgcagcttcatccagggtggaagggccaatgttcgacgtgcgctttacatgccggcccttgtcgctgcccgctacaacccagacctcaaagccaaatatcaaagcctcatcaacgccggaaagccaccaaaggtcgccgtcgtcacgttgatgcgcaagctcgtcgtgatggcaaatgcccttatcaaagccgatagattatggatcgccgatcgtgcttgcgcataacggaaa

SEQ ID NO: 8873 - DNA, 1348 bp, unidentified
  source 1..1348: mol_type = unassigned DNA; note = element_def459e
  misc_feature 1..3: note = core
  misc_feature 4..80: note = LE
  misc_feature 81..968: note = CDS
  misc_feature 969..1348: note = RE
  misc_feature 1086..1337: note = bridgeRNA
tgatgatgtggacgcccccgcacccgcggcagcctctatggtgttgaccggacaccgaagcaggaagaggagcgtttacgatgacgattacgacgattgggctggatttggcgaagagcgtgtttcaagcgcacggcgttgatgagaacggcgcgacgattttggtaaagcgtctgcaccgcaaacagatgctgctgttcttctcgaaacttccgccctgtcttataggagtggaggcgtgcggaacggcgcattactgggcgcgcaccctcaccaccatggggcacgaggttcggctcattccaccgtcttacgtgaaggcctacgtcaagcgcggcaagagcgatgcactcgatgccgaagcgatctgcgaagccgtacagcgcccgacgatgcggtttgtgccggtaaaaacggtcgagcagcagagcgttctcatgacccatcgcgccagagccttgctggtgcgccaacgcaccatgatcgccaatgccttgcgcgcgcatctggccgaactcggccttgtcgcaaatcccggcatcgccaatctggcgaagctggctgaacaggcactgtccgacgaaaacactttgccagcctatgctcgcacttctttggggattcttgtccgccatatcatggtgctcaacgatgagatcgcggtgctggatcagcaactcagggcctggcacaccgagagcgagaccagtcgccgactcgccgggatccccggcctcggcgtgatcacggccacggctcttgctgccaccgtcaccgatcccgatcagtttcgctcgggcagacagttcgccgcctggctcggtctaacgccgcagcagcattccaccggcggcaagacccggctcggcggtatctccaagcagggagaccgatacttgcgccgcttgctcgtcgtcggcgccaccgccgtgatcccacacaaaggacaagccaacgcccatggctaattggatcagaaagctcatggagaagaagccgttcaggctcgtctccgttgcgctggccaataagctcgcccggatcgcatgggtcgtactgacgcgaaaggaagcctatcggccctatgaactgacagcctgagcacaggccccaggcaaccctaattggtaacggcagtcgatgatgtgtaacgatcgagccaatggtgagaccaacccgtgtgattcaatgcgcttcataagcgcggcatcttgataagggacctcaccggcggatttccatcaaggccagcggcaatcacagcgccgcataaacaggccggacatatgaaagcaaccgatcacacccatcccgacaaaaagcccttgccatagggggcgtccacata

SEQ ID NO: 8874 - DNA, 1405 bp, unidentified
  source 1..1405: mol_type = unassigned DNA; note = element_def7f6c
  misc_feature 1: note = core
  misc_feature 2..304: note = LE
  misc_feature 305..1120: note = CDS
  misc_feature 1121..1405: note = RE
  misc_feature 1171..1397: note = bridgeRNA
caatgggatggacccctcttcacccgaacggcatcaacgtgccagactggaagcgttatcgaccagtcaacggagagaaggagtccaccatgaagcttatgcgcgttggcatagatttagcaaaggcggtattccaggtacacggggtcgaccggaatgagaaggtgacgttgcgccggaagttgacgcgagcgaactggctcgaggtgttgctggacgcggttgaaccaggctgcgtgatcggcatggaggcttgtggtggcgcgcaccactgggcgcgagcattgcaggcgagaggattgcggtgaagttgattgcaccgcagtttgtgaagccgtatgtgaagagcaacaagaatgacgccaatgatgcggaggcgatctgcgaagcgttgagccggccgaacatgcgcttcgtgacggtgaagacgatcgagcagcaggacattcaggccgtacaccgggtgcgctttgagttgagcaaccagcgcaaggcgaaaggcaatcagatccgcggcctggtggctgaatacggattggtagcgcccaaggaattgtggcatttgcgtgtggcgattccggtctggctcgaggatgccgagaacggcctaagcgcgcggttgcggcgcctgcttagcggtttgtggcaggacttgctggtgctggatcagcgaatgacggaactggatcgtgaaatcgctctgattgccaacgcggatccagtagccaagcggttgcagcaactgcgtggcgtgggaccgatgatcgccacggcgctggtggcgacggtcggcgatgcaaagcagttcgccaacggtcgacagatggcggcatctatcggcttgaccccgaggcaaaacagttccgggggcaaagagcgactcctgggtattagcaaacggggtgatacctacttgcgcacactgctgatccacggtgcgcgatccatcgtgcggacggcgaaggggaaagatgaccgcctcagccagtgggtcacccggattgccgagacccgtcattacaacgtcgcggccgtcgcgctggccaacaagacaactcgcatcgcctgggcgatgatgaagcacggaacggagtgtcgagcggaccagaccgcggcctgaaacggaccacgaccttgacgaagtagcagcgccgttaaccgaggagcccatccaccacgattgcaaagcaagccgcttgatggccgacaggtcgaaccggcgctagcgaaacccgagaactggcagggccttcaaggccgagatagcgattgggagctggcgcgcgaagcccattatggcccggcatcgatagctcgatgcggcaggtagaggccggatatacgtgagcagtcgtacctcaaagccaaagaacggagtgcttgcaaccgaggaggggtccatata

SEQ ID NO: 8875 - DNA, 1310 bp, unidentified
  source 1..1310: mol_type = unassigned DNA; note = element_def8b95
  misc_feature 1..3: note = core
  misc_feature 4..215: note = LE
  misc_feature 216..1163: note = CDS
  misc_feature 1164..1310: note = RE
  misc_feature 37..185: note = bridgeRNA
gcttgtgtcttgattagagattagaatctggagtgagagcggtgaatggcaagctgaaagccgcaggtgccttgagcacgagtgggagcacaagctgccattcaccgttccactttggcgagagcccgaacagttggacgcggctctgatctcgaatcacaagcgtgggccaagccaaagtcctctcacagtgttgagtttaggagatttaggcgatggtttcctacctgggtatcgatgtttctagtctttcgcttgatgctgcggtacggcctcagggcaccagacttcatgtaagcaatgatccggcgggattcgaagcgttgctcgatggcctttgcggtctcagcataaagcgtgttctgctggaggccacaggtggctatgagcgtaatatcctgaggttcttgcaggacgcgggctacaaggtcatacgcgtcaatcccaggcgagcccgagcgttcgcagaatccatcggagtcaaagccaagaccgacgccatcgatgccgaagtactggcccactacgctgaggtcattccagaccagcccaccctgcggatcagcccggagcgtgcgctgttgcgagaattgctgcagcaacgtgatcggctggttcagcagcgtgatgacgaccgcaggcgcctgaaacaggcgcagttcagcgcggtgtccgactttctgaaagccaaccttcagcacttcaagtcgcagatcaagctgattgagcaagcgatcagccagcaaacggaagccctgaaagatgaacgggttactcagctggtccaggtcaaaggcattggggtggtaacggcgggcaagctgataacacttctgccagaactggggcgtgtagagtccaaagaaatagcctcgttggtcggggtggcgccttttaaccacgacagcggaaaatccgtgggcaaacgctctatctcgggcgggcggtttgaggccaggcgatcgttgtatatgtcatgccttgtggcgataaagtacaacccagcactcaaggctcgttatgaggcgctgcgcggacgcggaaaagttgccaaggtcgccctcgtagcctgtatgcgggtattgatcgtacggctcaatgccatgctaaggacgggcaagccttggcttgatctggtcttgccacagcctatgcggacctagagcaggaagccgacgtaactcatacaggagcgggcttgcccatcaatccaataccgcgctggatggcacgggcttcgcccgtggccgcgcgacaagcgcgccccctggggggcgggctagattttaaataaatcgggcaagacagtt

SEQ ID NO: 8876 - DNA, 1408 bp, unidentified
  source 1..1408: mol_type = unassigned DNA; note = element_defa24d
  misc_feature 1: note = core
  misc_feature 2..305: note = LE
  misc_feature 306..1382: note = CDS
  misc_feature 1383..1408: note = RE
  misc_feature 90..275: note = bridgeRNA
ctttaactttgcagcgtgaaaagagtgtccttacgaactcttaaaatatttaacgttcaataaacgaagcaaacatgaagagatatcaaggtttttccttacctttgttgtagaaaggaaggattaactgccgaaggtcaacctatccgcccttggagaccaagagtctatcccttgctgcaggccctccggatttcaagctgcaaattccaaataggaaggtaggctcgaagcctaattaaagttgtagtaactcacagctttacttcagttaaccgcttcctgtaacttaaaaacgtaagaacatgaagaaaattgtaatcggcatcgacatttcgaaggaaaaaatcgacgcaactgcaatcgacgtgagagacagccatctgggagttgtcaagctggactaccaggtgtacgagaaccgccccatgggctaccgccgtatgctcgtctgggcaaggctcctgattaagggcgtcgggctgaaggacgtgctgttctgctgtgagacgactggcggctacgaccgctgcctgtgcgactacatctacgccaagggtcttgacatctggcgcgagggcgcgctgcagatcaagcgcagcatgggcgtgcgcaagggcaaggacgacaaggccgactcgctgatgatagccgagtacgccatgcgccatatcgacaaggccgtcatctacgagacgcctgacgagaaggtgcgggaactgaaggcactgttcctctaccgccacaagctcgtccaggagcgcacggagaagaaggtccgtgcctctgaactgaaggccacggcagccaagagtgactccatgcgcttcatcgtgcgcgatgccatgaggaacgtccgcgccctcgacaagagcatccgagactgcgagaagcagatccaggcgctcatcgacagcgacgagaatctcaagctcaactatgatcacgttgtgtccacccctggcatcagcatcgtcaacgcaacggccttcatcgcctacagcaacaacttccgcagcatcaacacggccaacaagattgcctcctactggggttgcgcatcgttccgcgaacggtcaggtacgagcgtcgacaagaaggcatacgtcaggtgctattccagctccctactgaaggcgacactgacacaggcggcggaatgcacgatcaaagagcacggcatctaccacgactactacctgcgtctgaaggcagagggcaagccctacggcgttatcgtcaacaatgtccgcaacaagctcatccatctggtgttctccctggtcaccaacgacatggactacgagaaggatcacgagttcatgagaaagaaaagaaagagcgaacaaggaatgtccgctcaattagagattattaactaaatatacttgtaaatatccataggaag

SEQ ID NO: 8877 - DNA, 1426 bp, unidentified
  source 1..1426: mol_type = unassigned DNA; note = element_defbb3c
  misc_feature 1: note = core
  misc_feature 2..134: note = LE
  misc_feature 135..1154: note = CDS
  misc_feature 1155..1426: note = RE
  misc_feature 1193..1425: note = bridgeRNA
atggaatgaacgcccccaccctccgaggttagaaactggaacatagaaagcggaccctcacggggcccagcggcatcaaggtgccgaaattggaagatcattgaggtcttcgcaggcaaaccagaggatccgaaatgaactatacgacggtcggagtagacatctccaagaacgtgtttcagcttcattgggttgatgctgagacgggcgaaatcgtcagcaagcaactcaaacgagcggtgttcctcgagcactttgcaaatcgaggagcttgtctagttggaatggaagcttgcggcggagctcagcattgggcacggcggttaatcgatatgggccaccaggtgaagttgatgccaggaaagttcgtcaaagcgttcgctactggcaacaagaatgattcggcggatgcgcgtgcaatctggatggccacgcagatgcccagcaaggcggttgcggtgaaaacagaagctcaacaggcgatcttggcgctgcaccgaattcgacagcaaaaggttaaattccgcacgatgcagatgaatagtctgcgggggctgctgactgagtacggtgaggtagtagctaagagccggacggcgctggacaaggcaattcctagcgtgctggcaaaattggttgagcgtctgccggcgatgttgattgagtcgttgcgtgagctatggagtgatctcgaaaaattggataagcagatcgctgatattgaacgacgtttgcagatgtggttgaaagaggacaaggcatgcaaggcgattgctgcgatacctggcgttgggctgctcaccgcgaccgctgctgttgcgacaatgggagatccgaaatccttcaaatccggacgtgaatttgcagcgtggctcgggctcgtgccggcgcaaacgggcaccggcggaaaggtcaagttgttaggtataagtaagcgaggagatacgtatctccggacactcctggtccacggtgcccgcagtgtgctcttcctcgcgaaggagccggggccgtggatagaaaacacgaagcaacgaagaccagcaaatgtgatcgtcgtggcgctcgccaacaagatggctcgaatgatatgggcggttctggcacatgaccgaccatatcgaaaggatcacgtgagtattcggcaggtttgataaattacgtttcgcagaagatctaacttttacagggtatggcgtcaaaaggttgcgttggaaacgagtgtgatgacaagacaggtcggaccggggcttgctaaacctgaatcgtagttcgagctccaagctcgtgcgtcaaatgaggggcaagtcagcggatttcatcggggccagcggcgtatcaggctgcaaaaaggtcggatataaaactgcaacctatcctgttgaatcaaagcaccgaaactaacgcaaacgggggcgttcatata

SEQ ID NO: 8878 - DNA, 1622 bp, unidentified
  source 1..1622: mol_type = unassigned DNA; note = element_df01c77
  misc_feature 1..2: note = core
  misc_feature 3..308: note = LE
  misc_feature 309..1505: note = CDS
  misc_feature 1506..1622: note = RE
  misc_feature 66..328: note = bridgeRNA
ttagtaccatataagtgtaagaggaaaatcatgttgcttgactctcgcacttatttttttattcaagtgtgaaagttgaagcgaaaaagctttaccttttgcacttatttttttatgataagggagtaacaggtctggcgaggcggctattggatttttacatccgtcaaaaaaactgccagcctttcccttattatatgcattcgattaagcaggttgagacacaataagtgctttcgtgtaacgaactaaaatgagtgttaataagtgtggaaggacctattacaaaattattttggaggaataacatgattagtgtaggtattgatgtttcaaagggaaaaagcacagtatgttttttagaaccatatggtaagcttttaaagaaaccgtttgaagttgaacatgataagatcagcttatcaacgcttgtaacgatgttaaaaaaactagatggtgaaattcgtatagttatggaggcaactggagtttatcatttaccgatattactatacttaaaagaacatgattttttcgtttctgttatcaatccatatgagatgaaaacttattgtacttgtggccttagaagggcaaaaactgatagacaagatgctataaaaattgcagactttggcattaataactggtatagattaaaaaactataatgttagtgatgatgtatattcagaattgaagcttttggtcaggagatacaatcattatatgagaatacatgtagaaagtattttagagcttacgcacattttggaatatacaatgccaggtataaagaaattattacaaggttggaacgaagctacaaacaaagacaaattaagtgattttgttgaaacatattggcattatgataatataacaaaattgtcagaagaagaattcattgaagattataccaaatgggcaaaagataaaggataccagtgtaagcaaagcaaagccgtgaaaatatatgctttggcaaatactagtatccctacaattacctctaatacttcatcggttaaaatgcttgtacaagaggcagtaagagtattaagagaagtcaataatacccttaaaaaaattttaacacaaatgcagaaattagccaagaggctaccagaatattccgttgttagaaaaatgggtggtgtaggagatgtgcttgcagttaaattaatagctgaaattggtgatgtaaaaagattccataacggtaaagcactaatagcatatgctggtatagacgcaccaccatatcaatctgggcagttcatagcaaaagaacgaaagatatcccaaagaggttctgcaagcttaagaaaaattggatatgaagttatgaggtgtttgaaatcacatgctatgccagaagatagtgcggtttatgaatttataataaagaaagagctggagggtaaatctaaaaaagcagctaaaatagcagggctaaataagtttttaagaatttattacgctcgaataaatgaaatatattaaatttacgcaataaaataataataggccgttaatattagcggtctatttagtgtgcgtaaattgtataatgaaattttatagaaaaaattaagaaaaggcttgacttttgttagcagg

SEQ ID NO: 8879 - DNA, 1186 bp, unidentified
  source 1..1186: mol_type = unassigned DNA; note = element_df062fa
  misc_feature 1..2: note = core
  misc_feature 3..217: note = LE
  misc_feature 218..1171: note = CDS
  misc_feature 1172..1186: note = RE
  misc_feature 27..196: note = bridgeRNA
cttgtatggtaaagcttaagagaatcggggagactttaggggtcgggatggagggacgtcgacaagtatctgcacagacagacctcgctgagaattcatcccatcgcgtcttccagagtcgatgaagaatctagcggtaaaaccgccgatttgtgcacaagcttactcggtggatgcaccaccccgacgctcttatttttcaacaggtggagggtgtatgacaagtgaaatgttaatcgggatagatgtagcgaaagacgaattagtgattgactcggagttgggcatagtgactattgcgaataccgcaaaggctatcgataagtggctgaaaaccttgcccgccgagagttatatcggtttggaggctaccggtgcttaccatcaactcctatgcgagcgagcggtctcaatgggtaaagtcgtctatctgctgaacccacgagatatgcgccattatgcgctgggcttgggccgccggggtaagacggatcgggtggatgcgcaaatgatccggcgttttattacggcagaacgcggtcatttacgcccctatcaacctgcctcgaccacacagcaccaattggccttgttgcaacggcgccgtgcgacggtcgtcaaacatcgccaagcactgcaaaaggccttgcgtagcgtgagtgagcttgaagaaccactgcgtgatgccttgacggcagtagacgggctattgacgcgtatagaccaacaattggacagcttattgaccttacaacccgcgttgaaagccgacgcccgacggcttgaaagtattccgggcataggccggcaaacctcgacacaacttgccgtcttgtttgatcgagtgccattaagccatagcgatgcggacgtagcttttgtcgggcttgatcccagggcgagtgactccgggcaaaagcgggggcgcaggcgggtgtctaaacggggacctagcgaactgcgccgattactatacaactgcgcccaggcagcgaccaaaaccgccgtctggaaaccctattaccaagcgttacgcgcccgggaattctcagcgacacaggcgctggtgattatttccagaaaattattacgcatcgctttttcgctttggaagcaaacaggtgccaaattcgatgctcagaaaattggctgcctcaaaaatgcgcattgacaagaaccatagaat

SEQ ID NO: 8880 - DNA, 1375 bp, unidentified
  source 1..1375: mol_type = unassigned DNA; note = element_df0fedc
  misc_feature 1: note = core
  misc_feature 2..64: note = LE
  misc_feature 65..1096: note = CDS
  misc_feature 1097..1375: note = RE
  misc_feature 1134..1370: note = bridgeRNA
caatggtatggaccccgccgccctcgggcggcgtatcttcgaatggagattggaggatcataacatgcaaatcaaaaggatcggcctggatctggccaagtacgttttcgaagttcacgcagtgggtacgactgaagaagtggttttgcggaagaccctccggcgagacgctgttgcgcatttcttcgcagaattgccgccctgtattgttggtatggaagcctgttgcggatcgcattattgggcacggcttctgaccgatttgggccacgaggtgcggctgatctctccacagttcgtgaaaccttatgtgaaatcgaacaaaaacgatcgcaacgatgccgaagcgatttgcgaggctgccggccggccatcaatgcggtttgtcccccctaagtcggctgaacagcttgaaatccaagcggtccaccgtatccgccagcgcgtggtcgcaaaccgtacccggctggtaaaccaagtccgcggtttgcttggggaacatggtgtcgtggtggcgcgggacatcacccgcatccggcgtgccctcagtgaaatagtcgataacaatcagggcgaatttggggagatcttcattgatatgttgcgcgacatgcgtgaggaactggccgaactcgacagccgtcttgcaggctgcaaccggcggattaagaatctcttccgcgccaatgagatgtgccagcgcattggtcaaatcgaaggtgttggcccgattacagcaacggcattggtggcagcagtcggtgataaatcctgcttcaagaatggtcgtcaatttgccgcgtggctggggctcgttccaaagcaacggtcaagcggtggaaaagcacgcttgttcgggatcagcaagcgcggtgaccgatacctgcgcacactgctgatccacggcgcacgagctgtgcttggaaaggcggccgggaaaaccgatccgcgcagccaatggatcgcgcggatgcgcgaacgacggcatccgaatgtcgtctcggtggcactggctaacaagaacgctcggatagtctggtcgctcttagcgagagatcagaactaccgcccagaacccgccatgtcgttcgcttgaacggcacctcggaaagtcaataaaggagagctacccagaatattacaacatctgccaggagatggaaaagggtcacgcccgttgcttctcgaacctgatgtgtggatcggcaaggtcagcaccgatgccttaggggcgatgaggaagaagcaagaggaaatccatcggggctcgcagcaacgaaatatcgggccgccctaagaagccggatatacatcagcaatcgcgacctcgaagccggaaccaaacagaccgttgcaatcaggcggggtccatata

SEQ ID NO: 8881 - DNA, 1111 bp, unidentified
  source 1..1111: mol_type = unassigned DNA; note = element_df10517
  misc_feature 1: note = core
  misc_feature 2..61: note = LE
  misc_feature 62..826: note = CDS
  misc_feature 827..1111: note = RE
  misc_feature 877..1108: note = bridgeRNA
taatggaatggactccaccctctcctaatcggcatcgtgatgtgccaaagtggagattcgaatgaaccacttaaacgaagagggggagtccgagatgaatcctacgacgattgggttagacattgcaaagaacgtgtttcaggcgcatggggtggataggaacggcaaggtagtgttgcgaaagaggctctcacgcgggaaggtgttggagttttgcgtcaatcttccgccctgcctgatcggcctggaggcctgtccgggagcacactactgggcgagggagttgctgaagctcggccacgcggtgaagctcatgcccgcccagtatgtgaaagcctacctcaaaggcaacaagaatgacggcaatgatgccgaggccatttgcgaggccgtcagccggccggggatgcgctttgtggcgatgaatacggaggcccagcaggatattcagatgttacaccggatccggagtcgtctggtggccgccgtcaacgacggaaagcagttccaaaacggccgccggatggcggccaacctcggactgactccgcgcgagcactcgagcggcgggaaacagcggctcttgggcatcagcaaacgcggcaacacctacttgcgtaccctgctcattcacggcgcgcgcacggtgttacgtcacgcaacgggtaaaaccgatcggctctcgcgctgggcagtggcgattcaagcccgacgcggcgccaatgtcgccgccgtggcactggccaacaaactcgcgcggatcgcctgggcggtgctggcccgcgatcgcagctaccgggcggatggggcggagcaatcggtttgacgcccgccgggaagcttttgagtcgcggtgtattaggctaaaaacacaccacagattgcgaaggtgaagaaacacctgatggcacaacaggtcagaccggtgttctgcgattccgtcccgcgtagtggcccttcgaggccgtcatcctataaggaaccagagcgcgcacattccatcatggccagagcggataccacgctcaccaacaggccggatatatacatgcagtcttccttacaagccatcatccaatcctcaccttgcaaaccgggtggagtccatata

SEQ ID NO: 8882 - DNA, 1593 bp, unidentified
  source 1..1593: mol_type = unassigned DNA; note = element_df11857
  misc_feature 1..3: note = core
  misc_feature 4..273: note = LE
  misc_feature 274..1290: note = CDS
  misc_feature 1291..1593: note = RE
  misc_feature 35..229: note = bridgeRNA
cttgtatattagagggggaaggatcaggtacactgggaaagaaccgagacgaggagaagaggaagggtgaactttcaggctcacagaggttacaaacctgccacgaagataaggtcccactcctctgctacgacgatcgaaaaccgaacggtatctgaggccttcccgactgaacagagccggcaatgagcctgtattcacaagtgtggttccgtgatcgccgctctccacgcctctagtcccaagtgtaccatagaaaggagtcttcgctcaatgaccacacgcttaccggccctgggcattgacatggccaagagtaccttcgatgtgcatctgctcgctgaatccaaagtcagctcgcagcactttgccaacacttcccccggatgcgaggcgttggtccagtggctcaagcagttggggatgaagcaggtccatgcctgcatggaagccaccggcacctacggggatgccctggccctcttcttgtatcaggctggccatacggtgagcatcgtcaatccggcacgcatggcagcctttcgtctctcagagggaggacgaacgaaaaccgacaagcaagatgcgaagctgatcgcccacttttgcgcgcagaaatgcccggtcgcctggctgccgaccccagcggccatagcacagttgcaagtcctgcttgtgcgactggaagccctgcaacagatggagcgacaagaggccaatcgcctggaaaacggccgcttcgacgcccagacgcggcaggacatccaggagcatcgtcaggatctcaagacccgcatccgggaagtcaaaaaacggctgcatgcgcacatcgagcaatatgagacgctcaaaaaaccgtgtacgttgttgatctctctgccaggcattgctgaattgtcggcggctcgcctgctggcagagattatcgacatcacgcgcttcaagacggtcaaacaactcgtcgcccatgcggggctcgctccgcaagagcgctcatcgggaaactcggtgcgcggcaaagcctccattggcaagtcgggccgcagtaagctccgcaaagcgctctatatgtgcgccgtcgttgcgtccactcatgacccgtccatgcgcgccttcgcccagcgcatgcgacagcgcgggaaaccggcgaaggtggttctcaccgcagtgatgcgcaagctcctgcacatggtctacggcatcttgaaatcggaaaaggcgtatgatcccaccaaagcctttcctggagcggctttgggttcagtcccagaggcggaggtagccgcctgagtttgagcgcagctcaggggggtcctgaaatatcggttctgcgaagctgtcatcaatttccaacatgaggacagcaaaagagggctttttttgtttttaatcaggcgcaagaagcaggaaccgcgtcagtttccagctgtcaagcgcattgcgaggtacgagcaacttggcttgacagctggaaactgacgcggtacactcggcgctgcctgattgaaagcgacaacatcactgaacgtttcgcggtttttttgctgaacttcaaccgatctggctgctgcctcttgacaattaagacggtat

SEQ ID NO: 8883 - DNA, 1570 bp, unidentified
  source 1..1570: mol_type = unassigned DNA; note = element_df12df8
  misc_feature 1: note = core
  misc_feature 2..284: note = LE
  misc_feature 285..1331: note = CDS
  misc_feature 1332..1570: note = RE
  misc_feature 1322..1538: note = bridgeRNA
cagggaggctgtggatagtgcttctggccctgcttcttcgcttccggccctgcttccgtggttttgggcgggtgggggcgtatggtccggagcactgggtcccggcctgacctccgaatcggcgacgccgtacgggctgtcctgctaacgacttgtcggccgggctccagctttaggcacccaccggcgctgccggtctgatctgcctggcctgggcaagaggccggggtgtcacaggtccgggcggccagcgggtgcgtgccatccctcaaccacagaaagggatgacagtgaccatcgtagagacacgcgccgttaccggcggtgtggacacccatgccgatgcccatgtcgccgccgcgctggatcccatcggcgggctgctcggcgtgcaggagttccccgcgacgccggccggatatgcgcggctgctgggctggctgggcggattcgggacggtatgcctggtcgggatcgagggaactggcagctatggcgccggcctggcccgccacatcaccgcggcggggatccgggtggtggaggtagatcgttccgaccggcaggaccggcgccgggcaggtaagtctgacccactcgatgcggtgagcgcggcgcgggcggcacagtcgggccgggcccgcggtgcgccgaagggacgcgacggcgcagtcgaggcgatccgggtgctgatggtcgccaagcgaagcgcccgcgcggagcggacccagacgatcaaccaggccggggccctgatcctgaccggccctgatgacctgcgggcccggttctcccagcatcaccccgcggacttggtcgctgagctggcggcactgcggccccgccccggcggtgtcgtcggttatgccacccggatcgcggtgcgcgaactcggccggcgcgccgagttcctcgatggccagctcgagcgcctggacgagctgatcgtccccctcgtcactgcccgcgtccccggcatgctcgccctttacggcgtcggcccagacaccgcggcgctcctcctggtcgccgctggggaccacccggaacggctgcgctccgaggccgcctgggcgcacctgtgcgcggtcgccccgatccccgcctcatccgggaagatcacccgccaccgcctcaacccgggcggcgaccggcaagccaaccacgccctgtggcggatcgtgatcacccggatgagctctcacccgccgacccgcgcctacgtcgcacggcgcaccgaagagggcctgtcgaagaaggagatcatccgctgcctgaagcgctacatcgcccgcgagatctacccccacctccgcgcggccgccggctaacgctcattctccggggacggcctggcccgctaatcggctgccgcacaaccgctggcctgctaacgattcgccgaccgtccccgggccttccacgtgacctggctgggcgtgacctcataagagcttgccctcatccgagcggcccttccctgtcttgtccgcaatccaagccattccagcatgcccggaaaaaggggacaaccaaatgtcacacgaacccttgacaagcataggggcat

SEQ ID NO: 8884 - DNA, 1603 bp, unidentified
  source 1..1603: mol_type = unassigned DNA; note = element_df176d1
  misc_feature 1..2: note = core
  misc_feature 3..264: note = LE
  misc_feature 265..1470: note = CDS
  misc_feature 1471..1603: note = RE
  misc_feature 32..284: note = bridgeRNA
ttagtaccataaaagtgtagttgttagagagtaattaactctgacatctgcacttatttttatataataaggggagtaattggtctggcgcggcgctttttggattaaccacatccggcaacaaaaacagtcagccaaccccttattatacgtattcgcttaagcaggtagagacggatatagtagctctcgcgtaaccaactaaaatgaatggtaataagtgtggatggaaacaattactaattattatcaaggaggtcatgtatgataagcgtaggtatcgatgtttctaaaggaaaaagcactgtatgcattttgaaaccatatggggagattgtaagtagaccgtttgaagtcaagcatcttgaaagtgatttagaaagtcttgcacaaatgattttaagactggatggagaagtaaaagttacaatggaagcaactggtatttatcatcttccagtgctgaattatctgcaagaacaaggtatttttgttgcagttatcaatccctttgagatgaaagaatatgcctgtaggggcatacgaagggtaaaaacggataggcaggatgctatcacaatttctaactacggaattgataactggtttagattagaaaaccacaaaggatccgacgaaacatatgcagagttaaaactactgggcagacaatactgtcactatatggaactgcatgtgaaagcgttgcttgaattaacacatatgttggattacaccatgcctggaatcaaaggaaaaattcatagctggaatgaaggaaatggaaaggataagttaagtgattttgtggaaagatactggcactttgacaatatcgtttcaatgaaaaaagatgaatttgtagaagattatatcaaatgggctaaagaaaacaaataccatcagaaccgttcaaaggcattggaaatctatgaactggcatctgatggcattgctactttatctgccaataccccatcgaccaaaatgctggtattggaagctgttagggtacttcgagaaatcgataataccttgatgaaaatcataacacgaatgaaggagttagcaaagacccttcctgaatatgaaacggtacgagctatgggtggcgttggggatgtattggctcctaagttaatagctgaaataggtgacgtcagacgttttcataatggtaaagcattaatagcctatgctggtatagatgccccgccatatcagtcaggacaatttactggaactaatagaaagataagtaaacgtggatcgaagcttttacgaaagattggttatgaaacgatgagagtacttaaaacgcataaggaaccagaagatgcagctgtatatcgatttattctgaaaaaagaagcagaagggaaatccaaaaaacaggcgaaaatagcagggttaaataagtttttaagaatctactatgccagagtaagcgaagtatataaatcgatttagaaatatttttaatagacaaagacgcagactgattgcaaaatcagtccatttgtcgtggataaaaacggagtaaatggaaatgaatgaaaaacctgcaagaaaatcaatttggtacttgatttttcttagcagg

SEQ ID NO: 8885 - DNA, 1381 bp, unidentified
  source 1..1381: mol_type = unassigned DNA; note = element_df2b3ae
  misc_feature 1..2: note = core
  misc_feature 3..85: note = LE
  misc_feature 86..1120: note = CDS
  misc_feature 1121..1381: note = RE
  misc_feature 1150..1367: note = bridgeRNA
gatggggtggatggctcccactcccggcatcgacatgccaaagtgtgattgtcatcaacgatcacaaataaaaggagctaccctcatgaagatttgcaccgtaggccttgatttggctaagaacgtttttcaggtacacgccattggagaagccggggaagttattgtctgcaaagctctgcgtcgtcgccaggttattccgtttttcagcaaacttgaaccttgtctgattggggtagaggcctgtggtacaagccacttctgggctcgggagttgtcatcacttggacacagtgtgaaattaatgcctccaatgtacgtgaaagcatacgttaagcgcggcaaaaccgatgcagctgatgcagaggctatctgtgaagctgtacggcgaccaacgatacggtttgtggccatcaagtctcccgagcaacaggcagtactggcgttgcacagaacgcgtaatttgctgatccggcagcgtactcagttagtaaacatgatccgcgcccaactggcagaatttggcatatcactggtcaaaggaattcagcatgccctcaaatttgtggagcagcttctagagggtaaagtgctgactgttcccccactggcaatcaaggtgcttatagttttggccgagcaaatacaggcgttacaagggcgggtcggagctattgataaggatctgatggtgtggttcaaaggaagtgaggttgcacgacgcttggcaaccattcccgggatcgggcttattacagcctcagcactggcggtaacggtcacggacccacatcagttcacgtcgggtcgacaatttgctgcctggttagggctaacacccaaagccaattccagtggaggaaaagagcgccagggacgtatctcaaagatgggggaccaatatcttcgacgtctgctggtgaacggtatgacagcccggcttcggtggattcggctaaaaccgggcacccaaccctggatcaccaatttactacaaacaaaacccgccaaactggttgctgtcgccatggctaacaaggttgctcgtatcgcctgggttattatgacccgtcgtgaggtgtaccgtattcctcagcctgcagaggagagttcggtatgagataaaccagcagagcgatttagaatattcaccaattgcaagggcgatgagatgtgatggcgaaccggtcaggccggggatagggaaaacccgataagtgtccaggacataacagtccgttaagtagagagggacccaatccgcggaatccatcagggccaacggttaaaaacactgcaacaacaggccgaacacaagactgcacccgaccatgccgataaatatcaaatataccttgcaaacagggagccatccacacag

SEQ ID NO: 8886 - DNA, 1325 bp, unidentified
  source 1..1325: mol_type = unassigned DNA; note = element_df3635d
  misc_feature 1: note = core
  misc_feature 2..250: note = LE
  misc_feature 251..1309: note = CDS
  misc_feature 1310..1325: note = RE
  misc_feature 16..241: note = bridgeRNA
cagtgaagatgtggctgtccctgatcatggggctggtcttgccggctggtctgacccggaccggacctgactgcgtgtcattaccgggattcgtcggcctgtccggcaagaccacgtggtgcacgcgaccggacgggcttgtgtgacctgatacgagcttgtgcgctcaagccccgtcactggtgtgtccgcccgcccggccggtgcgtgcctgtcctgcccggtcctcgagcggaaaggccaccccaggatgcccaagcgcaccaggattgtcatcggcggcgtcgacacccacggtcgcacccaccacgccgccgtcatcgaccagaccggtcggctgctcggcgatcgccagttccccgctgatcgcagcggctatcggcagctgctgggctggctgggtcgccacgggcagctgcgcgcggtcggggtggaaggcaccggcagctacggcgccggactgacccaggtgctcctggaccagggcgtgagggtggtggaggtcgaccgacccgaccgtcggacccgacgccagcggggcaagtcggacccgatcgacgccgaggcggccgcccgggccgtgctggccggcacagcgaccgcggtccccaagcggcgtgatgggatcgtggagtcgatccgggcgctgcgcaccgcccgcagcggcgccgtcaaggcccgcaccgcagccatcaaccagctcaaggcgctgttggtcaccgccccggccatgctgcgggaggcgctggacggccgctccaccccggcgctggtcgtcgcctgtgccaggctgcgccctgaccagaccgcgttggccgacccggtccaggggaccaaggccgcgctggtggtggtcgcccagcgcatccagctgctggaccaggagatcgccctggccgaccagcggctggctgtcctcgtcggtcgagccgcgccccggctgctggggctgctggcgatcggcaacgaccacgccggccagctgctgacaactgccggccagcaccccgaacggctccgcggcgaggccgccttcgcccacctgtgcggagtcgcccccatccccgccagctcgggcaagacccaccggcaccggctgcatcgtggcggcgaccgcgacgccaaccgggccttgcacctggccgtggtggtccggatgcggttttgtccccgcacccgcgcctatgtcgaacggcgaaccaaacaaggcctgtccaaacccgagatcatccgctgcatcaagcgctacctcgcccgcgaggtctaccacgccctggtggccgacttcgaagccctccacgccacttgacgatctatacgagcat

SEQ ID NO: 8887 - DNA, 1484 bp, unidentified
  source 1..1484: mol_type = unassigned DNA; note = element_df3b170
  misc_feature 1: note = core
  misc_feature 2..109: note = LE
  misc_feature 110..1126: note = CDS
  misc_feature 1127..1484: note = RE
  misc_feature 1178..1408: note = bridgeRNA
gaatgaaagggacttccccgtcccgaggtagccgcattgcggcagatggcaattgagtgccacgatgggaagtgcggtttctcatcaacttattcggaaggggaagtccatggctattctgacggtaggtattgatctcgccaagaatgtttttgcggtgcacggggtgaacgaggccggcaaggccgagttggtccggccaactgttgcccgcgacaagctgcatgaactgatgtcgtccttgccaccgtgcatcatcggcatggaagcttgctccggcgcacaccactgggcgcgtctgttccaagcttcgggccacaccgtacgcctggttgcaccgaagttcgtcaccccgtaccgcatgagcgggcggcgcggcaagaacgatgcggccgatgccgccgccatctgcgaggccgtgcagcgccctcacatgcgcttcgttccggccaagagcctgcaacagcaatcgcacctgatggtgcaccgcgcccgccaaggctttgtcgagcaacgtaccgccacgctcaaccgcatccgtggtctgctcagcgagttcggcatcgtgctgccgctcaaggccgccacggtgcgccggcgggcctgcgagtgcctggaagacctgcccggctacgccaacaccgtcatcggtgacctgctcagcgaagtcagccggctggacgagcgcatcgcgcaatacgaccaacacatcaaggccatggccaaagaggacgcgcgggccaagcgcctgatgcagctcagcggcgtgggcgagaccaccgccacctgtctgttggcgatgatcggtagcggacacgacttcgactgtggtcgccagttcgcggcctggctgggcctggcgccgggacagtacagctcgggcggcaagacgcggctgggacgcatcaccaaggccggtgatgcctacctgcggacactgctgatcctgggtgccagggcgctgctggtggcggccaagaacaagacggacgcggtcagtcgctgggcggtggcgctggccgagcgacggggctactggaaggccgtggtggccatcgcggcgaagaacgcacgcatggcttgggcggtgctgcgcaagggcgaagacttcgtgctgccggcctgaaagccgatcggcgttgcagctctcattgttgatcaagccaggaggattgagttcgaccgccgcgtgacggcaggcgttgatgacaacaggtttggacctgcgcgggcagtgaccgatcaactcaagggcggcgaactgcttgccggctaacgaatgggtctcccgcgtgcgtccttcatcagggtccatggcgcatgaaacgccacacgaatgaccgtttgtagtttggccagtccgcatctgttgttctcagctttgctcgctcaccacgcgccgaaatggcacgcagacccaacaagagaaatccgcaccgcgggtcatggggcaactttgtttgacaagtggggaagcccttgta

SEQ ID NO: 8888 - DNA, 1511 bp, unidentified
  source 1..1511: mol_type = unassigned DNA; note = element_df3c9a9
  misc_feature 1..4: note = core
  misc_feature 5..268: note = LE
  misc_feature 269..1495: note = CDS
  misc_feature 1496..1511: note = RE
gtcactagtgcaccctctttctggtgagcatcgttagggtgctcgctgttgggactcggcgggagccggggtgacggctttgctcggtcgcctgtgaagggccaccatgacaccgccgcccctggcttccccggggctgcggaccggctacagggagatgcgccgcagagcgccggctagtgaccgcccgggggccagtcccggtgccgccgggttgtcgctgccagttcaggggggttctgtgtcgtcgcttgctgttccgggggccatgttctacgcggggatcgactgggccgctgaggctcatgcggtgtgcgtcaccgacgcggccggggctgtcgtggccaggttcgatgtcgctcatagcgccgaagggctgggccggctgacgcgccggctcgccagcctgggcgatccgggggatatcccggtcgcgatcgagcggccgtccggccggctggtggacgtgctgctggaggccgggcacccggtcgtgccggtgagcccgaacgcgatcaaggcctggcgcgacggcgaggtgctctcgggcgccaagtccgacgccgccgacgcccgcctcatcgctgagtacctgcggctgcgccagcaccggctgcgcgtggccgcgccgtacagcgagcagaccagggcgctgcgcgtcgtggtccgcacccgcgacgacctggtggacgcccgggtcgcggcggtcaaccagctcgccgcgatgctggaggcgcactggcctggcggcaaggccatcttcgccaggctcgactcgccggtcgccctggaattcctgacccgctaccccgacgccgcctcggcagcccgcctggaccaggccggcatcgccgggttctgcgccggcctgggctactccggcaagcggcccgccgccgagctgctggaccggctccgttccgcgccagccggaaccaccagccccgaactcgccgctgccaccgccgacgccgtccaggccctggtcaccgtcctcaaggccatcaccagcgcgatccgcgacctggaccgctccgtcgccacccggctcggagagcacccggacggcaagatcttcacgtcgctgccaaggtcgggtcagatcaacgccgcccaggtgctcgccgagtggggcgactgccgcccagcctacgagcaccccgacgccgtcgccgccctcgccggggtcacccccgtcacccgccagtccggcaagcaccgcgccgtcgagttccgatgggcctgcaacaagaggctccgccgcgccatcaccatctacgccgacaacagccgccgcgccagcccctgggccgccgccatctacgaccacgcccgcgccgccggcaaagaccacccccacgccgtccgcatcctggccagagcctggatccgcgtcatctggcgctgctggaccgacggcacgccctacgaccccggactccaccgcgcagccgccaccctcgccagacacgctgccgctgaatccgcggcatgaggttgacacagggagt

SEQ ID NO: 8889 - DNA, 1543 bp, unidentified
  source 1..1543: mol_type = unassigned DNA; note = element_df3c9b3
  misc_feature 1..2: note = core
  misc_feature 3..539: note = LE
  misc_feature 540..1436: note = CDS
  misc_feature 1437..1543: note = RE
  misc_feature 17..233: note = bridgeRNA
ctcgtataatatacttgtagttaaaactactttttttcttttctatcccctcttctttgtgggataatattagtatagatagaggtcgtagctacctccttgaagtcatatcttccttttaaaggcttacgcctcttctttacgtctttatgcgtattagctggatagcactaagttgctgtatatctaacgaggttgcattgtcgtaaagttttagagggttctttctctatctaaaatatatgaaagctaggtgattttatgttttacataggtattgatattgctaagaaaaaccacgaagcttcaataattgattcttctggaaagagcttatccaaaagtatttcctttcccaattctacaaaagggatagaaaagttcaataattttatttctgaatttggtgtaacaactaataattgcattattggaatggaagcaactggtcactactggataagtttgttctcatacatcattgatctaggatttacgtgttatgttataaatccaattcagtctgatgctttaggaaaatgtatgttagacaaactaagaatgattcagttgattcatttataattgctcaaataatgcgttttggagagttctctatatctaatttttccgatgagaatacatttgcccttagaaatttaactagatataggtttgccttagttgatgaatgctcagattggaaaagaaaacttatagctatacttgaccaagttttccctgagtactcaagtcttttttcaaatatatatggtgttgcatcaaaggaactgttgtcaaaatatcctttaccagaagacatgctgtcgattcctgctgaggagcttggcgacttactttgtaagtgtagcaagggtcgtcttggcataaataaagccgaagaaatccaatcctgtgccagggaaacttttggaattaagttcgctaaaagatctttttctttccaaatcaagcaaataattagccaaatttcattcctagaagaacaacttaaagaaattgaaattgagattagttacttgcttgaggatatatgtccaattattactacaataacgggtattggtagtgttttaggtgcgtctatagtatccgagataggcaatatttctaggtttgaaagggcaaatcaacttgttgcctatgccggtttagacacacgcgtaaaacagtctggcgatttttcagctacaaatacaaaactttccaagcgaggttcgccttacttaaggcgttctatttggcttgccgccactgtagcagcctttaaggacccagccctatccatatactatcaaggattgagagcacgaggcaaagctcatggcacagctataggggctgttgcaaggaaattgaccaatattatatttgctgtcttgagagatcaaaaaccgtatactccaaatatttagttgtcaatattattaatttttcaagcctattcattaggcttatttgctatgcaataatgtcagtgtgaaatttcttttttattttgtattgacatttgatagctggt

SEQ ID NO: 8890 - DNA, 1361 bp, unidentified
  source 1..1361: mol_type = unassigned DNA; note = element_df49d67
  misc_feature 1: note = core
  misc_feature 2..231: note = LE
  misc_feature 232..1095: note = CDS
  misc_feature 1096..1361: note = RE
  misc_feature 1102..1348: note = bridgeRNA
tgatgtggtggacgacccctgcacgagcgtagctgtgcaatcatgtggtcgttgagccacgtctaggagtcggtccatgcagaaggatgtcgttaccgtcggtgtcgatctggcgaagaatgtgttccaagttcacgccattgctgccgatggcaaggtgctggtccgtcggcagcttcggcgtgccgaggtgttgaagttcttctcatccttgccgcgctgctggtaggtatgaaagcatgtgcttcggcacaccattcgggccgggagcttctagcgctgggccatgatgtgcggctgatgcctccggcttatgtgaaaccatacgtgaagcgcggcaagaccgacgctgccgatgcggaggcgagctgcgaggcggtgacccggccgacgatgaggttcgtcgcggtgaagagcgtcgatcagcaagcggtgctgatgctccacaagacccgtgacctgcttgtgcggcagcggactgcactgatcaacgcgttgcgcgcgcacctgtcggagtatgacatcgtgtccagcaaggggcctggtggggttagcgtgctgatgaagctcctgcacgaggggcaagagcagctgccggcacatgcgcgatcggcgctgcataccatcggtgcccagctgagatctctggcgagcgaggttgatcggctcgaggcacagatcctggcctggcatcgtaccgatgacacgagccgccggctcgcgaccattcctggcatcggcccgattaccgcctccgcaatcgctgcagctgtacccgacgcatcattgtttcgttcggaacggcaattcgctgcatggctagggctcactccgcgtccccatagctcgggtggtaaggagcggcttggcggcatcagcaagcagggtgacgaataccttcgcaaactgctggtcgtcggtgcgactgcggtgatgcgcatggcgcgcaaggatgccgcccgccagccttggctagcacagctgctcgagcgcaagccggtgaagatcgcaaccatggggcttgcgaacaagacagcgcggatcgcctgggcagtgatggcgcgcaaagaggtctacgcggccgccgccgcgtgactgctgtcctcgtcgcgcgctgacgcggtcgacgggatggtgtaagggcagctgagtggtgatgacaaaccggtcagaccggggatcgaacaaacctagcggagcaaagcgcttcgagcgcgatgacgtgattagggatccgatccgcggacttcatcagggccagcagctatgtggtgctgcgcaagtaggccgaacacatggatgcacccgaccggtgctcatcgctatacgaaagctcttgcgccgcaggggtcgtccacaca

SEQ ID NO: 8891 - DNA, 1505 bp, unidentified
  source 1..1505: mol_type = unassigned DNA; note = element_df4dab8
  misc_feature 1..2: note = core
  misc_feature 3..208: note = LE
  misc_feature 209..1489: note = CDS
  misc_feature 1490..1505: note = RE
  misc_feature 9..203: note = bridgeRNA
ctgatagcagtaccttctttcatggccgggacctccggggaacgcttgtggcgcttgtccttcgaggactgagatgagactgcgtccctgggggcctgcgccggaggcatgtcgtctcggaaggtgtcgtcccggagaggactggtctatcagcacgacgcgccgcctccagccccggtcgactacaactgaaatgcgatgagaggcaatgcttttgcttgctgtgggaatcgattgggccgagtcgttccacgacgtggcgctcggcaggcccgcccagggggtgatcgagcagttccgcatcgaccacaccgccgccggtgtggcccggctggtggcccgttgtatggagctggaaccggatcctggcgaggtgcgggtggtgctcgaaacccgccacggtgtgctggtggagtcgatggtcgatgcgggcttcacgttgctgccggtgaatccggacctggtcgcgcgccgccgcggccccgcccggaagaaggacgacgccgaggacgcccgcatctgctgccttctggcgctggaccagttcctggacctgcgcaagctcgtcccgcacggcgatctggccggagagctgcgtgccatcgcccgcgacgacgaacgcgccgcccgcgaccagcgccggctgctcaaccggctgcgcgccgacctgctggccacattcccggccgcggtcacgatcgccggtgacgatctgggcagcccgatcatgttgaagctgctggcggcctggcccacccacgcccagctcgccgaactcgaccgcgaccagctcgccgcgttcgcccgcgccaaccggcacggatggccggaccggttcgctgcccgcgtgctcgccgccctggccgtcgagcagttgccggtgcgtgactacctcatccgggcgaaagcgaccacgatcgcgctggccgccacgcagttgctggccttgcgcgaggcccgcaaggcctggcagcgccgcatgggtgagctgctgctgggcgcgcgccgcgagggccgcgccaaacaacccaggaaccccgatccgggaaaagcggtcccgggcggtgagatctacctgagcttccccggcctcggggacgtgctcgccgcccgggtcgccggtgaaatcggggaccacatcgagcaattcgggactccgaacgcgctgcaatgctacggcggcaccgcgccggtgacccgaagatccgggcgcagcgagtacgtcgtggcccgccggctggcacacaaccgctacctcggcgcggccgtgcaccaatgggcgttctgcagcctgcgtgcctccggctgggcgcgggacttctacgacgccaagatcgccaagggcaagtcccaccacagtgcactgcgcgcgctggccaaccggtggctggaactgctgtggcactgcctgacccgaggcgtcgcctacgacgaagaaatccacgccaacaaccgccgcaacgcaatccccgcgacgaccgcggcctgaggtagacagaaggtgt

SEQ ID NO: 8892 - DNA, 1405 bp, unidentified
  source 1..1405: mol_type = unassigned DNA; note = element_df5153f
  misc_feature 1..2: note = core
  misc_feature 3..90: note = LE
  misc_feature 91..1131: note = CDS
  misc_feature 1132..1405: note = RE
  misc_feature 1151..1377: note = bridgeRNA
tgatggtgtggaacggccccgctacccacagcatctaaagtgctaaaacgtggtcgttagttacaacgccacaatgtagggagccgttccatgaagcagattagcaccatcggcctggatttggccaagaacgtttttcaaattcatggagccgacgccgagggcgcgccggttctcaaccggaagctgcgtagagccgaggtgctacgctatttcgagaagctgcctccgtgcctggtcggccttgaggcctgcggaggctcgcattattgggcgcgcgagatcgcagcgttcggtcacgacgtgcgcttaataccgccaatttatgtgaagcctttcgtgaaacggggcaagacagacgccgccgacgccgaggcgatcagcgaagccgtgacccgcaagaccatgcgcttcgttccgattaaatcggctgatcagcaagccgcctcaatggtactgaaaacgcgcgctcttttggtccgtcagcaaacccaggcgatcaacgcgcttcgtgggcatttgtcggagctgggcgttatagccgccatcggcacggcgaaagtggcggcgctaatcgagatcgtgcgggacgatgaggaatttcgcctgccaaaagccgcccatttcgctttggccgaaatcgccgatcagatcgaggcattgacgcggcagatcgacaaactcgaacgagcgatcgtcgccgaagcgaagcgtgatgaggacatgcggcggctgacaacaattccgggcgtaggagcgatcacagcggccaatatcaaggcgttggtcccggatccagacggcttcaaatccggccgtcacttcgccgcctggctcggattgacgccaaagccccattccagcggcggcaaggagcggctcggcagcatatcgaaaatgggcaatccgacgctccgttcgctgctggtttgcggcgcaacgtcggtattgcgacacgtgaagggcaacgacaaagcgccgcaatggctaatcggacttttggcgcggcgacccttcaaggtcgtcgcggtagcgctcgccaacaagatggcgcggattatttgggcgctgctcaccaagggcgggacatatcgaaacactggcgcggcaagcagcgcggcgagcgcttgagccgagagatagccagaatggactgaccggcgcagacgccggcagaggcgaggtgcacaattagacgatgattccacgggacgaaatcccgaggcgagagaggccggcgcgacaatgcgcatccagcgcgtctgattgatcagtccctcgcttcgcgaatttcatcagggccagcggtctatgaccgcgctgaaaggccggacatatgaccgcaccgttcctgctggatgaaatgtctaaagaaagcacttgccgggcgcggccgttccacata

SEQ ID NO: 8893 - DNA, 1112 bp, unidentified
  source 1..1112: mol_type = unassigned DNA; note = element_df56791
  misc_feature 1..2: note = core
  misc_feature 3..161: note = LE
  misc_feature 162..1106: note = CDS
  misc_feature 1107..1112: note = RE
  misc_feature 1..163: note = bridgeRNA
cctgtgtgtgcagggtctgtcatgatggggtgggcgggaagccgttgggtccctggcgcatgacgccgtaagccggctcggtctcccgcccgtttcgaccattaacctgaacagttgcacgaggctgcgccaacagacctcgcatcacagggacaggccccatgatcttatcccttcgctgcgtcggaatcgacgtctccaagcatacgctcgacatttttgatgatgccgtcggcaaacccgagcgcatcgccaacgcgctacaggccatcacggagcaggtggcgcgttggcgatgcggcaatgtctttgtcgtattcgaagccacaggcgtctacgaccgagaacttgccgaagcgttgcatcgggccaggatccggtttgcccgcatcaatcccgcccgcgctcgcgactttgcccgcgcgcgaggacggctggctaaaaccgatgcgattgacgcccacatgctcgccggctttgcgcggacgatggcgccggcttccgaacaggcgccagatccagcccggaacgccctgtcactcctcgcaaaacgccgcgatcaactggtccacatgcgggctcaggagaagaaccggcgcagcgagacgcgtgatcccgccatgatcgaaagcattgcgcgcctcatcgacttcctcaacggcgaggtcaaggcgatcgaggccaggatcaaaaccctcatcaaggccgagccgacgatatccgacgacgcgcgtctgatacgatcggcaccaggcgtcgggcctgtcgcctgtatgcagctcatcgcccagatgcccgaactcggtcgcgtcgggcctaagcaggtggctgcgttggctggtctggctccgcttaacgtcgatagcggcctatatcgcggcaaacgagccatcggtggcggccgcaagcgggtccgcgacgctctctacatggccgctctcaacgccgtacgccgcgatggttcggttaaagctttttaccaaaagctccgcaccgccggtaaacccgccaaacttgccctgatcgccgtagcccgaaaactcctcacgaccctcaacgccatggtgcgagaccggaaagcctacctcgcaccacggccttcataacagttg

SEQ ID NO: 8894 - DNA, 1543 bp, unidentified
  source 1..1543: mol_type = unassigned DNA; note = element_df5f6ea
  misc_feature 1..2: note = core
  misc_feature 3..240: note = LE
  misc_feature 241..1422: note = CDS
  misc_feature 1423..1543: note = RE
  misc_feature 3..218: note = bridgeRNA
cttgtattatagagtagtagttattagagcccctctccaagggctgtgctacactgtaagggatgctgtggattggttacttcctcctaccgcaagacggttcaggaaaggctccaaccacagccctttacagtattgttaatcagttagataccgccagacggtttatgtagaacaaggttacacgagtaaagcgtcctgtggacccagcatcaaacaaacacaccggaggtattcatcatgatttgcgtgggtattgacgttgccaaggacaagcacgactgcttcatcctcagctcggaaggtgaagctctggcagatgtatttaccatccaaaacaatgcggagggctttgacaggctcctgcaaaccattcgccgctgcacccgtccagaagataaaataaaagtagggcttgaggctaccggacactacagctacaacatcctcggatttctgcttgacaaaggcctacccacctacgtcatcaatccgctgcacaccaatctctaccggaaaagcctgagccttcgcaagacgaagaccgaccgtgttgatgcgcgaaccatcgcagctatgctcatgtctgatgtggacctcaagtcctacacagatacagcataccacaacgaggagctaaagtcactcacaagataccggtttgataaagttcgtgaacgggcgaagctgaagcagtctgtttcccgcctggtcacgattctgttcccagagctggaaaagctggttccgacacttcatctggcatctgtttacgcacttctcagcgagtttcccggcgccaaacaggttgccgaagcgcacctgacgcatttgaaagcagtcttgagcgacgcctccaaaggccgctacgggcgagatatggcaacaacgcttcgagacgctgccagatgctctgtcggctctgtcatgccagccaagtctctggaattgcagcatacgatccgcctgatccgcgaactcgatgccgaaattgaagacattgagaccgcgatccagtccatgatggatgaaatacagtcgcccattacaacgattccgggcattggtgttcgcatgggcgctatgatccttgccgagatcggtgacttcacccgcttcgactcgccggataagatacttgcttatgctggcatgtcgccctctacttaccagtccgggcagctttcattgtctggaacctactcgcacatggagaaacgaggctctcgctatctgcgctacgcactttacaacgccaccaaatatgtttgcctttgggatacgaccttcgctgcttacctcgccaaaaaacgggctgaagggaagcactacaatgttgcaatttctcatgcggcaaagaaattggtgcgtctaatttacgcgatggagaaatccaagcagtcatatcgtaacgctgcgtaaatccattcttctatatgctcagttaggcgtccatctggatgtctgctttgctatgccctttttgatccgtctaaaatttttaccactcctcacatttcagacttgacatttaatagttagt

SEQ ID NO: 8895 - DNA, 1387 bp, unidentified
  source 1..1387: mol_type = unassigned DNA; note = element_df676d1
  misc_feature 1..2: note = core
  misc_feature 3..86: note = LE
  misc_feature 87..1115: note = CDS
  misc_feature 1116..1387: note = RE
  misc_feature 1134..1375: note = bridgeRNA
tgatggtgtggaacggcccttcgcaccggcatcggggatgcctactgtggtgacgccaatcgccacaagacagaaggaaccgttccatggagaagattaccataatcggactggatttggccaagtcggtctttcagatccacgccattactgaagacgggcacatagctgtccgccgtgctttgcggcgatcacaggtcttggaattctttcgtcacattgagccatgccttgtcggaatggaagcatgcgggagtgcccactactgggccaacgcaatcggcgaattcggctatacggtgcggttgatgccaccgacctatgttaagccctacgtcaaacgcaacaagaccgacgcggctgatgcggaggcaatctgcgaggcggttacgcgtccaacgatgcgcttcgtgcccgtcaagtcaccggaagagcaagccgctgggatggttttgaagacccgagagctactcgtgcgtcagcgaagccagacggcgaatgccatgcggggccatatggccgagctcggaatcatcgccgctgccggaatgacaagcattgccaagctcattgcaattttgcgcgacgatcaagacggacgtctgccgcactcggccaaggcggcgcttcttgaaatggccgatcagatcgaaaggctgacagaacgggttgaggtgctcgacagcaagatcatcgcagcagtgaaagccgatgatgccgctcgtcggctgacgacgatccccggtgtaggacctattattgcagcaactgttcgtgccgccgttcaggatccggcggcctttcggacgggacgggatctggctgcctggatcggcattacaccaacagcaaactccagcggaggaaaggagcggctcggcaagatctcgaagcgcggcaacaagcagttacgaacgctactgattgtcggagcgacgtcgatcctgaaacaggctcgcagaggttctaagctgcccggttgggtggtctcattaatggcacgtcgcccctacaaggtggcagccgtggcgctcgccaacaagatggcacgcacaatatgggcgcttctcgtcaagggcggcacataccaagcgccgtcgatggcaaaagcataggcataggcataggcacagaattcccggcgttaccgcgtcgggataaagtggcaaggtacgaagcgtgatgaacccgaggggcgatacctcgatgtcgatcagaccgtctgactcaatgcgccttcgagcgcgagaaagtgattaggcgatcgacatcgcggatctcatcgtggccagcggtcaatgaccgcgctgacaggccggacatatgactgcaccgtccgacggagattcatgctgccaacgccttgctaaccgggccgttccacata

SEQ ID NO: 8896 - DNA, 1335 bp, unidentified
  source 1..1335: mol_type = unassigned DNA; note = element_df6efdf
  misc_feature 1..2: note = core
  misc_feature 3..77: note = LE
  misc_feature 78..1094: note = CDS
  misc_feature 1095..1335: note = RE
  misc_feature 1064..1322: note = bridgeRNA
tgttggggtggacggcccaacggcatccaatgtgccaatatagggtcgaacaacgaacctaatgaaagggccgcccaatggaatttaagcggatttctatagacacgtccaagcatgtttttacgatccatggggtcgatgaccaggagcgcccgttactgcggcgcgagatcaggcgggctcaggttgaaccgttcttcgtcaaattggctccgacggaggtggttcttgaagcttgcgcaggctcgcaccactgggggcgggtgttgggcggtatgggccaccgggtcaggttgatcccaccgcaatatgtgaagcccttcgtgaagcggagtaaagatgatcgcaacgacgcagaagcgatcagtgaggcagcatcccgcccgaccatgcgcacggttccggtcaaatcggtggatgagcaagcggcagcgatcatcgtgaagcaccgggaactcttggtgaatcaacgaacccaggcgatcaacgcgttgcgggggcacgcggcggaatttggcatcgttgccgccaagggctgcgcgaacgtctcagcattgcttgttctcctgtctgccgaggaagcgattccagcaattgcaaaggcgatgtttgagcaaatgggtcagcatgtgacggatctcgatgcaaagatcgacgcactggagagacagctgctcgaacagcacaaggccaacgcggtcagcaagctcctcgccgcgattcccggcgttggggcaatcaccgcgatcaccatggcgctcaatgtgaaccccgcgaattttgagaccgggcggcattttgcagcgtggctcgggctgactccgcgagagcattccaccggcggcaagcatcgtatgggaaagataagtaaggcaggcaatgagaggttgcggcagttgctcgtggtcggggcgatggcggtgatccgcttcgctaaaccaggcagcaaatcagcgaccgcttggctgttgcaattgctggagcggaagccgcgcaaggtcgcggcgatcgctctggccaacaagatggcccggatcatctgggccatgatggcgcgtggtgaagcgtatcggcgtcagccggtagccgcctgatccgcgcgccggtgccgagggtttaggggcaaacaggagatggttatcggtcgaaccgacgagcaacaaaatccgtctgaatctacggcagttccatgccgcaatttctgtttggatgttgctcgcggcacccatctgggccagcggtcagaccaccgcgtcaaaggccggacacatgaccgcattcgaaccgataccaaattctgctttaacgacttgaacccaacgggccgtccacaca

SEQ ID NO: 8897 - DNA, 1354 bp, unidentified
  source 1..1354: mol_type = unassigned DNA; note = element_df70ebb
  misc_feature 1..2: note = core
  misc_feature 3..75: note = LE
  misc_feature 76..1101: note = CDS
  misc_feature 1102..1354: note = RE
  misc_feature 1119..1351: note = bridgeRNA
ttaatgagatggtcaccccggcaccctgcgaggcgtacgctttcgcagggtgcttttacttcggagaccgtcatcatgagcagcgtgagcctgatcggcatcgacattggtaaacataccttccacctgcacgcccaggacaagttcggcaaagaggtaatgcgcaagaagtgctcaaggcagcagatgatgcggtttctggccaatcatcccccttgcacggtagtgatggaggcctgtgccggttcacactgcctggcgcgagaaatcaaagcgatggatcatgaggccaagctgatctcgccgcagttcgttaaacctttcgtcaagagcaacaagaatgacttcgtcgatgcgcaagccatctgcgaagccgcttcccgaccctccatgcgctttgtgacgccaaaatcgcctgagcagcaaacgctctctgtttctcatcggatgcgtgaatcattgatccgcgaccgaaccaagacggtgaaccagatgcatgggttcctgctcgaattcggtgtcagcctgccgaccggattggcagtggtcaaacgccttgcttcggtgcttgaagagcacgacctgccaatacggctcgtcgcattactgcagcgcctgcatgatcatttcgtctacttgagcgagcagatcaaggtgttggacaaagagctggagagccaactggctgacgatgatctaggcagtcgtttgctgagcatgccgtgtgttgggccgatcaccgccagcctgctggctgtagaaatgggagatgctcggcagtacggcagtagccgggactttgcggcctctgtaggtctggtgccccgccagtacagcactggtggtaggccagctttgctggggatcagcaagcgtggcgacaagaaccttcggcatttgctggtgctgtgcgcacgggtctacatgcttcgcctgaagtatcagaaaggcccattggccgattgggtgcgttcattgctcgcgcgacgtcactccaatgtggtggcctgcgcgttggccaacaaactggcacgcatcgcttgggccattgccactcggcacacgcaatataaaacggagccagacgcgataaacgcctgaccccgttgtgctgcaccgagtttcaccatcaggttttgcgatagctgaacaacagatgaaataaacggccgatcggcctggcgatgatcctgaacgaccaattggctcttggaagccgcctactttgttaggatcgccaggtgcgaatgctcatcgtggcgcgggatgcgagcccaatagacgccggatagattgaagcaagccatccattccatctgatgaacagtattgcaaaaaatggggtgaccataga

SEQ ID NO: 8898 - DNA, 1450 bp, unidentified
  source 1..1450: mol_type = unassigned DNA; note = element_df9027b
  misc_feature 1..2: note = core
  misc_feature 3..214: note = LE
  misc_feature 215..1429: note = CDS
  misc_feature 1430..1450: note = RE
  misc_feature 7..219: note = bridgeRNA
ctaatgggtctcgacggcgtgcgtggggcatgctgttcccgagccgccggcgggtgagcactcgcgagcactgagcgttgagctctacggctagatcgtgcccccaccggtcggcgagggggtctgacggctggtgggatggcgtgccacgagcactggtccattaggtcgccgcgtacctcctccggctcagcggcccctggaaggagggaaggtgatcttcgtcggcatcgattgggccgaggcacaccacgacgtgtgcgtgctcgaccacgagggcgggatcctggcgaaggggcgggtgcctgacggccttgagggcgtcgggcggctgcacgcgatggtggccgagtgcgccgaggagccgtccgaggtcgtggtggggatcgagatcgaccgggggctcctggtcggggcgctcgtcgcggccggctaccgcgtctacgcgatcaacccgttcgccgtctcgcgctaccgcgaccgccacgcgacctccggagcgaagtccgatccgggtgacgcgaaggtgctcgccgacctggtccgcaccgaccggcgcaaccatcggggggtggccggggacaccgggctcgcggaggccatcaaggtcctcgcccgagcgcaccagtcgctggtgtggacgcgccaacgacaggtgaaccagctccggagcaccctgcgggagttctacccgggggcgctccacgcgttgggggacgacctcgcctcgcacgaagcctgcagcgtcctcgggatggcgccgacgccggagcggggacggcggctcacgaagacgaggatccggcgctccctcgcagcctcggggcgcacccggaacctcgaccggcgggccgaacagatccacggggcgctgcgagcgccccagctcgaggctccaccggtgctcgccgaggcctacggggaggtcgtgggctcgctcgtcgtggtgatcgatgggctcacgcaccagatcggtgagctcgagcgcgagctcaccgagcgttttgaaggtcacccggacgccgagatcttgcgcagtcttcccggactcggcccgatcctcggcgcccgggtgctcgcggagttcggggacgacccgacccgctacgccgatgctaaggcgcgcaggtgctacgcgggaagcgccccgatcacccgggcgtcggggacccgcctcgtcgtgctcgcccgcgtggcgcgcaatcgccggctcgccgacgcctgtcatctgtgggccttctccgcgctgaccacctcacctggcgcccgccgctactacgacgcccgacgggctcgaggggcgacgcatcatcaagcgctccgagctctgtcgaaccgcctcgttggcctcctgcacggctgtctgaggcaccgccagctctaccgagaggacatcgcctggccggactcgctcgcagcggtggcttgactccttcgaggcgtgggatgt

SEQ ID NO: 8899 - DNA, 1642 bp, unidentified
  source 1..1642: mol_type = unassigned DNA; note = element_df9709d
  misc_feature 1: note = core
  misc_feature 2..280: note = LE
  misc_feature 281..1513: note = CDS
  misc_feature 1514..1642: note = RE
  misc_feature 16..300: note = bridgeRNA
tcctattacaataagatttacggtaagaggcacggcagccagccgtgtctttttcctcattgttgccaaagctgttagaatgggaaggcattggtctgacgtatcactccagggactgacacgtccgcaggaaagtccgtcagccagcctctcattcgcagcgttcgatttatgcaggtagagccaccatctaggtgcgtccgtgtcatcaaatagatagaatcggcaatgatggaaaggctggtcgccaaattacaatctacgacaggagtgttaaacagtgaacgcagcagggattgatgtctccaaagggaaaagcatggtatctgtcatgcgtccttttggggaagtggtagcaaaaccttttacagtacgtcacaccggcagtgaactcaaggagttggcagactacctgaaaagcctggacggtgagacacggattatcatggagcataccgggcggtactatgagccggtcgctcagtttctccatgacgcggggctgtatgtcagcgcggtgaatccgaagctgatcaaagactacggaaacaactcactgcgcaaggtgaaaacggataaggccgattcccggaaaatagcgaagtacggccttgacaactgggtggaactgcggcaatatgtttccatggataagattcgttaccaactgaaaacgctgaaccggcagtgcaatttgtatggcaagacgaagacgatgatgaaaaacaatctcatcgctctcctggaccagacctatcccggtgtgaacgacctgtttgacagtcctgttcgtgaggatgggacgcagaaatgggtggattttgccgcgtcattctggcacctggagtgtgtgaagaacatgagtctggatgctttcacagggcgttaccgtaaatggtgcaaacggaacaagtacaacttcagcagcgataaagctgccgagatttacgctggtgtgcaggaccagatcgccatgctgcccaaggatgccctgaccaagctgatgattcgtcaggcaatcaacgcactcaacgctgtttccgcaacgctggagaaactcaaggccgaaatgctggagttatcctctcagctccccgaataccccgcggtcatggagatgcgcggggttggcgattccctcggcccacaacttatggctgagattggggatgtgatgcgctttgcccgcaggagcgctattacctctttcgccggtgtcgatccgggcgctgaccagtccggaggccatgaggccaagagcgttccaacctccaagagtggtccacctgagctgcgcaaggccctcttcctggtcatggaccacttgattcaaaccaagcccctgaatgaccccgtctaccaattcatggataagaaacgggctgagggcaagccctacctggtctacatgactgctggcgctaacaagttccttcgcatctactacggcagagtaaaggagtatttggctaaattagagcagcctcttgcccccaaccctgaacaacactagcggattcttcccccctactcatttcctctggccagcgcttttgcggtggcctttttgtgttgcactttttccctgcattcccccttataaatttttctcattttcctattgactttttatttgcagact

SEQ ID NO: 8900 - DNA, 1464 bp, unidentified
  source 1..1464: mol_type = unassigned DNA; note = element_dfa2b84
  misc_feature 1..5: note = core
  misc_feature 6..240: note = LE
  misc_feature 241..1449: note = CDS
  misc_feature 1450..1464: note = RE
  misc_feature 23..235: note = bridgeRNA
tccttaagttcgtaggtgcagttacttcgtgttgttacgttgtgctgtgacccgggtgggtcgggtgaggtgatggtcgtttgccggcctcgttggtgcggcttgaaaggactggccgcccggcccgcctggacttcctctggccgctgattgagatctgcgatgtgatcgcttgtttaaggaaatgctggcggggttgtccgtggggatcgtgttggcagacaagtgaaaagaggttcgatgacagcaggccaggtgtgggctggtgcggatatcggcaaggagcatcactgggtagccgtggtcgacgacaagggcgcgatggtgttctcgcgcaagctcgtcaacgacgagcggcagatccgtgatctcgtcaccgaggtggaccaacttgccgagcgggtgtcgtggacggtggatttgaccacggtgtatgcgagcttgttgttgacggtgctggctgatgccggaaagtcggtgcgctatctggccggccgcgcggtctggcaggcctcgacgatctatcgcggcggtgaggccaagaccgacgccaaagacgcccgggtgatcgccgatcaatcgcggatgcgcggggccgatctgccggtgttgcatcccgacgacgagctgatcaccgaactgcggatgctcaccgctcatcgcgctgatctggtggctgaccgtacccgcacgatcaaccggctgcgccaccagctcgttgcggtgtgtccggcgttggagagagccgctgcgatgacccaggatcgcggttgggtggtgctgctggcgcgttaccaacgcccgaaagccattcggcagagcggcatcacgcggctgacccgggttctcactgacgccggggtgcgtaacgctgcgacgatcgcggcggcggccgtggcagccgccaagtctcaaactgtccgactgccgggcgaagaggtcgccgctgggctggtggcgaaactcgcgcagggggtgattgacctcgatgaccgcatcaaagccgccgacgctgacatcgaggaccgatttcgccgccatcccctggccgaggtgatcaccagcctgcccggcatggggtttcggctcggcgtcgaattcctggccgccgtcggtgatcccgcgttgatcggatcggctgaccaactggccgcctgggccggattggctccagtgcccaaagattcggggaaacgcaccggacgactgcacacccccaagcgctacagccgtcgactgcgccgggtgatgtacatgtccgcactgacagcgatccgctgcgacccgcattcccgggcctactaccaacgcaaacgcgacgaggggaagcggccgatcccggccactatctgcctggccagacgccgcaccaacgtcctctacgccctcatccgtgataaccgcacctggcaacctgactcacccccgatcaccaaatcggcggcttgacttcttcattgagag

SEQ ID NO: 8901 - DNA, 1762 bp, unidentified
  source 1..1762: mol_type = unassigned DNA; note = element_dfa7832
  misc_feature 1..7: note = core
  misc_feature 8..253: note = LE
  misc_feature 254..1375: note = CDS
  misc_feature 1376..1762: note = RE
  misc_feature 1381..1625: note = bridgeRNA
gtcgagcagcgcgaagggtaaattgttgcggaaaggttacggaaaatgatcccttttcctccgtccccaagggattgcatgcaccgaaacggaccgtggcggaatcacaggttgaggacggacagacactatgacccaatccgagggcactgaaaaggcaggagcccccgctcgtgaccgcgggtcggggctgcgacaatgatgttgaagtgccataggcgcagccgcgccgcaacgaggttgggaggctcccatgccaaagtattctaccgcgttcgggatggacgtccacctgaggtcgaccaccgtctgcgccctcgacgcggacaccggcgaggccgtgacgaggaggttccccggcaacccctggggcgagatcgccgggtggatggatgggttccccgggccgtcgctcgcggcctacgagagcggctacctcggcttcgccccgcagcgggagctcgccgggctcggcgtcgagtgcgtcgtcgccgcggtctcgaagatccccaggtcggccgccgactcggcctcgaagaacgacaggaacgacgccgccaggatggccaaggcgatactcgcccacgacatctcccccgtatgggtcccctcccccgaggtcgaaggcatcagggacctcgccggcgcctacgacggggcgaccgcgcgcctggcgaccgccaagcagcggctgctcgccttcctcgcaaagcgggggttcgtctacggcggcaccacgcccgccggcaacccgaggaagtactggacctacgacttcctgaggtggctcgacaaggtcaggccggaggacgatggcggggttcggacgctcgccgccctgaggaacgaggtcgaggccgcggcggaggcccgggcggacctgctctccgagtacagggccgccgtggatgccagcccgatcgccgcggaggtggccgccctccagtcgatcaagggctgcgccttcgcgctggccgcagccttctcggccgaggtcggcgacttcacgaggttccgttccggaaggcaggtcacggcctatttcggcctcgcgccgagtcagaggtcgagtggcgactccgtgcggctcggaggcatcagcggcgcgggcaacgcgctcgtgaggaagctggccgttgagggttcatggtgctacgccgcggcacggcaccagccgaagctcatgccaagggacacgggcgtgcccctcgagataaggatgcacgggaggaaggggtccgagcggctcctgcggcggcgcgaggagatgctcgcccgcggcatgcccgcggcgaaggccaacgcggccaccgcggccgagctcgtgaggtggctttgggccctcggcatgatgtgccgggagggcgcggaatagacatagcccccgtcccggcgagccgggcggccttcggggataccccctatttcgctgtgcgcgcggagccctccgcatgcgcctcgacagacttggggaaccccgccgaaggaatggagtgcgggccgacagaacggtatccgcggatatgagactgagccgaaggcgtcgatgacatgccgggggcggaccgggacgggttaacggcaggccccgccgaccgattgcaagcggtcggcggggccattgtggctcttgacagcggattgggtcatatgagcgaaaacccacctgagcgagcaaggtgccttgaagcgaagcggcattgaccttctggtcatgccgctgaagctgaaaagcagattgccgctcaggtgggtttgcagc

SEQ ID NO: 8902 - DNA, 1333 bp, unidentified
  source 1..1333: mol_type = unassigned DNA; note = element_dfae9c2
  misc_feature 1..2: note = core
  misc_feature 3..72: note = LE
  misc_feature 73..1116: note = CDS
  misc_feature 1117..1333: note = RE
  misc_feature 1091..1317: note = bridgeRNA
agataattggactcccctcccattagcgatagactcgtagtctgcgcaaaaaagaaggaattggagtcccaaatgaagaatacagatttaatagtcggtgttgatttagctaaaaataaaattcaagtctgcgtttttaaatgtagaaaagtgctttccaatagtgaaatgacaccggatgagtttgccaattggcttgttaattcatcaccttctttgatcgtatttgaagcttgcggcacttctaattactggaaacagaaggcatcttctcttgggcacgaagccaggattatttccgctaaattagtttcggctgtacggcaaaatcaaaaaacagataagaatgacgccctagcaatcattcaatctgcaatgttacctgatgtgaactttatatcagggaaatccgtcgagcaacaacagcttcaatcaatgatgcgccttcgagagctctgtattaaacaaaaaaccgccttatcaaaccaactaacagctttactcggggaattcaatatacgagtttccagtagaaatggcgggctacgtggagctatggaattgacgttagaagatggagaaaatgatttatcttttgagttccgagatgcgctaaccgctgcctggcaacaatacctgactctatctcaaacaataagtgcctatgacacaagtttggaaaaagcgattcaatcccaccctgattgccaaaaactactaaaaattgagggagtaggaatgatcaatgcgattaacctttacatcgctctgggttgcgcagaacttggggtttttaataaaggtaaagacgcggcagcctgtatcggccttaccccaattcagcattcaacaggagggaaagctaagctgggttcaattggtcggtatgtaaagaacggtttgctaaggagtcagctaattacaggttccttatcggcaataaatcagatgttaaaacgagaggctaagacgaaaaaggagatgtggatcaaaggattagtcgaccgacgaggtaaaaagtgcgcagccgtagcgctagccaataaaacagtaagaacggcatttaccatgctcaccaaaggaacagaatacaaagctgaaccgctaaatacttaagtaagaaattcaacagataaaatgcattaaagaagataaaaatcaactggttaaggcaggcgacaacaaagagtcaagagctcgcagaatagaattgccgatcagttcgcgtaaatatcacagagccagagttagctactcatttagaactcgtacataagttcgcatttattcttttaagataaatttttctgttgacaaacggggagtccacata

SEQ ID NO: 8903 - DNA, 1169 bp, unidentified
  source 1..1169: mol_type = unassigned DNA; note = element_dfaf877
  misc_feature 1..2: note = core
  misc_feature 3..209: note = LE
  misc_feature 210..1157: note = CDS
  misc_feature 1158..1169: note = RE
  misc_feature 22..215: note = bridgeRNA
cttgtaatagcgcaatcagttatcgtcggcttgttccgtgaggaatggcctgccgtggtttgcaccccgcggcaggccgctggcgatcggatcgaacccacccagagcagtttgtggctgccccgtagcttgatcgcgtcagcaccttcatcggacccggatggttgccggaacaacttggttcgcttcacaaggcagggtcgaggaagatgacaaagtctaacataacgacggctggaatcgatacgtccaaagctaaactcgatatcgcggttcacgaccgggccgaacgttggcaggtcaccaacgatttagctggctggcggtcccatgtggctagcctcgccaagtccggcgtgacgcgggtcggcatcgaagcgacgggcggctatgaacgcggcgtggtagagcatctgcgggcggcaggctttatcgtgctgttgctgcagccgctacaggtcaaagccttcggccgggtacatttgcgccgtgccaagaatgatgcactcgacgcgatattgatcgcagcctgcgctgcagcggttgatccaccggagatcgcaccggatccgcggttgacggaattggccgattatctgaccttcctcgagcagatcgaggaagacatcaagcggttcaagaaccggctcgagcacattgacgagcctgcgctgcggcgcatcgtcaacagcgatatagcccggctgaaagcacgcaaggcggcgcagatacgcgacattgccaagcgtcttcgcggccacggcgatctggccaagcggctaaagctggtgctgagcattccaggtatcggcgaacgcacagcgctggcgatcgtcatccgcatgcccgagctcggttgcgtcagccgtgaagaagccgcagccctggccgggctggctccgttcgccgccgatagcggacagcacagaggtcagcgcaaaatcgctggaggccgcagccggctgcggcgctcactgtttgccgcagccctcccggcggccttccgatggaacaaggctctggtcgccctctatgcccgcctcactgcaaagggcaaggcccacaacgcagcgctaatcgcctgcgcgcgaaagctcctcatctacgcaaataccgtcgtccagcgcggcaccccgtggactgaaaatgccgcttagctttaatggttg

SEQ ID NO: 8904 - DNA, 1378 bp, unidentified
  source 1..1378: mol_type = unassigned DNA; note = element_dfb0df6
  misc_feature 1..2: note = core
  misc_feature 3..86: note = LE
  misc_feature 87..1118: note = CDS
  misc_feature 1119..1378: note = RE
  misc_feature 1148..1366: note = bridgeRNA
tgatgctgtggacggctcctccaccggcacgcgagtgccatggatgtgggtgctgataaggccccacgattcggaggagccaaaccatgcaagcgatcacgacaatcggtctcgatatcgcgaagtcggtttttcaggtccacggcgtcgatgcggaaggcaaagccatgcttcgccgccagctcaagcgccgctacgtgctagccttctttcagaagctgccgtcatgcctgatcgggattgaggcgtgcgcgtcatcacattattggtcgcgcgagctccaggccttgggccacagcgtgcggctgatgccgccggcctacgtgaagccctacgtaaagcgacagaagaacgatatggccgacgctgaggcaatttgtgaagcggtcaccagggccaatatgcggttcgtgccaatcaagacacccgagcaacaaagcgggctgatgctccatcgcacgcgccatctgttcatccgccagcagacctcagtgatcaatgcgatccgcgctcaccttgccgagtttggcgtcactgcgccggtcggccgcaaaggcatcgaggaactgctgcgtgtcatcgctgatccgagcgacaaacgggtgcctgatgttgtgcgtgcatgccttgccgctctgggcagccaactgatcagcctcaaaaagcagatcttagattttgatcgaatgatcatggcttggcaccgctgcgaccagacgagcaagcgcctcaattgcattccaggcgtcggtccgctgctagcgaccgcgcttgtcgcgagcgttgccgaccctaaagtctttcgatcaggtcgcaacttctcagcctggatcgggctggtacccaaacagcactcgagcggaggtcgggccaggctcggcagtatcagcaaaaagggggatcgatatctgcgcagcctatttgttgccggcgcattcgccgtcattcgctatgccaagctccatggcaccaagtatcggccttgggtcgcagcgttgttggcaagacggccgactaaagtcgcggccatcgcgcttgccaataagttggcccgaatggcctgggccatgatggctaccggcgaacgatacaattatccagcctcgctgagggtctaacgagatcgcgccgagtacccggcgtgatgtgaaggttgggagggcgaacagcacgtaatgcagagccggtcgatccggcgatcaggacaacccacttgggccactgcattctcgaatgcgggtttttgaccgggacctgatccgcggagagcattatggccagcggtcatgtgaaccgcactcaaaggccgaacacatggctgcaccgaccaagcctgcgacgtgaagattctccttgccaactcggagccgtccacaca

SEQ ID NO: 8905 - DNA, 1460 bp, unidentified
  source 1..1460: mol_type = unassigned DNA; note = element_dfb6164
  misc_feature 1: note = core
  misc_feature 2..230: note = LE
  misc_feature 231..1445: note = CDS
  misc_feature 1446..1460: note = RE
  misc_feature 44..220: note = bridgeRNA
ccgttacctttttcgtagccccttcttcggagaggatgggggtgtgctggcctgatggccccggcatgattcctgcccccagtcgaccatgatccggggggtgatgtcaccggggcccgaaggtgccagggatatcgctgataggggccgggcagaaagtattcgaggccgttcgtaacgtggatgccgagctctgacaccgcaaccaagccagcacatatggacactgtttgctactgctggaagggaactgcgtgatcaagaaccatgctgaggtcgatgttttcctcggagtcgatgtcggcaagggcgaacaccacgccgtagcgctggaccggaccggcaggaaactctacgacaaggcgctgccgaacgacgaagcaaagatgaaggccgtcatcgagaagttggccaagcacggcgcgatcctgttcattgtggatcagccagcgactatcggcgccctgcccgtcgcggttgcacaggcagccggcgtgaccgtcggctacctgcccggcctggcgatgcgccgcatcgccgacctgcaccccggcgaagccaagaccgatgcccgggacgcttacatcatcgccgaagccgcccgcaccatgccgcacacgctgcgctcgatccaggtggctgatgagcaggtcgccgagctctccatgctctgcggctttgacgacgaccgccaaacagatcaccgcaacctccaaccggttgcgcgggctgctcacccagatccaccccgccctcgaacgggtcccgggccgcgccggatcacccggcagtgctcgacctgctccgcacgtggcccacccgggagccctgaaacggctggccgcaagcgggtcggcgccgctgaaacggctcgcccgcggatgtatgctcgcctgaccgaggagatcttcgacgccctcgaccagcagaccgtgaccgtggtcggtaccaacgccgcggccgtcgtggtgccacagctggccggcatgctcggggacctgcgcgcctcccgtgagaccctccacgcccgtgtcgaggccctcgtggaggcccaccctcttcactcggtcctgagctcgatcccggcggtcgggatcaggaccgaagcccgaatcctcaccgaaatcgtcggcaaggaattcgccaccgccggacacctggcttcctacgccggcctgtccccagtgacctggcgctccggctcctcaatccgcggtgaccactcctcacgccgcggcaacaagatccttaaacgagcgctcttcctctccgccttcgccgcgctgaaggacccgctctccagggcctactacgaccgaaaacgcgcgcaaggcaagaaacacaaccaagccctcatcgccctcgcccgccgacgctgcgacgtcatcttcgccatgctccgcgacggcaccctctacgaagcccaaacacccgccgccgcttgacaaagaacatagggg

SEQ ID NO: 8906 - DNA, 1464 bp, unidentified
  source 1..1464: mol_type = unassigned DNA; note = element_dfb80e7
  misc_feature 1: note = core
  misc_feature 2..247: note = LE
  misc_feature 248..1447: note = CDS
  misc_feature 1448..1464: note = RE
  misc_feature 44..218: note = bridgeRNA
cgttacctttttcgtagcccgtttcctgttgcaggatgtgggtgtgctggcctgctggtccctgggcatgattgcgacgctctgttgatgatgatcctgagagtgttgtcacctggggctggtaggtgccggggagaccgctgataggggcaggacagtttgggaacgtcgtgcgtaacgtgggtgccgggccctgacaccgtggtgggccagtacgtgagttagggactacgactggaggtgccaggtgatcagaaaccacgacgacgttgaagtgttcatcggattggatgttggcaagggcgagcatcacgccgttgccctggaccggtccgggaaaagactgctggaccgggccctgcccaacgacgagacccggatccgggagatcctggccgagctggaacaccacggccggatcctcgtggtggttgatcagcccgcgacgatcggtgcgctcccggttgccgtggcccaggccgcggggaccctggtcgggtaccttccgggtttggcgatgcgccggatcgcggacctgcatccgggggaagcaaaaacggacgcacgcgatgcgttcatcatcgccgacgctgcccggacgatgccgcataccctgcgctcggtccagctggccgatgagcagatcgccgagctgaccatgctctgcggtttcgatgatgatctggccaaacaggccaccgcgacctcgaaccggatccggggactgctgacccagatccacccggccctcgaacgtgtcctgggaccccggctggagcaccccgcggtgttggatctgttgcggacctggcccacgcccgcagcgctccgccacgccggccggcgccggatcgggaaccggctgaccaagctcgcgccccggatgggtgaacgcctcgccgatgacatcatcgaggccctggcccaacagaacgtgaccgtgatcggcacgaacgccgcgaccatcgtcctgcctgaactgacgggcatgctcgccaggatccacgacggccgtgccaccgtttacgcccaggtcgaagccctcgtggaggcccaccctcttcaccaggtcctgatgtctttgccggcggtcggcatcaggaccgcagcacggatcctcaccgaagtcgccggcaaggacttcccgaccgccgggcacctggcctcctacgccggcctgaccccggtgacctggcgctccgggtcctcgatccgggccgaccgcgcctcccgaaaaggcaataaagtcctcaaacgcaccctctacctctccgcgttcgcagccctcaaagacccgctctcctgcgcctactacgaccgcaaacgagccgaaggcaaacaccacaaccaagccctcatcgccctcgcccgacgccgctgcgacaccctctacgccatgctccgcgacggcaccctctaccaggcaaaatcaccaaaagcagcttgacgaagaacatagggaca

SEQ ID NO: 8907 - DNA, 1634 bp, unidentified
  source 1..1634: mol_type = unassigned DNA; note = element_dfc10f1
  misc_feature 1..2: note = core
  misc_feature 3..291: note = LE
  misc_feature 292..1467: note = CDS
  misc_feature 1468..1634: note = RE
  misc_feature 40..271: note = bridgeRNA
ctcgtattatatagtagtagtttttagagaccctctccaaggtctttataactattaagtcatagtcttttctttacctcttccgtaggttcgactatgatatataagatactgtggattggttatttactcctaccacttgatggttttagaaaggccccaaccacagtctctttgctcatttgttaatcagttagataccgcatgacggtttatttagaacgaggctacaatcgcaaggagtccctgtggttctaaaacagtatcaaatacattttaaaggagattattatgatttatgtaggaattgatgtcgctaaggataagcatgattgctttatcacaaactctaatggagaagtattatttaaagcttttaccatttctaacagtcaagatggtttcaatgacctttaccaaagaatagaatctgttatggaagatataacaaaagtaaaagtaggactggaagctaccggacactataattacaatcttttaggttatctcattgataaaggtctgaccacctatgtcatcaatccgttacatacaaatctgtacagaaaaagtctaagccttagactcacgaaaacggataaagtagatgcccgcacgattgcttacatgctcatgtctgatgtgaacttgaagtcctactcagatacatcttaccacaacgaagaattaaagtcattaactcgttatcgttttgataaggtaaaagaacgtgccaaactaaaaacttccgtttcaagactggtctgtatcttatttcctgaattagaaaaacttgtaccaacacttcatatgacatccatttatgcattgctttctgaatttcccggggctaaatatgtagctggtgcacatcttaccagacttacaaatcttctttcagatgcatctaaaggtcgatatggtaaagataccgccataactttcagggaagctgcaagggcttctatcggctcaaatatgccagccaaatctcttgaactaaaacacaccatcaagttgatactggaacttgcttctgagattgatgaaatcgaaaatgaaatcaaaattatcatggatgaaattaattctccaattctcagtattccaggtatcaactatcgtatgggcgctatgatcattgccgagattggcgacttcagtcggtttgattctcctgataaaatcttggcttattccggattttcaccatcaacatatcaatcagggcagcttgactcagcatactcccacatggaaaaacgaggttccaaatacttacgatatgctctgtacaatgctgccaagtatgtttgccactgggattcgacatttgccaggtaccttaccaagaaacgagctgaaggcaagcattataatgttgcaatatctcatgccgtcaaaaaactggttcgagttatttatcatcttgtaaaatcgaatcagcaatacattaaagtagcttaattaactctaattcaatactcctttttcatgcacctatcatgatgctctttttgtcatgcagttttcaaagtgcaaggagctctaactgtattccgaatatatctaaaatacatttctgtactttatttaaaaaatatcattttagggcttgacttttaatagttagt

SEQ ID NO: 8908 - DNA, 1436 bp, unidentified
  source 1..1436: mol_type = unassigned DNA; note = element_dfd223a
  misc_feature 1..2: note = core
  misc_feature 3..120: note = LE
  misc_feature 121..870: note = CDS
  misc_feature 871..1436: note = RE
  misc_feature 1190..1386: note = bridgeRNA
agatggggtattcggctttgccccacgtcttgaacgggtgtttgagggtgctgcgcttcgagctgatgataaaacgtggtctgcgtgaacagccacaagcatcaggaatggaagcgcagcatgaagcattatgccggactggacgtctccgtgaaaagacgaccgtttgcatcgtggatgaaggaggccgaatttgccgagagatgtgttgcgagccatccggacgatcttgttgaggcgttgaagaaccccgcctggaatctggcccggatcgggcttgaagctggtcccttatcacaatggttgttcagtggtctggcgggagccggactacctgcaatctgcatcgaaacccgtcatgcgaaggcctttctcaaggcgcaggtcaacaagaccgaccgcaatgatgcgcgcggcatcgcgcagatgatgcgggttaatttgttccggcccgtgcacgtcaagacgctgatgagccagaaacgccgggcgctgttgacagcccgcaagttgctgcaggaaaaggccatcgcaattgagaacgacattcgaggcctgttgcgtaacttcggtctcaaggttggcattgtcggcgctgccaaatttgcggatcgcatccaggacctttccggcgacattccggagctacgtgacattatggaggtgttgctcgccgctcggcagaaacttcgcgagcagttcacggtactgcatgaaaggctgttgtcgatcgtgaagggtgacacggtttgcagacggttgatgaccgtccctggtgtcggacctgtcgttgcgctggctttcaaggctacggtcgacattcctgcccgcttcaagaattcgaaggccgtaggccggctctcgggttgacgccgcgcttgcatcaatcaggcgaggacaatcgcgtcggacgtgtttccctgtgcggtgacgccatgatgcgaacgctactttatgaagccgcgcaagtcttgctgacggtggtgaaaagtggtcatggctgaaagcttgggcgatgaacgtcgctaagcgccggggccgacaaagagcgaccgttgcccttgctcgcagattggctgtcatcatgcacagaatatggtccgacggcagtgagttccgctgggcgcgagaggaagcgacggcggtgatatagccgggtcaaccaaacgaaagggagaagatccgataacgagatccgccaggggcggatgaatgtccttcgcgggacggaggatgaagagaggacgtgccgggactcgtttccaccgccgcaacatggtgagaacgctgtttagatgtcctcttcactccaactgatcccatgctgggagggccaacgcgccgatcccgaagagaagcaaggcctcgcgaaagacatcaaatgcccgtggtagaggaagcttgaaagcgattgacttcaacacgccgaatagaga

SEQ ID NO: 8909 - DNA, 1315 bp, unidentified
  source 1..1315: mol_type = unassigned DNA; note = element_dfe7767
  misc_feature 1: note = core
  misc_feature 2..68: note = LE
  misc_feature 69..1085: note = CDS
  misc_feature 1086..1315: note = RE
  misc_feature 1087..1308: note = bridgeRNA
taatgagatggtacgtccctcttcacggctaaactgaaatatgtttactgctataaggaaggtgccatatgacacatgctcatattattggaattgatcttggtaaaaactcgtttcacatcgttgctcatgatattcatggacaccaactatttaagaagaagtttactagaaccaagttgatcgattttatatctactcaacaaccgactattgtagcaatggaatcatgtggtggttcgcattggttagcgcgtaaatgtgaagaatatgggcatactgccaagctcattccacctcaatatgtgaaaccctacgttaaaaccaacaaaaatgattttatcgatgcggatgcaattgccgaagcggcttctcgacctacaatgcgattcacttcagtaaaaagtgaatcagcacaagccatatcgacaatacgaaaaattcgtagtggttatatcaaagaacgaactgcatgtatgaatcgtgttggctcaatactcctggagttcggtatcagctttccaaaaggacatgtatgcatgagaaagttattccagtggttagctgataaaaatgaatatcttccaccactaattatttttgaattaagtgaattacatgagcactacgaacatcttaatgagcttgtagaacatcaagataagaaaatagaaaagttactggcagagaatgagcaaatgaaacagctacaaagcattccaggtgtcggtccggttgttgctagtgcttgcttatcctcaataggagacccaaacgattttaaaaatggtcgaaatttcgcagcgtggattggtcttgtaccaacccaatactcgacagggggaaaatcgacactattggggatatcgaaacgtggtaacaaggaattaagaactcttctgatccatgctgcccgctcagttctttggcgtgacaaatctgttgaaaaatatttcggttcgtggcttgccaatctaaagaaacggaagccattcaatgttgctgttgttgcattagcaaataagattgcacgcattatctgggcagtattagtaagcaaaaaagaatttgaaatcagagcgtaaccccaatttgcaatggaaattaaagatgacaaaacggttagaccaccagattgaagacctgttgccccaaacagcagcttaagtatgcttttcgttttgcgaggacaatctggcgcgaacctcatcatagagctgagactaaataggtctctaaacagactctgaatatattagcgcaaatcagctcgttattttgatttctacttgcaataacgggacgtaccatatat

SEQ ID NO: 8910 - DNA, 1363 bp, unidentified
  source 1..1363: mol_type = unassigned DNA; note = element_dfe9a91
  misc_feature 1: note = core
  misc_feature 2..69: note = LE
  misc_feature 70..1104: note = CDS
  misc_feature 1105..1363: note = RE
  misc_feature 1113..1353: note = bridgeRNA
tatggaatggcccgcccctccacccggcagcgttaggctgccgatgccactggaggaaaggattgtgccatgcagatcgctgttctcgggatcgacttgggcaagaactactgcagcctcgcggccctcgatgggtccgggcagatcgtgctgcggcgacgcgtgcgccgagaaaatgtcctcaaaaccgtatctaagctgaagccgtataccgtggcgatggaggcttgcgggggagcacatcaccttggccgtctgttacgcgatagcggatacgaggtgcggctcatgtcgccggaatatgtgcgtccgtacgtgaaggcgcagaagaacgacgaccgggatgcggaggcgatcgccgaggcggcgacgcggccaacgatgcgcttcgtcgaattgaaatcggcggaacagctcgacatgcaagtgctccaccgtgcccgcgaccggctcgtcgccgagcgaaccgcgctaatcaatcagctccgagccgtgctgatggagcgcggtatcactgtcccacaggggcggcgcaagctcgaacaggccctcacctcgatgttggaggggtgtgagacggccctcagtccgcgggttcgagcgttgatcaacgatatgcgggaggaatggtgcgcattggaccaccgcatttgtgccttcgacaacgaatttgccacgcgtgcccgcgaggacgatcgagcccgacgcctggccaccattccggggatcggcgtgctcagcgcaaccgcgctggtggctgccatcggtgacgggcagagttttgcgcgcggtcgcgatctcgcggcttggcttggcctcgttccacggcaggcgactacgggaggcaagccgcgccttaaaggaatcagcaagcgtggcaatgtgtatctacgcaagcttctgatccacggctcccgtgccgcattggtttcgctctccaggagcgagactgcgcttggcagttggttacgcggcttactggcgcgggcgcatgtgaacaccgtcgtggtggcacttgccaacaagcttgcacggatcgcgtgggcgattctgcgcactgggcacagcttcgaagctaaagctaaaggggtagcagtagggtaatcaggagactggccgagcgcgctgatccagcgtgagcggttgacgatatctgcgggtggcggaaacgagatggcctgacagtaaatcggcagcctggaaatctgatggcctacatggcgcttgacgccgccgaggttataaggaccgggatgcgcggatctccatcttggccggggcgacgcctcgagaccggatacgttggtgcagactgatcagacattcccgtgaaacgcagcttgcagatggggcgggccatacg

SEQ ID NO: 8911 - DNA, 1450 bp, unidentified
  source 1..1450: mol_type = unassigned DNA; note = element_dfeb33d
  misc_feature 1: note = core
  misc_feature 2..256: note = LE
  misc_feature 257..1261: note = CDS
  misc_feature 1262..1450: note = RE
  misc_feature 61..221: note = bridgeRNA
gctctagtcttgcacggtcgataaggagttgcttccttgtcgagtgatagatcactgaagagaactgagcctggccgtgggtgaaccaactccgcagatagggaacagccctatgagacctatcggtacccatggtcatctcaggtcttaggctcggatagaattgcaggcgtaagggcctattagagtcatggagcatcggacctgtcgctcagcctctccagcgatcgtttgtacaacccaaatgtaactgttgatggaacattggataggcattgacgtgagcagcgcgacactagacttcgcactgctggatggaaaaggcacgcaccttgagagcgtgcaaatagagaacgaccgcaaggcggtgatgaagttgatgggtcagtggagtaagcgtcacggtgtggaggtgggcaagagtttgatctgcttggaagcaaccgggcactacacactgatgatgctgaacctgatcgttgggcagcagtggcatgcttggttggcgcaccccaacgacatccagcagagcatgggtatcaagcgcgtgaagaacgacaaggtggatgccctgcgcatcgcgcagtatgcacgcaccttccatgagaaagccagattgttcacagcacagaacctgaagctggaccggctcaagcatttgatcacacgtaggaaccacctggtgcgtagccgggccaggcataggacacacatcacggacctgaaccgctatatggaccgccagctaaggaccgagttcgatcgcatcgacaagcgacagatcaagctcgaggaccaactcgtggcccatgtggatgccttgatccttgccgagatcaggaccgatccacagaccgaacggcagtacgatctgttgcgcaccatacccggcgttggcccgcaggctcgccgcatacctggtggcctgcaccgatggctttgcacgcttcaacacgccgcgccaggctctcgtgccatgccggtgtcgcacccttcgagcgcaggctcaggcagcagcgtgcgtggccgcacccaagtgtcgcatcaagctgataagtcgctcaagaccttgctgcacatgtccgcgctggtaagtgtgcgcgaacccggtgaactgcgccagtacttcgagcgcaagcgtgctgaaggcaagaagccgatcctggtggtcaatgcagtgcgcaacaagctcgtgcatcgcgtgtgcgctgtgatccggaacaacaggccctacgaacggcgaccgataacaacgacctgaaccactagttgcaactttgtgcatcgcgcccaaacggaagtaggctctgctggagagcaacctgccagggataggcgcgatgaacgacgggcatgaacatgtgtcgggggcacgtcgcccttggcacatgcctggagttcctcatgcctaaaataaactcatcgtaatgcttgcaaatgacatagaata

SEQ ID NO: 8912 - DNA, 1149 bp, unidentified
  source 1..1149: mol_type = unassigned DNA; note = element_dff0621
  misc_feature 1..2: note = core
  misc_feature 3..195: note = LE
  misc_feature 196..1104: note = CDS
  misc_feature 1105..1149: note = RE
  misc_feature 39..215: note = bridgeRNA
cttgtatattaaatccatccctaaaacacagagataactaagacaaaaagtttatagtgtcaactgatttactggggaagccgtcccaaccttaagccttgagcttgcgcgtagaaaggctccccaccctcgtcatccatgccgtggagtatcttaggcctgtaagcgtgagcttctgagcctgcattcacaaggatggtagatgtgaagtgtcagggttgggaaaccagttgtcatcataacaaaaataccgggattcaaaacatgaacacgataggcattgatgtaagctgtaaggaattggttgtcgctgtgcatgtggaaggtaaatgccacaaagctaaagcttttgaaaatgccccggcaggccatcaagccattattgaattgctggcaaagctcaaaggagaagccaaggtatgtcttgaagcaaccggtatttaccattttgatttggcagttgcattgagcagggctagcgttcaagtaatggtgatcaaccccaaatcagcccataactttgccaaggtattgatgaagcgcagcaaaaccgatgtggtcgatgctgctactttagctatttactgtgggcggatgccttttgttgcttggcaacgcccggcggatgaaagcattggtttacgggcgattgcccgaaggatagcggctttaaccaagctaaaaacccaaacgaaaaaccaattgcatgccttaaaggccaccggggatacgcccatttttgtggtcgagcatacaatggttttgcccggcgacatgaccgcaaggcaatgggttgcccatgcgggtttagacccccggcactttgaatcgggttccagtgtggcaaaaaagccgcgcatcagcaaggcaggcaataagtatatccgccaagccctgtatatgcctgccctggtggcaaccaaccatgagcccaatgtcaaaggctattacaggcatttgatcgaggacaacggcttaaagaaaatacaggccatctgtgctgtaatgcgaaaattgctgcacgccatccatggcatgttgaacaacaattcagaatttgactgcgcttgtttttatacgcttcccgatcaaaaaacagcctgatttttaaggattatgcaaaataggatttgtgttttaagagagtat

SEQ ID NO: 8913 - DNA, 1344 bp, unidentified
  source 1..1344: mol_type = unassigned DNA; note = element_dffda3c
  misc_feature 1: note = core
  misc_feature 2..70: note = LE
  misc_feature 71..1105: note = CDS
  misc_feature 1106..1344: note = RE
  misc_feature 1106..1334: note = bridgeRNA
tatgggatggcccgtccttccgaggacatcgagtatgatgtccttttcttgaagggaaaggagcagagccatgcagatttctatcttgggcatcgacatcgggaagaacagctgcagcgttgttggggtagatgaccgcggcgctgtagttgtccgccgaacgatgcggcgacacacattgattgaattcgttgagaagctaccaacctgcgttatcgcgatggaggcctgctgtggtgctcaccatcttggtcggctctttgccgcgagaggccatgaggttcggctgatgtcgccggaatacgtccgcccatatgtaaaggcgcagaagaatgatgacagagatgccgagggcattgctgaggcggcatcacgaccgacgatgcggtttgtcgaactgaagagccaggagcagttggatatccagacgttgcatcgggttcggtcacggctggttgcggagcgaacgaccttgatcaatcagctgcgtgccgttcttcttgagagaggtgtcacattcgccgcaggccgcgtgaagttcgagagcgctctggacggtctccttgccgaagctgatgaggtcctgtctgcgcgtatccgcagcctggtcatcgaattgcgggacgaatggcaattgcttgacaagaagatcggggggttgaacgcagagttcgtagtactcgccaggcagaacagcgcgatgcgtcgcctgacatcggttcccggcatcggcgtgctcaacgccacggcacttgttgccgcaattggtgatgccggtagttttaagcatgcccgagatctcggagcatggctggggcttgtgccacgacagttcaccaccggcggtaaggcgcgtctgcttgggataacaaagcgtggcaacacctatctgcgaaccttgctggtccacggcgctcgagcggcgatgcacacgctcagtcaaagtgacacgccgatcgggcaatggctccagacgatgctgtctcgaggcattcagcgcaatgtcgtgatcgtggccctggcaaacaagctcgcgcgtatcgcctgggcggtgttgcgcaaggcgcaaccctatgagcgggcctatggtgcagcggtaatctgagttattggctgcgaggaagcgcagcctaagatgtttgcgagtggaatagagatggcctgacagttgatcggcgttcagatagcccaggcgtggaaatggttctttgaaaccgtgttggttatcgtggctctggacgtgcggatatccatcttggctacggcctgaccgtaagaccgaatacgttgaagcagactgcacaggaaatcaaaaaacaacttgcaaacacggcgggccatacg

SEQ ID NO: 8914 - DNA, 1438 bp, unidentified
  source 1..1438: mol_type = unassigned DNA; note = element_e002188
  misc_feature 1..2: note = core
  misc_feature 3..120: note = LE
  misc_feature 121..1155: note = CDS
  misc_feature 1156..1438: note = RE
  misc_feature 1191..1391: note = bridgeRNA
agatggggtaatcggccggcgagcttgtggatagctggagattttgggtgctgcgcttcaggctgatggtggaacgaggtccgtgtgaacggcctcaagcatcagaaggagaagcgcagcatggaccattttgctggattagacgtatcggtcaaggagaccagcgtctgcattgtggatgacacgggcaggatcgttcgggaagtgagggtggcgagcgagccggcaactctgctggcggtgctgaggaaccccggctatcggttcaagcgaattggattggaagccggaccgctgtcgcaatggctttacagcgcgcttgcggaagccggcttgccggtgatctgtgttgagacgcggcacatgaggggtttgctaaaggcacagatcaacaagacggaccgcaacgatgcgcgcggcatcgcgcagatgatgcgggccgggctttaccgtgcggtgcatgtgaagacgttacgcagtcagaaactgcgcatgctgctgacccatcgccagctgctgcagtcgaaggccatcgccatcgagaacgacctgcgcggtactttgcgtaacttcggcctcaaggtcggcgtggtgggaacggtgaagttcgaggcacggatcaaggagctggtcgagaacctgcccgacgtggtcattctggtcgaaccactgctcattgtccggcgggtgcttcgcgagcagcttggcgtcctgcatcgccgcttgctggccgtagtccgggacgatgaggtgtgccggcgcctgatgacggttcctggtgtcggtcccgtggtggcgctgaccttccgcgccaccgtcgacgtgccagctcgcttcaagaactccaaggcggtcggggcggtatttggactgacgccatcccggcaccaatctggcgagagcgaccgccccggtggcatatcgcggtgcggagacgagatgatgcggatgatgctctacgaagcggcacagatcctattggtgcgctcgacgaaatggtcctggctcaaggcctgggcgatgcagatcgccaggcgccgcgggatgaagaaggcgatcgtggccctggcgcgtcggttggccgtgatcatgcaccgcatctgggttgacggcaccgagttccgctggacccgggaacaagccgcggcggcatgagggttgtgcaggatcaaatgcgataggaggaaacgcgagctccacccagcggtggaatggtgtccctcgcgggacgatggatgaggtgagttcgcatgtccgctcggacctgccgttcgtctgacggcaaggccgacccaaagattgttccacctcgtcttcgaatcccatgatggaagggccttggtgccgattccgaagagaagcacgagcccgtgagcgacatcgacactgtagtggtggatagtctgaaagtgcttgaccccaaccggccgattagaga

SEQ ID NO: 8915 - DNA, 1626 bp, unidentified
  source 1..1626: mol_type = unassigned DNA; note = element_e0050ce
  misc_feature 1..3: note = core
  misc_feature 4..258: note = LE
  misc_feature 259..1494: note = CDS
  misc_feature 1495..1626: note = RE
  misc_feature 8..234: note = bridgeRNA
gttcgtattataaggttaaccagataagaaaatatttctggttgacctttttttatatggtcttattatatcagtagccagggtagaacgtccgcacccgtgggacttagatcccgtaaagtaaaccgttcaccccctactggtagaaacatgtttaaggctggttgggactgagatctcgtataacaagcgaagctatgatactactaggaggaattaggggttactggcaagttcaatttgaggaggagatttagaatgaatccagtcgtgggtctggatgtttcaaaaggggaaagtgaagttcaggcatttttagataagggaaaaccttaccgtaaaagctttagtatcaaacatgatgttgatgggctaggatcattacttgagtttctagaaagtttaaaagataaaacaggtatacaacctgcggtggttttagaagctactggtcattatcatgcaccagttgttcagtttctagaggaacatcagtatttattaatcatcgttaatcctttgatctcttatagagccaaaagctctagtttacgaaaagttaaaaccgatgccattgatgcctatcgtctttgtgagctttattacaaagaggatttagagccatacaagaagcgcggcattcaactcttgaaccttcgtaatcttacaaggcaacatgagaatataacggggatgtatgttcaaaccaaactccaattccaagcagtgctagatcaaatatttcctgaatacagaggggtttttggtgacttatattctgttgtttctttgcttacactaaaagaatttccagcatcagaggatattttaacagttagtgaagaaacattggcaactagaatcaaggaattatgtaaaagtcgttcgaaaagatgggcattagaaaaggctcaaaaactaaaggcagcggcagatcgaaatccattccaaagggctctataccaaagtcatttactgagccttagtatgtatattaatatgcttcttcaatacaaagagcatctatcagagttggacgctgagatagatactctctcaaaaaaaattgaagaatataagattatccaatctatccctggtatcggagaaaaaatcgctgctacgatcatttctgaaattggggagatagatcggtttaatcacccaaagaagcttgtcgcattcgctggagttgatccagaggtatttgaatcaggtaaattcaaagccactctcgttcgtattacaaaacgtggatcaagtagattgcggcacgccttatatatggctgtcctctctggtattcgggattgtcgaaaacagaaaacaactgatgaaatcatccctaaaaacaagagattaagagcgttttacgataagaagcgtgatgaaggcaaactttataaagtagccgttattgcttgtgtaaataagctcttacattggatatatgccatattaaaaaacagaactcccttccaagatgtagactaattaagatttttaactaaataagacaaaaccttccaatcattaattagtggaaggttatttggcatgcgcatttttagtataacatgaagaattttaagtttttattgaaaaatgttgacaaactattagctg

SEQ ID NO: 8916 - DNA, 1113 bp, unidentified
  source 1..1113: mol_type = unassigned DNA; note = element_e005e5b
  misc_feature 1: note = core
  misc_feature 2..165: note = LE
  misc_feature 166..1098: note = CDS
  misc_feature 1099..1113: note = RE
  misc_feature 1..162: note = bridgeRNA
gtgtgtcgaaactgtgcttatatgggtgcgggcggaaggccgtcggaatcctggtctttaaagaccgtgtgctggctctggtcctccgcccgcttcgaatccctaacctgaacagttgacggaggccgtcacagcggacctcgcatcacaggataaggcagtcccatgatacatcctgatgtcatcggatgcgatattgcaaaagcgcatctagattttttcgacagcggccttgagcgccatttccgtatcgacaacactccggccgcaatttccgcgtggctcgacggccttgatggcagaggcgttcatatcgtctttgaggcgaccgggcgttacgatcggcagttgcgcatagccctggagacccgggagttgccctattcccgcgtcaatcctgcccgcgcccgcgactttgccaaggcgatcggccttcttgccaagacggatgcgatcgatgcacgtctgcttgcccggatgggtcaaagcctgccactctcaactcaggcgcctgacgatcccgcccgccacgtgctcgcccgccttcacacgcggcgtgaccagctcgtggccatgcgccagcaagagcggacacgccttcatgagaccgaggggatcgagcgtgacagtgctgaaagccatatggcttggctcgacgcggagggtgcgcgcatcgaaatggcatgccgtgatgttctgaaggccgagaagaccttgcaagaacaagaggcaaggctgcgttccattcccggcatcggccccgtggccgcattgaccctgatcgcgcatatgccagaactcggcaatcgttcggccaaggcgattgcagcccttgccggtcttgcgcccttcaatgtcgacagcggcacgtcacggggaaagcggcatatacgcggcggtcgcaagcggatacgtgacgcgctctacatggcggcgctcacagccagccgtatgccccgtgcttttaagtcccatgctgaccaaatgaaggaggcaggcaagcccttcaaggtcgtcatcattgcgcttgcccgcaaattgctcgccatcgcaaacgccatcatcagggacaaaacaaccttccgacgaaccacctgacaaacacagttgcca

SEQ ID NO: 8917 - DNA, 1543 bp, unidentified
  source 1..1543: mol_type = unassigned DNA; note = element_e00690a
  misc_feature 1..2: note = core
  misc_feature 3..242: note = LE
  misc_feature 243..1424: note = CDS
  misc_feature 1425..1543: note = RE
  misc_feature 3..218: note = bridgeRNA
cttgtattatagagtagtagttattagagcccctctccaagggctgtgctacactgtaagggatgctgtggattggtgaacttgtcctaccacaagatggtttaagaaaggttccaaccacagccccttacacttttgttaatcagttaaataccgccagacggttgatgtagaacaaggctacaaaagtaaggtgcgctgtggatgcagcatcataattctaaccgccggaggtttttgctatggtagtttctattggtattgatgtctcgaaggataagcatgactgcttcattctcagctcagaaggtgaagttctggcagacgtatttaccatacccaacacgatggatgggttcacctgtctgctgcagaggatccaaaattgtactgaacagatggacaaaataaaggtagggcttgaggcgaccggacattacagctacaacctgcttgggtttcttcttgacaatggtctggccacctatgtcctgaaccccttgcgcacaaacctttaccgaaagagcctcagccttagaaagaccaaaactgacagggtggatgcacgaacgattgcgactatgctgttatccgatgcgggcctcaaaccctacacgaatacagcataccacaacgaggagctaaagtcactgaccagataccgttttgacaaggtgaaagaacgggcgaaactgaaaacctctatttcccggttggtctgcatcctgtttcccgaactggaaaagctggttcccacacttcatatgacctctgtttatgcacttcttgaggagtttccaggcgtcaaacaagtcgccgcagcccatttgaccagactggaatcacttcttgaaaccgcctccaaaggccactacaaacgggatatggcgctgaaaatccgagatgcggccagagactccattggctctcgaatgcctgccaagtcccttgagttacagcacaccattcggcttattcgtgaactgaacaccgagatcgctgaaattgaggcgcagattcagtctttgatggaagaaatcgattctcccattaccaccatcccaggggtgggcttccgcatggccgctatgatcctggccgagataggcgaccttactcgctttgactccccagacaagctgttagcctacgctggaatgtctccttctatttaccagtccggacaactcaagaactgctatcctcacatggagaaacgcggctccagatacctgcgctacgctcttttcaacgcaaccaggtacgtctgtctctgggatccgaactttgccgtttatctcgctaagaagagagcggagggaaaacactataatgtcgcactttcccatgctgccaagaaacttgtacgattgattttcgctatggagaagtcacgacagccttattgtagtttagcagcataaatccaccttgttagcctgtgccggggttcttgcgaacctctgctttgctataccctttcgagaaccatctgtttttctacctccaccatccttttgagggttgacatctaatagttaat

SEQ ID NO: 8918 - DNA, 1543 bp, unidentified
  source 1..1543: mol_type = unassigned DNA; note = element_e008fa7
  misc_feature 1..2: note = core
  misc_feature 3..106: note = LE
  misc_feature 107..919: note = CDS
  misc_feature 920..1543: note = RE
  misc_feature 1240..1506: note = bridgeRNA
agaccacatgtccgtctgaggctggtgtgacccgcctcacaatatgcaggaaacgagggttgcgtcgaagaggtcggcgcagagcctcatgcataggagacgggtcatgggcgatggtatcagatttgtgggtctggatgtgcacaagcggcagacggtagtggcgctcgccgattgcggccgcgagggtgaggtgcgccactacggagctgttgagaccgatcgttcgagcatcgagaagctggctcggaagctggcccgtggcggcaagccactgcggttttgctacgaggcgggtccgtgcggctacggcatccagcgctggttgacggggctcgggcatggctgcgaagtggtggcgccctcgctgatcccatgccggccgggcgaacgagtgcgcaccgaccggcgcgatgccatcaagcttgcccgattgcatcgggcgggcgaactcaccgcggtctgggtgccggagcctgcccacgaggcgatgcgcgatttggttcgggcgcgcgcggtggccgtatacgcggtgcgccgcgcccgccagcaattgtccggtttcctgctgcggcatgatcgcatttacagccgcaaggcctggacgggagcgcatcggcgctggctggccgagctgaagttcgagcatgcggcacagcggatcgtgttggaagactacatcaatgcggtcggcacggcagagcagcggcgcgacggcttgaccgcgcaaattcgtgaactgctgccgagctggtcgctggcgccgatcgtggaggttgtgcaggcgctgcgcggcgtggcggcgatcgtcgccatcatcatcgtcgccgaactcggagatccgcgccgcttcgacagtcctcggcagttgatggcttatctcgagctggtgccgtctgaagcctcgagcggcgaataggtgtatcgcggcggcatcaccaaggccggcaaccgcaccgccaggcgggcgctcatcgaggcggcctggacttaccgctttccggcacggcgatcgaagcatctgctggcgtgctgcgagacgctcccgccgacgatccaggcgatcgcctggaaggcccagctgcgcttgagcgcccggtatcgcaagctcgtcgctcgcggcaagttgcccacggtggccgtcactgccgtcgctcgcgaactcgttggcttcatctgggccatcgcccgcgagctgccggcgatcccggcgcaagcctgacccgattgtcagctcgccaacacgaaaggaggcactcggccaaacagcaaccaaagcgcccgcgcgcgaggcgggaggcacggccaaggtcaggagaaccctcggcggtactatgagccgggcaaccgcccgatgctcgccgctagaccgaggcagctccacgacgaaccaatggccctgcggtcccgacacgcgcatcagagctggatccaccgtcgtttcgcggccgtgtctcctgccatgcgcgcggcgatcattcacttgtgcttgttcgcaagccacagaaaaatcttgtctgcatcttgcaacgccggacatgag

SEQ ID NO: 8919 - DNA, 1384 bp, unidentified
  source 1..1384: mol_type = unassigned DNA; note = element_e00977d
  misc_feature 1..2: note = core
  misc_feature 3..88: note = LE
  misc_feature 89..1117: note = CDS
  misc_feature 1118..1384: note = RE
  misc_feature 1091..1367: note = bridgeRNA
agatggggtggatgccgctctcaccctgacggcatcgcgatgtgccatactcgtggtgtcgaagcacaagctgaaggagagggcatccatggaagaagttagcattatcggggtcgatctggcaaagaacgtgttccagctgcacggggcggcagcggatggggtggttgttttccgcaagaagctgtcgcgactgcagtttgcgcgattcatgacggaccatcccgcatgcgacgtggcgatggaggcgtgtcccagcgcgcaccattgggcgcgggaattgtccgcctacgggcacagcgtccggctcattgcgccgcattacgtcaaaccgttcatcaagcgccagaaaaacgacgccgccgacgcggaagcaatcgttgaggcagcgatgcgtccgaccatgcggttcgtcgaacccaagaccgaagcccaacaggcccgggcggtggcgtttcgcgcccgcgagcagatcgtgaagcagcggaccgaagcgatcaacgcccttcgcgcgcacctctatgaattcgggcatgtggcgccggaaggggtcggatatatcccgcggctggcgaaggtggtcgaggatcctggttcgggcctgcctgacctggcgcgagacatctgccgcatggttctggagcagatcgaactgttgacgtcccgccttaccgcagtctcggcaaagctcgccgccgcgtccagggcggccgccatgccccggcagttacagaccatgccgggtgtcggaccgatcactgcgctcgcagtcgaaaccttcgcgccgccgatggaccagttccggcgtggccgcgattttgcagcttggctcgggttggtgccgcggcaacattcttctggcggaaaacagaggctggggaaaacatcgaagatggggcagcgggacatccggcgactgcttgtcaccggcgcgatggcggtggtccgctgggcgctgcgccgtggcgcaccgcaaaatccctggcttgagcgcatgctggaacgcaagccgccgatggtcgcagccttcgcgctggccaacaagatggcgcgcggcatttgggcgatgctgacgcgcggcgaggactatcgcgatccggtgatggccaccgcctgatcggtcgcgttggcaggaacggaacgcagagttgtgaggaaggcatgatccgaatgggcaaatgatcgacatgatccgggttgggcaaaccaggaaccttctcagagcttcgagctcgctgttggagatttggccccggtccgcgcatcaccatcccggccagcggcatctatcgggccgcactaacaggcctgacaagagtccgcactcgatcacatgtctaatgttcagaaattccttgcaaatgagggcggcatccacaagaga

SEQ ID NO: 8920 - DNA, 1610 bp, unidentified
  source 1..1610: mol_type = unassigned DNA; note = element_e00c656
  misc_feature 1..2: note = core
  misc_feature 3..441: note = LE
  misc_feature 442..1374: note = CDS
  misc_feature 1375..1610: note = RE
  misc_feature 12..295: note = bridgeRNA
ctattacaataagttcggacaggaacaccggatagccagtccggtgttctttccgtcccgtgccttagctagaataagatgagcaactagctgaccaactgtaccttgggtttacatacccgcagataagactgctagtcatcctcttgttgcaacgttcgatttgagcaggttgagccaccgaataccggagagttcgcgtcacgcaatagattgaatcgtcaacgagaaaagatggattccggttgcaggttctttgtgtcggaggaatgtgaatgaactgcgttggcatcgatgtttcccatggtaagagcataattgtggtcatgcgcccttttggagaggtggttgtctcgccctttgaggtgcttcacaccgacagcgagccaagcaagctggcagggctgctaaaaaagtctggacggtgagacccgtgtggtgatggaatccacaggttatcaccacacacctgtggcctggctgctccacgacgcgggcctttatgtctcagtagtcaatgcaatgctggtgcatgactacggaaacaacagtttaagacgggccaaaaccgacaaaaaggatgccgtaaagctggccaactacggtcttgaccactggctcacattgccgagatatatcccggaggaggatacccgactcatgctgaaaatctgctaccggcagtaccaacagtattccaaagttcagaccatgctgaagaataacctgatctccctgctggacaccaccttcccagacgcaaatcgcttgtttaccagtccgccccgcgccgatggcagcgagaagtgggtggactttgtcgctactttttggcattgcgagtgcgtttgtggccggtctgagaaggcctttactacccaataccagaagtggtgcagaaagcacggctacaatttcagcgaggataaggcgctggatatttatgcctctgcttgcagacacttcggtgtcataccgaaaacggatacggcaaaacttttggtagaacaggccatttctcaactccgggcaacttccgccgcgttagctgctcttaagcaggagatgcagtctctggcagcttctcttccggagtatcctgtggttatggggatgtttggtattggacctgccctcggccccccactcatggctgaaattggcgatgtacgtcggtttcattccaaaaaagcgttggttgccgttgcgggcatcgatgcccctccttaccaattcggtcaaatggacgtccgtagccacagtatttccaaacggggatctgcctcgctgcgcaggacgctcttcctagtgatgagtgtcatcctgcaacacgctccaatgaatgagccggtctaccagttcatgaacaagtaacgctctgaaggcaagccctaccgtgtctacatgatggcctctgctaacaagtttcttcgcatctattacgcttctgtgaaagcctatctggattctgcagaacacaactgattttcctatgctttgccagctggatagtcgccatttcgattttgagatgctcagcggctcagattagtgcgtcccttttctttgctcgttcccttaaaagttttacttagcttttattagcaggt

SEQ ID NO: 8921 - DNA, 1545 bp, unidentified
  source 1..1545: mol_type = unassigned DNA; note = element_e010221
  misc_feature 1..2: note = core
  misc_feature 3..262: note = LE
  misc_feature 263..1525: note = CDS
  misc_feature 1526..1545: note = RE
  misc_feature 6..243: note = bridgeRNA
ctaatgagagcaatcgggtctcacatctgcgaggcttggttgcgacagcagccggtgggtcagcactcctctagccccgggcaccgccacttcggggatgcctattggtagaccgtgcgcccaccggttgccggcggctcgaactgctgatgagatgtcgtgcccgggcggttgacgtgagcactggttcattaggtcgcagaagccaccgcatgctgccgtgtgttccatcaaggctgtggacaacggaaggactgggccaatgcggttgatgatcggcgacgactgggccgaagatcaccacgacatcgaaatcgaggatgagaccgggcggcgcttgtgcaaagccaggctcccggagggattgcccgggatctccaggctccatgagctgatcgctcagcacgccccgagcgactggacggacctcacgccagagctggccgcggacctggtcttcgtcggcaccgagaccgaccgcggtccgtgggtggtggcattgcgggcagccggctatcacgtgttcgcgatcaacccgatgtcttcggcccgctaccgggagcggcacagcacttccggtgctaagagcgacgccggtgatgctcacgtcttggcagaaatagtccgcgtcgaccgagatcaccaccgcgagatcgccggtgacaccgatctggccgatgcagtgaagctgctggcccgcgcccaccagaacctcatctgggaacgagttcgtcacaccttacggatgcggtcagcgctgttggaattctttcccgttgcggtgcaggcattcccggatctggctgccgccgatgcgctgatcctgctcggtcgcgcacctgaccctgaccgagccgcaaaactgacccgtggccaggtggtgtcggccttgaccgcagctcgccgacaccacgtggacgatcgggtcgaaccactgcgagcactgctgcggcaaccagctctgcggcaacctcccaccctcgaggcggcctacgccgccgtggtcgccagccaggtcaaggtgctcacagcactgaacgagcagatcactgcactgcaggctgtgatgacacaaaattttgatcgacacccggccgcccagatctacctgagccagccgggcctcggaccaatcctggccgcccgggtactgggcgaattcggggacgacgacacgcgattcattaactcccgcgccaggaagaactactctggccaaagcccgattacccgcgcatcggggaagaagaccacggtgatggcccgctacgccacgaaccgccgactcggagtggccctgcacctgcaggcatacggcgccctcaacggatcaccaggtacccgcgcgtactacgacaccatccgagcaaggggaaccaaccaccacgccgctctccgccaggttgccaaccgcctggtcggcatcctccacgggtgcctagactctggcaccctctatgacgagacagtagcgtggccggccgaacccatcaacacgcgggaaccgatgacctcagctgcttgacacgactcgacatgggatgt

SEQ ID NO: 8922 - DNA, 1365 bp, unidentified
  source 1..1365: mol_type = unassigned DNA; note = element_e0139a3
  misc_feature 1: note = core
  misc_feature 2..68: note = LE
  misc_feature 69..1103: note = CDS
  misc_feature 1104..1365: note = RE
  misc_feature 1110..1355: note = bridgeRNA
tatggaatggcccgcccctccacccggcgttgtagcttcgccggaggttcaaactggagggacgaatcatgaaggtttccgtgcttggcatcgatcttggcaagaatgtttgcagcgttgtcggacttgacgcagcgggcgcggtcgttttgcgcaggcgtgtgatgcgagaaacgctgatcggcctcgccgcgaagctgccgcgctgcatcctcgcgatggaggcgtgctgcggcgcgcatcaccttggccgcttattcgcggaccaaggacatgatgtccggctgatgtcgcccgaatacgtgcggccttacgtcaaagcgcaaaagaacgacgatcgcgatgcagaaggcatcgcggaggcggcgacacgccccactatgcggtttgtcgagttgaaggcccaggagcaactcgacatgcaaacgctccacagatcgagagaccggttggtcggcgaacgaacggccctgatcaaccaattgcgcgcgatcctgttggaacgcgggatcgttgttcctcaaggcaagcgccatctcgagcggcatctggccgctttgctcgacggtcaggacgcgcgggggctgagcccacggatgcgtctgctaatcgccgacggtcgcgcgcaatggcaggagctcgatcggcgcatcgccgtcttcgatgcggaatttgaggctttcatgaaagagaacgaagatgcaaagcgattggcgacaatccccggcatcggcgtcatgatcgcttccgccttgatcgcggcgatcggaaaagcggaatcgttcgagcacggtcgcgatctttcagcatggctggggttggttccacgtcaatcgacgaccggcggcaaaccgaagcttttcggcatcagcaagaggggtaacaaatatctgcgcaagttgctgatccatggcgcgcgtgcggctttgccacatcttgcggagcacgacacggcgcctggccgatgggccaaaggattactcgctcgcgtgcatcataatgtcgtcgtcgtggccttggccaacaagctggcgcggatcgcgtgggcggtattgcgacgcggcgaaacattcgccgccaagggagcgttcgtggcggcataggcatttgctggtcggcgcatgagacgctgatcggccgacgatgtttgcgggtggtgaaaacgagagatggcctgactgacagtcgaacggcgtcctagaaacctggtataaaaaacggcgctcgacgccgagagttttatgaggaccgggacgcgcgtatctccatcttggccgggacttcactccgaggccagatacgttgcagcagactgatcaaacggcgccctcgatataactgcttgcagacggggcgggccatacg

SEQ ID NO: 8923 - DNA, 1365 bp, unidentified
  source 1..1365: mol_type = unassigned DNA; note = element_e015e41
  misc_feature 1: note = core
  misc_feature 2..66: note = LE
  misc_feature 67..1104: note = CDS
  misc_feature 1105..1365: note = RE
  misc_feature 1132..1356: note = bridgeRNA
taatgagatggtccgccgccgagtaggattttaggctcggcagtttaaatcaggaggatcatcatcatgatgtacatcgcatctatcgggatcgatctcggcaagaccacctttcacttagttgccttgggcgaacgtacccaggttctgcggcgcaagaaatgttcccgtgcccagttgctggcctacaccgccaacctgcccgcgtgtttaatcggactggaagcctgcgccgggtcacactttctggggagcgtgttgcgccagcaggggcaccaggtgcggctcatcccggcccagttcgtaaagccttaccgcaagtccaacaagaacgactttctcgatgccgaagccatcgccgaagccgtgaccaagcagaacatgcgctttgtaccaatcaagacccaggagcaactcgatctgcaggccatacaccgggtgcgggatcgactggtgcaacgtcgcaccgctctgatcaacgagatccgtggattcctgctggagcgcgggatcacgttcgcagcagggcccatccacctgcgccagcatctccccacggtactggaagatgccgagcagaacctgagcccgcgtttgcgctggctgctggatcgactctggcaggagtggaagcagatcgaactcgacatcaagaccctcacggaagagatcgagcgcattagtaatgaggatgctcgttgccggcgtctacgtcagattcctggctttggtccgttggtctcaactgctacggtggccgccattggcaacggggctgcctttcgccgagggcgggacttcgcggcctggctgggggtggtgccgcggcagtgctccagcgggggcaagcagaagctgctgggcattagcaaacgcggcaacgtttatctgcgtcgcatgctgatccacggtgcccgcgcagtcctgctgcggatcaagtacgacaccgcaggattggggcagtgggtgcatcggctggcccaacgggctccgcgcaacaaagtgattgtcgcgattgccaacaagctggctcgcatcgcttgggcggtgttgtctagcggcaacgactatcgccaccagccgctgcaggccgtgccagcttgatgcatcaagacccagcttcgaggtaagttccagcaaggtctgcggaggagagaagaagacgaaagaagcgtccaacggcgtgtcggaaaacctgactgtagtgaacgcgtcctttgtgaccgagcgatttataaggaccgacacgtgcgcatcatcatcgagtgcccggagagcgaatctccactaagaggccggatacatttacgcggactttttctcgtcaatcttcaaccctcttgcagttcgccggcggaccataca

SEQ ID NO: 8924 - DNA, 1299 bp, unidentified
  source 1..1299: mol_type = unassigned DNA; note = element_e01d42c
  misc_feature 1..2: note = core
  misc_feature 3..77: note = LE
  misc_feature 78..1040: note = CDS
  misc_feature 1041..1299: note = RE
  misc_feature 1040..1286: note = bridgeRNA
tgatggtgtggacggccccctacggcatcagtgtgccagaatgaggttgttgtaaatctcagacaaggagaccgtccgtgagagagattatccgtattgggatggatacgtcgaagcatatttttgtgctgcatggagttgacgcggcggaacagccggtgttgcgcaagaagctgtcgcgcaagcaggtgcttgagttttttgccaagcttccgccgaccgtgatcgggatggaggcctgcggggcggctcattactgggggcgcgagcttggcaagcttggccatgaggtgaagctgatagcgccgcagttggtgaagccttatgtgctgcggaacaagaacgacgggcgagatgcggatggggtgtgcgaagcgatgggccgaccgcggatgcggtttgtgccggtgaagagcgccgaacagcaggccgcgctgatgcttgcaggtgtccgcgatgggctgatcggccgccgtacccagctcagcaatgcgatccgcggctacgcggcggagtttggcctgatcgcgccgaaggggttggacaagatcgagccgctgttggcccggatcacgcaggacgagagcgttcccgctatggcgcgcgagctgttcgccatgcagggccgtgactatgcgcagttgcagggtgagctgaaggcggtcgaggccaggctgctggcctggcaccaggccaacgccacaagccgtcgtctggcccagatcccctcggtcggtccgatcatcgcgacctcgcttgtgatgaagacgccggacccgcacgccttccgctccggccgcttgttcgcggcctggctcggcctgacgcccaaggaccattccaccgccggcaaaaccaggctcggcaagatcacccgcgctggcgacgagaccctgcgtcgcctgctcgtggcgttgctcaggcgcaagccgccgaagcttgcggccgtggcgctcgccaacaaggtggcccgcatcgcctggaagctgatggcgaccggcgagagctatgatgccgcacgcatgaacgctgtcacctaacaggtcggccggccggacgtagcgctcgccggacgaaccggagctgcaagagcagatggaatgatcgatcgatccagaacgcgagacaagccgcgggacccattggccttcacaaggtcgccaggttgtttggcactcgcgtcgcggaaaccatcttggcccagcgatcaacacgatcgcatcaaacaggccggacatatggatgacagcgatccgaccaatcccagaaagctcttgtgccacgggggccgtccacata

SEQ ID NO: 8925 - DNA, 1412 bp, unidentified
  source 1..1412: mol_type = unassigned DNA; note = element_e01d9f3
  misc_feature 1: note = core
  misc_feature 2..88: note = LE
  misc_feature 89..1138: note = CDS
  misc_feature 1139..1412: note = RE
  misc_feature 1182..1404: note = bridgeRNA
caatgggatggacgcccccacctttgacggcatcgatgtgccagagtggagatgtcaatgaccactcgaagcggaaggggcgtccaccatgcagattacgacaatcggaatcgacctggccaagaatgtgttccaggtccacggcgcggatgagcgcggcaagcccgtgctgcgcaagcagctgcggcgcgaacagatggttgtgttcttctcgaacctgccgcagtgcctcattggcatggaggcttgcggtggggcgcatcactgggctcgcaagctgcaggctttggggcacacggtcaagctgatggcgccgcagttcgtcaagccgtacgtcaagagcaacaagaacgacgttgccgatgccgaagcgatctgtgaggcggtgacgcggccaaccatgcgatttgtgcctgtcaagaccattgatcagcaatcgctgcttgcgctgcaccgagcacggcaagggttcatcaaggcacgcacggcccaggccaaccagatccgaggcctgttggctgaattcggtctcgtggtcccccagggaatcaacaacgtcagaagccgggtgcacgatttgatcgaagatgcgtccaacgagctgtcaggcgcattccgactgctcgtggatcggctgctcgggtacctcaaggtcttggatacacaggtcgatgaactcgagatacagatcaacgtttggcacaagaacagcgacgcaagcatgcggcttgagaaggtgccgggaattggtccgctgacggcaacggcaatcgtggccactgttggcgatgccaagaacttcgacaacggtcgacagctggcagcatggctggggcttgttccgcggcagcattcgagcggaggcaagcagacctttctgggcgtgagcaagcgcggcgatgcctatgtcagaacactgctcatccacggcgcgcgatccgtgatctaccacctgtcactgaagccggacaagctcaaggacagcgcctggatcagcgcgctgctgaccaggagaaacaagaatgtcgccgcagtcgccatggccaacaagacagcgcgcatcgtctgggccatgctcgctcatgaacgaagctatgaagtcaatgttccagtcgccggcgtcgcgaccgcggcctgaacactaccggcctgatccaacacagcttcaggagagttgaaccaccgattgctcgagcaatcatgaagtgatggcaagacaggtaagaccgtggttggcaagacccgaagttttcgcggcacatcaatggtgcgtccgaccgatagaggagccaatcagcgaatcccatcagggacagcggcgcaggccgcattcaaagtccgaatgtacgggtgcaatcttttccttctcgcccttgcgaattgagcgcttggcaaacgggggcgtccatgta

SEQ ID NO: 8926 - DNA, 1385 bp, unidentified
  source 1..1385: mol_type = unassigned DNA; note = element_e025e14
  misc_feature 1: note = core
  misc_feature 2..87: note = LE
  misc_feature 88..1116: note = CDS
  misc_feature 1117..1385: note = RE
  misc_feature 1162..1377: note = bridgeRNA
caatgggatggacgcccctactctaaacggcatcgatgtgccaaagtggtggtgtcaacaatcacttccatgagagaggcgtccaccatgcagattacaactattggcctggatctggcaaagcgtgttttccaagttcacgcagtagactcaagcggtcacacggttctagtgaagcaactcaaacgcagccagatgcatgagttctttgccaatctgaccccgtgcgtcattgggatggaggcgtgtgccagcgcccactattggggacgggagctgacgcgactggggcatgatgttcggctgatggccgctcaattcgtcaaaccctatgtcaagacgaacaagaacgatgctgctgatgctcaggcaatttgtgaagcggtgagccgacctagtatgcgatttgttgccattaaaagtgttgaccagcaggcggtgctttcaatgcaccgcgccagggatggactggttcgagcacgaagtgcgttggctaatcagattcgcggcctattggccgagtttggcctgatcatgccaataggcgtatcggccttgcgccgccaaacgccgacgctgctggatgaggctggggatcgcttgcctttgccgtttgtgcatctgattgaggacttattgacgcacatggatgagcagcaacgtcatattcaggcctttgagcggcaaattgtgcagtggcatcgcgcccatccagtcagtatgcggttggcgcagattccgggcattggccccattacagccagtgcattggtggcgacagtgggtgaccctcatttatttaagaatggtaggcagatggccgcctggcttgggttggtaccccgacagcactccagtgggggtaaacctatgctgctaggcatcagcaagcgaggcgacggctatttgcgcaagttgttgttgctaggtgcccactctgcgctgttgcggatccgtcatcagccaggcagcggacaatcctgggcggatcggctattgcgacgacgccctgtgaatgtggtggctacagcggtagccaataaacatgctcgtatcgcctgggccttgatgacagagcagtgtgactatgaccccgcactggctcaggttggttaagctaaacaaaagaggcatatgttgtattaattaacgattccaccgcgcgattgcgcaggcataccagcagtaatggcaagataggtcagaccgggatccgcaaaacccgattcggtagccgtacttcgagtacgtgcgggctatggggagcggatcagcaaattccattaggggccaggacacaagccttaagcccggatgtactgtcgcaatctgcctacctaaaccaaagctcaacgtatgcttggcaaaccaggggcgtccatgta

SEQ ID NO: 8927 - DNA, 1627 bp, unidentified
  source 1..1627: mol_type = unassigned DNA; note = element_e028faf
  misc_feature 1..2: note = core
  misc_feature 3..288: note = LE
  misc_feature 289..1332: note = CDS
  misc_feature 1333..1627: note = RE
  misc_feature 48..257: note = bridgeRNA
ctcttacctttgcatccgattatagaattaacttctggtaacagaagtaaggcttattttttcgtagttttgctagtgaaataggctttgaggggcgaggagattctgtaacaggtaggtgtaatccatatcgctacaaagagatgcccgcccctcttttcattatcttctagagtcaggacaaagtatctaaggacatttctaaatgatcaagtgtagatccaagagtttaggcgcaggaaggttttggtctatattcataacattattaacttaaagttttagcttatgagaccaaaattgttgatggaaaatgactacattttaagacaatgtgtaggcattgacgtttccaaagagacgttggtagttaccatgtgtatgttcagcttcgcggaggaggctcactactccgacgtcaagacgttcaagaacaacaagactggctttaaccagctggtaaaatggagtcgcaaggaggcttacaccgataaaccgctacggtatgtcatggaggccacaggcgtgtatcatgaagaactggccaaccatctcgtgaagattggttgcaccgtaatcatcatgatgccgaacaaggcaagagagtttgccatttgggaggggatgatctccaagaatgacaccatcgacagccgtgcgttggcccttgtgggatgtgtgaagaggagtatgcgtccatggcagccaagcaaggagatctatcacgaactgagggctatgacaagatttgcccaggacacgaagaagctgcgccttgcgctcaaaaaccatctcgaagccttggagcacagccatcaggctgagaagagcatagtcaaacattacgaggctatggtgtcgtatttggacaagcgtctgaagatgaacctcaagaacatgaaagagaaagtcgcatctgacgaggctcttaacaagaaggtagagaacatcattactgctccctcacttggcttcacctctgtgattacagtcattgctgagactaacggcttcgcgctcatacagaacagaaagcaactcaccagctatgctggcttcgatgtcaaggacaaccagtcggggaatgtaaaagggacatccagaatctcaaaaaaaggcaactcccgtatccgtgccatactttatatgcctgctgtgcaggcccaactgcgcagcaggcatctaaaagaagcctacgacaggattgtgcagaagcatcccgacaagaagatgatagcagtcactgccatggaacgcagactactgctccttatctatgctctctggaagagcgacaaaccttatgacgaagaccacgacaagaagaaataacacttaatccatagccaattacacgaaaagaggctggagcagtttgacacgcctccaacctcacgtgatagatgcctgaaatcgggtgtcttcacttgtcgtgtgcaatattacgaagattttttgaaatatgcgactgttttacccaaaaatattaaaaccttaataatctatacctgaaaacaccgaggggccagggggcgagaagcccccatcaggctaaaaacatataaaaaaacaaaatgacggcaattaatttttcttaactcttttttctttgagattaaaacagtat

SEQ ID NO: 8928 - DNA, 1505 bp, unidentified
  source 1..1505: mol_type = unassigned DNA; note = element_e03d94f
  misc_feature 1..2: note = core
  misc_feature 3..235: note = LE
  misc_feature 236..1318: note = CDS
  misc_feature 1319..1505: note = RE
  misc_feature 22..182: note = bridgeRNA
cttgtatgttgcattccaaggcgtgaggattaattcacgcttcggcggcaggccgttcgccccgtaggccaacgtgagttgagcctgtcctgtagattggccgccgcccctctcttttacgccgtggagaatcgcaggctttggagcctggatggtcaaggtgggcggatcgagtttagcccgttggcgcgggcaggggcggctgctgaagctcatcctagcgccaaggaggcttatgagcaagcaaatcgtttctatcgtcaggcccgttctctgcgaggaggagttgactgttccccgtcaggcaagcgtgttttgcggcatcgacgtgagtgccgacacgctgtctgtggccgttctcacgtcgaaccaagccatcgagcagcgcgagtttttgaacactggcagcgagcacaaggcgctgattgcgtggctgggcaagaagaaggccttggtgcgggtgtcgatggaggcgaccggcatttactcgatggacctggctttggcgctggatgcggcggacggcattgagctggcagtgctgaaccccaagcgggctcacgattttgccaagtcgatgatgcggcgctcgaagtcggaccgggccgacgcggcggtgctagccgagttcagcctgcgcatgaagtttatggcctggcagcggcctggcttgagtgcgctgacggtgcgctcggttacccgccagatcgaagcgtttggcttggagcacacccggggcctcaaccggctgcacgccgcgcaaggatcgctgggtacgccgcgttgcgtggtggaggacttgaagcgagtgttggtcgcgctggaacggcgcatcgtgacgcaacggcgcacggcccggaagctgatcgacagcgacgagcagacgcgcgagcagttccggctgctgctcggcatgccggggatcggggagatcagcgcgttgcagatactgggcgaactggtgctgctggcgccggacctgacggcgcggcagtgggtggcgcgcagcgggctggacccggtgcacgaggattcgggcagctcggtgcataaaccggcccacatcagccgcgcaggcagtcgtcacctgcgccgcgcgctattcatgccggcgctggccgcagtgcgttgcgacccgcatttgaaggcgttctacgagagtctgctggcgcggcacaaaagcaagttgcaggcgctgatcgccgtggcgcgcaagctgctgcatgccatctatggcgtcttcaagagcggccagccgtataaaggcaaactgctgtttccgaatatccggttggaggtagaatcaatcgccgggtgaaacggaagcgggctctgctgggaagcaaccatgccgagggataaccaggcgggctcatcctgacgatgaaccgaaggggcgggcacgggaacagattgctcgccccaaaaccatcggagggataggcccccatgccttgaaaatccaaccttggcccgacgaaaactcttgacctttcacagagaat

SEQ ID NO: 8929 - DNA, 1355 bp, unidentified
  source 1..1355: mol_type = unassigned DNA; note = element_e040fde
  misc_feature 1..2: note = core
  misc_feature 3..74: note = LE
  misc_feature 75..1091: note = CDS
  misc_feature 1092..1355: note = RE
  misc_feature 1096..1342: note = bridgeRNA
tgatgtggtggacggccctcccacccggaacggtggcaaggtaggccgggaaggaaccaccataggaggcttcgatgggcgcgatggcgacgattgggctggatctggccaagaatgtctttcaggttcacggagttgatgccgacggcaaagtgctggttcggcgacaacttcgccggggcgatgtgctgaagttcttcaggggactgccagcctgcctggtcgggatagaagcctgcgcaaccgctcaccattgggctcgggcgatatcggcactcgggcatatggtgaagatgatgcctcccgcgtatgtcaaaccctacgttaagcgcggcaagaccgacgcggccgacgccgaggcgatttgcgaagcggtcacccgcccaaccatgcgcttcgtggcgatcaagaccgtggaccagcaaggcgccctgatgctgcacaaaacccgcgacctgctagttcggcaacgaaccatgttgatcaacgggctgcgcggccacttggcggagttcggcatcatcgcggcgaagggggccggtggcgtgaaggctgctattgaagcgctgcacgaggcgcaggagcagttgccagaagcggcacggatggcgctgcatggaatcgttgatcagctcggccaactggctaccgcgatcgagcggctggaggcgcgcatcgtcgcatggcaccgcactaacgatgtcagccgacggctggcgaccatccctggcatcggaccgatcaccgccagcgcgatcgctgccgccgttccggatggatcgatgttccgatccgggcgccaatttgccgcgtggctgggcctgacaccgaaggcgcacagtagcgggggtaaggaccggcaggtcggcatcagcaagcagggcgacggatatattcgcaggttgcttgtcgtcggtgccacctcggtcatgcggctggcccgccaggacaacgccagccgacagtgggccgcgaaactgctggcccggaaatcggcgaagctcgccgccgtcgcgttggccaacaagacagcgcgcatcgcctgggcggtgatgacgcgcggtgaaatctacgtggcgccggccatgtagacccattcctcgtcggctgtgacaccgccgaacgaggtcgtgcgcgagggtggtgagacgtgatgacgaaccggtcagaccggggatcgaacaaacccactgggaccaagcgccgtcgagcgcgttgaggtgattcgggtttcggtccgcggacttcatcaaggccagcagcgctccagctgcgcaaacaggccggacacatggatgcacccgaccaaccgtcagatcgtatttcctccttgcaccgggagggccgtccacaca

SEQ ID NO: 8930 - DNA, 1430 bp, unidentified
  source 1..1430: mol_type = unassigned DNA; note = element_e04ab21
  misc_feature 1..2: note = core
  misc_feature 3..121: note = LE
  misc_feature 122..1162: note = CDS
  misc_feature 1163..1430: note = RE
  misc_feature 1185..1383: note = bridgeRNA
agatggtgtaatcgacttggcgccccatcctgctaacgaagaggaaggtgcagcgcttcgtgtcgatggtaaaacgtggtcatgtaaggaacagccacaagcatctgaaggaagcgctgccatgaaatactacgccggtctcgatgtttctgtaaaggaaacgagtgtgtgcattgtcgatgaaacgggcaaaatctgccgggaaagaaaggtcgtcagccatccagatgatctcatttcgcttttaggcgatccacaatggcactttgaacgggtgggtcttgaagcaggtccgctgtcgcaatggctctatgaagggctggccaaggccggacttccggttatctgcatcgagacccggcatacgaaatcgttcctcaaggcgcagcagcccaacaagagcgaccgcaatgacgcacgcggcattgcccagatgatgcgggtacatctgttcaagccggtgcatgtgaaaaccctgaccagtcagaagcgtcgggctctgctgacggcccgcaagcttttgcaggagaaggccattgccattgagaatgacattcgtgggcttctgcgcaatttcggtctgaaggttggcatggttggagccgttcaatatgaagagcgtattcgcgagctgatcgagggcctgtccgatctggcggtggtcattgagccattgctggctgcacgacgcaaactgcgggaggagttcgccggactggaccacaaggttcgcgaaatcgtgcatgatgatcctgtctgccagcgcctgatgacagtgcctggtatcggcccgatcgtttctctagcctatgtcgccacgatcgacattccggatcgctttcgatcatcgcgctcagtgggagcaatgatcggattaacgccgctcctcaaccagtcaggcgaaagcaaacggataggccatgttaccttatgcggcgacaatatgctgcgaggtttgctctatgaagcggcgcaggtgctgctgacgcgggtcacgaaatggtcatggctgaaggcctgggccatgaatgtcgccaaacggcgcggtgggcgcaaggcgatcgtggcgcttgcccgccgacttgccgtaatcctgcaccggatatggagtgatggaagcgaattccactggacaaaagaggccgcagcgatagcagcataatctttgtctgagaataaggaataaagttccgccttgcggcggaaggcgtccttcgcggacgaggatgatatgagttcgtgtttccacttatccgatgacagaaacatcatcaggatgccaatcagattggaccgtattattcttcgaatcccatgatgggagggcttttgatgccgatcccggagagaagcaagagccgcgaaaagacgttgaacgccgcaaaaatggaaagcttgattgcgcttgacttcaacacgtcgattagaga

SEQ ID NO: 8931 - DNA, 1523 bp, unidentified
  source 1..1523: mol_type = unassigned DNA; note = element_e04bebb
  misc_feature 1..4: note = core
  misc_feature 5..259: note = LE
  misc_feature 260..1513: note = CDS
  misc_feature 1514..1523: note = RE
ctcactggtgcaccatccttgtgtcggcagttgtaaggctgctgatgcacccgaggtgccgccgggtcaccgccctgctcgcttgacgcagttgacgtccaacatgagttctgcgggacccggtggttacccgggacgcgccgaccgtcgacagggctgtatgcgcaggtgagcgccgaacagtgagcggactggctgccgcgtcccggcaccacgcatgagggtgcctccccactgggcaagcagcgaggaggctgtaatggagtatctcccggacacgctgcccgcgatcccgccgggcggggtgacctgcggcatcgactgggccaatgacgatcacgccgtctgcgtggtcgacctggccggcaagattgtgcagcggttcaccgctgagcacagcggcgagggcctggccggcctggtgcgccggctgcgccgggccggcgccggcgaggttgcgatcgagcggcccggcggcaaggtcgccgacacgctgctggaggccgggctgaccgtcgttgtcatcagcccgaaccaggtgaagaacctgcgcggccgctacgggtccgcgggcaacaaggacgaccggtttgatgcgttcgtgctggctgacacgctgcgtaccgaccgggcccggctgcggcccctgcttccggacaccccggccaccgtcaccttgcgccaggtctgccgggcccgcaaggccctggtcggccaccgggtcgcggtgtgcaaccagctgcgcgcacacctgctgatcgcctttcccggcgcggtcggcctgttcgccgggctcgactccccgatcagcctggccttccttgcccgcttcgactgccaggaccgtgccgactggctctcgccccggcggctggccgcctggctgcaaacccagggctatagcggccgcaaagaccctgctgagctgcacgcccgcctggccgccgcgccccgcggcgccaccagcgacgacggagccgccaaagcacacatcacccgcgcgctgctggccgtgctggtcagcctcgtgcaccagatcaaggccctggacgcccagatcgccgaacagctcgccctgcacgccgacgcgcacatcttcacctcgctgccccgctcgggcaccgtgcgcgccgcccggctgctcgccgagatcggcgactgccgcgcccggttccccacccccgaagcgctggcctgcctggccggagtcgccccctccacccgcaaatccggcaagaccaccttcgttgacttccgctgggccgccgacaagcaactccgcgacgccgtctgcgacttcgccggcgattcccgccgcgccagcccctgggcagcccggctctacaacgacgccatcgcccgcggcaaagaccacccccacgctgtccgcatcctcgcccgcgcctggctgtatgtcatctggcactgctggcgcgacggcgtagcctacgacccagcccggcacaaagccctccagcgcatcctcaccgagcaacaaccggccgcggcttgacacagggcta

SEQ ID NO: 8932 - DNA, 1463 bp, unidentified
  source 1..1463: mol_type = unassigned DNA; note = element_e04bf4c
  misc_feature 1: note = core
  misc_feature 2..251: note = LE
  misc_feature 252..1448: note = CDS
  misc_feature 1449..1463: note = RE
  misc_feature 42..222: note = bridgeRNA
cgttatctttttgatagtccctagaaagaggatcatagggattgtcggccgaccaatctcggcatggtgtcttgcccctgtctatccaatgatccggggggtgttgccaccgagattgggatggcagcgaggtgattgctgattaggggcgcggcgccaaaatatggacgcctgtcataacgtggatgtaagactttgctaccggcggttggtcggccttgaacaagaactagttcaaaggagcactagccatgatcactaatgacgtgcagatctttctaggcctcgatgtcggcaaaaccgaccactgggcctgcgctgttaccaaagatggcacgaaaatctggaacagaacgcttcctaacgacgaagccaaactcaccgccgtctatcaagacctcagcgccaagggcacggttctcgttgtcgtggaccagccagcgaccatcggcgcgttagccgtcgcactcgctcaacacctgggtatcccggtggcctacctgcccgggttatcgatgcgtcgaatcgcggacatgtacccgggatcggcgaaaaccgatgagaaggatgcgttcatcatcgcggacgcggcccgcaccatgcctcacaccctgcgcagcatcgaggtcgctgacgaggacgaagccacgttagccatgctcaccggtttcgatctggacttggcacgccagatcacgcaaacgagcaatcgaatccgcgggctctttacccagattcacccacccctggaacgcgtcattggcccttggttggatcacgacgccgttcttgaagtcctcgcgacctggcccacaccgacccaactcaggcaggccggcaaagcgcggatcgctgcgaaactcaagaagcacggagcccgacgccacaccgcgtgggcaacgacaatccttgccgcactggagaaacagagcgttatcgtggtcggcaccgacgctgccgcactagtgatcccacacctcgccaatcagttgatctccctgcatgcccaacgcagcgatgtggccactcacctggagaaaatggtcgaggcccaccctctttacccggtcctgacatccatgccaggggtcgccgtcaggaccgcagcgatcatcattgccgagatctccggcaaaaccttcgctaacgccgccgccatggcctcatacgcaggcttagcgccaacaacacgccagtcaggtacctcgatcaaatccgaacgcgtcagccattcagggaacaaacgcctgaaaagagcactattcctctcggccttcgcctcgatcagattcgaccccaccagccgcgcctactacgaccggaaacgcgcccaagggaaacgccacaaccaagccttgatcgcactagcccaccgccgactcacagtcctcttcgccctgcttcgagacaaaaccctttacgatcttccggagctaaaagctgcttgacaaaatacatagggg

SEQ ID NO: 8933 - DNA, 1583 bp, unidentified
  source 1..1583: mol_type = unassigned DNA; note = element_e05192e
  misc_feature 1: note = core
  misc_feature 2..79: note = LE
  misc_feature 80..1144: note = CDS
  misc_feature 1145..1583: note = RE
  misc_feature 1345..1574: note = bridgeRNA
taatggaatggtccggccgtgctcctgccccaccggcgagtaatgctgggaaggggcgagtgtcaaacggagcaccgccatgtctaacaaatcaatcgcgaccattgccacgatgggcatcgatattggcaagaattcgttccacgtcgttggcctcgatcgacgcggcgcgatcgtacttcggcagaagtggtcacgcggccagatcgaagcgcggctcgccgcgatgccgccgtgcctgatcggcatggaggcctgtgtcggcgcccatcacctgagccgcaagctgcaagcccacggtcacaatgcgcggctgatgcccgcgaaatatgtgcgcgcgtataacaaagggcagaagaacgatttccgggacgcggaagcaatcgccgaggcagtgcagcgcccgacgatgaaattcgtcgccaccaagacggctgatcagctcgacttgcaggcgctgcaccgggtgcgcgaacggctggtcaggcagcgcaccagcatcatcaaccagattcgtgccttcctgttggagcgcggggttgcggtgcgccaggggcggcacttcctgcgcaccgaattgccgggcatccttgccaagcgctctgacgtgctgtcgccgcgcatgatgcgcatcatcgaggatttggccggcgactggcggcggcttgacgagcgcatcgaaggcttgtccaccgacatcacaagagtggtggagcaagacccggcgtgcgagcgtctgatgacggtgcccggcatcgggccgatcatatcgagcgcaacggtggcggcgatcggcaccggcgatgtgttctcgaagggccgcgacttcgccgcctggcttggactggtgccccggcagatctcgaccggagaccgcaccatcctcggcaagatatcgaagcgcggcaatcgctacctgcgggtcttgttcgtgcaggcggcctgggtggtattgatccggccgcagagttgggagcgctacgggctcaagccgtggatcgaagccgccaagaagcggttgcaccacaacgtgctcgccatcgcgcttgccaacaagctcgcccgtatcgcctgggcggctctcaacaaggagcgcaacttcgaggtcacgaggacaactgcgccgtcatcccgacctgcgtgagggtggcaccgtgctcgggaccgtcaacgcgtggcctgcaaacgctggagcaagaacaaaggcaactgcgacggccagccttgacggtccctgcgcgcgatgccccgcacaacctgcaggccgggacgaaggaacggcctcacggcacgaacaaaggaactgcaccgatcagggagagagcgatgacatagtccccgttttcctgccgaggtctgcgagaggatgaaacgagatggaggaccggtcttcccggcgcctgcgaaccctggtgacccaaatggcccgttcgaggcctgtccggtaatgagaccgcaggcgcgctgatatccatgatggcccggagcacaacacgctccaatcagaggccggatacattgatgcaagaccgcaagccgacagatcgatgaaaacctcttgcgacgcacggccggaccataca

SEQ ID NO: 8934 - DNA, 1392 bp, unidentified
  source 1..1392: mol_type = unassigned DNA; note = element_e0621ad
  misc_feature 1: note = core
  misc_feature 2..105: note = LE
  misc_feature 106..1143: note = CDS
  misc_feature 1144..1392: note = RE
  misc_feature 1159..1384: note = bridgeRNA
caatgggatggactcctcctcaacttaacggcatcgcaatgtgccagactgaatttgtattcgttgaagcgaaattttcagtcacgggaagagaaggagtccgttatgaagcttagtagagttggcgtggatttggcaaagaatgtctatcaactgcacggtgtggatcgtcatggcaaggcggtctggaagcggcgcttgcgccgcagccggtggcttcaggccctgatagacaaagttgagcccggctgtgagatcggcatggaagcctgcaccggtgcgcaccactgggcgcgggaacttcaggctcgaggttacacggtgcgactgatcgcgccgcagttcgtgaagccctttgtgaagagcaacaagaacgatgccaatgatgccgaggcgatctgcgaagcaatgagccggccgcacatgcgctttgtaacggtgaagacggttgagcaacaggatatccaggccacccatcgggttcgtgaggaactcaaggcgcaccgcaacgccaaggccaaccagatccgtggcctgatagccgagtacgggctggttgcgccgaaggggatactttcactgcgacgggtgatcccggagtggctggaagatgccgagaacggtctgacagataacttccgttacttgttgcacggactgtggaacgatcttctgacgctcgaggatcgtctcaaggaactcgataaaaagatcgagaagctcgcccgacgcaacgaggtcacaaaacgacttcagcaactgcgtggtgtcggaccattagtggcgacggcgctggtggcaacggtgggtgatggcaagcagtacgccaagggccgccagatggcatcggccctggggctgacgcccaggcagaacagctccgacgacaagtaccgactgttcggcattagcaaacgcggtgacgtctacctgcgtacacagatgatccacggtgccagagccgtcgtctcgcaagccagacaccgggacgatccattaagtcgatgggtaacggacatcgccaaacgacggcatccgaacgttgctgccgtagcgttggcgaacaaaaccgcacgcatggcctgggccatgctgcgaaatgacacgaattacgaatcaagcttggccgtcggtcgggcctgagcaaccaaggagatcctcaacagcgattgcagaagcaaactgcttgatggcaaacaggtcgaaccggcgtcggcacaccccgtgaacggctgggtactacgagtacgaagaagcgattgggagctgacgcgcgaataacccattatggcccggcatcaacgtatgcccactacagaggccggatatacgtacgcagtcgcgccatgcttgccttcagcaatttgcttgcaatgaggaggagtccatata

SEQ ID NO: 8935 - DNA, 1311 bp, unidentified
  source 1..1311: mol_type = unassigned DNA; note = element_e068131
  misc_feature 1..2: note = core
  misc_feature 3..262: note = LE
  misc_feature 263..1264: note = CDS
  misc_feature 1265..1311: note = RE
  misc_feature 45..210: note = bridgeRNA
cttgtatattaaaaacatcttcaaacacaagataatttcaagccaaaagtttatagtgattgtcgatttctggggaagccgttcgcacctgaagccttgagcttgcatgtagataggctccccaccctcgtcatccatgccgcggagtatctgagacctgtaagccaagcttctgagtctgcattcacaaggacggtagatgaagtgtcagggttgggaaaccagcaatcatcataacaaacaaatcttaggaagatggacaatgaaccatgtcggcatagacgtgagccaaaaagaattagtggtcgtcgtgagtaccaaaggtaaagcgcgaccggccaagaagtttgaaaacacaaccactgggcatcgggagatcatccaactattagccaaattgaaagacaaaacacggatttgcttggaagcgaccggcgtttaccattttgatttagccgtcgcgctgagtcgggcagatgaccttgaagtgatggtgattaatcccaaagccgctcataatttcgcccaagccttgatgaaacggagtaagaccgacaccattgatgcggccaccttagcggcctattgcgaaagaatgccgtttgaagcgtggcagcgtccggccgacgaagtcatcgccttaagagccattgggcgacggatcgcggcgttaaataaattgaaaacccaaaccaaaaatcaacgccatgctttaaaagccactcaggacacgcctgacatcgtaattgagcaaaccgaagaactcgtcagcgtactggaaaaacagatccaggctcatagggacagtgctttagaactgatccggcaacacgaatcactgatcagcgtctttaccctaatcatcggtattaaagggattgccgaggccagcgcgatacagctcttggctgaattactggtcttgccccaagacatgagcgcaaaacaatgggtagcctacgcgggcctcgatcctcgacataacgaatccggtagtagtgtcgccaaaaagccgcgtatcagtaaggcgggcaacaaatatcttcgtcacgccctatacatgcctgctttagtggcgacgcgctatgagccaaacattaaacgctattaccaccacttaattgaaaacaacgggctcaagaagctacaagcgctctgtgccgtgatgcgaaaattgttgcacgccatccatggcatgttgaaaaccaataaggaatttgatggcgctcgtttttattcgatgcctgccgattccgctaactgagtttttaaggttttttgcaaaataggacttgtgttttaagagagtat

SEQ ID NO: 8936 - DNA, 1639 bp, unidentified
  source 1..1639: mol_type = unassigned DNA; note = element_e06c9c4
  misc_feature 1..2: note = core
  misc_feature 3..295: note = LE
  misc_feature 296..1471: note = CDS
  misc_feature 1472..1639: note = RE
  misc_feature 40..271: note = bridgeRNA
ctcgtattatatagtagtagtttttatagaccctctccaaggtctttataactattcaatcatagtcttttctttaccttttctataggttcaactatgatatttaagatgctgtggattggtttaattctcctaccacttgatggtttcagaaaggctccaaccacagtctctttgttcatttgttaatcagttagataccgcatgacggtttatttagaacgaggttacaatcgcaaggagcaccctgtggttctaaaacagcattaatacatttcaaaggagatttattattatgatttacgtaggaattgatgttgctaaggataagcatgattgctttatcacaaactctgatggagaagtattattcaaagtatttaccatcactaacaacctagacggtttcaatgatctttatcaaagaatcgaatctgttatggaagatataacaaaagtaaaagtagggctagaagccactggacactatagttacaatcttttaggatatctcattgataaaggtttgcccgcctatgttatcaatccgttacatacaaatctgtacagaaaaagtctaagccttagacagacgaaaacggataaagtagatgcccgcacaattgcttctatgctaatgtctgatgtgaacttaaagtcctactcagacacatcttaccacaacgaagaattaaagtcattaactcgttatcgttttgataaagttaaggaacgtgccaagcttaagtcttccatttccagactagtctgtattctttttcctgaattagaaaaattagtaccaacacttcatatggcatctatttatgcaatgctttctgaattcccaggggctaagcatgtcgctaacgctcaccttaccagacttaccaatctgctttctgaatcatcaaaaggtcgatatggaaaagaaacagcaataacttttagagatgtcgcaagaaactccattggttcaaacatgcctgcaaaatctttagaattaaaacacacgattaagcttattcaagagatttcttctgagattgacgaaattgaaaatgaaatcaaattaatcatggatgaaatcaattctccaatacttagcatccctggcattaactatcgtatgggagctatgattattgctgaaatcggtgatttcaaccgttttgattctcccgataaaatcttagcttatgctggtttctcaccatctacatatcaatcaggacaactagatggtgcctgcgcccacatggaaaaacgcggttccagatatttgcgatacgcgctatataatgcggccaaatatgtctgtcattgggatccaacttttgctgaatatctagccaagaagcgatccgaaggtaaacattataatgtcgctttatctcacgctgtaaaaaagctagtacgagtcatttatcatctcgaaaaaacaaatcagcaatacattaaagcagcttgatttttttctaattcaatactccttttttgagcacctacatagatgctctttttgtcatgcggttttcaaggttcatagaactccaactgagttcaaaatatatctaaaatgcatttctgcactttaatcaaaaaatatcatttttcgacttgacttttaatagttagt

SEQ ID NO: 8937 - DNA, 1606 bp, unidentified
  source 1..1606: mol_type = unassigned DNA; note = element_e072046
  misc_feature 1..3: note = core
  misc_feature 4..273: note = LE
  misc_feature 274..1485: note = CDS
  misc_feature 1486..1606: note = RE
  misc_feature 16..293: note = bridgeRNA
actactacaatgtgtttagtggttgatattcctatcaaccagataggatgtttaccatcttgttgcttaagctgttagaatgagaaggcaatcggtctggccatccttccaaaggacttcgcgtccgtgggttagtctgccaaccagccctcattcgcagcgttcgttttacgcaggttgaactcccgttcgtgtgaaacacccagtagattgaataggcaatgagaaaactggtatcgaccattgcgaatatatctaaaaggagcagattacatgaacgcagttggtatcgatgtttctaaaggcaaaagcactgtagcgatcttccagccaggagaacaggtcgttctcgcaccacgtgattttcatcacacccaatctgacatcaattccctgattggtattatcaaggggctggatggagagacgaaggtatgcatggaacacaccggaaggtactatgaaccgatggcctcctggctttccgatgccggcatctttgtcagtgctgtcaatcccattctgatcaaggctttcggtgacgactcccttcgcgcgccgaagactgataaggccgatgcgaagaaaatcgcgcggtatactcttgaccgctggagcaaactgaggcagtatgggcatatggatgaaacacgcaaccagctgaaaacgatgaacaggcaattcggcttctacatggatcagaaaaccgctatgaagaacaatctcatcgcgcttcttgatcagacctatcccggcgccaataccttctttgacagcccagcccgcagtgacggcagccaaaaatgggtggattttgtttatacctattggcatgttgactgcgtacggggtaaatccctccaggcttttacggaacactacaaaaactggtgcaagcgcaaaagctacaatttcagttccacgaaagcaaaagcggtatatgatgcttctactgacttgattgctgtatttccgaaaaacgccaatacgaagatgctgatccatcaggcagtggagatgttgaatcaagcttctaagaccgttgaatctctccgcaccgaaatggatagcacagctgcaacccttcccgagtaccctgtagttatggcgatgaatggtgtcggcgccactcttggacctcaacttatagcagagatcggcgatgttacccgttttgcaaagcgcggttccttaaccgcttttgccggagttgatcctggcaagaacgaatcagggcagtacgctcagaaaagtgtgccgacttccaaaaaaggatctccacatttaagaaaaaccctctttcagatcatggacagtctgattcaacgttcaccggcagatgatcctgtttatgccttcatggataaaaaacgggctcagggcaaaccgtactatgtctatatgactgccggtgccaataaatttctccggatctattacggacgggtaaatgaatatctatccaatctttctgaaagcgaataactaacatcttccatacattcttcaggccagcgtcttacggtggtctttttctgatgcctttaaacttctctttgaaaatctctctgaattcctcattttccccttgactttttatttgcag

SEQ ID NO: 8938 - DNA, 1413 bp, unidentified
  source 1..1413: mol_type = unassigned DNA; note = element_e07f105
  misc_feature 1..2: note = core
  misc_feature 3..7: note = LE
  misc_feature 8..1156: note = CDS
  misc_feature 1157..1413: note = RE
  misc_feature 1179..1413: note = bridgeRNA
gaatgtaatgaacgcatcccaccctataaacgggtgcggtttgcagaaagaagttaggtgtggagcctcacagattttcggcatcaaagtgcccatgatggaaatgaactatattcccgactggagactccacactatgaaatatactcccattggcgttgatatcgcaaaacaccttatgcagatccattacgtagatccacattctggtgagttagttgataagaaggtaaagcgaaatgcttttctgactttcttcagtaatcgtgagccatgtcttattggtatggaggcctgtggtggctcccagttctgggcgcgggagctgaagaaaatgggacacgaagtcaggttactgcagggcaaattcgtcaaagcttttgtcatgggtaacaaaaatgacgtgatggatgcgcgggcaatatggatggccgtccagcaacccggcaagtcagttccggtcaaaagtgctgaacaacaggccattcttgctcttcacaaaatgcgtagccagctcgtgaagttcaggacagcgcagatcaatgcgatacacggcatcctgcttgagtttggtgaaacgattaataaagggcgtacttcgctggataaggctctacctgaagtgcttgaacggttaaaaatcactttaccaccgttctttatttatcagatagaagatcagcacagaaggcttaaagatcttgatgcgcagataaatggcattgaaaagcaactagctgcctgggccaggcaggatgatgactgccagcgactgatgcagatacctggtgtaggagcgttggtcgcaacagctgcacttgccacgatgggtaatacaggtgccttccgttcaggcagggagttcgcagcttacataggactggttccaaaacaaacagggacaggtggaaaaataaaactgttggggatcagtaagcgaggagataaatatctgcgcatgttactgatacatggtgccagagcagcagccctgctgagcaaagaaccatccccgtgggtaacagagttgctcaagcggcggcccgtcagtgttgctgtcgtggcgatggcgaataagatagcgcgaacaatatgggcgctgatccattacaagcggtcctacgataaaggagatatcagcgtgatgcccggctaaactgaatacgctgctgtatataacgagtaacgaaaagttgcgcaggcaaccgtagtgatgacaatgataggtaagaccgtgacttactaaacctgatgtgcctccagagcttaaagctcgtaccgggaataaggggtgagtcagcggattacatcggggccgcagcataaaggctgcaataaggccggatacagagctgcaacctaccgtcagtgttaaaacatcggaagccttgcaaaacgggatgcgttcataca

SEQ ID NO: 8939 - DNA, 1523 bp, unidentified
  source 1..1523: mol_type = unassigned DNA; note = element_e085336
  misc_feature 1..2: note = core
  misc_feature 3..250: note = LE
  misc_feature 251..1420: note = CDS
  misc_feature 1421..1523: note = RE
  misc_feature 10..228: note = bridgeRNA
cttgtataatgaagtagagctataaaagcactatttctgatatatttaattttttaatatataattatatagacgctgtggattagtttttccgtgtatagctttgactattttgttaagggtctaaccatagttctatgtttaattgttaattagttagataacgcttgacgttttatatttagcaaggatacgttaacatagtttttatggatcacaacgtcaattttaataaaaggaagtgataactatgatatttgttggtatcgatgttgctaaaaacaaacatgactgttgtatctttaattctgacggtttaattttagaagaaggtttcactttttctaataattcaaatggatttaataagtttaaagctgctttagcaaaacacagtccaaatttagacaatataaaagtagggcttgaatcaactggccattatagcaataatattgtcaattttatcaaaaaaaacaatctggagttaaaaatatttaacccacttgccgtaaatctttatcgtaaagcattaactttaagaaagactaaaacagataaaattgatgcacaatttatagctcaaatgctcttcagcgatgattcagaaccctacctacctatagattaccacataaatgagataaaatcattagctaggcatcgttatagattggttggtcatcgcggaaaattaaaaatatctttaacacgaattttagatattgcttttccagagctaagtagtatagtttacactatacatcaaaaatcttgttatgctttacttttaaaatttcctacagcagaagagatctcaaaatgtcatttaacaaaattaacgaatattttgtcgaaagcttctaaaggtcaatataacagggaaaaagctaaacaaattaaagaattagctaaaatatcaattggtacaccttatttatctattggatttgaacttcagcaaacaataaggttgattcaaaatatacaatgtgagatagatcttttagacaagaaaataaaagaaatcgttgaagaaactcatacacctttgttgacaattcctggtatttcttatgttttggctagtataattttatctgaaactggaaatattaaaaacttttcaaattcagggaaactcttagcatttgccggtttagagccttctacacatcaatcaggtaaatacactgccacaatgtcaagaatggttaagagaggttctaaatatctgcgctgggcgctcatgcaagcagcacgaacagttagtgaaagagttccagtcttcaaagaatatttagcattaaaacgatctcagggtaaacattatttagttgctatgagtcatgttgcaaaaaaattattaagagtgatatttcatttattacaaaacgatgaaaaatttgtaagcgcttgattacaaaaaatttgaaatatgatagctctttttgtaatgtgattttttcaaatttcaaatgaaaaaaatattaataatttttacttgacttcatatagttagt

SEQ ID NO: 8940 - DNA, 1575 bp, unidentified
  source 1..1575: mol_type = unassigned DNA; note = element_e0865d9
  misc_feature 1..2: note = core
  misc_feature 3..636: note = LE
  misc_feature 637..1446: note = CDS
  misc_feature 1447..1575: note = RE
  misc_feature 13..254: note = bridgeRNA
tcataatttacttgtatgatgttattagaagcaaaaacaacatacttcctttctttttttgtttcgtggtttaatacattcagatactgtgacttttgatttttttctgtagctttgactactcaacaggagtgtattgccatctcttttatctgaattgtttattagctggatgttgccagagcgtttgctcagagtacttatttcaatcaagtctacgatgataattgttggtggataccacggtatcagactttatgaaagggaggtacaacctcatgatttacgtcggcattgatattgccaaacttaaccatttcgccgctgcgatttcttccgacggcgagatactcattgagccgttcaaattcacaaatgactatgatggcttctatctgctgctttctaaactggcaccacttgaccagaacagcatcatcataggtcttgagtcaacggcacactacggtgacaaccttgttcgttttcttatcagcaaggactttaaagtgtgtgttctaaacccgattcagacttcttctatgcgtaaaaataatgtacgcaagactaagactgataaagtccgacacgtttgttattgctaaaacccttatgatgcaggactccttacgattcatgaccctggatgatctggattatattgaactcaaagagctcggcagattccgtcagaaactggtgaagcagcgtacccgtttaaaaatacagctgacttcttatgtggatcaggttttccctgaactacagtatttcttcaaatctggcctgcatcagaattctgtctatgccctccttaaagaggctccgacaccaactgccattgcttctatgcatatgacccatcttgctcaccttctcgaagttgcttcccacggccatttcggtaaggagaaagccagagaattaagagttctcgcacagaagtctgtcggtgtcaatgacagttctttatctattcagataactcacaccattgaacagattgagttactggatagccaattgtttcacacagagcttgaaatggcaaatcttgtcacctgcctgcactctgtgattatgaccattcccggaattggtttcatcaatggcgggatgatccttggtgagattggtgatatacaccatttctcagaaccaaagaaactgcttgcgttcgccggactggatccatcggttcatcagtctggtaatttccaggcacagagaaccagaatgtccaagcgaggttcaagggtattacgctatgcccttataaatgcagctcacaatgttgttaaaaacaacgctactttcaaggcttattatgatgccaagagagctgaaggccgaacccactacaatgcccttggacactgtgctggcaagcttgtcagagtcatctggaagatgctcactgacgaagtagaatttaacctcgaataagaggtctgcataccataatcgatagattttgaaaaagggcttttagggagctttgttaaagttaccctttttacccgaaacaaaaaaattgaatttctggctaatttatacttgacttttcatagctgg

SEQ ID NO: 8941 - DNA, 1663 bp, unidentified
  source 1..1663: mol_type = unassigned DNA; note = element_e095c79
  misc_feature 1..4: note = core
  misc_feature 5..299: note = LE
  misc_feature 300..1577: note = CDS
  misc_feature 1578..1663: note = RE
ttcataaaaatctccattccgcgcgccttcgggcgcggcacaaatagtaatgaaagattttcaaaacctatactccgtgagataatgcttgtaagaagctatactacaaagcacgggaggaggagttgtaaattctttctcgttttagacagcataaaaatcagtgtatgttctgccttttcaagcacaaataagtggtactacgagtccgtacactaagaattgttttaacgccttggttaaattgtgtggcagttcagtcaatggcttcttatcttacttaagaaaggagtatggctatgaaagttacttaccaaacctgttgtggtgtcgatgttcacaaatcatttctcgttgccacaatcattaaaacttccggtggtatcgaacctgactaccagaaaaaacgtttctctacgttcaacaattccattcttgaattcaaacggtggcttcttaacaatgattgccgctatgtttgtatggaatccactggcaaatactgggttcctgtctttaatcttcttgaagatgaaatccatgttacgatagctaatcccaaatgggtaaaggctgtaaaaggtaacaaagatgacaccaaggactctaaatggattggagatttgttccgtctcggacttgtgaaaggcagttatattccctgtaaaaaaatccgcgttttgcgtgaatttacaaggtatcgctataaacttgtttcctgccgttccagtgaaaagaatcgatatcagaatgctcttactgtgtgtaatattgcattagattccgttgtatccgatatctttgggaagtcatctacatccattgttgactatctgcttgaacagtcgggcaattctatcgatcatgaagaaatcgcatcaaaacttcttaggagcctcaaatctaaagaagatgctgttatcgaatccattgaaggatatcagatgactgattcccagaaatatcgtatgcgcctcgtccgcgcacatatggattatatcacagctgaaataaatgatgtagactctgaaatagaatctatcatttcttctgatcctgattacgaaaatgctatccagttactaatgactattccgggtgttaaacgtgatagtgcgatcactatcatctccgaaataggtattgatatgtctcaattctgtacctctaaacgtttgtgctgctgggctggattagttccaggaagcaacgaatctggtggaaagaagaaatctgttcggattacacgtgctggagtttacctcaaacctgcattagtgcaatgcgctcatgcagccgtcaaatccgatcagtctccttactacaaaaagaaatatgaatcacttatgaaacgccgtggcaagaaaagagctatcgttgctatcgctcgtatgattcttacagctattttccagatgttatctactggtgaagcgtggaatccgagtgacttatacaaaatcgatatgccagaagctcttgttgaaaagcaaaaagcaaaggctatcaaacaggctatgaaattacttgaacgcgaaggcttatatcctccgccacaagaacctgtagcctcgtaattattgttaataatatacttttttaaaagttgtcatttgtgacagcttattcaagtgcgccatttattggctgacctctactttct

SEQ ID NO: 8942 - DNA, 1573 bp, unidentified
  source 1..1573: mol_type = unassigned DNA; note = element_e09ce09
  misc_feature 1..3: note = core
  misc_feature 4..275: note = LE
  misc_feature 276..1448: note = CDS
  misc_feature 1449..1573: note = RE
  misc_feature 13..256: note = bridgeRNA
cttatataatatatttaggttaataaaggcaacctataatcctttattgacagattaattattcagaacactgtataattaatctattagttagagtgatgtcgttttctccttgagattgtaatctcgtacttgaaagactgacacctctagctgattaactgtttacgaataagttggatgttggctttttaaagcacttcgtatctgcaataaggcggtaacgtttttcagcgtagaggaacctatctaaaattctttatctaggtgatcatatgttttatcttggtattgacattgggaaaaacaatcatgtggcttctttgctggatgaaaaaggcaaagtagtttttaaagctttttctttctctaattccacagatggtgctaactgtttaattgaaaaaatttattcatattcgtctgcaatggaaattggcatggaggccaccggtcattattggctggcgctttattcgttcctgtttaaacaagggtttataattcatgtcatcaatcctatccaaactgatggctggcgcaatgccactgaaatcagaaagcataaaacggatgtgattgattctgtcctcattgccgactttattcgatatggtgaatttcttgagacatcccttgccaatgaggatgtcctgtctttgcgtaatttatcccggtttagaaattaccttgtcagttcgattggtgatctcaaaagaaaaaccatttgtatccttgatcaaatctttccggaatatcaagctgttttttccaatgtctttggcaaaacatcaaaagaaattctcttgcagttcagcacaccttcagagtttgaatctattacggctgtccaattagaatccctgctcaaagaaataaatcttaaaaatttcgctgctaaaaagattcaagagatttcttctgtcgctaaaacttctttcggtatcactttcgggctggacagcatgaccctacagcttcgacttttaattgagcaaatgaatttcatcgaaaagcaagttaatgaaatagaacgccagaccaaaacattacttgataaactcaactcgccaattaccacaattccaggtattagtactgttattggtgcaaccattctcagcgagattggcgatatttcaagatttagcaatccttctaagcttgttgcttacgccggtattgatgcttctatacaccaatcgggcaattaccaaagttcaaataacaaaatgagtaagcgcggttcaccttatcttaggacagcattatttcgtgctgcactcattgcatctactcatgatccggttttcaaagcctattatcaaaagaaacgttctgagggaaaacatcatttgacctgccttggcgctgtcgcccgcaagctttgctatacgattcatgctgtattaaaaaacaactgtgcctataaagtacaacttccctaaacgttgcgctttattaaatagaccaattttttgacctgctacatacaggtctatttcttgtgcataaatattaaaactgaacattgatatttttagattttctctattgactttttatagttggt

SEQ ID NO: 8943 - DNA, 1214 bp, unidentified
  source 1..1214: mol_type = unassigned DNA; note = element_e0a72cb
  misc_feature 1: note = core
  misc_feature 2..211: note = LE
  misc_feature 212..1183: note = CDS
  misc_feature 1184..1214: note = RE
  misc_feature 34..201: note = bridgeRNA
tcttaagtttacaattcattaaatttaagcataatcaagaaaagacaaaagagaggaataaggttaatatatacgcagaagcctagacttcgtcaacattgaaaatcccctctcttttctacacagatttcgtacagttctatgaggctttggacctcgattttaagtcgttgaaactcgcgtagttcgtcctttcaaaaatcattttcttatgaataaagatatcaaatattttggaatagacatcagccatctggttttcgatgtcacagactccaatggcaattatcatcagttcaagaacactcccatgggctttaagaagtttgaaaaacttttggatttcaatagtcattgcgtgatggaggcaacaggttattaccattaccagctggcgtattttctactggaatcaggcatcaaggtatccgttgaaaatcctctgtcggtaaagcggctcatacagatgaagctttcgaagatcaagaccgacaagagcgattccaaacttatctgcgagtatgcagaacaggtcgaagtgaaactttggaaaggaaattccaagcatcagacagagtgtctccagatgaccaggctcctttctgtatatacaaaacagagcaccatgctgaaaaataagttacatggcgagaaggtccttggagatccaagtaaatcagttttgaggtccttgaaacgaagtctgaaacacgtccagatagaattaatggccttggaaaaagaactgttggtaatggtcaaacaagtacaccaaggagtccttacgcgcctaaagagcatacctggggtcgggaacaaaacagcattgatgttggtggttctcaccgatgggttcgagcgttttactagcggaagtgagctgtgcagttatgccgggctgacaccagtgatcagaaagagtggcagcagtgtaaatggacgtagcaggatcagtaaaatgggcaatcaaaaacttcgaaatttattgttcatgtgcagctttacagcctgcaaatacaacaaagcatgtagggaaatttatgaacgaatagtagcaaaggggaagagcaaaaaactggcgttgatagcagtgtgcaacaagctcttaaaacaggcctttgccatagccaaatcgggattggtatatgatggggctcatagaagtactttagttgaaaattaatacatttttacttgttttttagcacagtact

SEQ ID NO: 8944 - DNA, 1229 bp, unidentified
  source 1..1229: mol_type = unassigned DNA; note = element_e0a7886
  misc_feature 1..2: note = core
  misc_feature 3..242: note = LE
  misc_feature 243..1202: note = CDS
  misc_feature 1203..1229: note = RE
  misc_feature 52..212: note = bridgeRNA
ctggtatgttgtctacatccactcgatgcccattgaacactgggcagtggaagtcgaagccgaatggggggacgagaccgtttaacgcttggacttcgggagtccggccggaagtaggggtccgcctcctgtttgactttcctcagttcgaatagtcacctgaacgcacgccgcattcaccagccagaacaggaaagtcgtcggcttcacgcggttttttttctccttgagggacgcgcttcatgccaggcaccttcatcggcgtcgatgtctcccagggccacctcgacgtgcacgtccgccccgccgcgctccgccgccgcttcgccaacacggccgccggcatcgccgagctcgtggcctgggcccggccccacgccgccgagcggatcgtctttgaatcgacggggccctaccagaaggccgccgtcggcgccctgctggccgaggggctccccgccgccgtcgtcaacgcccgccaggtgcgcgacttcgccagggccatgaactacctggccaagaccgatgccatcgacgccggcgtcatcgcccacttcgcggaggtggccaccacgacggtgcggcccctggagccccaggaaatccgggacctccgcgagctgtacgaccgccgcgggcagctggtgcacatgctggccatggagaagaaccagcggcactccgcgagcgtcgcccgggcctcggcccgggtcctcaagagcatcgacaagcatatcgcctacctcgaggcccaggtccacgagctgaaacgacgcatggaccggctcgtcgaaggctgcgccgccttccgggcccgcgacgagatcctgcagaccatcaccggcatcgggccgcaggtgtcccggacgctgctcgcctacctgccggagctggggaccaccagccgccagcgcatcgcggccctggtcgggctggcccccttcaacgacgacagcggcagccacgcgggccagcggcacatccgcggggggcggagcaaggtgcgccggggcctgtatcaggcggcggtcgccgccatccggcattgcccctgcatgaagggggtctacgccgcgctgaaggcgcggggcaaggcctcccgcgtcgccctcatcgccgtggcccgcaagctgctggtgctggccaacgcgatgatccgtgacatggtgccgtacaaggccccggcaaactccgtttgctaaaaaatcccttgacaaggaacatagtca

SEQ ID NO: 8945 - DNA, 1583 bp, unidentified
  source 1..1583: mol_type = unassigned DNA; note = element_e0ab6db
  misc_feature 1..2: note = core
  misc_feature 3..285: note = LE
  misc_feature 286..1479: note = CDS
  misc_feature 1480..1583: note = RE
  misc_feature 13..262: note = bridgeRNA
ctcgtatgatgaagttaggtttttaggaaagggatttacctataaacccaagggtattttaactgtagtaagaatactcttacttgtagatagagtgtcaccgaccacctccctgaatccttgtattcgtcctgaagactggtgcctctgtctaataagtggtttacgaatgagttggatgttgatgaccactggtcattcttcgtatctcttacgaggcagtaacgcttattagataggaggatacacggctatctcacatttatgaaataaggagtgaatctcatgtattatatcggtattgatatcgccaaattcaagcactatgcttccattattgatcagacaggaaaaacactaacaaaacctatttcatttcaaaatcatacagagggtggaaataaacttttagattggatacatcaatacgtcgacacccctactgatgtattaatcggaatggaggcgactggacactactggttagctctctattcctttcttttagagaagggattttctgtcattgttttaaatccccttcagacaaatgcttggagaaaaggaacagaaattagaaaacgtaagactgattccattgacgcaaccttaattgcagacgtgattcgctttggacgatttacagagacacctttagctaatgaaaccatgctggcattaaaacaattgagtcgtttcagaagctcccttgtacatagcgtgagtgatttaaaacgaaaagctattgtggtattagatcagacatttccggaataccatacggtattctctgatatttttggcaaaacatctgccgaagttttaatggaatatactacccctagtgattttgaacatgtctccgtagatcaattaactgaaatgatggaaaaagctagtcgcaagaagattggcgaaaataaggcaaaacatctccttcaaatcgcttcacaatcctttggtgtgacattttgtaaagatgctttttcttttcaattaaaaatgttactcgaacaaattaaatttattgaagagcaaattaaacattgtgaacaacaaatgggtgagtacttagttgaactgaatacccctatcacgaccatccctggaattggctccattttaggagccactattttaagtgaaattggtgatattcatcgttttgataaacccgctaaacttgttgcttatgcaggaattgatgcctctatctctcaatcagggcaatacgaagcatcgaaaagtagcatgtctaaacgcggttcctctcaccttagacgggcattatttcaagccgccatttcaggatatcggagcaatccagttttaaaagccttttatgaaaaaaagagagctcaaggaaaacattattacgtctgtattggagctgtagctagaaagttgtgttacattatctatgccgttctgaaaaataataaaccttacgagattcctcatcatacacccgaaagataaccttttcatttttttaacttcttaaggtttatttggtttgccttttttctgaaacaacatcaaatattttcattggatttcacccttgacttttcatagttggt

SEQ ID NO: 8946 - DNA, 1406 bp, unidentified
  source 1..1406: mol_type = unassigned DNA; note = element_e0b5764
  misc_feature 1: note = core
  misc_feature 2..229: note = LE
  misc_feature 230..1393: note = CDS
  misc_feature 1394..1406: note = RE
  misc_feature 13..244: note = bridgeRNA
ctacttagagacttcctgcaggatcgatgtccggccagactcggtccaggtgctcggcgagacgctcccacattgcggctgcccaccggtgtcattggtgtggctctctcatggcctgcggtctcgccgagcaccgcgcgaggagaggctggaaaggggtttgtcctgctcaaagtagcggtgccctccttgctgacaactccatccggttcagccaagggaggcgccgatgagcgtgatcatcgggatggacccgcacaggcgttcagccaccatcgaggtcgtcgacgaacgcggccgggtgctcgcggtgggccgctttgggactgacaaggccggctacgccgacatgctcgccgcgggccgcaagtacgccgatcgggtctgggcggtcgagggctgcaacggcatcggcaaacacatcgcccaccgcctggtccacgacggtgagacggtgctcgacgtgcccgcgaaactgtcggcgcaggttcgggtgttcgccaccggcaacggccgcaagaccgacccggtggatgcgcactcgggcgcgatggtggcgctacgcagcccgaatctggtgcaggttcaggtcgacccggacctgcaggtgatgggcatgctcgccgaccggcgtgacgagctcggccgcgcccgcacccagaccatcaaccggctgcaccggttgctgctggaactgttacccggcggggcgaagaagttcctgtccgcgccacaggcccgcgcgttgatcgcgacggtcaaaccccgcgacatcgtgggcaagaccagacgccgcctcgccgtcgagctgatcagtgaactcgagggcatcgacaagaagatcaaatccgcggacaaggacctcaaagccctggtcctcgcccgcggctccaccctgatggagttgcacctcatcggcccctcaggcgcagcccgcctactggcagacgtcgcagacatcagccggttcgccgaccgcgaccggttcgcctcctggaacggcaccgcacccctggacgcctcctccggcgaccagaagcgtcaccggctctcccgcgccggcaaccggcggatcaaccggactctgcacatcatggccgtggtccagctgcgcaaccgcaccgaaggccgcgcctacttcgacgcgaagaagggcgccgggaagacgtcgatggaagccatgcgcgcgctgaaacgccgactgtccaacgtcgtctacgcccgcatggtcgccgaccagaaacgcaggcaggcggcggatccgggagggcactcggggacgactctgcaatccagcgtgaccgacctgaccccggacatcggcccttcggacaagccacttcccggacccgccaccagccagcctaaacccgccctccgagcggtgtcttgacataaaggggtgc

SEQ ID NO: 8947 - DNA, 1168 bp, unidentified
  source 1..1168: mol_type = unassigned DNA; note = element_e0c1107
  misc_feature 1..2: note = core
  misc_feature 3..178: note = LE
  misc_feature 179..1147: note = CDS
  misc_feature 1148..1168: note = RE
  misc_feature 34..199: note = bridgeRNA
cttgcatcttgaaaattggttaaaataactacaattagatttggcacagtgtatgcagcccgattacccctggggttaaaaagcccgttcgaaagcgactggcgcatacactgagcctctcatctgaaacccgaacagttgtccgtactccataacgcatttgcaaggatgggtaataatgagtctgccaggtccactctgtgtaggtatcgatgtttctaaagcaacgctggacattgccgccagcagcgcaattgagcagttttcggttgccaatgacgctgacggctttgatgccatcattgctgagctgagaaagcacaccgttgcgcttgtgctgatggaagccaccggaggacttgaagctgccgtagcctgtgcgcttcaggccgaaggttttgagatcgctgtggtcaatcccaggcaagctcgcgatttcgcccgtgcgatgggatatctggcgaagaccgaccgcattgatgcgagagtgcttgcccagatggctgaagtcattcatcgccatcctgaacgggagcgctttattcgggctttgccggacgtagaacgtcaggttctcgctgccatggtagttcgcagacggcagttgatcacgatgctcgtcgctgagcgtaaccggttgcatcctgctcatcctcaaagcagaaaaagtattaatatcatcatcaaagcgctggaagatgaacttgcgcggatcgataaagatatgaacacccatatccgaaaccactttaaagaactttctgagcggttgaacagcattaagggtgtaggcaccatgactgtggccgcactgctggctgaggttccggaactgggtcggctttcgggacgagaaatcagcgcgctcgtgggcgttgcgccggtaaaccgagattctggtaccctgagaggccgacgaaccatctttggtggccgggcgggagtgcgaaccgcattgtacatggccgcactcgtcgcaacccgattcaatccagtgataaaagcgttttacacgaggctggttgcggcaggaaaacccaaaaaggtggcgctggttgcctgtatgcgcaaactactgaccatcctgaatgcgatgctcagaaagaacgaaggatgggatgattcgtaccatcatatagctccataattttatcgttcaagacagttg

SEQ ID NO: 8948 - DNA, 1176 bp, unidentified
  source 1..1176: mol_type = unassigned DNA; note = element_e0cabf5
  misc_feature 1..2: note = core
  misc_feature 3..205: note = LE
  misc_feature 206..1153: note = CDS
  misc_feature 1154..1176: note = RE
  misc_feature 3..181: note = bridgeRNA
cttgtatggtaggacttgaagggaggaggagggacaaagtccgcttctgactgttcgcgcagtacagaccgtgggagatttcacccctcctcctttcacccaagcgccgataaagaatgcatctggcctagaccgacgataggaacaagcctgcgcctctgggtgaacccttcaagtgttcaaaccttagcccggaggattttcaatggcaatgcccgtcgccgtcactcagccgatcgtaggtgttgatgtcgccaaagacgagttggtgatttatcacgccgaatccgatcgactcgaaacgatccccaacactaaagctgcgatcaagaaatggctcaaggcattgcccacgccggtggatgttgccatcgaagccaccaatatctatcaccaggaattcgccgatctggcttatgcgcaaggttgtgtgatctacatgatcggcggttacgagctcagtcattaccgcaaaggcgtgaaagttcgcgcaaaaaccgatgcgttggatgctcggctgctggctcgttatttaaccaacgaaggccaccagctgcacccttggaccccgccatcgcccctttactgccggcttataagcctcttccggcgccgggcagctttggttcaggcgcgtgtcagcctcacgcaaagctgggcgaacgaaccgttgctcaagagcgccttcaagacccagatagctgccatgcaaagactggaagttttacttgagaaaacaatccagacgcagttggaagaagctgatttgggcgcacagctcaagcgctgcatgaaagtcgaaggcatcggtttgttgagtggcgcccgtttactcacgtcgtttcagcgcggggacttcagaaatgccgatgcttttatcgcgtttctgggcatggacttgcgcatatcggattcggggaaaaagaagggacgccgctgtctgactaagcgaggtgacccggaggcgcgtcgattaatgcacaacgccgccatgtcggcgagccgcacagcggcctggaaggggttttatgaggctctaagagctcgaggattcagcacaacccaagcattggtggcactggcccgcaagcttgcccgtgtggtattcgctctgttgaagaaccagagcgaatacttgccaaaaggcatttaagggctagccctgcaccatagaat

SEQ ID NO: 8949 - DNA, 1638 bp, unidentified
  source 1..1638: mol_type = unassigned DNA; note = element_e0caf22
  misc_feature 1: note = core
  misc_feature 2..207: note = LE
  misc_feature 208..1458: note = CDS
  misc_feature 1459..1638: note = RE
tcgtataatctaaataccaaccaaatcgataaaataaggttgggttcaataaagactcatagttttcacaaaagctaacagcaaacaagttttttcctttctggacatttgtaccagcacaataaacgtcttgtgttagcttttaatactcatctataggatgctaaggagaaacgtgattgtttctaccttgtataacacgaagctatgagaactttaaaattaacacacaaggggtttaaaatgtattatgttggaatcgatgttgctaaagaaaaacattatgtatgtatcttagatgattcaggagaaatagctactaagccattttggatatacacagatattgtagggttaagagaactagtcaaacgattagcagatgtctctttaaagaatgatgactttcttataggggtagagtctacaggagcatattctgagaatctgtatgaatatattacagacagtgattataaggttgtcttgttgaattcttaccaaactgctaagtacagagactttagtactttgaagaaaatcaaaaatgacactattgatgctttggttattgcccaacttttacattcgggtaaatacaaggagagttacatcagtgatgatgcctatcattcagttaaagtcttgggacgtgtaaaaggctctttagacaaaaagattaagactattaagagagaaatctctaccgtgatagctactgttaatcctgagattacaaaagtctttcctaatatttttactaagacagccttagaagtgattaaggcttatcctactgctacggatatagcacaggctacgccaaagaagctgacccgtctgtttagacatattaaaggtaacaacttctctgaagagaaagcaaagctcttaatagaactagctaaaacttcagtgtatgctggtcgtgcctgtgatgctagagcatctctactcagttctcatattaggatattagagctttattgtcaagagaagaaagaaattgaagcccaaatcaaacaatttattgaagaagagattgattctattgataatcgtgtagagaaccttaaaagcataccaggagtatctgacaaaactatcgcctctatacttggagagtgtggtgaccttagacgctttacttcagcaaaagcattcataggttatcttggtctttatcctacacagtatcagtctggtaactctttatccgttggtagactggcaaagcgtggtatacctattgccaaacatgctctttatatggctactgtgggttccgtattgcataacccacaactcaataaactttttcatgacaaagtctcttctggcaaatccaagaaagaagctttgatcatactctccaagaagatagcaacgattatgtattccatagtaatatacaacaaaccttatgatgcccaaagagtatttatccccaacaggtaaatatcctatttgttagttttagcacttgtgaaaacaatgagtttttaatgaacactgaccaaatattgtttagtttttatttgatcatttgaatattcttttcaaaatactcaaataatccaacaaaatagctctgtctaaaaaacagccttaggttttaagctgttctttataggatgg

SEQ ID NO: 8950 - DNA, 1427 bp, unidentified
  source 1..1427: mol_type = unassigned DNA; note = element_e0d03bc
  misc_feature 1: note = core
  misc_feature 2..220: note = LE
  misc_feature 221..1243: note = CDS
  misc_feature 1244..1427: note = RE
  misc_feature 16..232: note = bridgeRNA
ctggttgagacttcgtggcagatgctgcgctcagttcgtagcgtttagaggtccggacggggtagctcgctaagtgccagccgtcggctccggtcgactggctttctaacgaagagcttcctgtccggcccttgccgcgagtggctcgaaagaggaacaagcaccagatccgaaccaggagtgccctcgcggttcctaaccgaccacgaaggaggaactgatgacggtgatcatcgggatcgacccccacaaggcgtcccacacggcagtggccatcggatgcgatgaacgcccactggccgaggtccgtgtccgagcgacctgccaacagaccgagaagctcttggcctgggcgaagcccctcggtccacgcacgtgggcggtcgagtcggcgggaggaatgggctatctgctctcccagcagttggtgagtgcgggcgaggacgtggttgacgtgccggccacgctggcctcgaggatccgggtcctcggcaccggacggtccaacaagaacgacccgaacgacgcgctgtcggtggcgatcgccgccctgcggtcgccggggctgcgttcggtgcgggtggccgaccacggcgagctgctgcgcctgctggccaagcggaaccatgagatcgggaggcttcggaacatcatcgtgtcccgactgcacgccgccctccagaacctgtcaccaggaggaatcgccaaggaactcaacgcttccgacgccattgccctgctcggcgcctatgaaccggtgaccccggtggagcacacccgctatgagctggcgctcgagctgctcgaggacgtgaagcgcctcgacgtgcagctgaaggcctcccacaagcgcatcaagacggcggtccaagcctccggcaccacgctcaccgaactctatggcgtgggtccgatcctggcggccgagctcatcggcttctccggtgacatccgtcggttcacgagccgcgatcagttcgcctcctatgcgggcgtcgctcctgtcgagctgtcctcgggaggtcgcaccgtgcaccggctgagccgtcgaggcaaccgtcagctcaaccacgccatccacatggtggccatctgtcagatccgccagaccaactccgaaggtcgcatctacttcgagaagaaggtggccgagggcaagaccaagcgggaggcgatccggtcgctcaagcggcacgtcgccaacgccgtctatcgccagctgttgctcgacgccaccaagtaggggtccgggaggacaagcgggaacgactcgtggcctgcgtggtcggctctgcaccctggcggccggctcttcggcgaagtcactcccggacccaccaaaaccttaggcatctgcgccgtcgccggcacgtgcgttcatcgcgcccggaaggcccccaaatctccctcttgactcaaagaggatt

SEQ ID NO: 8951 - DNA, 1608 bp, unidentified
  source 1..1608: mol_type = unassigned DNA; note = element_e0d216d
  misc_feature 1..2: note = core
  misc_feature 3..274: note = LE
  misc_feature 275..1486: note = CDS
  misc_feature 1487..1608: note = RE
  misc_feature 15..294: note = bridgeRNA
ctactactatgtatttagtggttgatattcctgtcttccagacaggatgtttcccatcttgttgcttaagctgttagaatgaacgggcaatcggtctggccaccgacctcttggaccttgcgtccgaaccccagtccgccaaccagcccctcattcgcagcgttcgttttacgcaggttgaacttcacgttcgtgtgacgcccagtagattgaataggcaatgagtaaatctggtatcgaccattgctaatacaatctcaaaggagtagagttcatgaacgcagttggtatcgatgtttctaaacgcaaaagcactgttacgatccgcaggcccggagatcaggtcgtcctcaagccctgtgacttccggcatacacagtctggcattaatgctctgatccagatcatcagggacctggatggcgagactaaggtctgcatggagcacaccggaagatactacgagccggtcgccagatggctctctgatgctggtatcttcgtcagtgcagtgaaccccatactggtcaaacagttcggcaatgactctctccacgcacccaaaacagataaagctgatgcaaagaaaatcgctcgctttgcccttgaccgatggccaaatctgaagcagtatggtcctatggatgaaatacgtaatcaactaaaaaccatgaaccggcagttcggattctacatggatcagaagacagccatgaagaacaacctcattgctcttctcgaccagacctatccaggcgccaatgacttctttgcttgccctgtacgcagtgacggcagccagaaatgggtggactttgtccgcacttactggcatgtcgactgtgtccgcggaagatctctgaaagcttttaccgagcactaccagaactggtgcagacgcaagagctataacttcagtgccgctaaagcggagcagatttaccgtgcctcagctgacctcatcgcagtgttcccgaaagatgtccgcacaaagagactgatacagcaggcagtggacatgctggactcgatttcccggacagtggagacactccgtgcggagatggataaaacagcttccacgctgccggagtatccggtcgttatggcaatgaacggggtcggcccgaccctgggaccgcagctcatggctgagatcggggatattacacgctttgaaaaacgcggatcactgactgcctttgccggtgtcgatcccggaaagaatgaatctggagactacgtacaaaagagcgtgcacacctcaaagaaaggatcccctcaccttagaaaaacactgttccagatcatggagagtcttatacagcgggcacctgcggatgaccctgtttatgctttcatggacaagaaacgggcccagggaaagccgtatcatgtgtacatgacagcaggtgccaacaagttcctccggatctattacggccgggtaaaagaatatatagccgggctgtcagaaagcgattaatgtgaacactcagccattgttccaggccagcgcattgcggtggcctgtttgtggtactataaatcaggtctgcatgtaaaccgggaaatacccaaatttctacttgactttttatttgcaga

SEQ ID NO: 8952 - DNA, 1305 bp, unidentified
  source 1..1305: mol_type = unassigned DNA; note = element_e0d4df0
  misc_feature 1..2: note = core
  misc_feature 3..68: note = LE
  misc_feature 69..1085: note = CDS
  misc_feature 1086..1305: note = RE
  misc_feature 1087..1299: note = bridgeRNA
ttaattagatggtccgcctcacctctgagctatgcttagagggtggctaaacaaagaggcgaaccatcatgtttaatattaaagtcattgggatcgatttaggcaaatcttcttttcatcttgttgctcatgattatgccggacgagagcaatatcgaaaacggcttacccgagttaagttacttgagcatcttgcgaatattccccgaactattattgcaatggagtcttgcggaggctctcattggctagcacgtcagtgtcaaaagtttggtcatgaggtcaagctcattcctcctcaatatgtcaaaccttacgtaaagaccaataaaaatgattacattgatgcggatgctattgccgaagcggccatgcgcccaaatatgcgttttgtaagtattaaaacagaatcggctcaagtgatttctgtaattcaaaaaatacgctctggctatatcaaagaacggacagcctgcatgtctcgtattggtgctattttattagagtttgggctaagccttccgacaggtcatagcaaaatgaaatctttgttccagtggctggcagagaaaaatgtcccattgccaccaatgctcatgcaagagttgatagaacatcatgagtattatcagtatctcaacgaacgaatagttaagcaggatgagaaacttaaaaaattggttgatagcaacagccatgcccaactgcttatgtcgataccaggagtgggtacattaactgccgcccagtgcctatctgatattccgaacattaacgagttcaaaaatggacgacatttagcggcttggctagggttggttcctcgtcaatattccacgggagggaagcctaccttgctgggtattagtaagcgaggaaataagtccctgaggacactctttattcatggggcaagagcgattctatcgaggttagacaaagctgaatctgtgtttgggcagtgggtgatggagctgcgagccaaaaagccatttaatgttgcggtggtggcactagcgaataagttatcacggatagcttggtcagttttaaagacccagaaagcgtttgaagtacgattataacccgagtttgcagatgataaataagatgacagaacggttagaccactagattgaagacctgacacaaaaaacagcagagagtgctattggctttttgaggacaatctagcgcggatctcatcgtggagcgaggcgaagcctaataacgactccgaatacattagcgcaaaccaacctcgttatcgaaaatatcatttgcaataacgaggcggaccataca

SEQ ID NO: 8953 - DNA, 1187 bp, unidentified
  source 1..1187: mol_type = unassigned DNA; note = element_e0d72ce
  misc_feature 1..2: note = core
  misc_feature 3..206: note = LE
  misc_feature 207..1184: note = CDS
  misc_feature 1185..1187: note = RE
  misc_feature 37..193: note = bridgeRNA
tcctttagatttgtaaaagaaatcaatacatttattaacaagagaaaagtgtttaagtaaactaagattcactcagagaaaaactcatagttcgattaagacttaaacactttcttatcaaaaactcagatagaaattcgggattggagcccattattaaggagttgagatgatgataagtttctctttattaatcaaacaaatttatggaaaaagtttttattggaattgacattagtaagctaactctggatgtttttgttaacagttgctctaaaacacaacattatcaaattaaaaattgttcaaaagcgattaaaaagttttttaaaagcttctccaatgatgcaaataccgttgtaggcatggaaaatacaggaagatacaattttgaactgtacgaagttttaagtagtatgaacattccggtttttgttataaacccacttcatttaaagaaaagcatcggtcttttaagaggtaaaaatgataaattggacagtcaaagaatctgtgcgtttttggagaaaaattacatggatctacaaccgtggatccctaaatccttggatattcaaaaaataaacttacttaatacggaacgcagacacagagtgaaaataagagcaggtttattgagacagatgaaagatttaagctttcttaaaaatcatacagataaggaaattataaagcttaacaagcaattgattttacttttagataaacagattaaaacaattgaaaaaaagattgtagagattattgaatcaaacacagaactaaaggatcaatatataagaatccagaccgttccgggtgttgggagagtattggccactatgctcattgttaagaccaatgggtttacggaaattcaatcggcaagaaagatggcttgctattctggtgtagttccatttgatcatcgctctggttcgtcaatttattataaacccagaatctctacaatggctgataaagaactaaaaaagattttacatttagctgccttgagttccataagattaaagaatgatctcgctttatattttcaaagaaaagttttagaagggaagaataagatgtctgttttaaatgcaattagaaataaaatcatacacagagtttatgctttgataaaaaataattctgtgtatgaaaataacttgcagatgtcatagaaa

SEQ ID NO: 8954 - DNA, 1419 bp, unidentified
  source 1..1419: mol_type = unassigned DNA; note = element_e0d9c0f
  misc_feature 1: note = core
  misc_feature 2..87: note = LE
  misc_feature 88..1119: note = CDS
  misc_feature 1120..1419: note = RE
  misc_feature 1179..1412: note = bridgeRNA
atgggatggacgcccccacctgcaacggcatcgatgtgccaaagtggatgcgtcactgcagccacttgaacagagaggagcgtccaaatgaaggttacgaccgttggcatcgatctggcaaagaatgtgttccaggtgcatggcgtcgaccagcgtggcaagaccgtcctgcgcaagcaactcaagcgtgcccaggtagccgccttcttcgccaatctgcccgcgtgcctgattggcatggaggcatgcggtagcgctcatttctgggcgcgcaagcttcaatgcctcggccacgaggtcaggctgatggcgccgcagttcgttaaaccctacgtcaagaccaacaagaacgatgccgccgacgctgaagcgatctgcgaagccgttgctcgacccaacatgcgcttcgtgccaatcaagaacgtcgagcagcaggcggtcctcgcgctgcatcgcgtacgccaaggcttcgtcaaggcccgcaccgcacagagcaaccagattcgcgggctgctggccgagttcggcatcgtgatccccaaggggctctcgcacctctcggcgaaagtgccagacctgatcgaggatgccacagtcgagttgccgatgcccttccggctcctcgtccagcgcctgctcgagcatctgaaggaactcgatcggcaagtcggcgagatcgaggcccagatcaaggcctggcatcgcgacaacgcactgagccgcaagctggagcggattcccggcatcggcccgatcacggccagtgcattgctggccaccatcggcgatgccaagtgcttcgaaaatggtcgccagctatcggcctggatggggctcgtcccagcccaaagctccagcggagggaagcacaacctcttgagcatcagcaaacgcggcgacacctacctgcgcaccttgctcatccatggggcccgctcggtcgtgcgcgtcatgcagggcaagtccggcgagagctggctgcacaagctgatcggccgacgcaatgccaacgtcgccgccgttgccttggcgaacaagaacgcgcggatcgtgtgggcgctgctggcccgcgaccgcgattatcaaccggactacgtgccggctcacgcggccgcgtaatagcaagaaccgcttacgaacagattcgacgacagtcgtcagtcacagcgggagaagcgcaccaccaccgattgcacaggcgatcacgcattgatggcaagacaggtcagaccgtggccagcaaaacccgcagaagtcagggcattcaagaatgcgctctgctgatagaggagttggccagcggattccatcagggaccaggggaaagccccgaacaaagagtccggatgcatggctgcaatcttcaccttcgaaccgtcatgaaatgagcgcttggcaaaacgggggcgtccatgcatg

SEQ ID NO: 8955 - DNA, 1355 bp, unidentified
  source 1..1355: mol_type = unassigned DNA; note = element_e0efdac
  misc_feature 1..2: note = core
  misc_feature 3..85: note = LE
  misc_feature 86..1099: note = CDS
  misc_feature 1100..1355: note = RE
  misc_feature 1126..1342: note = bridgeRNA
tgatgggatggatggcgcccgcttccggcatcgcaatgtgccatattgggtgctgtaaaaaaccaccaatagacgggagccatccatgaacgaagctatcacaatcgaggtcgatttggccaaatctgtttttcagctgcacggtgtcgatcacaatgggaagtcggttcttcggcgacagctgcggcgcagccagatgctggagttctttcagaaacagcccggtagcctgatcggcttggaagcttgcgccagcgcgcattattgggcgcgggaacttggcaaattcgggcatgatgttcggctgatgcagccgtcctacgtcaagggctacgtcaaacgcgggaaaaccgatgcggctgatgccgaagctatctgtgaagccgtttcccgcccatccatgcggtttgtcccggtgaaatctgaggaaacccaaggccagctggtcacccacaagacccgcgaatttctcgtccgccaacagacccagatcgtgaacgcgatccgtgcccatcttggtgaattcgggatcgtcatcccaaagggcatccaaaacgtcggccgggtgatcgaagcatgcgacagtgcaaaattgccgacagcagcgcgcaaggcgctgaacttgctggccgatcagctgatcgacacgcaaaagaagatcgccgaactgaccacagacattcgtgcggatgtgacctcaaatgaggccgcgcagcgcctacagacgatccccggtgttggccccattacggccagcgcattcgtcgcaacgctgcccgacatcgcagatttcaaatccgcgcgcgatctctccgcatggttggggcttacgccgaaaccgcactcgaccggtggaaaggaacgtttgggtcggatttccaagatgggaaacaagtatctacgccgcttgctctaccttggggccatggcgcaggtcagcgcacggcgtcgcggtgaaccaggcgacgactggctgtggaagatcatccagcggaccaagccaaagcaggccgcgatcgccttggccaaccgcatggcccgcaggatctatgcccttttgaaacacggaactgaataccaggcaaactacgcccgctgaacgaaatcggggtcgcaaaccctgaatgaaaggcaagtgcatcgtgagatgatggcaaaggacggaaatatcgtagcggacaccctgttcggaccggagcgcttgaaagcacgtgccattgattgggaccaaaacgaccgcggaattcatcaaggcgcgcagcatcgctgcatcgcagacgccgtatacatggccgcacccgaccaaatgccagacttgaccgtttcgcccttgccccgcgggcgccatccataca

SEQ ID NO: 8956 - DNA, 1574 bp, unidentified
  source 1..1574: mol_type = unassigned DNA; note = element_e0f1304
  misc_feature 1..2: note = core
  misc_feature 3..278: note = LE
  misc_feature 279..1442: note = CDS
  misc_feature 1443..1574: note = RE
  misc_feature 3..250: note = bridgeRNA
cttgtatgatatatttaataacttaaataaccatacgactcctttctttattttttaatatttaatataatctatatgtgataactgtggactttttatatttaatatagctttgactattccaaggagtttactgccacagtttcgtttttaattgtttataggttggataagccattgacttttgtctttgagtttttatatcacgcaagtttatgagggcgaacacatgtggaaggttgtcatagttattaatattttcgaaaggtggtaattttatgatttatgtcggtattgatattgctaaaaatactcactgggcttctgcaatgaactcagatggagaaattcttttagagcctttttcttttcaaaataataatgaaggctttcaaaaatttatttctaaactttctaactttgataaacaaaagatgctaattggtttagaatcaactgctcattacggcgaaaatatcatttcttatcttttcaacttagactacaagattggtattattaacccaatccaaacttccaacttacgtaaatctaacattagaaaaactaaaaatgataaggttgatacttttataattatcaagtctttaactttaaataattataatcttgttactacaagagacatcaacaacataaaactcaaaggcttaagccgttctcgacacaatttaattgtgatgagaagtcgttctaaaattcaattagcatcttttatagatcaattatttccagaacttaatatgttctttaaaggaaatcttcatctaaatgtatcatatcaattattaaaagaatattcaagtcctaaagacatttcttctttgcatttaactaaactctctaatattcttcatgataattcacatggtagatacaataaagaagatgctattcgcttacgtgaattggctaaaaactctgttggtattgataatccaactctttctttacaaattaaacaggctattcttcaaattgaactttatactgtacaaattgaagaagttgaaaaattatctaaacaaattcttgatgagatggaatctaaacttttaactattcctggaatgtcttacaatcaagcaactgtaattcatggttttattggtgatattaatcgtttcaacaaatcctgccaattacttgcatattcaggcttagatccatctgtatatcaatctggtaattttgaagcacgttctactagaatgtctaaacgtggtaattcactgcttagatatcatcttgtctatgctgcacataatttagtcttacataacaaaacgtttaaagaatattatgatttaaaacgctctcaaggcaagactcattattgtgcacttgggcattgtgctcataaacttgttagaataattttcaaaatgttaaaaagcaatgttaattttgatttagattaattaaatatttatttttcaatgtgttaagccgtttttaaaaaattgactaaaaacggttattaaagttgatcttttttatatcgaaaaatttttaaaattttttcagttttctattgacttttcatagttggt

SEQ ID NO: 8957 - DNA, 1364 bp, unidentified
  source 1..1364: mol_type = unassigned DNA; note = element_e0f4042
  misc_feature 1..2: note = core
  misc_feature 3..75: note = LE
  misc_feature 76..1110: note = CDS
  misc_feature 1111..1364: note = RE
  misc_feature 1083..1352: note = bridgeRNA
tgatggggtggacgccccccgacggcatcgatgtgccaaagcggaggtgttgaacaccactggaaggaggcgtccatgacagaagttaccacgatcggtttggatattgcgaagaatgttttccatgcgcatggcgcggatggaccgggccacacggtcttcagtcgtcggctcacccggggcaagcttctcgacttcttcgcgcggcagcccgcctgcacggttgcgatggaggcgtgtggtggggcgcaccattgggcgcggcaactgaccgaactcggtcacagtgtccggttgattccgccggcttacgtgaagcccttcgtcaagcggcataaaaacgacgcactcgacgccgaagcgatctgcgaggcggcgcagcggccgggcatgcgtttcgtcgcgatcaaatccgaggagcaacaggccgcaggcatggtgttccagacccgcgatcttatggttcgccaacgcacgcagctgatcaacgcacttcgcggccatctcgcggagtatggctgggttgcacccaggggcacggcgcagatagccatgctcgccgacctgctcgacgaggacgagatggcctcatcgctcccggatgcggcgctggtcatgttcagtgtgctgatcgatcacctcgcccggctagacgagcagatcgccgaccttgatcgcgagatcgcgcgccgtgcccgggacgaagaaacagcccgccggctgatgacgattcccggcatcggtcccatcgcggcgaccgcaatccttgctctggcaccaccgatagagactttctccaagggccgcgacttcgctgcctggctcggcctcgcaccgttgcaacgctcaacgggcggcaagcagcggctcggatcgatctcgaagatgggcgagcgaacgatccggcggttgctgatcatcggcgccagttcgatcgtgcgccaggccagtcgccgtggcgcgccggccggctcctggctcgagcgcatgctgtcccgcaagcctcgtatgctggtctcggtcgcgcttgccaacaaaatggcgcgcatcgtctgggcgttgctgaccaagaaggaagattacagagctccggtcgcagctgcggcataagccaaggctggcggccagaggcgtcggagacgcaagcgatcgaaggagggtatggcacaactgtcggcgagacggggctggaaaaccagggaatggcagagcgcctcggagcgcgcaaagctgatgtggatccagtccgcgaactcccatacgggcccgcagcaaggcgctgcatcatgaggccggacagatggcatcatccgactgcgtgacaaacccaattttacgcttgcatctgaaggggcgtccacaga

SEQ ID NO: 8958 - DNA, 1421 bp, unidentified
  source 1..1421: mol_type = unassigned DNA; note = element_e0f826f
  misc_feature 1..3: note = core
  misc_feature 4..204: note = LE
  misc_feature 205..1407: note = CDS
  misc_feature 1408..1421: note = RE
  misc_feature 4..174: note = bridgeRNA
ctccgtaagttgttaggcggcccgggagggccggatgtggctgatggtggcttgcctctggtggctcccaaggagtggccgtccggctctccggggcgccctgaccgctgattgagatctgcgtcctggtcgctgtttacggagctgacggcggggtgttcctcgggccaaggagagtgctggtttcggcgtggggagcgtgggatgacagagcggcgggctcggatctgggtggggatcgacgcgggcaagggccaccactgggcggcggcggtcgacgagtcggggttccaggtctggtcgaagaagatcgacaacgacgaggccgcgatcctggaagcggtcgccgaagcgctggccatggcgggtgcggtggactgggcgatcgacctgtccggcaccgcgtccgcgctgctgctggccctgctcgcgtcgcacgggcagaagccggtctacgttcccggccgcaccgtcaaccggatgtccggcgcctaccgaggcgaggcgaagaccgacgcccgcgacgcgttcgtgatcgcggagacctcgcgcctgcgcagggacttcgcggccgtggacgtccccgcccagctggtggccgatctggcgctgctggtcgcgcaccgcactgacctggtcgccgaccgggtccgcatggtcaaccggctccgtgacgtgctgaccgggatcttcccggccctggagcgggccttcgactggtccggcagcaagggcgcgctgaccctgctgacctaccggcagaccccggccgggatacgccgggtgggccgcgcccgtctggagtcttggctgcgcaagcgtggtgtccgctcggccgacaaggtcgccgccaccgcgctggaggcggccggggcccagcacactgtgctgcccggtgagagcatcgcggcctcgatcgtcgcagacctggcctcccaactcctcgcgctggacgagcggatcggtggcctcgacaagcagatcaaggagaccttccatgcccacccgcaggcgcacatcatcgagtcgatgccgggcatcggcccgatcctgggcgccgagttcgtcgtcgctgcgggcgacctgtcggcctacgcggatgccggccggctggcctccgcggccggcctggttccggtgccccgcgactcgggccgacgcaccggcaacctgcaccggcccaagcgttacagccgtcgcctgcgcagggtgttttacatgtccgcgcagaccagcatgatcaaggacggcccgaaccgggacttctacctcaagaagcgtgccgagggctgcggccacgtccaggccctcatcgcccttgcccggcgccgggtgaacgtcctgtgggcgctgttgcgcgacggacgggagttcacccccgcacagccggtcgcgcaggcggcttgactcggtcattgaaa

SEQ ID NO: 8959 - DNA, 1563 bp, unidentified
  source 1..1563: mol_type = unassigned DNA; note = element_e0febc3
  misc_feature 1..2: note = core
  misc_feature 3..249: note = LE
  misc_feature 250..1422: note = CDS
  misc_feature 1423..1563: note = RE
  misc_feature 3..227: note = bridgeRNA
ctcgtataataaagtagtagttaatattgttcgattttaagggcatgtgctataatgttattagatactgtggattagttacacccacctaccacttgatggtttcttgaaggctctaaccacagtctctttatacatttgttaattagttagataccgcacgacggtttatttagaacgaggttacaatcgtaaagagtatctgtggtctaaaaacagtatcaaatatttttcaaaggagtttttagtatgatttttgttggtatcgatgttgcaaaggacaagcacgactgcttcatttgcaattctgacggcgaggttttatttaatgcttttactattcagaacactatagaaggttttaattctctttatcaaagaattgaatctgtttcaaaagattttaacaaagtaaaagtagggcttgaagctacaggacattactcatacaatcttttgggttatcttcttgataaaggtttgactacctttgttatcaatccattaaataccaatctcttcagaaagtctctcagcctcagaaagactaaaacggataaaattgatgcccatacaatcgctatgatgttaatgtctaatgtagacttaaagtcctactcagatatattatatcacaacgaagaattaaagtcactaaccagatacagattttataaagtttctgaaagagcaaaactcaaaaccactgtttcccggcttgtgaacatacttttcccggaacttgaaaaacttgttccttcgctgcatataaaatctgtctatactatgctttcagagttcccgtcagcccatcatattgcagaagcccacttaacgaagcttacaaacctgctgcatactgcatctagaggcagatatggcaaagatactgcaattggttttagggaagccgcaaaaaactcaatcggttcagacatgccagcaaaatctcttgagctaaagcataccataaagctaatacaagaacttacagcagaaattgaggagatagaagcagaaatcaagcatattatggataacataaacacgcctattctgtctatcccgggtatcagttacacaatgggagctatgatagtagcagaaataggtgatttcagtaagttttcatctcctgataaaatacttgcgtattcaggaatgtcaccatcaacgtatcagtcaggacaaataaccaatagctattcacacatggagaaacgaggatcgcgttaccttcggtacgcattatacaatgcagcaaaatatgtatgtcattgggatgaaaccttcaagaattatctagcaaaaaagcgaactgagggaaaacattacaatgttgcaatatctcatgcagtaaaaaagctagtgagagtaatctatcatttacagaaaacgggtcagagttaccaagccgtttgagtttatgtaatactgtatttttaatattatttttttaagcaatttactattgctttatttgacatacaattttctagtttccttatttgaccgaaaagattttaactttttttatttttctattgacttttaatagttagt

SEQ ID NO: 8960 - DNA, 1211 bp, unidentified
  source 1..1211: mol_type = unassigned DNA; note = element_e100017
  misc_feature 1..2: note = core
  misc_feature 3..209: note = LE
  misc_feature 210..1196: note = CDS
  misc_feature 1197..1211: note = RE
  misc_feature 10..188: note = bridgeRNA
cttgtatctttaataccgatggcaagctaccatcactcaagaaagaatgagcttcttgtgggactaaagcctttgagcttgttcgaaagattaagccttctttcttgcattttagccagcgcaaacactgaacggtagcatagggttcgaccctgaatttacaaggcaagtgggttaagttggtaactttattgtgatgaggattagtcatgttttatatcggaatcgatgtttcaaaagcgaaattggattgcagtttgttaatggatgtcacaaacaacaaacgtaaagcgaaagtcgttataaattccaaaacaggaatttctgatctgttagtttggacaaacaagcagcacgtcccaaacgaccaattacacgccattttagaaggaacaggcgtatatcatgaacgagcggcacaagcactgcatgatgcaggtgttctggtttctatcgtcaatcccgcacaagtacgcagttttgcttttgggcttgctattcgtaataaaaccgacgatatggatagttttgttcttgcgcgttatggtgctttagttcagcctcaaatatggattccacctacgcaagaagctcgaacactacaagcattactcaaacgtcgtgaagcaatttcacatgaccttcttcgagaaaagaatcgcctagaaaaagcagactcaactgatacaccaactttgtgtcgcaaatctatcactgattcaattcaatttttaaatgaacaacttgctaaaattcaaacagatattgatgaacacaccaacagtcacgcgaatttcaaagaagatttagaattacttcaaagcattccagcagttggtccacaagtcagtaatcatttattggcaatcgttcataaccaccattttgaagatgccgacaaactcacggcttatctgggtttagtgcctgttcagcgtcaatcaggttcctcggttttgggacgctcttgtatttcaaaagcgggtccgccacacatgagagcgattctctacatggctgcgatttccgccactcgttataatccgcacgttaaatccttatatcttaggttattagaacgtggaaaatcaaaacgttctgcgttatgtgccgctatgaaaaaattagttcaattatgttttggggttcttaaaacacgtcaaccataccaagaaaattatgctcaggtttcttgacttttaacacggtat

SEQ ID NO: 8961 - DNA, 1520 bp, unidentified
  source 1..1520: mol_type = unassigned DNA; note = element_e101e6f
  misc_feature 1..4: note = core
  misc_feature 5..250: note = LE
  misc_feature 251..1510: note = CDS
  misc_feature 1511..1520: note = RE
ctcactggtgcaccatccttgcgttgacggttccggacggatcgccaatgcacctctggtccccatcgggccatcgccattcctgctcgactcttgaggtccacgatgagttccgcgaggcccggtggcccaggacacccagactggctacagggctgtgcgccacagagcgccgatcagtgagcgaccggctgcggtgtcccgggaccaacgggtgtttccccactgctgcaacagcgaggacacgacaatgattgtcaccgaagagattgtcaccgaagcaccaaccggtgcgcgggtgtgcggcggtgtcgactgggccaaggacgaccacgcggtgtgcatcgtcggcaccgaaggtcaggcgctgcaacggttcatggctacccacgaccggtcgggcctgaaggacatggtccgccggttgctccgggccggcgttgaggaggtcggcatcgaacgcccggacgggccgatcgtggatgccctcctggcggccgggctgaccgtgctggtcatcccacccggccaggtcaagaacctgcggtcccggtacggctccgccggcaacaaggacgaccggttcgacgcctacgtcctggccgacgtggtccgcaccgatcgccgccggctgcgccctctcgaacgcgacaccgtggccaccaccgcgctgcgcaccaccgtccgggcgcgccgggacatggtcgtccaccgggtcgccacggccaaccagctccgctcccacctgcagatcgtgttccccggcgcggtagggcttttcgacgcgatcgactccgatgtcagcctgcggttcctggaacggttcagcacccagggacaggcggactggctctccccgaaacgactcggttcctggctcgcctcgatcggctacagcggcggcaccgatcccgaggtgatctacgcccggatcaccgccgcaccacgcggcaccaccggcaccgacgcggcgacccacgcggtcaccacccagtcctacatcgcggtgctccgcaccctgaacacccaaatccgcaccctcgcggccagcattgccgagcaactcgacgtccacccggacgcgaagatcttcacgtcgttgccccgctccgggagcgtccgggccgcccgactgctggccgagatcggcgatgcccgcgggcgattccccaccgcgagctcgctggcctgccttgccggagtcgccccgtctacccggcaatccggcaaggtcaaagcagtgaccttccgctggggagccgacaaggagctccgcgatgcgctctgtgatttcgccggcgactcccgtctcaacaacccctgggccgccgacctctacgccaaagccctcgccaggaaatgcgaccaccagcacgccgtccgcatcctggcccgcgcctgggtcaacgtcatctggcgctgctggcaggaccacaccgtctacaacccggccgaccacggcgcgttgcaaaggatcctcaatcaagatcaacaaccgatggcagcttgacacagggcaa

SEQ ID NO: 8962 - DNA, 1468 bp, unidentified
  source 1..1468: mol_type = unassigned DNA; note = element_e102003
  misc_feature 1: note = core
  misc_feature 2..230: note = LE
  misc_feature 231..1448: note = CDS
  misc_feature 1449..1468: note = RE
  misc_feature 11..242: note = bridgeRNA
ctaatagttgctgaaggtgctgcggttgtgccgtagcattcgtgaggtccgacgggctggctccctaaccgcctgccggccgcgtgagcggtctggctttagatcgaggtgccggcctgccggttctcgccgtggcgtggctcgaaagaggtgcgagcgattgcagatccgttattaggcatgcccgccacgttctccattcctggtgacgatgacttgggagtgtgcttatgacggcggtcatgatcggagtggacccgcataagggctcgcatacggcagtggttatcagcccggcggaagagccgctgggcgagctgcgggtccgcgcctcgggtgctcaggcccagaagctggtcgcgtgggcagcggcgtggccggagcggacctgggcggtcgagggcgcgggcggcctaggccatctgctggcccagcagctcgtcgccgcgggcgagcgggtcctggacgtgcagccgaagctggcgtcccgggtgcggctgctgcaggccggggacacgaacaagaacgacccgaacgatgccctgtccgtcgcggtcgcggcgctgcggtcaaaggtcagccgcgaggtgaccgccgatgactaccaggcagtgctgaaggtctgggccaagcgccatcgtgacctggcccgggcccgtaaccaggtcgcctgccggctccacgccgtgctctgcgacctggtccccggcggccaccagaaggagatcaccgcagctcaggccaccaggatcctggaacaggccgccccgtccggcgccgtcgagctggcccgcgctgagctcgccgccgagttcctcgccgacctgcgccacctcgatgaccagctccgcgacaccaggaagaaactggccgccgccgtccgggcatccggcaccagcctcaccgaggttttcggcgtcggccccgtcatcgccgggaccgtcatcggcgatgccggcgacgcagcccggttccccggccgcgatcacttcgcctcctataacggcaccgccccggccggggtgtcctcagggaaccggaagatccaccgcctgtcgctgcgcggcaaccggcgcatcaaccacgccatccacatggccgcgatcacccagatccgccacaagcacagcgacggccgcgcctactacgacaagaaaatagccgagggaaaaacacacaaagaggcgctgagatccctcaagcggaagatcagcgacgccatcttcgcccgcctgcgggccgacgcccgccaatctgcaaaagccagggcgaacggtccgggagggcaaccagggaacggctctgactccagcgcggccggctcacaccccgaacgccagctcttcggacaagccactcccggacctgccaccaccctacgacccgccacccgcacccggaccaccccgcagccaccagcctcgaagaaaatccgggcaaccacttgacagcaaccacaaagaggact

SEQ ID NO: 8963 - DNA, 1469 bp, unidentified
  source 1..1469: mol_type = unassigned DNA; note = element_e110bec
  misc_feature 1..2: note = core
  misc_feature 3..228: note = LE
  misc_feature 229..1452: note = CDS
  misc_feature 1453..1469: note = RE
  misc_feature 1..224: note = bridgeRNA
ccgttaccttgtgagcaccccgatggacggggtctggtcgctcggccgggtatggctatgttgccctgccatcaatggtccggggggtgttgccgcccggtcgagagacacgcgttgaccgctgatagggacacggcccagcactgctgaggtctctttgtaacgtgggtgccggcatcgggtgtcaggactgcgaccagcgatgatgctccaaggaaggacagcatcatgaacacacgattcgcggtcgtcgtcggcctggacgtcgggaagaccgctcaccacgcgtgcgcgctcgacccggaggggaacaagctgttcgataagcccctcccgcaggacgagaccaagctccgcgagctgttcactcagctgcagaaccacggcgaagtgttgatggtggtcgatcagcccaacaccatcgggacgctaccgatcgccgtcgcccgagacactggctgcaccgtcgcctacctcgccgggttggcgatgaggaaagccgcggatctgtatcccggcaggtcaaagaccgatgcacgcgacgcgttcatcatcgccgacaccgctcggactatgcctcacacgttgcggcaggtcgatcgagacaacgagatcctctccgccctgaaagtcctggccggcttcgatgaagacctcgcgcacgagaccacgagggcgctgaatcggatccggtcgctgctcacgcagatccatcccgcactcgagcgcgtcttcgtcggtggcagcttttccacgacactggtgctggatctgctggagaagttcggcggccccaccgggctcaagactgctggccgtggcaaggttctccggttcgcccggtcccattcccgccggagtcccgaagcactggtcgatcagatcttcacggcgctcggagagcagaccgtcatcgttcctgcgaccgcagcagtggagctcgtgatccccagagtcgctggtcaggtcaaggaactcaaggaacagcgagcgaccgtggccagggaggtcgagggcatgttggaggacttccctctcgcctcggtcttgatgagtatgccggggatcggcatcaagaccgccgctcagatcctcttgaacattggcgacggttccgcgttcgagaccccgggccacctcgcggcctatgccggcatcgcgccggtcacgcgaagatccggagcctcgatccgcggggagtttcccgctcgatcaggcaacaaacgactgaagaacgcacggttctactccgcctgggtcgcctcgaaccacgacccgatctccaaggcttactacgatcggaaacgagcccagggcaagcgccacaacgccgccgtgatctgcctggcacgccgccgctgcaacgtcatcttcgccatgctccgcgacggcacctactaccagccacccaccaacgccccgacacccgagccagccgccctcgcggcttgactcggaacatagggaca

SEQ ID NO: 8964 - DNA, 1594 bp, unidentified
  source 1..1594: mol_type = unassigned DNA; note = element_e113b64
  misc_feature 1..2: note = core
  misc_feature 3..276: note = LE
  misc_feature 277..1476: note = CDS
  misc_feature 1477..1594: note = RE
  misc_feature 12..296: note = bridgeRNA
ctgttacaataaatttagtcggtaaaaccataacaaaccagtaatggtttacacgcactcatactcaagctataatgaaagcagtaattggattgacgttgtcctccttgggacaaagtgcccgtatttaagactgtcatctatgctttcattacagcgttcgtttttgcaggttgagccgccacatcggtgcgttcgtgtcaccaaacagagtgaataggtaatgagtaaaaagcatactaccgattataatattcagacataggagtgatttttatgaacgctataggtattgatgtatccaaaggaaaaagtacagttgctgtactaagactatttggagaagtggtagcgtcaccttttgatgttattcataacgacagtgaacttaaaaagcttgttgcttttatcagacaactgccgggtgaatctaaggtcgttatggagttcaccggtaactactctgaaccaattgcccgcttcctccacaacgagggtatatttgtttccgtagtcaatgctctcttaattcacgactatggtggaaacactattcgtaaagccaaaactgataagaaagatgcaattaagctcgcttcttttgctcttgacaaatggcttgatttgaatgaatatacacctgcggaagatttacgtgcaacacttaagtttctgaacaggcagtatattcaatacactaaaatgcttactatgctaaaaaacaacttgatttctctgcttgacctgacatttcctaatgccaatcagtttttcaatactcctccgaaagcctctgacggtcatgaaaaatgggttgattttgttctgaaattctggcacagagaatgtatttcgaaattatcattatccgcattcaagctgaaatatcagcgttggtgcaagaaaaacagctacaattattctgaaattaaagcagaagaaattcattgttatgctaaatctcagattagcgttttgccgatgaatgacagtgttaagctccttgtcactcaatcagtaacacagctcatcacaatgcaggaaacattgtgtgccatcagaaaagagatggataacatatcttctcagttgcctgagtatgatactgttatgtctatattcggtgccggcaaagtacttggggctcagttgatggctgaaatcggtgatacaaggcgttttcgtaatcgtaaatgcattactgcatatgcaggtcttgacgctcctccttatcaatcaggtacagtcaacatacaatcacgaagcatatccaagaaaggctcttctgcacttcgtaaaacactctttcaaattatgaccatttacattcaaaatcaaccgataactgaaccagtatacaattttcttgacaagaaacggtctgaaggcaagccttacaaagtttatatgatggctgctgcaaacaagtttttacgcatttactatgccaaggtgaacaaagttctctgttcttaatcaatacattcatttcattcaggctgctttgaattttatattctctgcggtctttttgtcttaccattttttcttcaagaatttttttcattttagggcttgacttttatttgcaggt

SEQ ID NO: 8965 - DNA, 1574 bp, unidentified
  source 1..1574: mol_type = unassigned DNA; note = element_e117762
  misc_feature 1..2: note = core
  misc_feature 3..251: note = LE
  misc_feature 252..1427: note = CDS
  misc_feature 1428..1574: note = RE
  misc_feature 3..227: note = bridgeRNA
ctcgtattatatagtagtagtgtttatagaccctctccaaggtctgtatgttatactattttagatactgtggattagtttttcgtcctaccacttagatggtttaagaaaggctctaaccacagtctctttgtttatttgttaatcagttagataccgcatgacggtttatttagaacgaggttacaatcgcaaggagtccccgtggttctaaaacagtatcaaaatctattttaaagaggtgttctttcatgattttaaccggtattgacgtagctaaggataagcatgattgctttatcatgaattctgatggagaaattcttgttaaagcttttactttttctaataacctcgaaggttttaactttctttacgagaaaattcgttctgtaactaaacctaaagataaaataaaagtagggctcgaagctactggacattacagctataaccttcttggattcttactcaacaaaggtttgcccacctttgttattaatccactacatactaatctttttcgtaaaagcctaactctcagaaagactaaaacggataaagtagattccagaactatagctatgatgttaatgtctgatgtagccttaaagccctacacagacacatcttaccacaacgaggaactaaagtcactatcccgttatagatttactaaggttcaggaacgttccaaactcaaaacttctgtttcccgtttagtccagattcttttcccagagcttgaaaagattgtttgtaccattcatatgtcttctatttatcaccttttagaagaatatcccggagcttcttacatcgcttcagtccatcttaccaagcttactaatcttttaatggaagcttcgcatggccgttataaccgaaatactgctattaagtttagggaagctgcacgtaattccattggttcaattctgccagccaaatctcttgaacttaaacatactattaaactcattcgagaattaactgttgagattgacgagatagatgctgaaataaagaaaatgatggatagtatagcttcacctattactactattcccggtatcggttacagcatgggagctatgattatttctgaaataggcgattttagccgtttttcttctccggataaaatattagcttatgctggtttatctccatctacttaccaatctggacagcttaataactgttattcacatatggagaaacgcggttcacggtatttaagatatgctttgtttaccgttgcccagaaagtgtgtatttgggataatacctttgcagaatacttatctaagaaaagagcagaaggaaaacactattatgtagccatatctcatgcagttaaaaagctcgtaagagttatattccatttagaaagaacaggacaggcttatttaaaagccgcataaaaatagaataattgaatactgttttttgagagcactggtaacgatgctctatttgtcatgcaatttttaggctaactgcgaaaaattaagaattattcatattcttttaaatatagctaatttatatcttgactttttatagttagt

SEQ ID NO: 8966 - DNA, 1373 bp, unidentified
  source 1..1373: mol_type = unassigned DNA; note = element_e119a66
  misc_feature 1: note = core
  misc_feature 2..76: note = LE
  misc_feature 77..1108: note = CDS
  misc_feature 1109..1373: note = RE
  misc_feature 1141..1364: note = bridgeRNA
taatgagatggtccgccgcttgatccccacgttgaggtggatgatcttgttggcaggtttaaggaggatcatcgacatgcagattcgttcggttggcattgaccttggcaagacaacctttcacctcatagccctgagcgcagcaggcaaggtgctgttgcggaagaagttcacccagaagcagctcatcacttttaccgcgaacctgcagacttccttgatcgggatggaggcctgttcgggggctcacttcctcggccgggttctgagacaacaaggccacaacgtgaagctgattccggctcagttcgtgaagccgtttgtgaagtccaacaaaaacgacttcctcgatgcggaagcgatcgccgaagctgtcgaccgacagaacatgcgcttcgtcccgatcaagacagacgatcagcttgatctccaggctatgcaccgcgtgcgggatcgactaatcgcccgtcgaacctcggtcatcaaccagctgcgggccttcctgctcgagcgcggcatgaccttcgccaagactccagccaagctgaaggaggccatgcccgagatcctcgagaacgcggatgcgaacctgacgccacgcatgcgcaacctcgtcagcctgctgtggagcgagtggaaggatctggagcagcagatcgttgcgatgaacgaagaggttgaacagatcgcctcctccgatccagcctgccagcgactgaggcagatcccaggcatcggcccgttagtggcaaccgcgatcgtcgctgccatcggcaacggagcagccttccagaaggggcgtgagttcgcatcctggatcggacttgtgccgcgacagcactcgaccgggggcaaggcccggctgttcggcatcagcaagcgcggcaacagctacctacgcaagattctcgtgcacggcgcccgatcggctgtcctcagagtcaaacgcgaacgttcgccgttcggcggctggcttgatgcgctgaaacaacgagccccgatcaacgtggtgatcactgcggcagccaacaagctggctcgcatcgcctgggcagttctatcaagcggacaagactatcggacagctaccagcatgccgagcgtctaagtcgtcccctctcaccgcgtcacgatctagcgttcccacaaggtctgcaccggatagctaagacgaacgaacagttcccaacggcgtgctcgcaacctgctccctgaaatggtcttccatgaccgtcccgtttatcaggaagagcacgcagcgcaactcatcatggccagcagagtttgctctctacacaaaggccgaatacatttgcgcagacctgtcgatcgacccttcgcttttcccttgcagtcagacggcgaaccataca

SEQ ID NO: 8967 - DNA, 1528 bp, unidentified
  source 1..1528: mol_type = unassigned DNA; note = element_e11a2ff
  misc_feature 1: note = core
  misc_feature 2..227: note = LE
  misc_feature 228..1520: note = CDS
  misc_feature 1521..1528: note = RE
  misc_feature 14..242: note = bridgeRNA
ctacttgtttacttgccctacggctggagcccggccaggctcggtcgaggtgcccggcggggcgctcgcattgcggctgtccaccttgatcgttggtgagactcacatctggcatgcggccccgtcgttcaccgtggcgtggagaggctcaagaggggtctgcccagctcgaagtagcgttgccctcctcgccggtcatcaccggtctccaggcgaggggaaagttcatggggcacgtagtcatcgggatggatccgcataagcactcggcgacgatcgagatcatcgacgagcgggggaaggtgttgtgtcagggccggttcggtactgaccgggacggttacaaggcgatgctggccgcgggccgcaggttcaaggaccgcagctgggcggtggagggctgcaacgggatcggccgccatatcgcgcagcggctggtcgccgatggcgagccggtggtcgatgtgccagcgaagctgtccgcccgcgctcgcttgttctccaccggccagggacgtaaaaccgacccggttgatgcgcattcggtggcgctggccgggctgcatgccccgggcctgcgggtcatcaccgcagatgatgcgacggtggcgctgcggctgctggccgatcgccgtgatgagctgggcgtggcccgcacgcagacggtcaaccgcctgcaccggctgctgctggagctgctccccggcggggcgaagaagttcctgtctgccgcgcaggccagggaactgctggccacggtccgcccgcgtgacatcgcagggatgacccgccgccggctcgccgccgagctgatcaccgagctgacgcggaccgacaagcgcatcaaggccgctgacgccgagctcaaagagctggtggccgcgaccggcagcagcctgctcacgctgcacggcatcggcccctccggcgcggcacgcctcctcggcgacgtcggtgacatcgcgcgtttcgccgacaagggcaggttcgcgtcctggaacggcaccgcacccctggatgcctccagcggtgaccagaaccggcaccgcctgtcccgggccggcaaccgccggatcaaccgggtcctgcacatcatggccatcgtcgcgctgcgcagcgacaccgaaggccgcgcctactaccggcgcaagctcgccgccggcaaaaccaccatggaagccctgcgctgcctgaaaaggcgcctgtccgacatcgcctgccggcagatgaccggcgacgcccacgctacggcgacgggcccgggaggacacccggggacgactactggctccagcgtggccggctccagcccctgcaccggctcttcggagaagtcacttcccggacccgccgcaaacgaccctacgcctgctccggccagcaagccgatccgttctccagccagttcccggcgcctctcgatcaaagccggaccgcagccgttgtcaagcgaagtctgcttgacaacggcgaggaccggcgcacactcacgaggcgggaacgacgccctcttgacatagaggggtgc

SEQ ID NO: 8968 - DNA, 1400 bp, unidentified
  source 1..1400: mol_type = unassigned DNA; note = element_e11c40c
  misc_feature 1: note = core
  misc_feature 2..91: note = LE
  misc_feature 92..910: note = CDS
  misc_feature 911..1400: note = RE
  misc_feature 1174..1395: note = bridgeRNA
caatgggatggactcctcctcacctatcggcatcgatgtgccaaactggtaattgcaccaccagttaacggtgaaaacggaggagtccactatgaagattagtcgagtaggtgttgatttggcaaaaaatgtttttcaactgcacggtgtcgatcgccacggtaaaaccgtattgaagcgtcgattgtcgcgcgataaatggataagcgctttgataaagtctgctgaacctgactgtgagatcggcatggaggcctgcggcggtgcgcatcactgggcacgcgtgctaacgacgaagggttttcgggtcaaactgattccgcctcagtttgtaaccccctacgtcaagagcaacaagaacgatgcaaaagacgctgaagcgatttgcgaagccatgagtcggcccaatatgcgttttgtaaaggcaaagacggtggagcaacaggacattcaggcgacacaccggattcgtagtgagctgatgtgtcatcgcacggcgaaggccaaccaaattcgtggcttagtgacggagtatggcctggtagcgccattgcaaatggcttctctgcgagcagccatcccccgctggcttgaggatgccgagaatggattgaccgatcggttccgcaccctgctacacggactttgggaagacctgcttacattggaccagcgtattgaaaccctcaacggggaaatcgagtccattgcaaagagcgatccggtcgcccaacgccttcaacaactacgcggtgtgggtcccctggtcgcgacggcattgattgccaccgttggaaacggtgaccagtttagtaaaggtcgccagatggccgcgtccgtgggactcacaccgaggcaacacagctcggggggcaaggatcgatttctgggatatcagcaaacgcggtgatacctattttcgtctcatcttaatccatggagctcgctctgtggtcgccaacgccaagcataaagatgatcgcttgagtcgttgggtgacagaattggcacagcggcgtcatcccattgttgcggcggtagccttggccaacaagaccgtgcgtatggcctgggcaatgatgaatcatgatgcagactatgatccggaatttgcggcgagctgatgtaggtaagccacaaggatcagaagtaagtagagagaggaaccttaaccacgatggcgaagtaagctgaatgatggccaactggtcgaaccggcgtcggtaaaacctgataatgtccatgtgcaccaagcacgacaaagcgattaggaactgacgcgcgaatagcccattatggcccggcatcaacgtatgccaactttagaggccggatatacgtatgcagtcgagccaactgtcatcaagcaggttacttgcaaacgaggaggagtccatata

SEQ ID NO: 8969 - DNA, 1393 bp, unidentified
  source 1..1393: mol_type = unassigned DNA; note = element_e11d59e
  misc_feature 1: note = core
  misc_feature 2..97: note = LE
  misc_feature 98..1129: note = CDS
  misc_feature 1130..1393: note = RE
  misc_feature 1174..1390: note = bridgeRNA
taatgtaatgaaccatccccatccacgccgctagcccggcggggtcttccggactagattcagtctgctggaccttaaccttggatgggagatcgatatgactattagtattctgggcattgatattgccaagaacacctttcaactccacggcgccgatcattctggcaaaaccgtatacaagaagcgtctggctcgccgcgagttagctgctcacgtgaccaacctgccaccctgcaccattgtgatggaggcatgtggcgggtccaactactgggcgcgagttttccaaagcagcggccattcggtgaagctgattggcgctcagttcgtcaaaccgtttgtgaaaaccaataagaacgacgccaacgatgcgcaggcgatagtcgaggcagccagcaggccgtcgatgcactttgtgcccatcaaaaaggtcgagcagcaggacattcaaacgattcaccgaatacgcactcgagtcgtcaagaaccgaacagcgttgatcaatgagataagaggactgtgcctggagtatggggttgtccttactcctggagccgctcgggtaaaatcctcgctctgtgtagccattgccgatggcgataacgagctgacgccattgtcacgagagtctatgcaggatctgtacgatgaactggtggatgttgaatgcaggttgaaaaagctcgataacaaaatccgtcagctgtgcagacagaatgagaactgccagcgcatactgaaaattccgggtgtcggtgaactgaccgccacagccattgtcgcagcggtgcccgatccgaaggagttccgcaatggtcgccatctgtcggcctggcttgggctggttccgcggcaatcgtccagcggagacaagcgaaccctccttggtatcagtaaacggggtgaccgatatctacggacgttactgatccacggagccagggcggtactgagccactacaagcacaaagataacgactacacccattgggttggtcggaaaaaggccacgctgagtcacaacaaagcagccgtggctttggcgaacaaaaatgcgcggatcatctggtcgatgttgaattcgggggaggagtttagctacggggcatccgcaaccgctgcctgatactcaatatcggccagctacttttaacgaactgggcacaatcacgagtttgctatggttgatttgaatgatggtgaataggtcacaccggctcttttagaacctggaacttgtcacggccctcagaggccatggtactgatgaggtggaggagcgcggatttacatcagggcacaagtttagcttgaatgccgaatatatgactgcaactcagacctatggcaaccatcggaaatcaacttgcaaaaggggatggttcatata

SEQ ID NO: 8970 - DNA, 1291 bp, unidentified
  source 1..1291: mol_type = unassigned DNA; note = element_e122c73
  misc_feature 1: note = core
  misc_feature 2..210: note = LE
  misc_feature 211..1179: note = CDS
  misc_feature 1180..1291: note = RE
  misc_feature 33..201: note = bridgeRNA
tcttaagtttgaaatctattaaattagatataaatcagaaagaacaaaagagagaattaaggttaatatatacggtgaagctttagacttcgacaacattgataatcctctctcttttactactaaatcacgatcagttctgtgagactatagatctcgatttcaagttgttgtgaatccagtagttagttctttcataaatcatttcttatgaataaatataaagaaacttttggagttgacatcagcaaagatgtatttgatgtttatggtaccctttcgggtcataatcagtacaaaaatgatgaatcaggattcgttaagtttctaaaagaattaccagatacagccttagtggttatggaagcaacaggttattatcattatcggcttgctcagtttttgtacaaaaataaaatagtagtttctgtggtaaatcctttatccattaagcgttttattcaaatgaaattagccaaagtaaagacagataagagcgatgctaaatcgatatgtgattatgccttaatcaatgcagtacccatatacaatgcgctcacagatgtacagagtgaatgtttacagctatttagattgttagatgtttatctaaaacaccgtacagcaaccaagaacaagctacacggggaagagactttgggcataccatcaaggtatgtgtaccgttcattaaaacgtaataaaaagcatctagacaaagagatttctgctatcgaattgaaacttctatcattaatcaaacaagagcagcaagaacaactaacattgcttagaactgttcctggcataggtcagaaaacagcattgtttttaattgttataaccgatggtttttcaaagtttgaacacgcagcacagttatgtagttacgttggaattacacctaccataagggagtctggcagtagtgttaaaggtagatcacggataagtaaagtcggtaataggaaactacgtaatctattatttctatgttcgtttaatgcctgtaagcataataaagcgtgtcgggaactttatgagcgtatagtaaacaaaggaaagagcaagaaagtggcattaatagctgtagctaataagctgattaaacaatgctttgcaattgcgaaatcaggcagagcgtatgatgaaacttacgtttctgtattgcttaagtaattaaaaaaatagaataaaaaaaagcttacaaaatcaactacttgaatttgtaagcccaatataatagtgtctaatatttttgaagaaatgacttgttttttacctcagttct

SEQ ID NO: 8971 - DNA, 1543 bp, unidentified
  source 1..1543: mol_type = unassigned DNA; note = element_e126368
  misc_feature 1..3: note = core
  misc_feature 4..241: note = LE
  misc_feature 242..1420: note = CDS
  misc_feature 1421..1543: note = RE
  misc_feature 8..222: note = bridgeRNA
tttcgtattattaggtcagccagagatttctggttggccttttttcttaggtgcattaagatggcggtagccgggagaacgtgggtcttttaggggcgtagaccccgtcaaaaaaactgttttcctactaccccaatgaccatgtttgagctggtagaggctttgacctcgcatcacaagcgaagctatgggtttggaaccatcgtaggaagtgccggtgaatacgaattgggaggttattatggaacctgttgtcggcgttgacgtagccaagggattcagtgtggtacaagcgtttttaaagcgaaatgagccgtatgggaagatgattagcatctcgcatggagagggtggatttaagtatttgggggaggtacttgcagagctgcagacaaagacaatgcagcctccggtcgttattcttgaagcgacaggtcattaccaccgcggacttgccacctatctagagcgcaacggatggacatatttcatcgtcaacccattacaagcaaaacgagcgaaaggaacacagttgcgcaaggtaaagacagatgctgcagatgcctggcatttagccgagatgtattatcggggagacgttaccgcgcatcgaacttgggatgaggcatttagagagcttcaacatgtcaccaggcaacatgagtttgtgacggggatgtatgtgcaagcgaagttaaacatgagggccttgctggatcaagtttttccagcgtatgagaaggtatttcgcgatctattttctgtgacatctctcaacgtgctggcccgttgtctggaaggtcaagtcgagaatctgcatgaggtcattcaaaaaggcgtaggaaggtcacattcacgaaaatggatggaagctaaggtggaacaactcgaggaagcactgtctgattggagcgaacagccaagaagtcattctcaaactttcgttttacgcgggatggttgacttactgcttgcattttcagagcaactgagcgaactggagaagcagatcaatgaaatggcaacgagtcttccagaggtcgaattggtgaaaagtataccgggaataggagatagacttgcagccgcgattgtcgctgaaattggagacgttaggcagtttaaagaagcgaaacaacttgttgcttttgctggattggatcctgggatattcagttcggggaaattcacggcaagtagttcaaaaattacgaagcgtggctcaaagaggcttcgtcgtgctttatatttagccgtacagtgcggtattcgtggaagaactaatcccaaaatatgggattattacgataaaaaacgaaaagagggcaaaccctacaaggtggtcgtgatcgcttgcgccaacaagcttctccatcacgtatacgccatccttagtaagagccagccctatcaatcctaatattccaatatccaaatttatccgaaaccttcacgccaatgaaggttttttgtcttgcttaaaaatagtatatcaagaagatcgccaatcaccaacaccaaatccttgacaagtattagctgg

SEQ ID NO: 8972 - DNA, 1340 bp, unidentified
  source 1..1340: mol_type = unassigned DNA; note = element_e12cd0b
  misc_feature 1..3: note = core
  misc_feature 4..174: note = LE
  misc_feature 175..1080: note = CDS
  misc_feature 1081..1340: note = RE
  misc_feature 1111..1327: note = bridgeRNA
tgatggggaagacggccccgcttctgagaagggaccgtatactggtcctacactgcaaaaggagcattccgatgaacccagccgccgtaggcctcgacctagccaagaatgtttttcacgtccatgtcgccgatgcatctggcaagacgattgacagcaaaaggctcactcgtcgtgatctcctgccctatttcaaagcgttgccgctttgcctgtattgaggcctgtgcaactgcccataactgggcccgtcagttgcaagggctcgggcatgacgtgcgcctgattcctccaagctacgtcaaacctttcgtgcgtcgcggcgcgaagaatgacgccactgatgcggcggcaatttgtgaagcagtgacccgacccaacatgcgctttgttccgatcaaatcgcgtgaagatcaggcgttcctgatgctgcacagggcccgaggccttttggttaggcagcgaaccatggcggcgtatgcgttccgggcgcacttggccgagtatggggtcattgtcgctcagggaatacaccgggtcgatgccctcattgcgaagctggatgagatacgagcagaccttcccaatgatgcgtcctttgcgttggatgctctcgtcggacaacttgataccctgaaccgacagatcgatcggatcgatgtccggctggctgagattcacaagaccaatgcgatttgccgcttgcttgccaccataccgggaattgggccgattaccgcgaccgcgttcgccgccacaatacccgatccgtccacgttccgatcagggcgtgagtttgctgcctggctcggcctgacgccacgccaaaactcatcaggtgttaagcaccggctcggcggcatcaccaaacaaggggatcggtatcttcgccatctgctggtattgggagcgcgaactgtggtgcgctatcctaaagcccgttctcgtgtagatggcccatggattgaggctctgctggaacggcgccgcccaatggttgctgccgttgcggtcgcaaacaagctcgcgcgaacgatctgggcaatgctctctaccggcgaggtgttccgaaacgcctagaattgaagatcgaataaacgggacacaatgagatgccacaagtgcaatgaaaggatgatgataatcggcaaagctgaggatcgagaaagcccggagagctttaagcgcgccaaagcgcgtcccgttgatgaggcctcgatccgcggacaccatcagggccagcagtcatgtatgggctgcacaaacaggccgaatacatgaacgcacccgccgatgaacattacgctcaaaacacttgcgcccgcggggccgtctataca

SEQ ID NO: 8973 - DNA, 1115 bp, unidentified
  source 1..1115: mol_type = unassigned DNA; note = element_e12f685
  misc_feature 1..2: note = core
  misc_feature 3..166: note = LE
  misc_feature 167..1099: note = CDS
  misc_feature 1100..1115: note = RE
  misc_feature 1..168: note = bridgeRNA
cctgtgtgtaggggatgtgtcaggatgggtgcgggcgggagatcgttgggtccctggtcgtgaagaccgctccccggcacggatccccgcccgcgttccaagtacccaaacctgaacagttgatcgaggccgcatcaccggacctcgcagcacagggataggccccatgaccatacaacctggctttgtcggttgcgacatctccaaagaccatctcgacatttttgatgaggcgctcggcaggcccgagcggatcgccaatgaagcgacggcgctggcaccactgatcgaacgctggaagaacaaggacatgctggtgctcttcgaggcgaccggcccttacgatgcctgcctgagacgggcgctgacaacggccgccatcccctttgcccgcgtcaacccggctcgcgcccgcgacttcgcccgcgccaccggacggctcgccaagaccgatgccattgatgcacagatgctcgccgccatggcccgcagcttgcgtccggcatgcgagcccgcaccgtcgcccgaacgcgaggcactggcccgcctgcacaagcgccgcgaccagctcgtcgccatgcgcaagcaggagcgcacccgtctcgccgccatcgacgatcccgccatcgtcgaagatatagaggctcatatcgcctggctcggcacccgcattgtcgagatcgaacggcaaacccgcgacctgatcgccgccaccgatcggttgagcgaagaccggcgcctgttgcgttccgtgcccggcatcggtcccatcgccgccgcaaccctcatcgccctcatgcccgaactcggcacccgctcgccaaagaccatcgccgcgctcgctggcctcgcacccttcaacgtcgacagcggccagttccgcggcaagcgcgtcatcaagggcggcagacggcgcatccgcgaggccctctatatggccgccatcaccgctgtccgttcaaagcaccgcttcgcgcgcatctacaaggccatggtcgacgccggaaagcctcccaaagtcgcactcatcgccattgcaagacgtatcctcgtcaccgcaaacgctatcctcagagaccggaccgtcttccagacctgacacatcaacacagttg

SEQ ID NO: 8974 - DNA, 1444 bp, unidentified
  source 1..1444: mol_type = unassigned DNA; note = element_e131050
  misc_feature 1..3: note = core
  misc_feature 4..234: note = LE
  misc_feature 235..1170: note = CDS
  misc_feature 1171..1444: note = RE
  misc_feature 1..230: note = bridgeRNA
cccgttacctttttcgtggctcttgatcgaggacccccggtcgccgggtccggcatgacttactgcccctgtcgttgatgatccggggggtgttgtcaccggccccggtggcgtcggtggaccgctgagagggacatggccgcctgcgggttggtctcctcgtcacgtggctgccggcaaccgtcgccagaccagcgtccgggccgtgcggcgaacacacggggaggagaccgcgtgagcagcgagtacgcggtgtttctgggcctggacgtcggcaagggcgaacaccacgccaccgcgttggacccagccggcaggcgccggtacgacaagccgctgcccaacgacgagacccggctgcgggcttcacccggctcgccgagcacggcccggtgctggtcgtcgttgatcagcccgcctccatcggcgcgttgccggtcgcggtggcgcgtgcctgtggttgtcaggtggcctacctgcccggtctcacgatgcgccggctggccgacgtgcaccccgggggagggcaagaccgacgcccgcgacgcctacgtgatcgccgacgccgcccgcaccttgccgcacacgctacgccgggtcgatgccggcgatgaggcgctggccgagctggaggtgctggtcggcttcgatgacgacctggccggcgaggcaacccggatcaccaaccgcatccgcgggctgctcacccagatccaccccgccctcgaacgggtcctcggccccaggctgcaccaccccgctgtgctggagctcctctcccgccacggcggaccccaaggcctgcgcgccgccgggcggcgccgcctgctggccatcgcccgcaagaacgcaccccgcatgggcgaacggctcatcgccgaggtgttcgccgcgctggacacccagaccgtcaccgtccccggcactcacgcggcccagaccgtcctgccccgcctcgccgaggcactgcgttcggtactggaccagcgcacgcagatcgcggccgaggtcgaaaggatcctcgatgcgcaccctcttgcccaggtcctgacctcgatgccgggcatcggagtcaggaccgcagccaggatcctgctcgaagtcggggacggcagcggcttttccgaccgccggtcacctggccgcccaccgccggcctggccccggtgacccgccgctccgggtcctccatccggggcgaacacccaccccgcggcgggaacaagaacctcaaacgggcgttctttctcgccgcattcgcggccctggccgacccggccagccgggcctactacgaccggaaacgcgccgaaggtaaacgccacaacgccgccctgatctgcctggcccgacgccgctgcgacgtcctgttcgccatgctccgcgacggcaccctctaccagcacccagccacccaaaccacttgaccaaacccatagggaca

SEQ ID NO: 8975 - DNA, 1161 bp, unidentified
  source 1..1161: mol_type = unassigned DNA; note = element_e1311c4
  misc_feature 1..2: note = core
  misc_feature 3..199: note = LE
  misc_feature 200..1153: note = CDS
  misc_feature 1154..1161: note = RE
  misc_feature 24..213: note = bridgeRNA
cttgtgtgatcgctgactgatagattgtcggtgtcttccgggacgtccgcctggcgtagccgcgccaggcggacagccgtcggagggaccgtagccacctgagctcttgcgagctgtgggggagcagggtcgccgtcggcgcttcactgacccggatggttgcagggacgtagaggtccgaagccacaaggaggggtcgatgcagcagaggaagactagcacgaagtgcgccgggatcgacgttggcaagcactggctcgacggagcggtgcacggccaggccgagacggagcgggtgagccgcgatgcggctgggatcgatgtgctgattgcgtggctgcaaggccatggggtcgagcgggtcgggctggaggcgagcggcggctacgagcggatggtgatggaggcgctcgaagcggtggggcttgaagtggtgttgcaccagccgttggaggtgcgcctgtttgcgcggctgaagcgtctgcgggcgaagaacgatcggctggatgcggcgctgatcgcagcggcgacggcgcaggccgatgcggcgaaggccgcggctgatcccaagctgcgggatctggccgatcggctgacggcctacgagcagatcggcgaccagctggccgagctgaagggtttcctcgagcacgtcgcgccgaaggacgtcatgcgccagctcaaggctcaggtcgcctctctggcgcggctgaagaccaggctggcggccggcgtgctggaacgccttaagtcccatcccgaccttgcagcccgctacgagctgctgatctccctgcccggcgtcggaccgatcgtcgccgccagcctagtggtgcgcatgcctgagctgggccagatgaagcgcggccaagctgccgccttgctcggcgtggcgcccttcgaccgcgactccggtcaactcaaaggcaagcggttcatcgcaggcggacggcgcaggccaaggcggctgatctacctcgccgccctcagcgccaagcgctgggaccccaaccagaaagccttcgcccagcggctcgccgctcgaggcaagccggcaaagctgatcgtcgtcgccgtcatgagacgcctcatcgaagcagccaatctcgtcctcgccaggcaaaaaccctggatcaaagcaaccgcctcctaacatggttg

SEQ ID NO: 8976 - DNA, 1370 bp, unidentified
  source 1..1370: mol_type = unassigned DNA; note = element_e131ee8
  misc_feature 1..2: note = core
  misc_feature 3..79: note = LE
  misc_feature 80..1117: note = CDS
  misc_feature 1118..1370: note = RE
  misc_feature 1118..1358: note = bridgeRNA
tgatggggtggacggcccccgtacggcatcgcgatgtgccagattgaggttgttgagcttcaatcgaaggagaccgtccgtggagcagattacgcgcattttcatcgacacgtcgaagcagttcttccagctgcatggcgtgaacgcagccgaagaggttgtacttcggcgcaagctgaagcgggatcagtttgtggcgttcttcgccaagctgccggcgacgttggtggggctggaggcgtgcggggcctcgcattactgggcgcgcgagctgatggcgcagggccatgcggtgaagctcgtgccggcacagtacgtgaaggcctacgtcaagcggggcaagaacgacgcgcgcgacgccgaggcgggatgcgaggcgatgagccggccgacgatgcgcttcgtgccgatcaagagcgccgagaaccaggcgtcgctgatggtgatgtcgatgcgcgagcgcctgacccgcgagcgcacccggctggccaacacgatccgcggccacgccgccgagttcgggctgaccgcgccgaagggggttgcgcacatcgcgccgctgctggcggaggcggctgacgccgagggcgttccgaagctggccaggcagatgttcgccaccctggcgcgtgagtgggatcgcctcggcgtcagccgaagggaggccgacgcaaggctgatggcgtggcatcggaccgacgcgctgagccgccggctggcccaggtcccttctctggggccgatcggcgcttcgatgatggtgatgaagctccccgatccgaaggccttcaagtcggcccgtcacttcgccgcctggatcggcctgaccccgaaggaccattccaccgccggcaagcagcggcttggcgcgatcacctgcgccggcgacgaggcgctgcgcagcgtcctggtggtgggggccaccgcggtgctgaagcccatcggcaagggcggcggtctcagatcgccctggctgctgaagctgctcgagaaggacaagcccaagctggccgccgtcgcgctcgccaaccgcgtcgcgcgcatcgcctggaagatgatggtcaccggcgaggcctacgatcccaagcgcctgatgcgcgaactgcctacgacctgacgaaatcacccaggctcaatctgggcgatgccgcaacttgcaagaaaaggacaggtggtgcgatcgatcgatcccaagcgcgagacactccgagcgacccaacgggacccaagcccgtgttcttgaatggaactcgcgccgcgaaaaccatcttggcgagggtcaacccgaccctcagaccgtacatatggccgcaagcaaccgatcagtccccaacctacgccccatcttgcaatagggggccgtccacata

SEQ ID NO: 8977 - DNA, 1371 bp, unidentified
  source 1..1371: mol_type = unassigned DNA; note = element_e1393b4
  misc_feature 1..2: note = core
  misc_feature 3..75: note = LE
  misc_feature 76..1110: note = CDS
  misc_feature 1111..1371: note = RE
  misc_feature 1083..1359: note = bridgeRNA
tgatggggtggacgccccccgacggcatctatgtgccaaagtggaggtgttgaaacaccactgagggaggcgtccgtgttgcaagctagcacaatcggtttggatatcgccaagaacgtttttcatgcgcacggcgcggacgcgcgcggtgcgatggtcttcagccgcaagctgacgcggggcaagctgctcgacttctttgccggtcaggctccgtgcattgtggcgcttgaggcttgcggtggggcgcaccactgggcgcgcgaattgcaggcgatggggcatgaggtgcggctgatcccgccggcttacgtgaagccgttcgttaagcggtccaagaatgacgctgtcgatgccgaggcgatctgcgaggcggtgcagcgtccgggcatgcgcttcgtggcggtgaagagcgaggagcagcaggccgccgggctcgtgttccgcacgcgcgatctagcggtgcgccagcggacccaactcatcaacgcgatccgtgggcatctagcggagtatggctgggtggcgccacgcggcacggcgcatatgacgatgctcgctgatctactcgatgatgctgagatggcctcgagcttgccggaggcggcccgaccgatgttcaagctcatggtcgacatgctggccgagctaaccgaccggatcgctgtgctcgaccgcgagatcgcccggcgtgctcgcgaggatgaagcggcacggcggctgatgaccatccccgggatcgggccgatcgctgccaccgccatcctcgcactggcgccagcggtggagacgttccgcaagggtcgcgactttgccgcctggttgggattagcgccacgtcagcactcgaccggaggcaagcagcggctcggcagcatctcgaagatgggtgagcgcacgatcaggcggctgctcatcatcggcggcagctcgatggtccgcagcgcctgtcgtcatggtgcgccggctggctcgtggctggagcggatgctggcgcgcaagccgcgcatgctcgtctcggttgcgctcgccaacaagatggcacgcatggtgtgggccctgctcaccaagaaagaagattacagagctccggccatggtcgcggcgtaaagccgggatcggggtcagaggcgtcggggacgtaggcggtcgaaggagggtatggcacaacagtcggcgagacggggccggaagaaccagtgaacggcagagcgctaaccaagcgcgcaaagctgttgtggatccggtccgcgaactcccatacgggcccgcagcaccatcgctgctccaagaggccggacagatggcagcacccgactacgtgccgatataccccgatttactgcttgcatccaaaggggcgtccacaga

SEQ ID NO: 8978 - DNA, 1461 bp, unidentified
  source 1..1461: mol_type = unassigned DNA; note = element_e150f8e
  misc_feature 1..2: note = core
  misc_feature 3..226: note = LE
  misc_feature 227..1441: note = CDS
  misc_feature 1442..1461: note = RE
  misc_feature 7..224: note = bridgeRNA
ctaatggggacggatcggccggaaaatagaggctgatcttccgagccagcgacgggttagcacttagttggcccgggcacgcagctctaaggctagagagtgcgcccggcgcttggtgaggagagctgacgactagtgggatgtcgtgccttgagcactgatccattaggcggtcgcggagctcctccgggcttggaaggaattacacgactggaggggatgaccattgctcttcgtggggatcgattgggccgaagaccatcacgacatttgcatcctcgacgagtccggtgacgtgctgaggcggagacggatcgaagacgggctgtcgggcctcgagacgctgcaggcgctgctggccgagttcgctgccgatccgactcaggtgatcgtggggattgagacggaccgtggcctgctggtgcgcggtctcctggcgagtgactacgaggtctatgcgatcaatcccaaagccgtgagccgctatcgcgatcggcacgcggtctcgggggccaagtcagatgccggcgacgcgaagctgctggccgatctggtgcggaccgaccgccataatcaccgcccgatccaaggagattcggagctgactgacgcggtgaaggtgctcgcgcgggcgcaccggagtctgatttggacgcggcagcggcaagcgaaccagttgcgccatctcttgcgcgagttttatccgggcgccatcgctgctttcggcagtgatctgacgtctactgatgctctggccctcctgatggccgcacccacgccgattcgtggccggacgctgagccaagcgcaaatcggctccgccctgcgccgggcgggccggcagcgacagatcgaggccagggcggcccagatccaggcggcgctccggcagccgcagctccaagcgtcggcgcgggtggccgacgcgtacggggcgacggtcgctgctacggtgccgatcctgctcgaactcaatgcccaaatcgctcacctcgagcaagaactgaagaaggcttttgaagaacacccggacgccgagatctaccagagtctgcccggacttgggattgtcctcggcggccgggttctcgccgagttcggcgacgaccggactcgctttcagcatgctaaagcacgcaagaactacgctggcacggcccccattaccaaagcctccggcaagagccagatcgtgttggcccgggtcgcccggaatcgccacctagccgatgcctgttatttatgggccttctcctcgatcactcgctcacccggtgcccgccgctattacaccgcgctccggcagcgaggcaagacccatccccaggcgcttcgcagcttggccaaccgcctggtcgggatcgtgcacggttgccttgcccatcggcagcggttcaacgaagctgtggcgtggccttccgctgccacgctcgccgcttgacttttgccgacgtgggatgt

SEQ ID NO: 8979 - DNA, 1374 bp, unidentified
  source 1..1374: mol_type = unassigned DNA; note = element_e155439
  misc_feature 1: note = core
  misc_feature 2..72: note = LE
  misc_feature 73..1107: note = CDS
  misc_feature 1108..1374: note = RE
  misc_feature 1150..1367: note = bridgeRNA
tatgggatggcccgcccctcccgccagtaccgagttatggtgccggtgtgtttgagaggaaggagcgaaccgatgaccatcgtgactcttggaattgacctgggcaagaacctgaacagcattgttggccttgatgtggagggacgggtcgtcctgcgccgccgcgtgagaagggcgaccctggccgaacttgcaggcaagctcgcaccctgcacgattgctatggaggcgtgctgcggagcgcatcacgtcggccgtctcttcgctgcgaggggacatgaggtccgactgatgtcgccggagtatgtccgcccctacgtccgtgcacaaaagaacgacgacaatgatgcggcgggcatcgccgaggcggctacgcggccgaccatgcgcctcgtcgagttgaagagccaggaacggctcgacctgcagaccctgcaccgcgcgcgctcgcgcctgattgcggttcggaaggcgctcctaaaccagctccgggcgatcctgctcgaacggggatacgtcttccgccaagggcgcaaggttctcgaaccggaaatcgatccgttcctcgccgagccgccttcggacctttcgacccgcatcctgacgctcatcggggacatgcgagccgagtggcgatcccttgatgagcggatcaattctttgaacgacgacctgaccgagcatgcacgtgccgacgaggcggcgagccggctgacctcgatacccggcatcggcatccttggcgcaaccgcgctggttgcagccatcggagacggtgaggcgttccgtcgggcacgcgacataccagcctggctcggcctcgttccgaagcagatgacgaccggtggtaagccacggctgctcagcatcaccaagcgtggaaacacctatctgcgcatgctgctgatccacggggcgcgtgcggcactgccgagcctctccaaacaagcgacacccttgggctcgtggcttcgaggtcttctgtcacgagcgcaccgcaacgtggtcattgtcgcgctcgcggctaagctcgctcgcatagcgtgggcaacgctgcggcatggtgtaggcttcgagccggaaaagggcacggtgatgaccgcctgagcggagctgtacagtcgaaaagatcggccccggatcgccggagccatgtgaggttggcggaaggaggctgatggccggaagggtcgaacacccgcgtccctggaagcctggttcaaaaaacggcgctatgacgccgggacttttatgaggaccaggacgcgcggatctccatcatggcgagggcagcaatgccactacgccggatacgttagtgcacgaccaaacaaagcctgaagcaacccacttgccaacggggcgggccatacg

SEQ ID NO: 8980 - DNA, 1384 bp, unidentified
  source 1..1384: mol_type = unassigned DNA; note = element_e157cbf
  misc_feature 1..2: note = core
  misc_feature 3..68: note = LE
  misc_feature 69..1112: note = CDS
  misc_feature 1113..1384: note = RE
  misc_feature 1152..1371: note = bridgeRNA
tgatgtggtggacgacgcccgctcccggcatcgaagtgccatagggtggttcgtcggagacgaatcacatgaggggagccatccacatgcaaattaccacgatcggtttggatatcgccaagaacgtgttccaggttcacggcattggcgccgcccagaaggtcatcgtcagaaagcagcttcgccgcggacaagttatggcgttcttcgaagctctggcgccgtgcctgatcggtatggaggcctgtgccacgtcgcaccattgggcgcgcgagctgacgaaactgggccacatggttcgtctgatgccagcgaaggatgtgagggcctacgtcaagcgcaataagaacgatgccgccgacgcggaagcaatctgtgaggcagtgcggcgcccaaacatgcgtttcgtacggattaagtcggccgagcagcagggccagctgatgctgcatcgagcacgcgatctgctgatgcgccaacgcacccaggtgataaatgcattacgggcgcatttggccgaattcggcattacggctgcacaggggcgcgaagggatcaaagagttgttggcggtcgtcgtacaggatgagggttcgcgcttgccggtcgacgcccacgccagcctgaccgtactagcggcgcagcttcagtctgtgcagacgatgatcggaacgctcgagaaacggatcattgcgcagcatcgctcgaacgaggcaagtaagcggctcgagaccatccccggtatcggagttatcggggccaccacgatcgcagcggtcgtgccggatccgagggtttttcgatcgggccgtgattttgcggcctggatcgggatcgtgccgcggcaagattcgaccggaggcaaacagaagctcgggccgatctcgaaacagggcgaccaatacctcaggcgcattctcattgtcggagcccatgctttcttgcggcgtgcgcgccagcagccggataagtatccctggctcactcagcttctcgctcggcgaccgttcaaggtcgtcgcggtcgcgctggccaacaagatggcgcggatcgcttgggcgttgctggccaagggcgggacctaccgagcgccccaactcgcggcagtctaacaaggagctcggcaatggaaggatgaggttgcgtctgtgcgtaactgcaggggtgatgacgacattgatgcgaaacggtcgggaccgtcgattgggaaaacccgtaaagtgccacgcgaggaaagaacgcgtgtttttggttgggaccgatcagcggatcacatcagggccagcagccaaaacggctgcattcaaaggccggatacatggctgcacccgaacgcttcgctgaaacgttagattcctcttgcaccgcgggcgccgtccataca

SEQ ID NO: 8981 - DNA, 1491 bp, unidentified
  source 1..1491: mol_type = unassigned DNA; note = element_e15840e
  misc_feature 1..3: note = core
  misc_feature 4..233: note = LE
  misc_feature 234..1445: note = CDS
  misc_feature 1446..1491: note = RE
  misc_feature 13..198: note = bridgeRNA
atccatacctttcttcatgggttgatccgggtcattcgtaggatcgggacacccaggagtgtcgggtgtggctgtcacccgagagccgatgatgtggcttccactgattggccgcccgacgctccgcgacggctcggccgctgattgggatgcgcgaactggatcgctcgtatggatacgtcggcgaggtcgtctgctgggaggtacgtacacgcacgacgaaggaggacctcgtgcccgaactgtgggccggaacagacgccggcaaggccgagcaccactgcacggtgatcgacaccgacggggtgacgatgctgtcgcggcgcgtgccgaacagcgagtccgaacttctggaactgctgggtgacgtcctggaactggccgacggtgccccggtcacctgggcggttgacctgaactccggcggggccgcgctgtggatcgcgctcctggtcggccacggccagaagctgctctatatccctggccgtactgtgcaccacgcctcggccgcgtatcgcggcagcgggaaaacggacgcgaaggacgcgttcatcatcgccgacaccgcccgtatgcgccacgacctgctgcccttgcaggaaaccagcgagatcgccattgacctgcgaatcctgaccgctcgccgcgcggacctgtcggccgatcgcacccgggcgatcaaccggctccgtgggcagatgctggagtacttccccgccctggagcgagccttcgactacagcacctcgaagagcgcgttggtcctgctgacgggttaccagaccccggccgccctgcggcgcgtcggccgggcccggctggccacctggctgaacaaccgcggcgtccgcaccgaccacgccaggaatgccgccgacaccgcggtggccgccgccgagactcaacacgcggccgtccgcggggagaggaccgccgcgaagatggtccacgccctggcccgggatgtcatgaccctcgaccgggagatcgaggaactggaagccctgatcgtgggctgcttccggaagcatcccgacgccgccgtgatcaccagcatgcccggcatcggatacctgctcggcgcggagttcatctccacgaccggcggcgacatgtctgccttcggcagtccagaccggctcgccggcgtcgccgggctggccccggttccccgagactcaggcaaggtcagcggcaacctccgccgcccccgccgctacaaccgacggctccttagattgttctacctctccgcccaggtggccgccgtgtgctgtcccgagtccaagcggttctaccagcgcaaacgcgctgaggggaagtcccacaagcaagccgtccttgcgcttgcccggcgccgtctcaacgtcctatgggccctcatgcgagaccacaggtacttcgagaccgccgctgcccgcgccggtgccacagcgacatgacgccttcaccgcatgtcaccacagccacttgacaacctgattggga

SEQ ID NO: 8982 - DNA, 1437 bp, unidentified
  source 1..1437: mol_type = unassigned DNA; note = element_e15e00d
  misc_feature 1..2: note = core
  misc_feature 3..122: note = LE
  misc_feature 123..1157: note = CDS
  misc_feature 1158..1437: note = RE
  misc_feature 1189..1389: note = bridgeRNA
agatggggtaatcggccgacgtttttgtggatagctgaagagaatttgggtgctgcgcttcaggctgatggtgaaacgaggtccgtgtgtacggcctcaagcatcagaaggagaagcgcagcatggagcattttgccggactggacgtgtcagtcaatgagacgagcgtctgtattgtggatgatacgggcaggatcattcgcgaggtgaaggttgcgagcgagcctgaagcgctgctggcggtgctgggcaaccctgcctgccagttcaagcggattgggttagagtcggggccgctgtcgcagtggctttacagcgcgcttgccgaagcgaatttgccggtcatctgtgttgagacgcggcacatgcgggccgttctgaaggcacagatcaacaagaccgaccgcaacgatgcgcggggcatcgcgcagatgatgcgggcgggactttatcgtccggtacatgtgaagacgttgcgtagtcagaagctacgcatgctgttgacccatcgcaagctgctgcagtcgaaggccattgccatcgagaatgacctgcgcggcaccttgcgcaccttcggcctcaaggtgggggtggtggggatggtgaagttcgagacgcgcatccgagaactggtcgagaagctccccgatctgcgcacgctcgttgaaccattactggttgtccggcgggtgctgcgcgagcagatcgccgtgcttcaccgacgcgtgctggccatcgtccgcaacgatgaggtgtgccggcgactgatgagcatccccggtgtcggaccggtggtggcgctgacctatcgcgctactgtcgatgtgccggcgcgcttccgcaactccagggcggtcggggctgtgctgggactgacaccctgcaagtatcaatccggcgagagcgattacaccggcggcatctcaaaatgcggcgacgcgatgctgcgggtcatgctctatgaggcggcccagatcctgctggtccgttcaacacggtggtcctggctcaaggcttgggcgatgcggatcgcccgccgccgcggcatgaagaaggcaatcgtcgcgctggcgcgtcgcttggccgtcatcatgcatcgcatctgggttgatggcaccgagttctgctggacccggcaacaggccgcagcagcatgacaacgcgagatcaaacccgataggagaaacgtgaactccaccgcgtggtggaatgatgtccctcgcgggacgatggatgaggtgagatcgcatgtctgcttggacctgccgtcagcttgccggcaaggccgccccttagattggtccacctcgttctcgaaccccatgatggaagggccctggtgccgattccggagagaagcacgagcccgtgagcgacatcgacactgcagttggtggatagtctgaaagcgcttgacccaaaccggccgattagaga

SEQ ID NO: 8983 - DNA, 1260 bp, unidentified
  source 1..1260: mol_type = unassigned DNA; note = element_e1619de
  misc_feature 1..3: note = core
  misc_feature 4..211: note = LE
  misc_feature 212..1225: note = CDS
  misc_feature 1226..1260: note = RE
  misc_feature 8..201: note = bridgeRNA
tgcctttagtttgcacattaaataaatatacaataaattaactgaaaaggaaacgggtgaactataacgttttgtagggatgaagccctattagctgcattagtcccgtttcctttattcagacttgccagagctaattggaatgataggcttaaaggcctgataaaggcaatcgcaaagcaagttttttattaacgttaaaaacaaaattatgaaaaaaaatcaagaaattaggctgttttctgagagtgttggcattgatgtttctaaactcacaatagatgtatttctatacaacaaaaagagccatcgtcaatttggaaatacagccaaagggtttattttaatgcaaaaatggataaaatcggaggtgaatgattttaatgatctgatttattgttttgagcatactggctggtattgcattttactaagtcattttctgcacgaagaatcattgttttattgttgcataaatcctttggagcttaagcgctctatgggttttaaaagagggaaaacggataagaccgattcttacgagatagcaagatttgcctggttgagaaaagaagaattgaatgcatctgtccccatgcctctgaagttaatagagctacagcgcctaatgagcataagggagcaatttgtaaagcaatccacagcgcttaagaatttagaaaaagggttgctggttaccatagaaaaacttacaaatgacattggactcaaggtgattaggcaatctatattgcaactagaacaacaagtaactaaggtggaaaaagcaatggaggaactaattaagttagaaccagaaatgacgactaattacaaacttagcaaaagtgtgaaaggtgttggcaaaattctagcaatacaaatgctactacatacccataatttcactcgttttaatgaatggcgtcaattttcagcttattgtggactggtaccatatccctttcaatccggaacaagtataaatggacgaaagaaaatccattccataagtgatgttaaaatgaaaagtttattgtcaatgtcagctataagtgcaattcaacacgattcggaactaaagatgtattatcataaacgggtagaggaaggtaagccccaaatggtagcattaaacattattagaaacaaaatagtatccagaatatttgccaccgtaaagcgaggaacaccctatgttgaactaaataaatttgcttcttaaaataattgagaaaaaacttgtttttgatcttggaa

SEQ ID NO: 8984 - DNA, 1237 bp, unidentified
  source 1..1237: mol_type = unassigned DNA; note = element_e17420e
  misc_feature 1..2: note = core
  misc_feature 3..69: note = LE
  misc_feature 70..981: note = CDS
  misc_feature 982..1237: note = RE
  misc_feature 984..1226: note = bridgeRNA
ttatgggatggcccgcccctccttcggcgtcggcgctaagctggcgtggtctggggagaggagagagcgatggcgatcaccgtgttgggtatcgatctcggtaagaatagctgcagcgtcgcgggtttcgacgagacgggccgtgtcgtccttcggcggagactcacgcgagacggcgttgtccggctgggcgccaaactgccggcttgcacgatggcgatggaggcgtgctgcggcgctcaccaccttggccacgtcctgcgggagcagggccacgaggtccgactcatgtcgccggagtacgtccagccctacgtcaaagcgcagaagaacgacgagcgggatgcggaagcgatcgcagaggccgcgacccggccgacaatgcgcttcgtcgagttgaagagcgaggcgcagctggacgcgcagatccttcatcgtgcccggacgcgcctcgttggacagcggacggcattgatcaaccagctgcgcgccgtgctcctggaacggggcgagctggatcgccgtgttgctgcgctgacgaccgagttcgtagccagggcccgcgaggaccaggctgcacggcgcctcgtcagcattccagggttcggggcgctgaacgcgaccgcattggttgccgcaatcggcacgggcgagacattccgatccggtcgtgatctcgcggcttggctgggcttggtaccgcggcaagcgacgactggcggcaaaccaaggctcctcggcatcacgaagcggggcaacacttacctgcgcacgctcctgatccacggggcgcgggcggctctgccgtcgctctcggcaggccagaccctgatcggcgattggctgcgtggcctcgtcggccgtgctcacaagaacaaggtcgtcgtggcgctcgccggcaagttggccaggatcgcatgggcggtactccgctccggcgagggctacgcggccagggtcagccagcctgtggcggcctaaacgagatcgatcgccagggcggcccggcccggcgatcgacgatgtctgcgggcggtggaagcgagatggcctgacggttgaaccggcaccctgtgatcctgacacaaaatatggcgctcgacgccgtgtcttttatgaggaccagggtgtacggaactccatcttggccggggcacgcccccgagaccggatacgttggcgcagacaggtcagatcacctcgcacatgccgcttgcagatggggcgggccatacgt

SEQ ID NO: 8985 - DNA, 1585 bp, unidentified
  source 1..1585: mol_type = unassigned DNA; note = element_e178af8
  misc_feature 1: note = core
  misc_feature 2..182: note = LE
  misc_feature 183..1457: note = CDS
  misc_feature 1458..1585: note = RE
  misc_feature 6..224: note = bridgeRNA
tcgtattatgagatcaaccagttctttctggttgatccttttttcatttgcatagaggattaaggtagcctggtcgaacgtacctgcccgtgggacttgaacccgagcgctatagtgttcacccctacttgtcatgaccatgattgaggctggttgggacgtaagatcccgtataacaagcgatgctatggagcgacaagaagaaccttagggatgccggggaatctaaacttaaagggagagatgaaatgaatccagttgtcggtctagatatttcaaaagaagaaagtcatggacaagcctttttagcgcgcggaaagcccttcagagggacattccacttcgagcacactcgtgatggcctagcaaatttacatcaagttttgaaggatgttgagactgcatccagactacgtcctctacttattctagaagcaaccggccattaccaaagtccggttgttcagttcctagaagaacatcactacatttacattgtcattaatccgctcatctcaaatcggcttagaaagtctcatcttcgtaaagtaaagacggatgctgcggacgcttacctattgggagagttgtactacaaggaagagtttgaaccttttaagaaaagaggtgtgcaacttctcaatctgcgctatcttacaagacagtatgagtccctttcaaagatgtgtgtacagacgaagctgcaattccaagccgttttagatcaggttttcccagcttacaaaggcgtctttggagctatgtattcccgtatttcactacggtttttaagtaaatttccaacctcatattcagttttgcagacggatgaaattacactcaaagctaagatgaaagaactactttcttcgaaacgggggcgttcagagggctggattaaccaacgggttcagcgactgctagacgcggcaaagcaaaacccatttcagcaaaccatgtatgcaagccacttaatcaatttgaaagttcttattaccctcattcttcagtaccaagagcatcttgctgaactggaacagaacatagatgctctggctgaagaaattgaagagcatgaattaattcagtcgattcccggtattgggcataaaattgctgcaacaattttatctgaaattggagaagtcgaccgatttgatcatcctaaaaagctagtggcttttgcaggcattgacccgagtgtctttgcttccggaaaatttacagcaactcgaaatcgaatcacaaaacgtggttccaggcagttgcgttacgcactggtaatggctgtccagtgtgggcttatacgctcccgaaatatgcgactcaaagcgttctatgatcgcaagagagcagaaggaaaaccacataaagtagctctaatcgcatgtgcaaataagctcgtccattggctttatgcaatcttaaaaaacaaaaaggaatttcgtccaatttaaaagattatcattggcataaccttccaagacacaacggaaattggagggttatttggcatgctcattttaactataccacatgatttagaatcactttactggtaatcttgacaagctattagctggta

SEQ ID NO: 8986 - DNA, 1549 bp, unidentified
  source 1..1549: mol_type = unassigned DNA; note = element_e17b547
  misc_feature 1: note = core
  misc_feature 2..230: note = LE
  misc_feature 231..1526: note = CDS
  misc_feature 1527..1549: note = RE
  misc_feature 17..245: note = bridgeRNA
ctatttatgtcttccatgactgcccggcctggcgcaggctcgggtgaggtgcccggccggacgctctctttgcggctgcccgcctggagtgatgggtgtggctctttcatggcatgcgtcttggccgggtgccgtggcggggcgtggctcaagaagggtctgctcagctcgtaatagcgttgcccgtcctcgccggcaaagtgatccgcctgaggcgaggaggcatggcgatggacagggttgtcatcggggttgacccgcacaagctgtcggtaacgatcgaagcccgggatcaccgggagatcctgcgggctgtcggccagttcgccaccgacgggcgcagctaccgccagctgctcgaggtcgcgcggcagtggccggagcgtatctgggcggtggaaggcgcgaacgggatcggccgcccgctcacccagcggctgctggccagcggggagcgggtgctggacgtgccggccaagctcgccgcccgggcccgggtgttcgataccgggcagggccgcaagaccgatgctacggacgcgcacgcgatcgtcatggtcgccctgcgggacaagggattgcgcgaggtcagcaccgatccggagctgatggtgctgcggatgctgtgtgaccgccgcgacgagctgtcccgcgcccgcgcacaggccctcaaccggatgcaccgcctgttcctggggctgcttccgggcggggcgccggtgaagaaatccgtcagccagtaccaggcgctgctggccacggtccggccccgtgacctggccgggaagacctgccgccggatggctgctgaggaactggaggacctgcaccgcctggacgccaagctcaagggcatgaaagctgagctcaaggcggcggtcctcgcgacgggctcgcacctgatggacatccatggcatcggcccggccggtgccgcccggatcctcgccgacgtgggagacatcagccggttccctgaccggaaccacttcgcgtcctggaccggcaccgcccccatcgacgcgtccagcggccagcatctgcgccaccggctgtcccgcgccgggaaccgcaggctcaaccacgtcctctatatggccggcatcgtccagctccgcaacgacaccgcaggccgggcgtactaccggcgcaagcgcgccgccgggaagacctcgatggaagcgatgcgctgcctgcgccggcgcctgtccgacgcggtctaccggcagctggcagccgacgctcccggtcaggaagaagcgagcccgggagggcaccccggggcgtctttgatatccagcgcggccggcctgtccccggacaccggcacttcggataagccacttcccggacccgcaccccagacgctaccgccaccacgcccagctccacagcccatggcccccgcagccgctgccacccggcggcgcgcccgaggtgtcaacgtggagcgcccaaccggacgaacgacgttgacaccgaccagcgccgccatacgctcaacagcgctggggccatgcccttgacagatcccttcatagaagggagc

SEQ ID NO: 8987 - DNA, 1461 bp, unidentified
  source 1..1461: mol_type = unassigned DNA; note = element_e1912de
  misc_feature 1..7: note = core
  misc_feature 8..245: note = LE
  misc_feature 246..1448: note = CDS
  misc_feature 1449..1461: note = RE
  misc_feature 13..234: note = bridgeRNA
agtccttaagtttgtaggtgcagttacttcgtgagagttacgttgagctgtaacccgggtggatcgggagaggttgcatgggttttgctggctttcgggtgtggcttgaaaggactgaccacccgacccatctggacacctcggaccgctgattgagatctgcgatgtgatcgcttgtttaaggaaatgccggcggggtcgtccatcggggccaggttggaacacaagcgaaaacgaggagatcgatgaccgattcgcacctgtgggcaggaatcgatgtcggcaaggaacatcactggatatgcgtcctcgacgcctccggtgaggtcgtgctgtcgcgtcgattcgccaacgacgagaaagaaatcatctcggtgatcactgacaccgaatccctcggcgattcggtgtcgtggacggtggatctgaccaccgtctacgcgaccttgctgttgaccgtcctcacgaaggccggcacacctgtgcgctatctgtccgggcgttcggtctggcaggcctcgacggtctaccgcggcggcgaggccaaaaccgacgccagggacgcccgggtaatcgcagatcagtcccgcatgcgctccgacctgcccgtgttgcatcccgatgacgagttgatccgcgagttgcagatgctcaccggccaccgcgccgatctcgtcgccgaccgcacccgcaccatcaaccgcctgcgtcagcaactcgtcgctgtgtgtcccggactcgaacgtgtcgcgcagatctcctcggatcggggttgggtggtgctgctgacccggtaccagcgacccaaagcgatccgccgtgcgggggcagcacggctggccacgatgctcgccggctccggggtgcgcaatgcggagtcgattgctcaggccgcggtcgctgcggcgaaagcgcagacggtgcggctccccggcgaagatatcgctgccgaactggtggccgagttggcgcagggggtgatcgacctcgacgtgcgagtcagagccgctgacgctgcgatcgaggctcgatttcgtcggcaccctctggccgaggcgattgtgagtctgcctggaatagggttctgtctcggcgccgaatttctctcggctgtcggtgatccggcgctgatcggatcggccgatcgactcgcggcgtgggccggtttggtgccgagacccaaagattcgggtaaacgcaccggacgcctgcacactccgcagcgttacagcaggcgtctgcgccgggtgatgtacatgtcggcgctcactgcggcccgttgtgaccctgtttcgcgtgcctactacacgcgcaaacgggccgaaggtaagcgcccgatccaggcaacgatctgcttggcgcggcgtcgcgtcgatgtcctctacgcactcatccgcgacaaccgcacctggcaaccggacgcgccggtcgccacggttgcggcttgacaggatcattgag

SEQ ID NO: 8988 - DNA, 1639 bp, unidentified
  source 1..1639: mol_type = unassigned DNA; note = element_e19570a
  misc_feature 1..2: note = core
  misc_feature 3..424: note = LE
  misc_feature 425..1510: note = CDS
  misc_feature 1511..1639: note = RE
  misc_feature 12..284: note = bridgeRNA
ctgttacaatatatttgcctcggaaaagtggcagccagctacgagccgagacatctcgttgcttaagctgttagaataggaaggtaatggtctgaccctataccccaagggcttcgtgcccgttgcgaagtcagtcagccatcctcctgttcgtagcattcgatttgtgcaggtagaaccgcgtgttcgtgtcaccaaacagatagaatcggcaatgggtaaagatagctctgtccattgcaaattctttcaggagtgatgaacatgaacgcagcaggcattgacgtttccagcagcaagagtaccgtggccgtacttcgtccttttggcgaggtggtaaaactgccattcgatgtgcgccacagcgccgaggagctggcctctctggcaaaacagcttaaatccattgagggcgcgagtagttatggagcacaccggacgttactatgagagcatcgccaaggttctccatgaagccggactttacgtttcggcagtcaatcctttgcttatcaaggagtacggcaataattctctccgcaaggtcaagacagacaaggcggatgccatgaagattgccaaatatgctcttgacaattggagcgaattgcgtgattatactcctatggatacaatccgctatgatttgaaaactatgaaccgtcagtttcagctggccattaagcagaaaaccgctaccgcaaacaacatcatcgcacttcaggaacagtcttttcccggtatccgcaagctgtttgacagccctgtgcgcggtgacggcacgcagaaatgggttgatttgacccatgacttctggcatgttgattgcgttcgcagcggcagtctgaacgcttttactgagcgttaccgcaaatggtgcaaacgaaaccgttaccagttcagcacagagaaagctgccgagatatatgctctggcaaagtccgctgttgtactggtgcagaaaacatctgtcacgaaaacgctcgttcaggccgctgctgaccagctcacagcgatctcgcgcagcgtagaaacttaccgcagcgagatgaacaagctggcatctcagctgcccgaatactctgtcgtcatggaaatgtacggtgttggtgaatcccttggaccgcagcttatggcggaaatcggtgatgtgcgccgctttgagcgtaaacagtcgcttgttgcttttgcaggtactgaccccgcgccgagcgaatcaggcaattactgctcccgtagcaataggaccaccaagcgtggctctccatatctgcgcagaacgctgttcaacattatgaaagtacatctgcaacgtgctccggcagacgaaccagtgttccagttcatggacaagaagcgtgccgagggcaagccgtactatgtttacatgatagctgcgggcaataagtttctgcgccgttattacggcaaggtgatggcatacttctcttcgctggaggatctgccgcctgtagatatggattccacaggtctgcatcacacgaaataacccactgtaatctggatcttcaggtcggcgcatttgcggcggccttttggggttgcgcttttctctgcctgctgcctacgatattttcttttgtcaagtccgcttggggcttgactttttatttgcagg

SEQ ID NO: 8989 - DNA, 1475 bp, unidentified
  source 1..1475: mol_type = unassigned DNA; note = element_e1a47f7
  misc_feature 1..2: note = core
  misc_feature 3..95: note = LE
  misc_feature 96..1175: note = CDS
  misc_feature 1176..1475: note = RE
  misc_feature 1200..1393: note = bridgeRNA
aaataagaagagactccccactttactgtaacggcatcaatgtgccaagattgggttgttaaacattcaatctaaaacttttaaagggggatcccatgttaaatgttactcgagttggcgttgatttggcaaagaatttgatccaagtttgcgctctagatgcgtctggaaaggtattggcgaataagtcattgcctagggataagtttcttgcctggtgtaccgagcagttgccccctgaatgcttggtagcgatggaggcctgttcgggctcgcatcactgggctcgagagctcaacaagcgaggttttacagcaaaaatcatttctgcaagccttgttgagccgtatcgaatggagggcaaagggggtaaaaatgatgccaatgacgcgtttgcggtcagtgaagcggcagccaggccaaagatgcgatttattccagtcaagagtcgtcagcagcaaggtcttctgtgtgttcaccgtattcgtgaagggttcaaagaagaaagaacgggcattattaaccgaatccgtggattgatagctgagtttggccttgttgtttccaagagtcctgaaaaactgcgtgagagcttgcaagacctacttgaggatgcagaaaatggtttggactggctagcccggttagccgttcaagagttgagcactcactgggaagccatagaccaaaaaatagattggtgtgaccggaggatcaatgcccatattgctgaagatacccaagctaaagcggctatgcaactgatgggagtcggtccgataacggcttcagcagtggtgacgaccgttgttgatttcaagcagttcaagaatggggcccagtttggtgcctggcttggtctgaccccaaggcaaaactcaagtggcgggaaaacaaaactgggcaagatcacgaaacgcggggatacctatcttcgaactctgctcatacaaggtgcgaagtctgcagtcatgagcgctcacaaaagagaggatcccatctcaaagtggttattcgagctaaaagaaaaagcgggctggcaaaaggctgcggttgccatggccaacaagaatgccagaatcttatgggccgtgatgaccaaaggcactgcctttgatccgcggcatgtgagcctgaagccaaccggtgaaatatcaccggcaatggcgatgtaaaaaagtggttgattaacaattttcttgcaagacgtaaaacaaagatagatttcacaggttagaccggcggtgggtaaactcgataagttgttggggatgcaattgcgaatacccgaaattcaaatggagtcctgccgagcggttcttatcttgggtcgcacttgagtgcaacaaacccgtctgtaaatttgcagtctaattcttgttgagtgatgtctttggtaagcgttgaacaagaaaaccgttaattaggaaagaaaaaactacagtcagtggttgactaggtggtgagtccctgta

SEQ ID NO: 8990 - DNA, 1412 bp, unidentified
  source 1..1412: mol_type = unassigned DNA; note = element_e1a4978
  misc_feature 1: note = core
  misc_feature 2..90: note = LE
  misc_feature 91..1125: note = CDS
  misc_feature 1126..1412: note = RE
  misc_feature 1182..1404: note = bridgeRNA
caatgggatggacgctcccacctacacggcatcgaaatgtgccaaagtggagatgcaaatcaaccacttgaacagacaggagcgtccgacatgaaggtcacaacagtaggcatcgatctggctaaaaatgtgtttcaactgcacggggtcaatgagtatggcaagaccgtagtcaagaagcagattcggcgcgatcaaatggtcgagttcttcgtaagtctgcctgcttgccttattggcatggaggcctgcggtagtgcacatcactgggctcgcaagctgcaaggctttggccacaccgtcaagttaatggcgcctcaattcgtcaagccctacgttaagaccaacaaaaacgacgcggccgatgctgaggcaatatgcgaagctgtggcccggcccaatatgcgctttgtgccgatcaagaacatcgaacagcaggcggttttggcgctgcatcgggtccgtcaaggttttgtaaaggcacgcacggcccaggctaaccagattcgaggtttgttgtcggagtttggccttatcgttccacagggaattggctacatcgcttcccgtgtgcctgaacttattgaagatgccagcaatgaattgccgggttcattcaggatactcattcaacggttgcttgatcacctgaaggagcttgaccgccaagttgaggaactagagacgcagatagtcaaatggcatcgccaaagtgatgccagcaacaaactggcacaagttcctggcattggccccattactgccagcgcgctggtggcttcacttggggatgcgaagaactttgatggtggccgtcaggttgccgcatggctgggcttggtgcccaaacagcactcgagtggcggcaaacagaatctgctgggtatcagcaaacgcggcgatacctatctgcgaaccctattgattcacggtgcgcgttcagtgatttaccgagctcagcacaagcctgaatcctgcagttggattaacggggtggttagtcggcggaacaagaacgtagcggccgtggcgctggccaataaaaatgcacgcatcgtgtgggccttattggccaacgagcgagagttccggcctgactacacgaccgccaaagcggccacgtagtcaatccggccaagtgaaataatgtaataaaaaatccagacagggagagaagtaccaccgattgctcaggcaatcatgaagtgatggcaagacaggttagaccgtggttggcaaagcccgtgccggacgaggcacccagagtgcgtgtaagcgattgaggcgtcaaccagcgaatcccatcagggacagtggccaaaggtcacaacaaaagtccgaatgtacgggtgcaatctttaccttcgagttgtcatgaattgaaagcttggcaaaccgggagcgtccatgta

SEQ ID NO: 8991 - DNA, 1357 bp, unidentified
  source 1..1357: mol_type = unassigned DNA; note = element_e1a5446
  misc_feature 1: note = core
  misc_feature 2..74: note = LE
  misc_feature 75..1100: note = CDS
  misc_feature 1101..1357: note = RE
  misc_feature 1123..1353: note = bridgeRNA
taatgagatggtcaccccgaccccctgcgaaggctacgctttcgcagggtgtttttaattcggagaccatcaccatgagcgatttggcactggtcggtatcgacctcggcaaacacaccttccatctgcacggccaggacaaatccggtcatgagctgtttcgcaagaagctctcacggcagcagatgatgcgcttctttgccaacctgcctgcgtgcaccgtggtgatggaggcttgtgccggagcgcatttcgttgctcgtgagctgactgccctgggacatcaggccaagctgatttccccccagttcgttaagccctttgtcaaaggcaacaaaaacgacttcgtcgatgcgcaagccatctgcgaagccgcttctcgcccgacaatgcgcttcgtttcgcccaagaccgaagcccagcaaaccctttcaatactgcatcgcctgcgcgaatcgctgatccgcgaccgcaccaaagcggtcaatcagatgcatggtttcctgcttgaattcggcatcagtctgccgcagggcgtgaccgttatccggcggttggccagcgttttggctgagcatgatctgcctacgcgattaacgttgttgttacagcggctgcatgatcattttggctaccttgataagcagatcaaagcgctggacaaagacttggcaagccagcttgcggaggatgatctaggaaaccggttgctgagcatgccaggtattggccctattacagccagcctgttggccgtggaaatgggcgacggcaagcattacgcctgcagtcgagatttcgccgcttctgtcggccttgtacccaggcagtacagcaccggaggcagggcgaacctgctgggcatcagcaagcgaggagacaagaatctaagacgcctgctggtgcaatgtgcgagggcctacatgcagcgaatcgagtaccaaaaaggagctttggccgaatgggttcgagccttgctgacacgacgccattccaacgtggtggcctgcgctctggccaacaaattggcacgcatcgcttgggcgattgctagacaccacacccaatacgaagcagggccaggcgccttgaacgcctgaccctgcggttgttgctgtacaacgattcacctttcaggttttgcgatagctgaacaacagatgacgtaaacggcctaccggcctggcgaagatcctgacatgaaaatcggctctcgaagccgaggggctttttaggatcgtcaggcgcgactctcatcagggcgcggggcaagccccaactggacgccggatagatttaagcaagccaaccacttcatccgttaatcagtattgcaaaaaatggggtgaccatagat

SEQ ID NO: 8992 - DNA, 1454 bp, unidentified
  source 1..1454: mol_type = unassigned DNA; note = element_e1aaef5
  misc_feature 1: note = core
  misc_feature 2..109: note = LE
  misc_feature 110..913: note = CDS
  misc_feature 914..1454: note = RE
  misc_feature 1205..1393: note = bridgeRNA
gaatgaaagggacttccccgtcccgcggctgcggtggaagtcgtaaatgggcatcgacgtgtcatcatgaagtttcgaacgttcaccacaccaacaagaggagaagtccatgcctgttgtcactgtcggaatcgatcttgccaagaacgtctttgcggttcacggagtggatgaagccggcaaggcagtattggtcaaaccgcgtgtctcacgggatcaactgctcgcgctgatcgcccagttgccgccctgtctcatcggcatggaagcgtgctcgggtgcgcatcaatgggcacgtatgttccagcagtacggtcacaccgtgaagctgatggcgccgaaactcgtggcaccgtaccgtatgtcgggcaagcgcggcaagaacgaagcggcggacgcagcggcgatctgtgaggcggtgacacgtccgagcatgcgcttcgtgccgctgaaggacgaacaccagcaggcgacactctgcctgcatcgaacgcggcagggctttgtcgaggaacggaccgcaatctacaaccggatacgtggcctgctttcggaatttggcgtggtgctgccgcaaagcccggagcgtctgcgaagagagatcacagtccatcttgattctttgcccagttgggccaatcgctgcatcagcgatctgcttgagcacgcaggcaacatcgaggccaggcttgccgaatacgaccgcgcgattcgccaaattgcgcgcgatgacgaacgcagccggcggctcatgcagttgcgcggtatcggcccgaccacggcgagcgcactgcttgcgagcctgggtgccggacatgacttccaaaatggtcgccaggtgggcgcgtggctcggattgacgccagggcagcatagcagcggcggcaagcagcggcttggcagcatcacgtaggcaggcgacgcctatctgcgctgtctgctggtgaacggtgcgcgcgccgtcatcgcgaatcccggcgagaagcaggatcgcttcagccgttgagcgagaagcctcgttgagcggcgcggatattggcgcgcggccgtagcgatcgcagccaagaatgcgcgaatggcgtgggcggtcctcaagtacggcgaggacttcaagcacgagccagccgccgggtgagttccaccgatgtattcgtcaaccgttcaccaacgagaagcaacggtacccatgagcgattaaatgatcactttgcactgccagcggtgatgtgaagcggttggacccgcgcgaggtatacctgataaggctacagggattcattcccggtcagcgaacgaggtcctcgcgcgcgtctttcatcagggtccgggccatcggcccaacatgatcggttgtagtacagcagtccttcactttctcacatgacgccggcaaggcaacattgcaacaacagaaaaccgcgtttgagcttgcactcaatggggaagcccttgta

SEQ ID NO: 8993 - DNA, 1329 bp, unidentified
  source 1..1329: mol_type = unassigned DNA; note = element_e1b2dbe
  misc_feature 1..2: note = core
  misc_feature 3..71: note = LE
  misc_feature 72..1070: note = CDS
  misc_feature 1071..1329: note = RE
  misc_feature 1107..1316: note = bridgeRNA
ttatgggatggacgtctcccgcaatcgggccaaaaagattgcagcaaaaatagagcagaggagttcatcacatgcacatgctggcgatcgatttgggtaagcagtccttccacatttatgggataagcgacgatggcgaagtggtatcgcgcaaggttggtcgggccaagctcgtcgacgcggtgaccagattacaaccgcgtctggttgcgatggaagcttgcgccagctcgcaccactggggtcgcaccttcgaggcgctgggacatgaggtgcggctcatccatccgcggtttgtgaagccgttcgtgaagggatcgaagaacgacgcagtcgatgccgaagccattttcgaagcggcaaccagaccaaccatgcggttcgtgccgctgaagagcgtcgagcagcaggatcttcaagccctgcatcgaacacgcgacaggctggtcgtccagcggaccgctttgatcaaccatacgcgcgggcttttggccgagtatggcatcgtcatgcccgctggcgcgtcccgcttccgcttgaagatcgacaagatgattgagaccgccgaactctcggacttggccaagcccctgtttcgacaactcgtcgaagagtatcgcgaccttgataccagagtgtcggctctcgatgacatgctggtcaagatctgccgcactgacgagcgttgcaagcgcctgacaacgctgcctggcgttggaccgatcgtcgcgacctccttggtggccgcgatcgacgatggccaacacttcaaatcgggcagagccctctctgcctggatcggtctggttccgcgacaatacacgacgggcggcaagccaaggcttggcggcatcggcagcagagccaaccactaccttcggcggcaactcatacacggggctcgatcggcattgctgaggatcagcaagcacgaggaccggcgatcaaaatgggcgcaggatctgctatcacgagctgggcacaacaaaacgctcgtcgccatggcgaacaagacggctcgcatggcatgggcgatattgcgcagcggagagagctacaagatcgcgtgaccatggctcagcgctgagcaggatcacgaatggcttcaaatgcggggtgaagacttgatggtgtaacggcacggaccgccgcttcacagcctgtaaggaacgatggccttcgaggccgctcatcttagaaggcactgaaccgcgcggattcccatcatggccaggagcaaatccgcttcaatcgataggccggatagattcacgcatccaatgccgcagcaacatcaaagatccaccttgcgcgggaggcgtccataga

SEQ ID NO: 8994 - DNA, 1420 bp, unidentified
  source 1..1420: mol_type = unassigned DNA; note = element_e1b9b3b
  misc_feature 1..4: note = core
  misc_feature 5..200: note = LE
  misc_feature 201..1406: note = CDS
  misc_feature 1407..1420: note = RE
  misc_feature 1..180: note = bridgeRNA
ctccgtaagttggtaggcggtccgggagggccgggtgtggctgatgaatccctgccttgagtggctcgcctggagtggccgcctggttctccgggacgccctggccggtgattgagatctgcggttcggtcgctgtttacggagatgacggcggggtgttcttcgggccgtgctgacgaccccttcccctggaggaacatgtgaacgacaccccgaaacgccggctgtgggtcggcatcgacgcgggcaaggcccaccactgggcctgcgcggtcgacgaggacggcaagacccgcttctcggcgaaggtcaccaacgacgaagcccagatcctcgacgccgtcgagcagatcctcgccctgggcgctccggtgtgctggggcgtggacatctccagcgctccttcggcgctgctgcttgcgctgctggccgcctcgggtcaggacctggtctacgtgcccggcaagaccgcgggccgcatgtccggtgcctaccggggcgaggccaagaccgacgcccgcgacgcctacgtcatcgccgagaccgtccgccaccgcggcgacttcgccccgatcgaggtgcccgcgcaggtcacggccgacctggcactattgaccgcgcaccggggcgacctgatcgccgaccgcgtccgcatggtcaaccggctccgcgacgtgctcaccggcatcttcccggccctggagcgggccttcgactactcgaacagcaagagcgccctgacactgctgaccggctaccagacgcccgagcggatccgccgcgccggggccgcccggctggcgcagtggctgcacaaacgcggcgtgcgcatcgaccgcgccgagctcgtcgcgggcacagccgtcgaggccgcgcgggcgcagctgaccgaactccccgggcaggccaccgcggcccggatcgtcgccgaactcgcacagtcgctgttggacctggacgagcggatcgtccgctgcgacagggacattcgcaccacgttcagcgcgcatccgcaggcggtgatcatcgagtcgctgccgggcatgggcccgatcctgggtgccgagttcctcgtcgccgccggcgacctcgccgcctatgccgacgccggacacctggcctcagcggccgggctcgtccccgtcccccgcgactccggtcgccgcaccgggaacttccaccggcccaagcgctacagtcgcgaacttcggcgcgtgttctacatgtcggcccaggtcagcatcaccagacccggcccgaaccgggactactatacgaagaaacgcgccgagggctgtcgccacacccaagccgtcatcgccctggcgcgccgcagaaccaacgtgctctgggcgctcctgcgcgacggccgcctcttccaagaaacggctcccgccaggacttgacaacatcattgaga

SEQ ID NO: 8995 - DNA, 1377 bp, unidentified
  source 1..1377: mol_type = unassigned DNA; note = element_e1c0676
  misc_feature 1: note = core
  misc_feature 2..73: note = LE
  misc_feature 74..1099: note = CDS
  misc_feature 1100..1377: note = RE
  misc_feature 1139..1374: note = bridgeRNA
tactgagatggacccggcgcccccttcgggggacactgaaggcccccgaaacctgacgcgttggaggttcatcatggaaattgacgtcctcggcatcgatctcgcgaagcacgtgttccaactccacggcgctgatcgtcgcggacgagcggtgcatcgcgcgaaggtatcgcgcagcgcgttgttcgagactgtccggacactggggccaaggctggtcgtcatggaagcctgcagcacggcacaccattgggctcggcgcttccagtcgctcggcatccaggtgcagctcatcagcccgcaatacgtcgcgccgttcgtcaagacgaacaagaatgatcgcaacgatgccgaggcgatcgtcgaggccgcgagccgtccagcgatgcgcttcgtgacagtcaagtcgatcgagcaacaggatatccaagcggcgcaccgcatgcgggccatcctcctgcgccagcgtacggccttgatcaatcagatgcgcggcctgctcggcgagcgcgggttcgcgatcgctcggtcccccgaggctttcaagcgcgcgatgccgcaactgctgagcaccagcgccgtcgagctgacgtcgttttgccaagcgctgctcaccgagttgttgcagcacctgaagacgctcgaggagcgcgtccgcttgatcgaggcctcgatccagtccttcatgaagcaatcgtcgctctgcaagaaaatcgctgcggtacccggtatcggtccgatcaccgccacggccatcgtggccgcggttggcgacgcccagcagttccgtaacggtcggcatttagcggcctggctgggcctcgtgcccagacaatactcatcgggcggcaaaccgcgcctgcagggcatcagtcggcgtggcgacacctatctgcgaacgttgctgatccatggtgctcgggccgtgcttcgctacgtgaaagcgaagaccgatccccaaagcctctggctacaggagttgatcgcccgacggggatataactgcaccgccgtcgcgctggccaacaagaacgcgcgcatcgtacaggcgctgctcagcagcgacgaacactatcgccaaccgaacgccgctgcctgatcgaatcacccaactctttatggagagtcgtacccaccctggttttgcgaagcttctcgaagcgatgacgaaataggttgaaccagcaccccgaagcctgtttttcgtgccggctgccgcttgcggcgagccgtgattttgctaaggaccgggtgcgcggatctcatcgaggctgcgggcgtgcttcggcgatcgcccatctggcaagccggatacatgcatgcagaccgtttcgacatcacgaacaagaagcttgcaaaaggcgtcgggtccataca

SEQ ID NO: 8996 - DNA, 1511 bp, unidentified
  source 1..1511: mol_type = unassigned DNA; note = element_e1c3cfa
  misc_feature 1..2: note = core
  misc_feature 3..77: note = LE
  misc_feature 78..1241: note = CDS
  misc_feature 1242..1511: note = RE
  misc_feature 1242..1498: note = bridgeRNA
tgttggggtggacggcccccgacggcatcgctgtgccagaatgaggtcgttggagatctcaaacgagggagccgtccgtgacgaagattatccgcattggggtagacacgtccaagagtgtttttgtgctgcgggtagacacgtccaagagtgtttttgtgctgcatggagttgatgcggccgagcgtgtggtgctgcgcaagcggcttcggcgtaggcaggtacttgagttgttcgcccagttggagccgacgaaggtcggactggaagcctgcggagcggcgcattattgggcgcgcgagctgcaggggttggggcacgaggtggtcctgctgccgccgcaatacgtcaagccctacgtgaagcggaacaagaacgatgcggccgatgccgaggcgatctgcgaggcgatgagccggccgacgatgcggttcgtgccggtgaagacggcggagcagcaggcggcgctgatgctggtgggaacgcgcgacgcgctggttcgccggcgcacgcaattgaccaacgcgatccgcggctatgcggccgagttcgggctgatcgccgccaaggggctcgacaagatcgagccgctgttggcgcgcatcgcggcgcacgcgccgctgcccgggctggcgcgagagctgtttgcggcgcatgcgaaggaatatgcccggctgcaggcgcagatcagggagatcgaagccaagctgagggcctggcacaagcacaacgagctgagccgacggctcgcggaggtgcccggcatcggcccgatcggtgcgacgctggcggtgatgaaggtgcccaatcccaaggcctttcgctgcggtcgggacttctcggcctggatcggattgacgccgaaggatcactcgaccgccggcaagacgcggctcggcgtgatcacgcgcgccggcgacgaggcgttgcgcagcgcgttggttgccggggcgactgcggtcattcagcacgtcaagcaaggaaaagggcatccttcgccctggctgatcgagcttgtgaggcgcaagccggcgaagcttgcggccgtggcgctggccaacaagaacgctcgcatcgcctggaagctgatggtcagcacagagcgctacaatcccgcgcacggtcgggcggtcgcagcgagcggggggcgcggccctgcgcttcgtgggggctccgcgccgcgccccccgctcgcgccgcatgacaagtctcgcgagatcaccgcgacgaccagggcctaacgagttcagcgcaagagcgaccttcgcctcgcgctgaggccggcgcttgctcgagaagcggcagatggtgtgatcgatcgatccgtgacgtgagatactccgcgagacccaatggcgctcattcgaaaccgccatgttgtttggacctcatgtcgcgaaccccatcttggcagcggtcatgtgcgaccgcgacaacaggccggacatatgatcgcaagcgatccgatccgctgctgccgccactcttgcaagccgggggccgtccacata

SEQ ID NO: 8997 - DNA, 1228 bp, unidentified
  source 1..1228: mol_type = unassigned DNA; note = element_e1c510a
  misc_feature 1..2: note = core
  misc_feature 3..255: note = LE
  misc_feature 256..1206: note = CDS
  misc_feature 1207..1228: note = RE
  misc_feature 32..211: note = bridgeRNA
cttatatgttgaaaagtgttcttcagggatggagaatttactagggacgcttagtaaagggaagatgagatcttgtaccaggccaaaggtacccaacctgacaaccagattaggaccatcttccccacacactataaactgaacggtatcttaggccagcatatgattgccaagcctgtattcataaggttagtaaagccatagtgtgtttttaccaagcaagaaaaatactaacacaactttaaggtgattcaaatgacttgttatgtcggagtcgatattggaaaaaatcaatttgatgttcatctacatcaccaagctagaggtcaaagctttagcaatagcccagaagggtttacagcgttcttaagtattctgcctgcgccacaaacctgccatattgcaatggaagccacaggtaaatattttttcaacttggcgcagtttttattcaatcaccagatcaaggtgagcgtagttaatccagcgagtatcaaatactatgcgcagtcacagctaaaacgcactaaaacagatttacaagatgccaagctcatcgcccattactgtcaatcacaacaaccaaagctttggcagcctccgagtcaggtgatagtggagctccaagaatggcagcagtttcaagccctattaattaagcaaaagactcagctaaccaaccaaatgcaaacgacagagtgtgagcgacttaaacaactccagcttgaacagatagttcaacttgagcaagaaatcaatgaagtttctgagcaaattaaaacgcttatatcgcaagatgaaaaactcaatgagcagacaagcttgttaacttctattaaaggggtgggagaaaaaacagctatacaagtactcacgctcattaaagatatagatggatttgacaacgccaagcaattggcaagctttgctggggtggtacctcaaatcaagcaatctggaagcagcgttaatagtagctcactatccaagattgggcatagtgagttgagaaagtgtttgtatatgcctgcactggccgccattaagtttaatccggtcattcagacctttgcgcagaatctgcaaagtcgcggtattactggtaaaaagaaagttgtggcggtaatgcgtaagttattgcatattatgtttgccgttttaaaacacggcaaaccttttgatccatgctataagatcagtacttgactgtttgagttaaacacggtat

SEQ ID NO: 8998 - DNA, 1507 bp, unidentified
  source 1..1507: mol_type = unassigned DNA; note = element_e1c5203
  misc_feature 1..2: note = core
  misc_feature 3..204: note = LE
  misc_feature 205..1482: note = CDS
  misc_feature 1483..1507: note = RE
  misc_feature 6..204: note = bridgeRNA
ctgatggctctaccctcccctcttgaggtcttccccggggaacgctcttggcgcttgtccctcgaggactgatgtgagacggcgtccccagggaacggcctcggaggtccgacgtccacaagggtgtcgtcccacgaggactggtccatcagcacgacgccgaacctccgtccgaacggcttccccacgaggaaaggaggcgatgtgctcgggatcgggatcgactggtccgaggagttccacctcgtcgcgctgggccgcccgggcgagggcgtcatcgaggtctcgcgcgtggagcacagccccaccgaggtcgacgccttggtcgccaagatcgcggggctcgagcccgaccccgccgaggtgcgggtcgtgatcgagacccgccacgggctgctcgtcgagcgcctcgtcgacgcgggctacgtcgtggtcccggtcaacccggatctggtcgcgcggcggcgcgggccggccaagaagaaggacgacgccgaggacgcccggatcgcgtgcttgatcgcgctcgataggcacgagcgactgcgtccgctcatcccccacggcgagatcgctggcgagctgcgcgcgatcgctcgagacgacgagcgcgccgcccgagacgagcgcaggttcctcaaccgcctgcgccaggacctcatctcgaccttccctgcggcgcttgccatcggcggggaggacctcggagcgccgacgttcctgcggatgctggaacgctggcccaccgcggacacgctggcggcggcacccaggaccgagctcgtggcgttcgcccgctcgtgccgccacgggtggccggagcgcctcgccgatagggtccaggcctcgctcgcagcggagcatttccggcccaaggactacctggtgcgggccaaggccgacacgatacgcctggccgccacgcagctgctcgcgatcggagctcagcgcaggacctgggagcgtcgcatgggcgagctcctgctcggggctccgcggcagggacgagacaagaggccgagaggagacgggctggggaagggctttcctggcggcgagatctacctgagctttccgggcctcggtgaccgcctcgccgccaggatcgccggtgagatcggcgatcatcccgagcagttcgacacgccgaactcgctgcaatgctacgcgggcaaggcgccggtcacgcgccgctcgggaaagtccgaggtcgtcgtggcgtgccggctcgcgcacaaccgctatctcggcggtgccgtccagcagtgggcgttctgctcgctgaggcgctcggggtgggctcgggagttctacgactcgcagcgagccaggggcaaagggcaccaggcggcgctccgggcgctcgggaaccgctggctcgagatcctctggcactgcctgcacagaggtgtcccctacgacgaagcggtccacgtcgccaaccgaaaccgggccctcggaaggacgacccaggccgcgtgacacggtggtggttgacgaagggtgt

SEQ ID NO: 8999 - DNA, 1429 bp, unidentified
  source 1..1429: mol_type = unassigned DNA; note = element_e1ca850
  misc_feature 1..3: note = core
  misc_feature 4..80: note = LE
  misc_feature 81..1154: note = CDS
  misc_feature 1155..1429: note = RE
  misc_feature 1165..1417: note = bridgeRNA
tgatggggtggacggcgccccgagcggcatcatcgtgccaagatggccgttatcgcagcaccatctgagggaagccgtccatggggaagtctaacatcgatctctcgtctgtcacccgcattggcctcgatctggcgaagaacatcttccaggttcatgcggtcaacgtgaacggaggcgtaatcgtcgcgcggtcggtgcgacgcggcaggttgctcgccttcctcggcacgttcccgcgctgtcttgtggccatggaggcgtgctcttcggcgcatcattggggacgagctttcatagagctgggtttcgaagtcagactgattccgccggctcacgtgaaaccctatgtccgccgcaacaaaaacgacgcagccgacgccgcggcgatctgcgaggccgtcgggcgaccgaaccaacgctatgttccggtgcgatcagtcaacaatcaggcgcagttgatgcgccaccgcacgcgcgaattgctcgtcggccaacgcacacagcttttgaacgcgttgcgcgggcacttggcggaggtcggcgtcattgcgccccaggggacgcaaaatgcttattcgctcaagcgccttctcgctcacgaagccgacgagaacggcgagatcgtggttcccgaatgtgtccggggggcgctagtctcattatgtcgccaaatcgacgcgctcgacgaagaaatcgaagcgattgacaagcaaatcgcgacgcaagtcaaagccgatccaacggcgcggcgattgacgagcatccccggaataggccccataaccgcttcggcgatcttggccaccgtgcaagacgcgaacactttcgcctcggggcgcgagttcgcggcgttcctcggattgacgccgcgccagaattcgagcgggggcaaggaacgcctcgggagcattaccaagatgggcgaccgttacctgcgcaagctattggtcgtgggcgcctgcgcggttctatttcaccgcaaggggcataacgacgccctgcgccgctgggccgatcaattggtcgcaagaaagtccggcccctcggggttcaaactcgtcgctgtagcgctcgccaacaaaatcgcgcggatcgtcttcgcgcttttgacccgaggcggcgattacaatgaccgcccaatcgcggcgtgaggctgcgaaaggcccagcaagtaagattttcgtcgcaaggcgacatgcaatcgagggcgactacggggtgatgtgaacaaacggaatggctcgaaagcccgttaggggtcggcgtcaatacgaacgcgctgcgatgattggggcaaggagccaggcggatcaaccatcaaggccagcggacgatctcttccgcataaacaggccgtagacatgaccgcgcccgagatgttcgcagaaccgcaaagacacccttgacaaggggcgccgtccagaca

SEQ ID NO: 9000 - DNA, 1446 bp, unidentified
  source 1..1446: mol_type = unassigned DNA; note = element_e1cd43e
  misc_feature 1: note = core
  misc_feature 2..18: note = LE
  misc_feature 19..1143: note = CDS
  misc_feature 1144..1446: note = RE
  misc_feature 1212..1437: note = bridgeRNA
taatgggatggtccggccgtgctcctgccccgccagcaagtcaagctgggagggggcaccgaagacaaggagcacgccatgtctcagaatccaatcaccgcaatcgctaccgtcggcatcgatatcggcaagaactcattccacgtttttggccttgatcagcgcggcgcgatcgtgctgcggcagaagtggtcgcgtggccaggtggaagcacgatttgccaacatgccgccgtgcctgatcggcatggaggcttgtgttggtgcgcatcatctcagccgcaagcttaaggcgcttggtcacgatgcccgactgatgccggcgaagtacgtacggccctactcgaagggacagaagaacgacttccgtgatgccgaggcgattgccgaggcggtgcagcggccaacgatgaagttcgtggcgaccaagaccgccgatcagctcgacctgcaggcgctgcaccgggtgcgggagcggttggtcagccagcgcaccggcatcatcaatcagatccgggccttcctgttggagcgtggcattgcggtgcggcaggggcagcgcttcttgcgcgccgaactaccgcgcatcctcgccacgccacccgatgtcctgtcgccccgcatggtgcggctcatcgaggacctagccagtgactggcgtcggctcgacgagcgggtcgagagtctatcgggtgagatcgaggctgttgcgcgccaggatgccgattgcgagcggctgatgagtgtgccggggatcggcccgatcatctccagtgcgatggtggcggcgatcggccgcggcgaagtgttcgcgaagggccgcgacttcggcgcctggcttggcctcgttcccaagcagacatcgaccggggaccgcaccatcctgggcaagatctccaagcgcggcaatcgctacctgcgcgtcctgttcgtgcaggcggcctgggtcgttctgatcaggccaaagagctgggagcgccacggcctcaagccctggatcgaggcggctaagaagcggctgcatcccaacgtgctggcgattgcgctcgccaacaagctcgcccgcatcgcttggagtgttctggctcgcggccggaacttcgaggcaaggacgaatattaacgcaaccgcccaagctgcttgatcgtccaacgcgagatgagcatggaaagatgagggggccgcgatgacgtagcctgatcaatacgacttgccagccgaggtctgcgagaggatgagacgaaatggaggttcggtcttcccggcgcatgcgaacactggtgacccaaatggcccggtcgaggccttgccggtaatgagatcgcacgcgcgctgatatccatgatggccaggagccaatgctccaaccaaaggccggatacattgatgcaagaccgctcaccgccagatcgacgaagactcttgcaacgcacggccggaccataca

SEQ ID NO: 9001 - DNA, 1504 bp, unidentified
  source 1..1504: mol_type = unassigned DNA; note = element_e1e1814
  misc_feature 1..3: note = core
  misc_feature 4..254: note = LE
  misc_feature 255..1484: note = CDS
  misc_feature 1485..1504: note = RE
  misc_feature 7..247: note = bridgeRNA
ctaatgggagttgatcacgcttgagccggtttggtgagagagtggttgctgagccgccagtcggtgagcactagctacagctggaacaggcctttgggttgattcctggagctagaccgtgccccggctggttggtgaggtttctgtaagcactcatggggtgtcgtgccattgagcactgatccattagctcgttgccagattccttcggcttgaccaaagttcggcatcgattgacgtttgtggaggtagtgatggttgtgtttgtgggtgatgattgggctgaagctcatcatgatctgtatgtgatgaacgaggcgggtgatcgactcgactcggcgagggtcccgcatggccttgacggtatggcccggtttcacgagctggccgctgatcatgtcgaggaccccaccgatgtgattgtcggaatcgaggtcgaccgcgggctttggatcgaagcgctcgttgcatgcggttatcaggttcacgggatcaacccgcgggccgcctcgcggtatcgagaccgcctcaatgttggcggcgccaagtctgatcgtggtgacgcaaagatgttggctgatctggttcgcaccgatcgccaccaacatcgccaggtcgctggcgacagcgagattgcacaagcaacccgagtcctggcgcgagctcatcagagtttggtgtgggaccggacccggcacacgaatcggcttcgccacgggttacgtgactactttcccgctgcagcccaagcgtttgctggtgagctggcaggcatggacgcaattggaatcttggcaaaggccccgaccccggtcgaggcggcacagctgtcggtgtctcagatccgttcggctctcaagaccggtggtcgacaacgcaatgttgataaacgcgcccgtgagctccaagcgttgttgcgcgctgatcatctagcgaccactccagcggttgcagctgcctttggggccacgacccgatcgctcgtcgcgatcattgtcgagctgaaccaacaaatcgaaacgctcgaggcagaactcgcttcggcttttagcaaacacccggacactgacatttaccgttccctgccaggatttggtccagtactcagtgcccgggtgctcggcgagttcggagatgaccccgaacgctacgccaacgccaagtctcgcaaaaactacgccggcacgtcacctttgacccgagcctcaggccgaagccacatcgtgtcggctcgccacatccgaaaccgaaggctctatgacgcactcgaccaagcagcattatgttcgctcacccaaagcccgggctgccgcgacttctacgaccaacgccgagccaaaggcgacctgcaccaccaagccctacgagcgctcgccaaccgactcgtcggcatcctgcacggctgcctcaaaacccgcacccactacaacgaacacaccgcctggtcacaccgccaagaaccagaaacccgaatcgccgcttgactctaaaacccctggggtgt

SEQ ID NO: 9002 - DNA, 1521 bp, unidentified
  source 1..1521: mol_type = unassigned DNA; note = element_e1e44c2
  misc_feature 1..3: note = core
  misc_feature 4..245: note = LE
  misc_feature 246..1409: note = CDS
  misc_feature 1410..1521: note = RE
  misc_feature 8..223: note = bridgeRNA
tttcgtattattaggtcagccagagatttctggttggcctatttttgtggtcgttctatgatggcggtagccgggagaacgtcgggcttttagggacatcgatcccgtactaaaaactgttctcccactacctccaatgaccatgtttgagctggttggggcaattgacctcgtatcacaagcgaagctatgggtttggaaccatcgtgggattgccggctagatttacatcaggaggagctgacatggaaccggttatcggattggatgttgcgaaaggatttagcgtattacaagcgttcacgaagcgtggtgaggcgtacgggaaaccggaaaccattcgacatgccggtggacttgaaaggctagaccatatcattcgtcagttagaagagcaaacagatatcaagcccgttgttattttggaagcaaccggacattaccatcgggtggttgtagcctatttgcagcagatgaatattgagtattttatcctaaatcccttgttgtccaaacgctcaaaaagcgcacagttacgcaaagttaaaacggatgcggcagacgcctggcatttggctgagatgtactatcgtggcgatgtaaagcctcaccgaagttgggaagatcgaataacagagatgcaacacttgacgaggcagcatgagtttatgacggctcaattcgtgcagtcgaaattgaacgcgagagcgttattggatcaagtttgcccggcatatgaaggcgtgtttcatgacctgttttccaagacttcgttgcgtgtgctccttcatatgcttcagggggctgtcgtaacggaggaagtagtgcgcgaaacagcaggcagttcgcacgggaaagcatggattcaatcgaaagtagggcaaatccaaaacctgcggctccctcagaagcaaagcgccgctcaaagggcagcattgttgtttatggtggagatcctgcttgctcaacaagaacagttgacccgactggagatgagaatccaagaagaggcgaaggagattccggaagtggagttgctaaagacgattccaggcatcggggataagctagctgcttcgctaatagcggagattggggatgcaaagcagtttgaagatccaaaacagttagttgcctacgcagggctggatccgagtgtgcatagttcaggtcaattcgtagcgtccagcactcgcatcaccaaacgcggctctaaacggctacgacgcgcactgtatttggctgtacaatgcggtataagaggaagtacgaacgaaaggctacgagcgtactacgataagaaaagacaagagggcaagccctacaaggtgacggtgattgcttgcgccaacaagctattgcatcacatatacgccatcttgaagaagggcacgccctacaccgcataatccatatttaaccaacatcctccgagccaacggaggttatttggcatgtacagaattataacaaggttttttcctaagaccaagacgtcaaagcttgacaaacattagctgg

SEQ ID NO: 9003 - DNA, 1428 bp, unidentified
  source 1..1428: mol_type = unassigned DNA; note = element_e1e48be
  misc_feature 1: note = core
  misc_feature 2..69: note = LE
  misc_feature 70..1134: note = CDS
  misc_feature 1135..1428: note = RE
  misc_feature 1207..1422: note = bridgeRNA
taatgggatggtccgccgcttccgccctgatcggtctggggatataagaggtgcacggaggaggttcccatgcaaatacacacgatcggcatcgatctcggcaagacggtctttcacctggttggcctgaacctgcggggcgaagtcgttgtgcgcaggaagtgctcccgcactcaactgctgcagtttacggcgaacactcaagccgacctgatcggcatggaggcatgtgccggagctcatttcctgggaagagcactccgggaacaaggtcatgaggtgcggatcatcccggctcagtacgtgaagccttacgtgaagacgaacaagagcgacttcatcgatgccgaggcgatcggcgaagcagtcgccaggccaaccatgcgctttgtcccgatcaagacggatgaccagctcgacatgcagtcgctgcaccgggtgcgagagcgctgggtcattcggcgcaccgcagtcgtcaaccaaatccgaggtttgctgcttgagcgaggcatcactctccggcaaggccgccgacatcttgaggccgccctgcccgggattctcgaagatgccatgactaggctgtctggagctcttcgcatgctgatctctcaactgaagcacgaactggaagagctggccaacttcatcggggaagcggatggcgtcatggaacgaacctcatgtgagaacgaatcctgccggcgcttgctttccataccaggcattggccctgtgaccgcaacggcactcatcgcggcggttggaaacggagctgccttccgaaagggtcgagagttctcagcctgggtcggtatggtgccgagagagtcctccaccggaggaaagcagaagcttctgggcatcagcaaacgaggcaatccctacctgcgaaagctattcatccagggagctcgcgcggtcatgctgcgaggaaccaaacaatccatcggtctcagaacatggatcgagaatatcgctctgagaaagcaccctaatgtcgccgcggtcgctctggcaaacaaaatggcccggatcgcctgggtggttctggcgagaggagaggcttatcgaccctccttgcttacggaatcggaaccaaacctacatagcttgcagatgaagcctgcctgaagtcaggcttggaagtcgccttcgcgattccacatctacaacccacggacgacggtctaaccaagtttcctgccaggtctgctggcgaacaattgagatggcacaacggtcgaacccgacgctctcctaacctgatgcgccaagcagttttccgaaactgaagagctaaataggaagaggcgtagcgcattccatcctggccaggagtcgtacactccgctaaaggtcgaatacatttgcgcagaccaccctgtcagatcacttttcgcttgcgacaaggcggcggaccataca

SEQ ID NO: 9004 - DNA, 1414 bp, unidentified
  source 1..1414: mol_type = unassigned DNA; note = element_e1ee260
  misc_feature 1: note = core
  misc_feature 2..97: note = LE
  misc_feature 98..1141: note = CDS
  misc_feature 1142..1414: note = RE
  misc_feature 1183..1409: note = bridgeRNA
caatgggatggactcctcctcaccctgacgtttcggcgtcgatgcgccagaatggaaggtggcaaccggccattcagaggatgaggaggaacccaacatgaacattacacgagtaggtgtcgacatcgcaaaatccgtctttcacgtgcacggcgtggatcgtcacgacaagactcagtggcaggcgagtctcaagcgtaatcggtggcttgacgctctgtgtgaacgagtcgctccaggcgtagtaattggaatggaagcctgtgcatctgcgcaccattggggcagagaacttcagaagcgagggtacacggtcaagctgatagcggctcagttcgtcaaaccgtacgtcaagagcaacaagaatgaccgcgttgacgcagaggctatctgtgaagctctgggtcgacccagtatgagatttgttgccgtcaaatcagtcgaacagcaagacactcaggctgcccaccggattcgagaggaactggtgggtcagcgtacggccaaggcgaatcagatccgtgggctggttggcgaatacggaattgtcgcgccagtcggcatcaatcaactccggctcgcattacctctttggcttgaggatgcggagaacggcctgaccgatgaatttcgtaccctgctgtccgacctggcgaatgacttgcgacaccttgatcgtcggatagccgaccttgacgatcggattgcgcaggcggtcaaggtcgatccgatagcacggcgcctggtagagttgcgcggtgttggcccgctcaccgccagtgcactttccggtgcgcttggggatggcagggcgttccggaaagggcgtgactttgcagcctcgctcggccttacgccacaccagcacagcacaggcggtaaagaccgattgcttggcatcagtaaacggggcgacagctacctgaggaaattgctggtccacggtgctagggctgtgattcgacacgcgaaggatcgggatgacggactgagccaatggctgaacggactggtcgcatgcaagcatgtgaatgttgtgacggtcgccttggcaaacaagacagcgcgaatagcttgggcgattgtgcacaacgagacccactatgatccgatgcttgctgcatccaaaacggctggttaatggttaacgagcctcgatcaatatcaaggaggacagaccatcacgattgcagagcatgatgtttgatggcgaacaggttgaaccgacgtcggaaaaacccagccggacggggagccgaggagctcgtgtaagcgtatgggagccgacgtgcgaatagcccatcagggtccgatgcctaaatgaacggcatcatcaatgagaccggatacacgtaggcagtcgtaccttgacgtgatcgaacaaaatgcttgcaaaagaggaggagtccataca

SEQ ID NO: 9005 - DNA, 1471 bp, unidentified
  source 1..1471: mol_type = unassigned DNA; note = element_e200d6f
  misc_feature 1..2: note = core
  misc_feature 3..222: note = LE
  misc_feature 223..1185: note = CDS
  misc_feature 1186..1471: note = RE
  misc_feature 9..182: note = bridgeRNA
cttgtatattaaaagaagtggtagaccgtcgcaccctaggtcattaaagaccgctttgtagcatgggtcaccacaacaatctctttgacagaactcgaacagtcgccggggtcaaagctttaaactactgacatttaaagtatacagtccgcatcgggcaaggatgagtgaaatcaaggggatgaattaaaaacttcttgacaaaatagttgagattcaaaaatggaaaacatctctgtgtgggtaggcattgacgtgagcaaagcgaccctcgatgtttatatccgtcccatcggtaaagcattgaagtttgctaatacagaactagaaatatttaatttagttgaacaattaaaattttatgatttgaacctcatcgtactagaagcaaccggaggattagaaacagaactggtcattcaactacaggcagcaatgctaccagtagcattaatcaatccacgtcaaggacgaaattttgccaaagccactggtaaactcgccaaaacagatgctatcgatgcacaaatattggcacactttggggaagcaatgaaacctcaagtgttaaacattgagtcacaagcatctcgtcaattaggagaattaattagtcgtcgaagacaattagttgagatgcaaactgctgaaaaaaatcgacgctcacgcgcccgtggtaaagcattggcagatattgaagcacacattgaatatcttgacgaacgtctcaaacaactcaatcaagaaattgagcaattaactcaaaacaatcaacaatggattgaaaaagttaatttactcaaaactactcctggtattggccaagttatttcgacaactctggtttctgatttgccagaactcggtcaactcactgccaaacaaatttctcgcttagttggtgttgcacctatcaatcatgatagtggtcaacacaaaggtaagcgcatgattaatggcggtcgcgctcatgttcgtgccactctttatatgggtgctgttgttgctatgcgtcataatccggttatcaaggccttttatgagcgtcttgtcgaacgtggtaaatcgaaaaaattagctctcactgcttgcgttcataaaatgttagtcattttaaatgcaatggttcgggataatttaccttggcgtgttactgacaacttacaacccattcccaacgcttaatcacaattgaccgtttttatacttggaaatactctccctgatgatcctattgccgcatttgggtcaatttttgatgctcttttttatcttcacgggaaatccagcaactggggaagattctgcggcgaagcggagtggctggtgcgggctgctaccatcttagccaagagccacaagtctttttgcccgtaccagccaccgcagaatctagcgcagcgttccccagttgcgtcaatgttcagagtcccggtttttgttaacgatcgcttgactttcaagacagtcg

SEQ ID NO: 9006 - DNA, 1349 bp, unidentified
  source 1..1349: mol_type = unassigned DNA; note = element_e210e6f
  misc_feature 1..2: note = core
  misc_feature 3..77: note = LE
  misc_feature 78..1112: note = CDS
  misc_feature 1113..1349: note = RE
  misc_feature 1146..1344: note = bridgeRNA
tgatgtgatggacgccctttcctgaagcagccagtgccatacttttactgtctgcgtttgctacgggagtaaatcacatgagcacgaccagagttgttggtattgatatcgcaaaatcagtttttcaggtctgcgtttggatggtcgatggctccgtcgcatggaacaaaaaaatctctcgttctaaattgctggatactatccggcagtttgaacctggaactcttgttgctatggaagcctgcgccacttcgcatttttgggggcgaaccttcgcatctatgggctattgcgtcagactcatccccgcacaacacgtaaaagcttttgtccgtagccagaaaaatgatgccaatgatgcgttggcaatttgtgagacagcatttcgcccgggtattcactttgtttctgtaaaaaccacagaacagcaggatatcaaggcgcttcggaacacacgtcaactgatggttgagcagagaacgaagctggttggccagcgccgttctctgctcgctgaatatggtttcactattcctgtcgggatcctgcgtctccagcaacagctaccggagctgattgaagatgcctcaaacagcctgacattcactcttcgtcggctgttgtcttcgctgcgggaagatatgcaggcattaaatgaacgaattaccagcctggatagcgaaattgcagcactgtcatcacagcaaatcgcgtaccgccatctattaacaatcccgggtgtaggcccgttgattgctgccgcgtttatcagcgaagttgatgccacacagttctcgagtgggcgagaattatcggcgtggtgtggactggttccccgccagcacagttcgggtggaaaacagcgcctgtcttctgtaacgaaaaatggcaaccggagtctgagaactctcattattcatggtgcgcggtctgtaatgcgctgtgtgaaaaagcgcgatgacagtctgagtatttggctgcaaaggctggaggcccgtcgagggttcctgaaaaccacggttgcgctggcgaataagctgacgagaatcatctggcgtgttttgaccgatggtattgattttaatatgcaggaggccgttgcgattaattaaataaaacagcaagttacaaaaagcatttttaactgagtttgcaggcactgatgagataacggctaccgtccctgtaacagcctgaagttgacctgggtaatcaaataccggtgtagtgattaggaaacagggctcggataacatcatggcgcaggtcattgaacctactaacgacgccggatatatggtcgcaaaccgcatcgaaccagtacttgcatcacccggggcgtccatata

SEQ ID NO: 9007 - DNA, 1308 bp, unidentified
  source 1..1308: mol_type = unassigned DNA; note = element_e215672
  misc_feature 1..3: note = core
  misc_feature 4..214: note = LE
  misc_feature 215..1180: note = CDS
  misc_feature 1181..1308: note = RE
  misc_feature 36..201: note = bridgeRNA
cattgtataataatttatcgttataactttgcataaacattcaatatcaaagtgtggaataagaccgagttttcattagtcataaaggccgtgagatatgttctgcccccacactttatacatcagaaaccggatagttcaatgggcttttaagaccccgcattcgcaatgatggctcacgatgtacagatgttgttttaatattattcagactatgacttacgttggaatcgatgtcagcaaggcgacctttgttgtcgcttattcgtccgctaagacaggccgggcaaaaacatttaagaataccgttaaaggtgtccatgagttcatccaaaccatttcagctgcagagcaccattgcgttttggaagccaccggcaattacagtgcgttgctagtttacctgctttccgaagccggcattaccgtcagccttgaaaatccgctgaagataaagaatttcgcccgagccatgctcaccgtcaccaagacggacgagattgatgcccgactgatagccttgtatggagagagaatgcagcctgctccttataaactacgaagcgaatccatcctcattctcaagcagaagcgtacggtgttacgccagctcaagaagcaacttgtggctacacggaacctcaaaagctcaatggaagtcctgcctttctttgaccccaaatgcaagaaaaccattgaaaaaacaatcgtatttcttgaaaaacaaatcaaggggatggaggaagaactggcctctttggcacaaggtgagtacaagaaacagatggacttgctcacttctatcaaaggtatcggtgtcacactggcaactgcacttatcgtagctacaggtggatttacttactttaataatgccaagcaactgacccgatacttgggtctgtcgcccacttaccagcaatccggtacgtcagtcaatgttaaaggtcacatcaaccgaaacggggattcaagcctcagaagccaactttatgtagcggcgttctcgtcactcagatgtaatgccgaatgtaaggcctgtttcgaccgtttgcgatctaacggcaagcctggtaaactggcggtcattgcggtcgccaacaagcttgtaaggcaagccttcgctgttgtcactcatggaaagccctatgtcgacgggttcatatctgaaaagccataacagctcctgcggagggaacgccatgcggcaaggggctgagcagtcagccccgacgagctttacatgtacgataacttgcataattatgctaattattgttaaccatattcagtttttatattatagtt

SEQ ID NO: 9008 - DNA, 1461 bp, unidentified
  source 1..1461: mol_type = unassigned DNA; note = element_e216fb1
  misc_feature 1..2: note = core
  misc_feature 3..234: note = LE
  misc_feature 235..1446: note = CDS
  misc_feature 1447..1461: note = RE
  misc_feature 13..201: note = bridgeRNA
tccttactttctttcgtagggtggtcgggccgtcggccgtagggttcgattcacctagggacgacgggtatggctttcatgcttttgctggtgttcatggccgtaggagattggccgcccgtcgttccgagacgactcgaccgctaattgagagacgcgattggatcgctgtgtaaggacacgtcggcgtggtcgtctaacggaagtagccagacgagcacggaggcggcgttgatggcacgacaactgtgggccggcgttgacgccggcaaagccgaccatcattgcgtggtcatcgacactgacgggcagcgcctgctgtcgcagcgaatcgccaacgatgaaaccgtgctgctcgaattgatcagcgcggtgaccgctctcgctgacggcggacccgtcacttgggcgatcgacctcaaccatggtggcgctgctttgctgatcacactgctgctcgcccgcgatcagcgactgctctacatccccggacgcaccgtttaccacgcctcgggcagctaccgcggtgacggaaaaaccgacgccaaagacgctgcgatcatcgccgaccaagcccgcatgcgccgcgacctgcaaccgttgcgggtaggtgatgacatcgccgtcgacctgcgcatcctcaccgcgcgccgcaccgatctcgtggccgaccgcacccgtgtgatcaaccgtctgcgcgcccagctgctggaatacttcccggcactggaacgcgccttcgactacagcaacagcaaagccgcgctgatcttgctcaccggctaccaaactccggacgcactgcgccgcctcggagccgcacgcctggagacctggctgcgtaaccacaaggcccgcaacgcatcccgcatcgctgccaccgctatcactgccgccaaagctcagcacgcgaccgtgcccggtcagcagatcgccgctgccatggtcgcgcgcctggccaaggaggtgatggccctcgacagcgagatcggtgagaccgaagcgctgatcgaggaacgatttcgtcgccatcgccacgccgagatcatcctgagcatgcccggcttcggaatcatgctcgcggccgagttcatcgccgccactggtggtgacatgaagtcttttaccagtgccgaccgcctcgccggggtcgccgggctcgcacccgtaccgcgcgattcgggaaggatcagcggaaatctcaagcggccccgtcgttacgacaggcgtggcctgctgcgcgcctgctacctggcagcgatgatcgctgtacgcctcgaccccacttctcgcatctactacgacagaaaacgagccgagggcaaagcccacacccaagccgtgctggccctggcgaggcgacgagtcaacgtcctgtgggcgatgctgcgcgacggcgcgacctacacgccccacgaccactcacctaccgctctcgcggcttgacatcttcattgagaa

SEQ ID NO: 9009 - DNA, 1364 bp, unidentified
  source 1..1364: mol_type = unassigned DNA; note = element_e219712
  misc_feature 1..2: note = core
  misc_feature 3..255: note = LE
  misc_feature 256..1293: note = CDS
  misc_feature 1294..1364: note = RE
  misc_feature 44..210: note = bridgeRNA
cttgtatcttgtttgcgtctgcccgattcggtcgctctgtgttagtggggaactggatcgggtttcggcgggaggccgttcactcctgaggcgctgttgttcggcagcctggattatagataggccccccgccctcctttctcaacgccgtggagaatctcaggccgcgagagcctgcatacaaggtcggcgagagaggtggcacagggtcggggagccgaagctcagtctaatccagttttgcagggggtcaacatgcctgtagctgaagtcgacacgtttgttgggatcgatgtcagcgcgcacgagttaagtgtcgccttacgccgcggtcaaagccacgacaaggcagccatggcgaagttcccgaaccatccttccgggcacaaggccctggtcgcctacttgctccgtggtggcggacgagtgcgggtttgcttggaggccagtgggaattacagtctggatctggcgttgaccttgcaagcgcaccgccaggtggagatcagtgtcatcaatccgcggcgggcacgacgcttcgcagagtcgctcggtgaacgcagcaagaccgatccggtcgatgcccgtgtgctctgcgaatatgctgctcgcatgccttgggttcggtggcaaccgcccagcccggttgctctacacttgcgggctttgacccgtgccattgccgacctgggtgttatccatactcaacagaacaatcgtgcgtatgcggcggcagctagccaagccttgccggtcttggtggtcaaggagatgcaacgccataagaaatacctggaacagcgcatgacacggttgcgacgggaagctgtgcggctcatcgcctgcgatcccgaactggagcgccgctttcgcctcatgctaactacgatcggcatcgctgagaccagcgctctgcagatcctgggcgaattagccgtgctgcccgacatgctggacgcgcgccagtgggtggccttcagcggactggatccacggctcttcaagtcggggaagtcggtcgagaagcggccgcggattagtcggagtggcagtcgtcacctgcgtcgtgctctctacatgccggccctggtcgcactgcgtcgtgatccctatctccgtgtcttctatcaaaacctactcgctcgcggcaaagctcggctgcaagccgtggtggcagtcatgcggaaactcctgcatgctctgtttgccatgttccgcagcaatcaaccgtacgatggctccaagctgtgcgcggtggaactggccgtccatgccattgccgcttgcgcttgagcgacccgaaaaagagagagggttctccgcacctctcctagagagaaaacactttgactttaagagagaat

SEQ ID NO: 9010 - DNA, 1070 bp, unidentified
  source 1..1070: mol_type = unassigned DNA; note = element_e21c707
  misc_feature 1..2: note = core
  misc_feature 3..257: note = LE
  misc_feature 258..1058: note = CDS
  misc_feature 1059..1070: note = RE
  misc_feature 11..220: note = bridgeRNA
cttgtcttatgtattccctattgatctgcaaagattgagccaatgcacgccacgccatttatggcgtgcattggcggctgctggatcgatatgggcttggtcgtaagggaccgttttggagtatgatcagtcgccgtcttcgcatgaggcctgaacggatacgcaagcgctgatttatcatgggcttgcatgacaagcataggacatgacgatgatgactaatgatagcataggtatcgacatggttgggcgacgatatgccgagcctggtcgtgtttgaggctaccgggccgtatcatgggcgctttgagcgtgcgttttcagggaaacttcccttggtgaaagtcaaccctttgcaggcccgcaggtttgcacaagcctgcggcaccagggtcaaaaccgatgcggtagatgcgcgcatgcttgcatatatgggaagtgctctggctttggagccagaccacccccttgacgaaaaacaatacgaactcaaagagttatttagttccagaggtggtctcatgaaggatcgcacccgtttgattaaccgcctacaaacacaaacccttgctctcgttaagcgacaaaccaaagcccgaatagaccagataacacgccagttaaaagttttgcagcaggacatcaatacgagggtgcaagactgcccaagccgagcccgagccaacactatactacgctctatcccgggcattggtgaagtggccgctgcaaccattctcattgagatgcccgagatcggaacgcttgataaaaagcgggctgcaagccttaccgggttggctccgatgacccgacaatcgggaaaatggcgcggcaaggccaccattcaaggcggtcgaaaacatctgcgtgatgcgctctacatgcctgctctggttgccgcacgacacaatcccgacatgcgtgacaaatacaaagccatgatcaaacagggcaaaccgcaaaaggttgccctgacagcgataatgcgaaggctaattgaactcgccaacgctttggtcaaagcagatcgcgaatgggttcaaaatgggacttgaccaaaacggata

SEQ ID NO: 9011 - DNA, 1241 bp, unidentified
  source 1..1241: mol_type = unassigned DNA; note = element_e21d7cf
  misc_feature 1..3: note = core
  misc_feature 4..238: note = LE
  misc_feature 239..1219: note = CDS
  misc_feature 1220..1241: note = RE
  misc_feature 7..215: note = bridgeRNA
gctattagatttgtatttagtaaattcagttattattaattaagataatttctgaacaaccagagggaataggtgaactagttcgactcttaaacgtagtggtttatcctgagcattagtcctattctcctctttgggtttaagtaccatttagaatgttaagctttaaggcttattaatagcgttagtaattgaaccaatttggttgtgtcagagttgttttcctaaattcaaatttatgaaaaattttatcattggcattgatgtttctaaagacacacttgatttttgtatactgcaaaaagatagccgtgggaaaatccagcaaggtgtgattgcgaacaaagaaagagagattcttacttggttgaaaaatctagacaaagaaaatgtagttgttgccctagaacatacaggacattacggcgcactactgtcttggctattagaagaacaaatgtttacttactatttgatcaatccattagaccttcagcggtcactagggctacagcgtggaaaatctgatatagtagacgcctatagaattgctgattatactataacaaataatcataaattatcaccttttaaattgccttgtgaatcattaagaaaattaaaagcacttatgacggcacgtgaacgatacgtaaaaatgtcagtacaaatacaaaatagcttaaaagcggaaatgatactaagtaaaaaggtagtattgaaacaattgataaaacttgaacaaaaacaattaaaatcaatccaaaacacgatacaagatttagaaaaacaaatgatggaaatagtaaaatcaagtcaggatctaaataccacctatacaaaaatatcatctgtaataggtgttggtacaattacggcaattaaatgcattatagaaactgataattttacccgatttacagatgcccgtaaatttaattgccattgcggtttagctccattcccttatcagtcaggtagcagtataaaaggtcgcacaaaaacacactttttgagggacaaaacactaaagtctattttatttaaggctgcgggaagtgccattcagcacgatcctcaattaaaaaaatattaccaacaaaaattagaaaaaggaaagcacaagcttacagctttaaatgctgttgcaaacaaaattgtactaagaatattcgccgttgcaaaaagaaatgaaccttttgtaaaattaattgcttgattacttgtttttatcttagaat

SEQ ID NO: 9012 - DNA, 1560 bp, unidentified
  source 1..1560: mol_type = unassigned DNA; note = element_e221db1
  misc_feature 1..3: note = core
  misc_feature 4..260: note = LE
  misc_feature 261..1439: note = CDS
  misc_feature 1440..1560: note = RE
  misc_feature 3..237: note = bridgeRNA
ctcgtataatgaacatataacattatacgaactcctttctttaaaatttttacttttctgttataatgtttttatagactctgtggactagttcttatccctatcgcttgacgatttcctttggaggctctagccacagatgtttgttaatttgttaattagttagataacgcatgacgttttatttagaacgaggctacattcagcaaacattttgtggatcacattgtctaaattttatttaaaaaggagcaatcattatgatttatgttggtattgatgttgcaaaggataaacacgattgctttgcaatgaactctgatggagaaattttgattgaaaaaatgactattcaaaacaattttgatggtttcaattatttattcaattctatttctcaatttaatgaaagttttgaaaatattaaagtaggacttgaagctactggtcactacagcaataacatccttaactttctgacatcaaaaggatttaatgtttatgtcattaatccactacaaactaatctttacagaaaaggtcaaagccttagaaaaaccaaaacagataagttagatgctcgtttcattgctacaatgcttatcacaggaaacttaaagccctactctaatttatcttatcacatttctgaattaaagtcactagttagacatagatttcgtttagtgcaagaacgatctaaatttaaaacttctctttctagacttgttactcttgcatttccagaacttgaaaagatagtttggtctatctcacaaaattctgtactttatcttcttaatgaactaccttctgtaaaagatatttctaaatgtaatttaaaacatcttacatgtattttagagaaatactctaacggtaaatacagtagagataaagctattgaaatccgtgaacttgctagaaaatctattggtactaacagtcgttctttatcttttgaattaaagcaagttattcaaactgttttattcttacagtctcaaattgatgatattgataaagaattaaaaaacttagttgttaaacttaatagcccaataatgtccattccaggtatttcttatgtttctgccgcttttatcttagctgaaattggtgatataaacaattttgattcaccagctaaattacaagcatttgcaggacttgatccatctacatatcaatctggaaaatatactgctactcattcagtaatggtaaaacgtggttctaagtatctccgttgggctttacttaatgctacaaggcttgtttgtatgcgtgataaaacattcaatgattacaaaaattcaaagctcgctgaaggtaaacattattttgtagcacttagtcatacttctaaaaaattaattagagttatttattatttattaaaaacaaataaatcttatcaacttccaaaagtagcttagttgatagtgtttcataccttttaaaaagcatttttcgaaatgcttatttgtcatgcattttttcaatgtactaattttttagacttttttgagaaaaactattgacattcatatagttagt

SEQ ID NO: 9013 - DNA, 1353 bp, unidentified
  source 1..1353: mol_type = unassigned DNA; note = element_e227609
  misc_feature 1..4: note = core
  misc_feature 5..81: note = LE
  misc_feature 82..1104: note = CDS
  misc_feature 1105..1353: note = RE
  misc_feature 1083..1341: note = bridgeRNA
atgatgggtggacggccccttgcggcatcgaatgtgccaaactgggctgtgattaactccagcggaaggagaccgtccgtcatgcaagctatcagatttggaatcgatttggccaagaatgtgtttcaggtgcacggcgtggatgctgccgggcgcgtggtggtgcagcggcagctgcgccgcgcgcaggtggagaagttcttcgccgcgcagccgccggcgctgatcggcatggaggcctgcggctcggctcatcattgggcccgcacgctcagcgcgctcggccatgacgtcaagctgatgccaccggcctatgtgaagccctatgttcagcgcaacaagaacgatgcccgcgacgcgcacggctgttgcgaggcggtgagccggcccgacatgcgcttcgtgccgatcaagtcggtcgagcagcaatgggcccgggcgctgcaccgcacacgcgaccttctggtgcgccagcgcacgcaactggccaacgccatgcgtggcctgctctatgagatgggacagacaagtgccaaaggggcggcgggcatcgagaccctgctgcggcgcgtcgaggcggccgatgaagccatcccagcggcgctgttgatctgcctggtgccgctggccgggcaatggcgggcgctggatggcgagatcggcaagctggacaagcagatcctggctcaggtcaggcagcagcgggcagctttgcggctgacgacgatcccgagcgtcggcccgatcatcgcgcatgcgaccgtcgcagccatcggcgacggtcgccagttcgcctcggccagggacttcgcagcctggctgggcctgacccgcaagacccatgacaccggcggcaagcacaggccgacaggccatataagccgtgccggcgacaaggacctgcgcaggttgctcattctcggcgccagttcctggctgcgtcaggtcagggccaagcccgacagaggctcgccctggatacgcggcctgctggccaggcggccggtcaaggtcgccgtcgtggcgcaggcggccaagaccgcccgcatcatctgggcaatgctgcaatcgggacaacaatacagggcaccggctgtggcctagccgcaatcgaggcccttaacagcgtaaggagcaaaaaggcagcacggcaaaatggtcaggacctgggtcgggaaaatccgccatcgtcatcgcgacaccaagcgcgctagaatgattggaaccgatccgcgtaacccttgttggtcagcggtcatcgaaatcgaccgcactaaaggccgaatacatgaccgctccagacttacgccgtcgtcgtcattttgcctcttgcccaagaggggccgtccatac

SEQ ID NO: 9014 - DNA, 1352 bp, unidentified
  source 1..1352: mol_type = unassigned DNA; note = element_e22962d
  misc_feature 1..3: note = core
  misc_feature 4..87: note = LE
  misc_feature 88..1107: note = CDS
  misc_feature 1108..1352: note = RE
  misc_feature 1125..1339: note = bridgeRNA
ggatggggtggatggctcctgcatcaaacggcgtcgcaatgcgccatagtgcaattgctatgaactgcttatgagaggagccacccaatgcatgttacaacaatcggcctagatttggccaagaacgtttttcaggtccacggtattgatgagaatggcgaggttgtattcaaccgcgcactgagacgagcacaagttttggttttctttgagcgtcttgagccatgtttggtcggcatcgaggcctgtggaaccagccaccattgggcacgggaactgatcaagctgggccacaacgtgaagctaatcccaccagcctacgtcaagccctacgtcaaacgtggcaagtctgatgccgttgatgctgcggccatttgcgaagcggtgacgcgcccaacaatgcggtttgtcgaagtgaagaccccagaacaacaggcgatactttctgtccaccgcacgcgcgatttgatcgtgagacagcgtacgcagaccatcaatatgttacgggcacagctggccgagtttggtataatcatgccgcaaggcatttaccacgcgctgcaatttgccaaagactgcataaatgacgagccgctcaatcttccaatggacgcccaagaggtcatcttcaatctttgcgatgaactgctgttcctacataccaagatcctgcggcattctcggcacatgacacgtattgccaaaagcgaggaacgcgttgcgttgctgcgaacgatacccggtgtcggaccaattacagcgtcagcaatcgttgcgacggtcggcagcggcaagcagttcaacaatggtagagagtttgccgcttggttaggactgacaccgctcaacagatcaagtggcgggaaggaacgtctcggtcacatctctaagatgggggatcaatacatacgacgtttactggtcctaggcatgacgtctcgcatccgatccatcaggttggagccggaaaagtttgatccatggtttgctgacatcctgtcacgcaagccaagcagagtagctgccgttgccatggccaacaaaactgcccgtatgatctgggccgtactgacccggaatgagcctttcaaagtgagaaccgtttaacagaccaacgaaacaactggagtttgcaagaccaatgaagtgatggaactttgtcagcccaaaaaccaagacaccccgagctttgtccagaacgcttgctgttcgatgtgcggaatgggacttggttggtggaaaccatcagggccagcggccatgtgcgtcgcgctaacaggccgaacacaagactgcttctgacaaaatgccatgcacgaaaaaggacttgcaaaaaaggagccatccacaca

SEQ ID NO: 9015 - DNA, 1496 bp, unidentified
  source 1..1496: mol_type = unassigned DNA; note = element_e236ad9
  misc_feature 1..4: note = core
  misc_feature 5..241: note = LE
  misc_feature 242..1480: note = CDS
  misc_feature 1481..1496: note = RE
gtcactagggcaccctctttcttgcgggcatcgctagggtgctcgttgttgggacccggcgggagccggggtgacggcctggtgcggtcgcccgcgaagggcctgcatgacaccgccgcccccggctttcccggggctgcagaccggcaacagtgggatgcgccgcagagcgccagttagtgaccacccgggagccagcctcgccgccgccgggccgtcgctgccattttgaggagtcgagttgtcgcttgcgctgcctgaagcgctgttctttaccgggatcgactgggccgccgagactcacgccgtgtgcgtgatggatgctgcgggcaagatcgtggcccggttcacgatcgagcattccccggacgggatcgccgcgctggcccggcgcctggccacgtacgggaagcccggcgatatgccggtcgccatcgagcggccgaacggccgcctggtggacctgctgctggaggccgggcacccggtagtgccggtcaagccgaacgccatcaaggcctggcgcgacggtgaggtgctctcgggcgctaagtccgacgcaggggacgccgcggtgatcgccgagtacctgcggctgcgccagcacaagctgaaggtcggcgtcccgtactccgatgagaccagggcgctgcggaccgtggtgcgcgcccgcggtgacctggtcgagatgcgggtcgcggccaccagccagctctcggcgctgctggacgcgcactggcccggcgccagggccatcttcgctgacgtcgagtccccgatcagcctggacttcctcacccgctacccgaccccggccgctgccgcgcacctcggcgagaagcgcatggccgcgttctgcgccaagcacgggtactccggtcgccgcatcgccgcgcagctcctggcacgcctgcaccacgccccggccggcgctgccggcgaggcactcgctgaggcgctccgcgatgccgtgctcgcagccgtcggcgtgctcacggccctgaacgcgtcggtgaagaaccttgaccgcgccgccgccgcccacctcggggagcacccggacggcgcgatcttcacgtcgctgccaaggtcgggtcaggtcaacgccgcccaggtactcgccgagtggggcgactgccgccaagcctatgagcgccccgaccccgtcgctgccctcgccggctgcacgcccgtcaccaaggaatccggcaagcaccgggccgtgcatttccgctgggcctgcaacaagcggttccgcgtcgcgatcaccaccttcgccgacaacagccgacacgccagcctgtgggccgcgaagatctacaacgacgcccgggccagcggcaaggaccacccgcacgccgtgcgtatcctcgcccgcgcctggatccgcgtcatatggcgctgctggctcgacggcgtcccctacgaccccgcccagcacacagccgcggccgcgctcatcgagcccaaagcggcgtgaggttgacacagggggt

SEQ ID NO: 9016 - DNA, 2001 bp, unidentified
  source 1..2001: mol_type = unassigned DNA; note = element_e2377e2
  misc_feature 1..3: note = core
  misc_feature 4..232: note = LE
  misc_feature 233..1426: note = CDS
  misc_feature 1427..2001: note = RE
  misc_feature 1..236: note = bridgeRNA
cccgttaccttcttcgtagtcccgcaccgcggggccacggtcgccaggttcggtatgactttcttcccttgtctctcgaatgatccggggggtggtgtcgccgagcctggtggcatcggtagaccgctgatagggacaaggccaccgggttcgaggtaggtctcttcgtaacgtgggtgccgggtatcgatgctggatcggcgaccggtaggaccggacgaaagactgcttcatggacacgagttacgccgtgttttgcggcatcgacgtgggtaaaagcgatcatcacgcggtcgggctggacaccgccggcggccgactgttcgacaaggcactgccgaacgacgaggcccgactacgggctgtgttcgcggatctggccgtacacgggccgatcctggtggtcgtcgatcaaccgaacacgatcggcgcgctgccggtcaccgttgcccgagactgtggtcacgacgtcgcctacctgccggggttgtcgatgcgccgggtcgccgacctgtatccggggcaagcgaaaaccgatgcccgcgatgcgttcatcatcgccgataccgcccgcaccatgccgcacacgctgcgccgggtcgacgtcggtgacgagaccctgaccgaactcggtgtgctcgtcgggttcgacgacgacctcgccggcgaggcgacccgggtcagcaaccgcatccgaggactgctcaccggcatccaccctgccctcgaacgagtactgggacctcggatcaaccatctggctgtcctcgagatcctgtcccgctatggcggaccggccgggatccgacaggccggcaaacgccgaatcaccaccctcgcggtcaaacacgcaccgcggatgggcgcccgcctggccgaggaaatcttcgccgccctggacgcgcagaccgtgacggttcccggcagcaaggccgccgagatcgtgctgccgaaactcgccgactcgctcaaagaggtgctgcaacaacgcagaaccatcggtgacgacgtcgagaggattctcgacgagcaccctctttcccaggtcctgacctcgatgcccggcatcggagtcaggaccgcagcacgcatcctcatcgagatcggtgacggctcggacttcgccacagccgggcacctcgccgcctacgccggcatcgccccggtcacccaccgctccggcacctcgatccgcggcgagcacccggcccgctcgggcaaccggaaactcaaacgcgccctgttcctgtccgcgttcgcggccctgcacgacccgaccagccgcgcctactacgaccgcaaacgcgccgagggcaagagacacaacgccgccctgatctgcctcgcccgacgccgctgcgacgtcctgcacgcgatgctcaagaacaagaccttctaccagccaccaaccgcagacgcggcgtgatcacgcccagcaggcgtgctaacgcactcgcttcgccagatggaccagcgcatagccgcctggagtcggagttcggtgcgtttcctgataaccgaaccgagagtagagccgcaggttgccgaggctgcgctcacccgtgaacaactgcagatcagtgatctgctcaggtagtcgctcttccaccagttcgagcagtcgactgccccggccccggccctgcatgtccggggccacgaccagccgtcccagctcggcgatgtgaagctccgtcagagagagatacacgcgcacggcggcgacgagacgccgggagtcgtcgcgcaacccgaacgcgagaacgtcgggctgcgtcagctcgctcaccaactcggcgaaggactgcatcaacgggggaaggttcacgtcatcgtgggcctgagcctcagtcacatacgcagcccgctgcaacgtcagcagctcacccgcgtccccacccgacagcgtcacaacggattccatgcacgtcgactattccagcccctaccggaccgcactccagtggcatccccgagcggttgacatcaacatagggacac

SEQ ID NO: 9017 - DNA, 1316 bp, unidentified
  source 1..1316: mol_type = unassigned DNA; note = element_e23d31b
  misc_feature 1..2: note = core
  misc_feature 3..266: note = LE
  misc_feature 267..1268: note = CDS
  misc_feature 1269..1316: note = RE
  misc_feature 43..215: note = bridgeRNA
cttgtatattaaacacatctctaaaacacaggaattaagtaacacaaaacgtttatagtggtcactgattttctggggaagccgtcccgaccttaagccttgagcttgtatgtagataggctccccaccctcgtcatccatgccgtggagtatcttagacctgtaaagccaagctttctgagtctgcattcacaaggacggtaggtgaagtgtcagggttgggaaaccagttatcatcataacaaaataacgatagagatgaaaaaatgaaccatgtaggaattgatgtcagccacgaagaaaatgttgttgtgattagtgtcaacgggaaggctcgcaaagccatcacctttgaaaataccgcctcgggtcataacgcgcttatcggtgcgttagccaaattgaaaggagaaacccgcgtttgtcttgaagcaaccggcatttatcattttgatttagccatcgcgctcagtcgtgccgcgaacattgaagtcatggtcatcaacccaaaagtggcgcataactttgccaaagtcttgcttaatcgcagcaaaaccgatgcggttgatgccgaaaccttggcgatttattgcgaaagaatgcccttcgaactctggcagcgtccagccgatgaaaacatcgcattgaaagcgattgcacgaagaattgccgctttgaacaaactgctgacccaaactaaaaatcagcttcatgcactcaaagcgactcaagaaacaccggcaggcgtgattggacatattgaagaattgattgaaacattgactcgtcaaattcaagcgcatcgtgaagacgcgctggaactgattgggcagcacgaagcgttggcaaacgcttttgcgttaatcaccagtgttaaagggattgcccaagctagtggcattcaaattctggcggaattgatgatcttgccgcagaacatgacagccaaacaatgggtggcttatgcaggcttagacccaagacactttgaatccggtagcagcgtggcaaaaaaaccgcgtattagcaaggcgggcaacaaatttatccgtcaagccctgtatatgcctgccttggttgcagctcatcgtgagccgaatatccaaggttactatgcgcatttgattgtggataatggcttgaagaaaatgcaagcgatttgtgccgtcatgcgtaaacttttacacgctatccatggcatgttgaaaaccaacaaagaatttgatggaacttgtttttacaagcttcctgtcgaagcaaattcataatatgaattatgattttttgtaaattgggcttgtattttaagagagtat

SEQ ID NO: 9018 - DNA, 1590 bp, unidentified
  source 1..1590: mol_type = unassigned DNA; note = element_e25778b
  misc_feature 1..2: note = core
  misc_feature 3..239: note = LE
  misc_feature 240..1463: note = CDS
  misc_feature 1464..1590: note = RE
  misc_feature 9..213: note = bridgeRNA
ttagtaccataaatagtgtaagaaaggaagtagttcctatcttgcactatttttgtataatgaagaagtagtatgacgaggctgttttagggtttaaacatccgaaataaaaactgtcaactacctcttcattattcatattcggttaagcaggttgggcaaaacgtccgtgtcacaagctaaaatgagtgtaatggtgcaggtagaaactacaaaagaaaaaagaaagaaggcaaaacatgatatctgtaggtatagacatatcaaaagaaaaatttacagtttgtgcattagaacaaggaagtaaaataatttggaaaccatttgatgtttcactaaacaaaacaaaagtagaagaatttctagcgaaactagaaaaaataaaagaagaagtaaaaataacaatggaagccacaggaaaatatcatctaccaatactttatgaattaaaagatagaggatactttgtaacagtaataaatccattaaaaatgaaacaattttgccgagccttaaactttagaaaagcaaaaaacgacaacatagacgcaaggcaaatagcagaatatggaataatgtattggaaagaattagaagactacaaagtagatgaagaaaactacagagtcttaaaagaattaaatagaaactaccaacattacatggatctaagaatcaaccaaatgaacttcgtagaccaaacagtacatcaaacatttccaggaataaaaaaactaatcccccatggatcaggagacttttcaaaagataaactattagactttttagaaaaatggtggcataaagacctaatattagaaaaaacagaagaagaatttgtagaagaatataaaacatgggcaaaagaaaagagataccatccaactgtaaacaaagcaaaagccatttacaaattagcagaggacagtatctcaacccaaccttcccataactcaaaaatagaaacgaatatcagagaaggaataaatctgataaagcaaataaatcagattctaaataatattttatcacaaatgatagaaatatccgagcccttagaagaatatcaagaagcaaaaaaattctcaggtatatcagacaaattagcagtacaaatagtagcagaatttggaaatctatcaaaatttaaaaacaaaaaaagtctaatatccttcatggggatagattcacccccatatgaatcaggaaactttaaagcagaccaaagaaaaataagtaaaagagggaacgcaatactaagaaaagtaggctaccaagcaatgaaatgtatgatgagtgcaaaaaatccagaaaatgaaatatataactacatgataaaaaaagaaaaagaaggaaaagcaaaaaaagtttgcaaatttgccggcttaaacaaattcttaagaatctactatgcaagagttatgaagtcaaaagcctgtaaaacagaattaaaagtagcttagaaataaaaataatatgttactaagccgaaaaacagtcggcttaattgtaatgatcaaaattaataaatcaggaaaataaaaataacctgaaaataaattcaggttatgcttgacttttgttagcagg

SEQ ID NO: 9019 - DNA, 1925 bp, unidentified
  source 1..1925: mol_type = unassigned DNA; note = element_e257cb2
  misc_feature 1..5: note = core
  misc_feature 6..134: note = LE
  misc_feature 135..1424: note = CDS
  misc_feature 1425..1925: note = RE
  misc_feature 1589..1859: note = bridgeRNA
ataggagcttcttgtataattcaaatataaggaattcccagaaagaaggttgataaaaaaatacctcagagtaaaataagattactgactttgcagggttagtaaaaatcttattaaacagtgaggtacttgaaatgaattataacacacaaaacgcaaaaattgcatctattacggaaaaaactttgatcgttggtattgatgtgggaagtgaaacccattatgcaagggcttttagctggcgcaattatgagtactcaaaaaagccgtttgctttcagtaacgatgaagatggatttgcttcattcaaagcatggatggatgatatagcagagaaacacgaaatggaaaaggtgattccgggaatggaaccaaccggccactactggctaaaccttggagcgtacctgcagggacagggaatgaggccggtacatgtaaatccgcatcatgtcaagaaatccaaagaactggatgacaataatccgaataagaatgaccgtaaagatccaaaaacaattgcaggtctggtaaatgaaggaagattctcttatccatatattccaaccgggatctatgcggagatcagaaatctgtctaacctccgcatccagacacaggaagagatcacaaggatcaaaaacaggatcgcccgctggttcagcatctattttccagagataaaagacgtttacaggaatccggatgcggtaagcggactgatggtgataaaacaggcacccttgccttgtgatatcaaaggacttggagtggacggtgtcaataagatatggagggatgcaaggctgaaaggcgctgggataaagagggcaaagaccctggtaacagcagcggagcacagcatcggaaatacggaagcaccgagaagcgcaaggaaagagatccgaaacctgttaaatgactatgagatctataagagccgtatggatgaacttatggaagagatagaggaattactttctgagatcccatatatagataaattgatgggaatctgtgggatcggaataaaaacggtaagctgttttattgccgaagttggagatattgaacgttttgataatccgaaacaggtgcagaagctggcgggatatgccattgttgcagacagctccggaaaacataacggggaaagcaggatcagccacaggggaagaaagcgattgagatatgcattgtatgaagcagcgatatctgtgatcgggaaaaacaaagaattcaaagagatccatcattattacaggacgagggagaaaaacccactaaagaagatgcagtcggtgatagcggtgtcatgtaaactgatccggatattttatacgatactgacaaaaggcatagattatgacggtcagaagatgttaagagacattgtaagaccaggaatgcagtcagcagcataaaaagaagtaagacagtgtatcatggccggtctgagcctttgagaggaagagttggaaggctgggaccagccatgatagctggaagtaacaaacataatgtaacaggaaaacgtccactgaaaggtgctgttacggaaaagaagtcagtaatacaaaaaacaaagaatgagccagtagtcggcaggaatattttccagagggcatgaccctgtaaaggagctaagctgacaccctggttatggacaggcgggacgagagaagttaggactcagcgatagactgatgatcctggtagacatgggaggttcgctgccgtagatggatgggtatacacaaggccatgtagaatgaaaaaagaagacgttttacttcgtgtacccaaaatccactactttcgtaccagatacagagaaatgtccattcctatggctctttcttctgagatatttattgatgaaacattaaaaaaaccttgattttaaaggaaaaagacttgactat

SEQ ID NO: 9020 - DNA, 1693 bp, unidentified
  source 1..1693: mol_type = unassigned DNA; note = element_e25c676
  misc_feature 1..3: note = core
  misc_feature 4..423: note = LE
  misc_feature 424..1479: note = CDS
  misc_feature 1480..1693: note = RE
  misc_feature 237..391: note = bridgeRNA
aaaaaggcacttttcgatgaggaagcatgcgtttgcagcaaaaatggttgacgagaaaaatgcgtatccatctccattttgccaaggaaaaagcagaaaagtcacccctatatagctgaaatcatcgattgactcgagtgatttcatgacttgagctagccttacctttgcagaaaaattatcatcgaaggatgaatgatgaacaaaagttaattcgtacctttgttgtaggaaggacggattaacctccagtgggtaatctagtgagctagccagaccatgagtctaatttgagttatagtccctctgggttctatctgcgaaggcttaataggaagataggctcggagcctgagtaaggtgatagccctaggcagaagatagttaatcacgtcctgagaataataattcagacacaaaggtatgaaaaaaatctttattggcatcgatgtttcgaaaaaaactatagatgcaagcgtgattatcccgtcaatgactggtgacaagccctcactccaagtctatggcaagttcgacaacagaccttcaggcttccgtaaaatggtcgctatggtgcgtaaggcagctgcaggcatagatacgtccgaatggacattctgctgtgagacaacaggcggatacgacatcgcattgtgtgactacattacatccaaacagatgattatctggcgtgaacatgcggcggagattgcaaagattcgcagagaccacggcaaggacgaccgcagggactcgctgctcattgcagagtatgcatggcgcaaccaggacaaaacacgcccttatacgccaaaaaacgttgagattctgaatctgcgacacctgcttctctatcgcaggcagctggtggagatgcgcaagcaactggtcgttagatcaaacgaattgaaacagattgccgagaactgcgaacaactcaaattcatgtacaaggacagccagaaactcataaaagagataacagagcgaatagagaactgtgaggtaaaaatgcgtgaactgatgtcaacaagtcccacgattgctgccaatttcagtcatatcatatccatcacaggcataggactggtcagcacagcggccatcctcatctatacgaataacttcattggcataacatcatataagaagtttgcaagttactgcggtatagcgccattctacgaggactccggaacgaccgtgcacaaacgcgactatataggacacaagtccaacagtatagtacgaacatatctcacacaggctgcacaggtcgcatcacgtttcaacgtggacatggttgaatacaaacagcgcatggcattagctggaaaacctcaacaggtgattatcatcaatattgccaacaaactgctcagaatcgtattctctgtcatcaagaacgactgcgactatgagccaagacatgagtacatgcgacaacaacgcattgcacaagaaaaaactgttgcatgaaacatatgaattgagaaagggcgtagcccccttaaacatcaaaaacatcgtcacagacgataaacatataagaaataatagaaatttaaatattttaatactcaaaattcgtgatttaccataggaagctcaatcgatgatttcactcgagtggcgtttttgggggtatgaatacattaaacatgaaacattaaatattaaacattaaacattg

SEQ ID NO: 9021 - DNA, 1456 bp, unidentified
  source 1..1456: mol_type = unassigned DNA; note = element_e263b10
  misc_feature 1: note = core
  misc_feature 2..153: note = LE
  misc_feature 154..1200: note = CDS
  misc_feature 1201..1456: note = RE
  misc_feature 1225..1454: note = bridgeRNA
gaatgaaatggacgcctcccacctgatcgccagggataaaggatctgcaagagggaagtagcggatgagtgatggatcctcgcgcggccaacggcatcaatgtaccctagagtgaaagtgcataactttcgaggcaggcggaggatccatatcatgaatgctactaccaaagccgtggtcggggtagatacggccaagagcgtattccagctgtacagcgtggacatggagacgggcgaagtgatcagcaaacagctcaaacgtgggcagttcctgctgtggttctcgaaccgcgcaccatgcctggttggtatggaggcatgcggcggttcgcaacactgggcgcgccaactgcaggcgctggggcacgaagtcaagctgatgggtggcaagatggtcaaagcatttgtgagcggcaacaagaacgatgccgccgatgcgcgcgccatctggctggcggcgcagcaggccggcgtgaaggaggttgcggttaaaaccgaggcgcagcaagcagtgctagcgatgcaccgcatgcgccagcaactggtaaaaatgcgcacggcgcaacgcaatgaattgcgcggcttgctggccgagtatggcgaggtgtttggtttagggcgggccgcattcagtgtcggtatgaagggcgcactggcccgtctggcggagcgtttgccggcggtgctgatcgataccttgcgtgagcagtgcaatgaattggtcaggcttgatgagcgaattggcgccattgaggccaggttgcaggtctggtttcgtgaggatcgcgccgcgcaggctattgccgcgatcccaggcgttggcctgctgatggcaacggcggcggtagcgactatgggccagcccaatgctttccgctcggggcgcgagttcgccgcctggatcgggctggtgccggcccagaccggaactggtgggaaggtaaagctattgggtattagcaagcgcggtgatacatacctgcgtactttgttgatccacggcgcacgagcggtacagcaccacacccaggcgccgaccaggtggctgcaagatattggccagcgccggccaccaaatgtggtgacggtggcgctggctaacaagattgcgcgcacgatctgggcggtgttggcccacaggcacgcatatgacagggaccacgtcagtcaacggccacaggccgctatgccgacgtgaagatcaaccaactctttgaaaggatggcacgccaacggttgcgttaggtatcggcagtgatgacagacaggtcagaccgggatccagcaaacctgaatggttccatgggccttaagcccgtaggaggaatgaggagtggatcagcggatttcatcggggccagcggctatgccgcatgcaaggccggatatagaactgcgactttccttgtctatgcgttgctgaaaataccttgcaaaagggaggcgtccatata

SEQ ID NO: 9022 - DNA, 1616 bp, unidentified
  source 1..1616: mol_type = unassigned DNA; note = element_e265955
  misc_feature 1: note = core
  misc_feature 2..274: note = LE
  misc_feature 275..1513: note = CDS
  misc_feature 1514..1616: note = RE
  misc_feature 13..294: note = bridgeRNA
cctgttactatagatattggttgatgacatggcatccagccatgtctttttccatcttgttgcctaagctgttagaatgagaggacaatgggtctgacgggcacctccaaggactttgcgtccgtaatttagtcagttagccatcctctcgttcgcagcgttcgatttgtgcaggtagagccgccattcggtgcgttcgtgtcatcaaacagatagaatcggtaatgaggaaagggtggttcgccaattgtaaatctgtgatggaagtgtttttatgaacgcagtgggaattgatgtttccaagggcaaaagcatggttgctgttgtccgaccctttggagaattggtggtaaagccctacgaggtacgccacacctccagtgaactcagggagctggcaaactcgctaaaaagtctggagggtgaaacgcgtgttgttttggagcataccggacgttattatgagcctgtggcgcagatgctccatgatgccggagtttttgtcagcgcagtcaatccactgctcatcaaggaatacgggaacaattctctgcgcaaagtcaaaacagataaggctgattctttaaagattgcacggtacggtcttgacaattgggttgaactgcgagagcatacttctatggatacaattcgttaccaactgaaaagcatgaaccggcagtactgtctgtacaccaaaaacaaggttgcctttaagaacaatctgattgcgcttcttgaccagacctaccccggtgtaaacgctctttttgacagccctgtccgtacggatgggagccaaaagtgggtggatttcgccgcgtccttctggcatgttgattgtgtacggagcataggggaaagcgcatttgtggaacgataccacaaatggtgcaagaggcacggctacaacttcaatgccaccaaggtagctgaaatttatgcggattccaaagaattgattgctatgctgccgaaaaatccactatctaaagtgatggtgcaggaagccattaaccagcttaactccatctccaaaacggtcgaagtgtttcgttccgagatgaatcagcttgccgagcagcttcccgagtaccctgttgtgatgggcatgtacggcgttggaagctctcttggcccacagctcatggctgagattggagatgtgcgccgttttgcccacaagggctctctgaccgcttttgcaggagtggacccaggtgcaaaccagtccggtacatacgaagccataagcactcgttcctcaaaacgcggttcgccggaactacgaaaaacactctttatggtgatgacagttcttttgcaaaaggctccgccggacgacccggtctttcgatttctggacaaaaagcgtgctgagggaaagccctattacgtttacatgaccgccggatgcaacaagcttctacgcatttactacggcaaggtgaaagagtatctgaacgccgtgaacgagcctgtggatatggattcaaccggcctttctcggtagcgtactgccaacttcaggtcagcgcttcggcggtggcctttttgtgttgcttattttccttaacttgttttttctcttaacctattgactttttatttgcagg

SEQ ID NO: 9023 - DNA, 1164 bp, unidentified
  source 1..1164: mol_type = unassigned DNA; note = element_e2683f5
  misc_feature 1..2: note = core
  misc_feature 3..204: note = LE
  misc_feature 205..1152: note = CDS
  misc_feature 1153..1164: note = RE
  misc_feature 36..210: note = bridgeRNA
cttgtcttatgcctgtcctgcccaaccgggcgataaggaggcaccggtggcggtggccgacccgccaccggtggaaggggacggatcgggaaagtgctggccgtcatgggccgagctagagatggatcgcccctttcttttcctgatgccctgaacggatacccggggttcggccccgaacgacaagcataggacacggaaaagatgaccgcgacgatagcaccgaccgccggtatcgacatctccaaagatcgactcgatgtggcgctccatccaaccagcgagacgcggcagttcggcaatgaccggcgaggccatgacaagctgctgtgctggttgaaaaagcgagcagtggcgtgcgtggtgttcgaggcgaccggctcgtacgctcgcgagctggagcgacggctggaaaaatcggctgtagcgttcgcccgggtgaatccacggcatgccaggcggttcgccgaggcgaccggtcgtctggccaagaccgaccgtgtcgacgcactcatgctcgcccgcttcggcgccgtgatggagcccgaatgccggccgctgcgcagcgaaaccctcgaccagctggccgagctcgtagctgcccgccgagccttagtgaaagaccgcacagccaccctcaaccgccggaaaacgctgcgcatagcgctgctcgccaggcaggcagcgcgtcggctcacccagatcgatgcccagatcaaggccatcgacgacgccgcccgagccttgacccagggcgaccccgacctcgaccgtcgccgcgccatcctcgaaagcatccgcggcttcggcgaaaccaccgcgatcgccctcctcgccgacatgcccgagctcggcacactcgacgaaaaacaagcggcagccctcgccggtctcgcacccatgaaccgccaatccggcacgtggaaaggcaagagcaggatccaaggcgggcgacgtcacgtccgccagaccctgttcatgccggccttggtcgcggcccgctacaacgccgacatgaaggctaggctcgagagcctgaccagggccggcaagcccgccaaagtcgccatcacagccgtcatgcgcaagctcatcatcctcaccaacgcgctccttcgagacgatcggctgtggacgccaaaacccgcttgaccatcacggata

SEQ ID NO: 9024 - DNA, 1400 bp, unidentified
  source 1..1400: mol_type = unassigned DNA; note = element_e2700d4
  misc_feature 1: note = core
  misc_feature 2..86: note = LE
  misc_feature 87..1118: note = CDS
  misc_feature 1119..1400: note = RE
  misc_feature 1146..1386: note = bridgeRNA
tgatgtggtggaacggcccgctacgacagcatccaggtgctaaaacgtggtcgttgatgtcaacgccacaaagcaggagccgttccgtgaagcagattaccaccatcgggttagatttggccaagcagttctttcaggttcatgccgccgacgcagagggttcccctgtcctaagccgcaagctgcgccgggccgaagtgcttgggtttttcgaaaagcaaccagcatgcctggttgggatcgaagcctgcggcagcgcgcatcattgggcgcgtgaaattgcctcgctcgggcacgaggtgcggctaatcccgccggcgtatgtcaaaccgttcgtcaagcggggaaagacagatgccgccgatgccgaggcgattagcgaggcggtgacgcgcaagacgatgcgcttcgtgccagtgaagtcggctgaacagcaggcggcggctatggtattgaagacccgggcccttctcgttcgtcagcagacacaggtagtcaacgcgctgcgttcgcatctatcggaattgggcatcatcgccggcattggcacggcaagaattgcgggcttgatctcgatcgtccgtgatgagactgatgcccggctgcctgcagccgcccgcttcgccttgaccacaattgcggaccagatcgaggccctggccctgcagatcaacaaactcgagcgcgagctagtctcccaagccaaacatgacgaagacatgcggcgtctggtcacaatccctggcgtcggcgcggtaacggcagcttccatcaaagccctgataccagatcctaacggatttagatccggccgacatctcgccgcctggttgggattaacgccaaaatcccattcaagcggcggaaaggagcgtctagtcgggatatcaaagatgggcaatccggagcttcgctgcctcttggtgcttggcgcaactgcggtgttgcgtcacgcgcggggcaatgacaacgcaccgaaatggctgtgcgacctgctggcacgacgcccctacaaggtcgcggccgtggctcttgccaacaagatggcgagaataatctgggcgctgctaaccaaaggcggtgtgtatcgaggcttggatcgcgcgcaaagggcgtagtgaacgcctgagtcaattccaacgagaacagactgatcggcgcagtagccggcagaggcaaggtgcataaaaagacgatgatccccggggacgaaatcccaagaagaatgaggtcgcggcgacatgcgcttagagcgcgtttgtttgattaacccttcatcttgcggacttcatcgaggccagcggtcatgcgccgcacacaaaggccggacatatgaccgctaccgatccctacggcggatatcgtcacaaaatgctccttgacacgcgggccgttccaca

SEQ ID NO: 9025 - DNA, 1297 bp, unidentified
  source 1..1297: mol_type = unassigned DNA; note = element_e278d9e
  misc_feature 1: note = core
  misc_feature 2..251: note = LE
  misc_feature 252..1076: note = CDS
  misc_feature 1077..1297: note = RE
  misc_feature 1088..1283: note = bridgeRNA
taatgggatggactacctcttccctctgcggttaactttacgaaatatgttcagcaggagaatcaacatgaatatcgtatttctgggtattgatctggctaaaaatgtctttcagctctgcgggttaaaccaagccggtaagcctgtttatttaaaacgtaccggccgaaaagaattactccagatggtggcgaatattccggcgtgtctgatcggtatagaagcatccacaggcgcattttagtggtagcgtgagtttgagcgtaaaagtcatcagcccccagtatgtaaaacctattgttcgtgggcaaaaaaatgacggtaacgatgcgcaggcgatagctgtggctctgatgcaacctacgatgcagtttgttccacctaaaagccctgaacagcaggatattcaggctctacatcgtgcaagacagcgtattgttaatcatcgtaatgctacagtctgtcaaatccgggggatgctgcttgatcggggaataacaatcggcacggcagtctccagagttcgtcgtgccgttccgattatcctcgaagatgctaaaaatagtcttagcgttagaatgcgcaggacgattgcagaactatatgatctctttaacgatttgggtcgtagtataaacttttttgataaagaaattgatgctgtgttcaggcaatcagaagcctgccagcgcattgccaaagttaaaagcattggtcctaaaacagccacggctgttgtggccgcgattggcaaaggaactgaatttaaaaatagtcgtcactttgccgtatggcttggtctggttctacgacatcactcgagtggcgataaacaggtactgatgaatatgatgaaaaaaggcgacaagcatttgcggacactttttattcatggtgcccgcgctgtcgtcagagttgccacgaataacaatgatggcagcctgtctcagtgggttaaccagttaaaggaacggcgcgggtttaataaaacgaccgtggcggtcgctaacaagaacgcgagaataatctggtcgatgctgagaaacaataccgaatatcaggctgttggaagttagtacccagccagacgagttgcagtgtactgaaaaatggtgacaggttgcacctgcacaatcggaacctgactattatattggcctcagaggccgtccagttgttgaggcgattgtgtgcggattacccatttgggcacaggttagttttcctgatgccggatagatgtaagcaacaacccaaaaccagattctgtacttgcaaaacggaggtagtccataga

SEQ ID NO: 9026 - DNA, 1443 bp, unidentified
  source 1..1443: mol_type = unassigned DNA; note = element_e28397c
  misc_feature 1..2: note = core
  misc_feature 3..149: note = LE
  misc_feature 150..1172: note = CDS
  misc_feature 1173..1443: note = RE
  misc_feature 1211..1443: note = bridgeRNA
aaatgtaatgaacacatcccaccccattaagtcaggtgctctgtgatggatgaagggaaatactggaaggtgtggagcctcgcagatttccggcatcatagtgcccaatacaggatgcataaagctccctcagactggagactccacaaatgaaatatacaccggttggcgttgatatcgcaaaacatctgattcaggttcatttcatcgacgagcacacaggtgaagtgattgataagcaactacgtcgtcaggattttctgatgttcttctgtaatcgggaaccctgcctgattggtatggaggcctgtagaggctctcagcactgggggcgtgaactgacaaagctggggcataaagtccggttgttacaggcccactttgttaaggcattcgtcgtcatgggaaataagaatgatgtgatggatgcccgggctatctggatggctgttcagcagccaggtaaggacatcgcggttaaaacagaagaacaacagtcagtgctggttttgcaccgttcccgcagacaattggttaagttccgcaccatgcagattaattctctgcacggcacgctcctagaatttggtaaaaccattcacaaaggtcgggcagcgatggagcgagagctccctgaagcactggagcggatgaaagagagactgccgccgtatctcattactgtgctggaaaaccagtacaaccggctgaatgagctggactcgctgatagaggatattgaaaaaaagcttaccagcgtggcgagacagaatgaaacctgtaagcggttgctggatattcccggcgttgggccacttattgcaacggcagcggtggccaccatgagggaagcatcagcgtttaaatcagggcgagagttcgcggcttatgttggtctggtgcccaaacagactggctcaggagggaaaatccgcctgctggagataagcaaacgtggtaatacatatctgcgagccttgtttattcatagcgcaagggcggcagcattactgcccaaagaacctggtccgtggataaccgaactgaaaaaacgtcgtccaaccagcgtggcaatcgtcgccatggcaaacaaactagcacgaacagtatgggcgatagcagctcatggaagtaaatacgacaagaatcatgtcagtatcagatcatattaatcgctgataccgataaatattaacttttaatgaaaggatgaatactgaaaggtaactctggcggccatagtgatgacaacgacaggtaagaccgggactcactaaacctgaatattgtgttgagctaaaagctcgctggagaaatgaggtgtgagtcagcgaattacataggggctcgcagcttcatggctgcaaaaaagccggatataaagctgcaacctacccgtcactgtcaaggcaatggatgccttgcaacgggatgtgttcatat

SEQ ID NO: 9027 - DNA, 1615 bp, unidentified
  source 1..1615: mol_type = unassigned DNA; note = element_e28e0a7
  misc_feature 1..3: note = core
  misc_feature 4..246: note = LE
  misc_feature 247..1485: note = CDS
  misc_feature 1486..1615: note = RE
  misc_feature 8..222: note = bridgeRNA
gttcgtaatataaggttagccagatatttctggttgacctttttatttggggtcttaatataacggtagtcggggtagaacgtcgcacccgtgggttaaatcccgtcagctaaactgttcaccccctacttgtataaacatgtttcaggctggttgggacaacgatcccgtttaacaagcgaacctatgacattacaagaagccttaggggataccgacaaattgagtttctaggaggagaaaagcatgaatccagtcgtaggcctggatgtatcaaaaggagaaagtcaggtccaggcatttttagataaggggaaaccttatcgtagagtgtttagtattaatcataacctcgaaggattggagaatttactagaattccttcaagaggttgaaaaaacagcacttggtcatcaaccttcggtcgttttagagtcaactggacattatcatactccagtcattcaatttttggaggaacacaagtatgtttatgtaattgttaatcccctgatctcacatagagccaaaagctcaagtttacggaaggtaaaaacagatgcagctgatgcttatcacctttgcgaactgttttataaagaggagttggagcctcataaaaaacgaggtatacagctcctaaaccttcggaatttaacaagacaacaagagagtattgcggaaatcacggccaaaacgaagattcaacttcataccttattggatcaggtattccctgagtacagaggggtgtttgggagtttatattcaaaggtatcattgcttaccctgcttgaatttccgacaaccgaggcagttttaagggctagtgaaagtgaaattaccgagaagattacttctatatgtaatagccgatcaaggctttgggcaacagaaaaggcacagaaactaagagaggccgcccttcgaaacccgtttcaaaggaatctgtaccagagccatatctttaatcttgagatactggttaagattgttcttcaataccaagagcatctatcaaagttatcagcagaaatagatgccctagctaaagaaattgaagaatataggctactccaatctatccctggaatcggagaaaaaatcgcggcaacgattatctctgaaattggtgaaatagatcggtttactaatgccaaaaagctcgttgctttcgcgggggtcgatccaagtgtgtactcttctggtaagtttactgcttctgttaacaggattaccaaacgaggttcaagcagactccgccacgccttatacatggctgttcaaagtggtattagggacgctcgtaaaaagaaaaccactgacaaaataattccacgcaataagagactgagagagttttacgacaagaaacgcgaagaaggaaaaaccttcagagtggctgttatagcttgtgtaaataaacttctgcattggatatttgccttactaaaaaacaaaacgattttccaggatattgtttaaaaacaatatctaactaaatacaacaaaaccttccaatcggacataatggaaggttatttggcatgcttatttttagcttaccatactaaaaattctatttcattgaaaaatgttgacaaactattagctg

SEQ ID NO: 9028 - DNA, 1364 bp, unidentified
  source 1..1364: mol_type = unassigned DNA; note = element_e29608c
  misc_feature 1..2: note = core
  misc_feature 3..75: note = LE
  misc_feature 76..1101: note = CDS
  misc_feature 1102..1364: note = RE
  misc_feature 1077..1351: note = bridgeRNA
tgatgggatggacgcccccctgacggcatcgatgtgccaaagtggtggcgttgacaacactgaaggagggcgtccatgacagacgttagcacgattggcctggatttggccaagaacatcttccaggcccatggcggagatgctgccggtgcggtcatcttccgcaggaaactgcggcgcgaccaggtgctggccttcttcgctgcgcagcctccatgtgttgtggctatggaggcttgtcccggcgcgcattactggggtcgcgagataagcaagcttggccatacagtcaggttgatcgcgccggcttatgtgaagccctttgtgaagcggcagaagaatgatgctgccgatgccgaagcaatctgtgaggctgcacaacgccccacgatgcgtttcgtcgcggtgaagagcgaggagaagcaggcatcggcggtgatctttcgaactcgcgacgtactcatcggccagcgtactcaactcataaatgccctccgcggccacctgtctgagttcggcttcattgcgccgcaagggccttctcacatccagcaactcatcgaccaggttgaggatccttcctcaagaataccggaagccgctcgttgttgccttgtcttcctcatcgaggcactacgccgtctcgaggaacaagtccgagaattggatgcggagattaccgcgcgagccaaagctgacgatactgcccatcgcctgatgagcgttccgggaatcggaccgctgatcgccaccgcactggaagcactggctccgccagcagagactttccgctccggacgtgacttcgccgcctggatcgggttgacgccgctccaacgctcaacgggcggcaaggaacggctcggacgaacgtctcggatgggggagcgaaccttacgacgactgctgatcatcgcatccagtgccgtggtgcgctgggccaagcgcaaaggtgtgccatctgggtcatggctccatcgaatgttgacacgcaagccgccgatgttggtaattgtggcgttggccaacaagaccgcgcgcattgcttgggcgttgatgacgaaaggtggaatctaccgagctccgaccgtcgtcgcctgatcgcggcgaacggacgcgaggctatcgggaggacgtgagaaggtcaaaggacaggtatggcgcaacgtcggcgaggcgggatcaggagaaccaggcgcatggggagcgcttcgagcgcgttccaatgatttggacctgatcctcgaactcccatacgggcccgcggccatcaaacggtcgcaaggagaggccgaacacatggcagcacccgatcacgcgcagcagccaaagattcttcttgcatccgaaggggcgtccacaca

SEQ ID NO: 9029 - DNA, 1390 bp, unidentified
  source 1..1390: mol_type = unassigned DNA; note = element_e296e2f
  misc_feature 1..2: note = core
  misc_feature 3..88: note = LE
  misc_feature 89..1117: note = CDS
  misc_feature 1118..1390: note = RE
  misc_feature 1088..1377: note = bridgeRNA
agatgggatggttgccgccctctccggacggcatcgcgatgtgccaagatcgtggtgttcaacgccacgcaagggagaggacggcgagatgaaggatattatgatcggggtggatttggccaagcaggttttccagctccacggtgcacagaggagtggcgagattgtgttccgcaagaagctgtcgcgtgaccagtttcagggcttcatggcagcgcagcctgcctgtctggtggtgttcgaagcctgcggcagcgcacatcactgggcgcgtcaaatggcggtgctcggtcatgacgtcaagctgatcgcaccgcaatacgtgcgcccttttgtgaagcgccagaagaatgacgctgctgatgccgaggctatcgtgatcgctgcgcggcagccggagatgtgctttgtgatgcccaaaacaaaggagcaacaggccaaggccgtcgcattccggagccgcgaacggctcgtccaccagcgcacagagcttgtgaatgcgctccgtgccgtgttctatgaatatggacatgcctttccgatcggcatcgctcatctgaagcggatggaagccgtggtcgaaggaccgggcatcgacctgcctgagcttgtcatcgatgaatgccgtgatctgctggcgcagattgccgagaaaacagaaagaattgcggcgaagaccaagacgctgaaggcacttgcggcccagaccgaaaccgcacgcctcctgcaaacgatgcctggcgtcggccctttgacggcgctggcggtcgaggcctttgcgcccgacatggcggaattcaaaagcggccgaaacttcgcggcgtggttggggcttgtcccgcgccaaaactcctccggaggcaaggcgcggttggggcgtctatcgaaagctggccagagcgatatccggcgcctgctgatcatcggcgcgatgaccaggaccacggggggcgcacgcagaaggattgcggctgatggttggattgggcggcttctggcgcgcaagccagggatgttggtcgggatcgcactggccaacaggatggcccggcagatctgggccatgatgacacggcgccaagcctacagggatccggcggtggtggctgcggcatgaacatcatgacgtgatcgctcctcacggatgaaggggagtgtgagaagccgacgaccttgaatgggcacaacgatcgaacagatccggatcaggaaaaccaggacaatcgccagagccagacagctcggcttccagatcaggacctgatccgctgatcaccataccggcccgcggcttctgaaagtgccgcaccgagaggcctgaaagaagaccgcactcgatcacttgccgacagggacgaaagcctcttgcattacgggcggcagccaaaga

SEQ ID NO: 9030 - DNA, 1588 bp, unidentified
  source 1..1588: mol_type = unassigned DNA; note = element_e2a00e8
  misc_feature 1: note = core
  misc_feature 2..267: note = LE
  misc_feature 268..1464: note = CDS
  misc_feature 1465..1588: note = RE
  misc_feature 28..287: note = bridgeRNA
gattggtacaaaataagcatagcacccgaagcgtataggaagcctcggaggctatgcttatttttgttataatgggagggcaatggatggacggtttctttggtgagccaagcgctcgagctgtaaacagtcctccgccctcttgttataaagattcgattgagcaggttgctccggctatgccgcgtgcgcgtcacgaaccaatttgaatcgtaataagccggtgcggaagcattgcaatattttatcaggaaagaaggaatgcccatgctcagtatcgggatcgatgtgtccaaaggaaaaagtaccgtgtgcggaatgaagccgggaggagaaatcgtgtacactccgtttgaagttcagcacacgagggaagggatgtcggagctggtttcgctgctgcgcggcagcggcgaagaggttcgtgtcgttctggaaagcaccggcagctaccattgcccggtggtggccgcattgttggagaacggaatattcgtctccgttgtcaactcgctgcggatgaagcggttttgctcacaaagcatccgcagggtgaagaccgatcaaatcgacgccatgcagatcgctttgtacggcctggcctattggcaggagcttcaaccgaccagactgccagaaaatacatatcgggagcttcagctcctggcgcggcagtattaccagatgacctccatgctgatcaaggcaaaggtcgattttaatgccctctgtgatcaggttttgcccggtatgcaggagctcatgagcgaccatgccggacggcacaagctttcggactttgtcctgcggtatcgtcacaccactcacatcctcgaaatgggagaaacgcgctttcggaaggattattgcaaatgggcggaaaaaaagggataccgcaatcgcgaacgtatggcagcgctcatctttgccacagctcaaaacggtatccctgtgcttcccaatgcaccatccacgcagatcgtcattacggaagcgatacgagtcctccacacagtggaggcgtcccgtgacgctattttaacacagatgcaagctctcgccaagaccctgccggaatattctcttgtgcgcgaaatgccctgcatcggggacacgctggctccgcgcctgatcgcggagatcggagatgtccgccgctttcacagcaagcgggcgctcatcgcatacgccggcattgacgcgccgccgtaccagtccggcaaattcagcgcgaataaccggcacatctccaagcggggaaatcgctatctgcgtaagaccgggtatgaagtcatgcagagctatgtgatgcacaaaccggcaaacgatccgatctttacattcattgagaaaaaacgcagcgaggggaaaagcggtaaactcgccatggtggcaggtctgaataagttcctccgagtctattatggtaaggtcacagagctctaccgcagcttgccgcagtagaacgagctgagatctccaatgctttgtttgaggcggccaaacaatccgttttgccgcctctgctttgctatgctctttttccacccgcaaattttctttcaattggggcttgactttttagcag

SEQ ID NO: 9031 - DNA, 1443 bp, unidentified
  source 1..1443: mol_type = unassigned DNA; note = element_e2a38f7
  misc_feature 1..2: note = core
  misc_feature 3..167: note = LE
  misc_feature 168..1196: note = CDS
  misc_feature 1197..1443: note = RE
  misc_feature 1212..1438: note = bridgeRNA
agatggggtaacgggcgttggccaccctcggcaagccgcgcgctcgctacggcgctatttggggcgcgctcgctcgcggcttgccgagggtggcggtcgtccctcaatctgatggtgtcaaacggagtcgggctttcgcccgctccaagcatcatcgagggacgaccatgaactattatgcaggaaccgacgtgtcattggaatggtcgagcgtgtgcgttgtggacgccagcggcaggattgtccaggaaggcaaggttgcgagcgatccggcggcgctgatcgcctggtttggatcgcttgggtatgagctgacccggatcggcctggaggctggaccactgtcgcagtggctgtacgcggcgatgaagcaggccggccttccagtcgaactgctggagacgcgccatgtgcgcgatgcgttcaaggcgatgccggtgaagtctgaccgcaacgatgcgcgcgggatcgcgcagctgatgcggcttggatggttccggccggtgcactgcaaatcaatggaagcgcaggagacgcgcgcagtgctcaccgcccgcaagctgctgcagaacaagctgcgcgacctggaggcgagcttgcgcggcattttgcggggctttggcctgaaggtcgggaagacgacgtcaaagcggttcgcggaacggatcaaggagctcgtggtcgggcatccgagcttggaggtcttgagcgaggcgctgctggctgcacatgccgtgctgctgcgcgagttcaatggctttgagcgacgggtgcggaccatggcccgccaggatgccaaggcccgcctgttgatgtcgacaccgggggttggcgccatcgtggcgctcacgtttgcctctgcgatcgacgatcctgcgcgcttcaagtcatcgaaacaggtgggagcgcatttcggcctgacaccgaggaagtaccagtccggcgaaaccgattacaccggccgaatctcgaagatcggcgacaaagaggtgcgcaccggattattcgaaagttctcacgtcatactgaccaagccggtcaggggtttcgccctcaagagctgggccatgcggctggccaagcgtgttgggatgaagaaggcgaaagtcgccttggctcgcaagctcgccgtgatcatgcaccgcatgctggtcgacggaacaccctttaacttcgctgctggcgccgcagcctaacaggagaaaccgagagttttcgggcgggtcacgacaccagccttcccgaagcgaagtcccttgccgggacgatggacaggtcagaccgcaacccatcccgtggcgctcgaccacgcaaacggtagattggtcgacctatcctcttcacaccccatcaggtggcggccccgcgccgaccccgtacagaagcgcgaacccggcgggcggacgacgtaaaagggattgaccaacaaaggcccgttacaga

SEQ ID NO: 9032 - DNA, 1734 bp, unidentified
  source 1..1734: mol_type = unassigned DNA; note = element_e2a48d9
  misc_feature 1: note = core
  misc_feature 2..110: note = LE
  misc_feature 111..1160: note = CDS
  misc_feature 1161..1734: note = RE
  misc_feature 1423..1653: note = bridgeRNA
gaatgaaagggacttccccgtcccgaggtcggcgcagttgggtacgcggcacggtggtgccaagatgggaagtgcgaagtctcatccacacacacggaaaggggaagaccatgactattattgccgttggcatcgatctcgccaagcacgttttcgccgtccacggtgtcgacgaagccggtcgcgctgcgctggtgcgtccgtcggtcgcgcgcgacaagctgcacgagctgatcgccaccctgccgccgtgcctgatcggcatggaagcctgtaccggtgcgcaccactgggcgcggctgttcatggggcacggccacagcgtgcggctgatcgccccgaagttcgtcaccccgtatcggctgagcggcaagcgcggcaagaacgatgcggccgatgcgcaggccatctgcgaagccgtgcaacgcccgcagatgcgcttcgtcccggtcaagagcgaagcccagcaggcccaactgatggtccactgcgcccggcaaggctttgtgaaggaacgcaccgccaccatcaaccgcatccgtgggctgctcgccgagttcggccacatcctggcggccaaggccgacaccgtgcgccgcgaagccgccaagctgctcgaagccctgcccgggcaatcgaaccgggtcatcggcgatctgctcagtcagacccaccacctggaccagcgcattgccgagtacgacgcgctcattcgcaccatggcccgcgaggacagccgctgtgccgaattgcagcgcctgagcggcctgggccagatcaccgcgacggccttgcgcgccacgatcggcaacggcgccgaattcaagtgcggccggcaagtggccgcctggctcgggctggtgcccggccaatacagctcgggcggcaagacgcgtcttggacgtattaccaaggcgggggacacctacctgcgtacgctgctggtgctcggtgcgcgggccatgctcgccgccgcacagcgggcggtggccgaggagcaggagaacccggccaagccggcgagccaactggcgcattgggcggcagccctggccgcacggcgcggccacggcaaggcggtggtcgccattgcggccaagaacgcacggctggcctgggcgatgttgcgcacgggcgaggacttccgcatgccggcataggggcatcgccatcgagcagcgtcggctgttgccgggggtggaaatccgcctctttttggggatgaaaagcgcttgtctgcatggcagtaagcgccacagtgccgcgcttactgccatgaccgagcgtatcgccccttcaccgcgtcaatggttcgcttcgccaggctgcacaaggccgcagcctgccattgacccggctacggggctggactgggtcgcaaccgcaaaggcgaaaaggcgccagcagagcagcagcgaagtgttccaccaccgcgtactgtgcagcgttcatgagggcaggtcggacctgcgcggggtatgcctgattagctcaaggcggcatcgtttgatgaccgcgactaacgaatgaggcccccgcgtgcgtctttcatgagggtccgtggccagccgaatccaggccacacaatgaccgtttgtagtttttccagtccgcactttgcctgtgcaggctgcacgcgatgcgatggcggaaagcgaaggatatcgtcaatgacggatcgctccgcgatccgcacggcatcactttcgcttgacattgggggaagcccttgta

SEQ ID NO: 9033 - DNA, 1255 bp, unidentified
  source 1..1255: mol_type = unassigned DNA; note = element_e2a849b
  misc_feature 1..2: note = core
  misc_feature 3..235: note = LE
  misc_feature 236..1093: note = CDS
  misc_feature 1094..1255: note = RE
  misc_feature 57..214: note = bridgeRNA
taccttagatttgcatccgaggattacagataaaatagaaaagataaatttgtgaagtaaagaaagaatgcaggaagtgaaccggggaacgatacggaaagaacaagacccattctcataagcggactccctgcttgtttgaacccagacccagatagtaggttaacatccattgttaaggtagttaggttaagttcaagccctttctttaatagaaaactttaaagacaaaagtatggagaatttttattttatcggtgtggacgtgtcgaaaaagaaactggacttctgtgtgatgtttgaaggaaaggttgtacatgaagaagcaacagccaaccatcaaacagcaatcatgtcgttgctgcgtcatttggaagaggattatgggataacaagcgatcggatgcttgtctgtgcggaacataccggtcagtacacttttcctttggcttgtgcctgcaaatccgttgagtgtaagctatggcttgaaaacgcggctgaaatcaaatactcgtcaggtgttcaacgtggcaagaacgacaaggtggatgccaggcgtatcgctatctatgccggtcgttttcaagacaaggtacgttattacaaacgtcccacggaggatattgaaagattgaaacaacttgaatccgaacgcaccttgtatgtgacggatttggccaaatacaaaggacagatgaaagatcagaaggactatatgcccaaggctttgtacgaacgcaagatgaagcgtttgcaggcgttaatggacgacttggaggaagccatacaggccattacagacgaaatggatgaagtcatagcttcttgccccgtattgttcaggcaaagagaactattgatgtccatagacggcgtagggcgtgtggtggcaaccaacatgatcatagcaacggaagcttttacccgtttcgatgatccgaggaagttcaactgctatgccggagtggcccccttctcattcttccggaagttccctgcactcgaaagcaagagtatcgcaccgggcagacaaagtgatgaaaagattgctgcatttagctgctgttgctgtaacacaccggattggaggtgagctaaagaagtattatgaaaggaaagtagccgaaggcaaaaacaagatgtccgtgatcaatgcgttacgagccaaaatcgtggcaagaatgtttgcggtcatcaaaagaaacgagaaatataaacctattttatcttaaataacttgcaaaaatcatagtag

SEQ ID NO: 9034 - DNA, 1229 bp, unidentified
  source 1..1229: mol_type = unassigned DNA; note = element_e2ae596
  misc_feature 1..3: note = core
  misc_feature 4..223: note = LE
  misc_feature 224..1132: note = CDS
  misc_feature 1133..1229: note = RE
aacacctatataggtttattagtcgaggagagtaatactctcctcggctgaggaaacatggtcgagagggaaactgaagcgaagtcttcgggtagtggcgtgacaaaccccctaccatcggactgaacattgtgataaaattcacgcatataggtgtgataaagaggtaggggtaatagggatagatgtatcaaaggaccatttaattacaagtagggggagggtgagaagatacgagaacaaaaaggagggttatgaggaaatcctcaagatgaaaccttgcgtaatagtcctagagcctaccggagtatacgcaataaagccttcacaatacttcaaggagaaagggataaaagtactacaagtcagcccaaacgtgttatcaagggaaaaggagtttaggggaaagaaaacagatttttacgatgcagaaaaattagaaaacatggtcgacaaggctaaggagtacgattacaaccccttaaaggaattagtaacactctacctcttcctaaaggacatagagacgaaatacaagaacaggctaaagagagcactattcctagtaagcgataacgataaggtaagcaaggacaggttggaaaaacttgcgaaaggagattttacacgagaagagctctaccaacttgaatacacccccttagtacttgaggaaatcaaaatcctggctaaaaacctcctagaaacgcaagagaggttgaaggaggttaggaggatgattgaggggcaagtccctcaagaccacgtcctattaacgataccaggtgttggggggcttgcagctggtattattataggtattgttggtgatattaggcgttttcctaaaccagagtcctttgtggcttattgtggtttagatcccgtagttgagaggagtggaagggctgtggtaagtagggggatttccaagaggagtaataagtacttgtgtagtttgctttactttttggcagtgaggaattattctaggaaccctactttgttgaagttttatgagacacacaaggataggttgaaaggtaggaagttgtatgttgctttggctaggaagttggcaagggttgtttggagtgtttggtataataataagccttatgagcctaaataggtaagccctcccccgaatcgccacgtgggttgaaaggacccacgtggcaatgttagctaatactatgcttgaagtttgagcgaaagatttattactg

SEQ ID NO: 9035 - DNA, 1370 bp, unidentified
  source 1..1370: mol_type = unassigned DNA; note = element_e2aec8a
  misc_feature 1..2: note = core
  misc_feature 3..76: note = LE
  misc_feature 77..1120: note = CDS
  misc_feature 1121..1370: note = RE
  misc_feature 1123..1360: note = bridgeRNA
ttatggatggcccgcccctctctctgcagcagctgatagcatgctgatgtaaccaaggtgaggacggagcagagccatgcagctttccatcatcggcatcgatctcggcaagacgtcgtgcagcctcgtcggcgtggacacggccggcaaggtcctggtgcgccggcgcatgcgccgcgacaccatcgtcgccttctgctccaaatatccaggcagcgtcgttgccttggaggcctgctgtggcgctcaccacatcggtcgggctctggccgccaagggacacgagatcaggctcatgtcgccggaatacgtacggccctgtgtcaaggcacaaaagaacgacgaccgggatgccgaagccatcgctgaggccgcgagccggcctaccatgcgcttcgtcaccttgaagtcggaggagcagctcgacatgcagacgctccatcgtgtgcgcgacaggctcgtcggcgaccggacgtcgctgatgaaccagatgcgcagccttctgctggagcgcggccacatcgtagcgcaggggcgcgccaagctggccgtcgccctggccgagctgctctacgcgaaggaacgcgtcctggccgcgcggattcacgagctgatcgtcgacatgcgccgccagtgggtggcgctcgacgagcgcatcaaggcgttcgacgccgagttcaccgccgccgcgaaggcgcaggacggggcgaagcgcctcttgtccatccccgggatcggcgcgctgaacgccaccgccctggtggcagccatcggcgatgctggcacctttgcccgaggacgggacctcgcggcctggctgggcctcgtgccacgccaggtgacgacgggcggtcgcccgaagctgctcggcatcaccaagcgcgggagcaagtacctgcgcaagatgctgatccagggtgcgcgatcggcgctgccgactctgaaggctggggacacagccgtgggtgcctggctgcgcgggctgctcgcccgagcgcatctcaacgcagccgttgtcgcgctggtggccaagatggcccgcaccgtgtgggcgctgctgcggcacggcgatatctacaaggccgcgcccgcggcgccaacggcgcccgtggcggcctgaaccggatcggctgacgcgaaaggagcgtcggccctcgatgtctgtgggtggcgacaaggagatggcctgactgtcaaccggcgtcctggaaacctttcccgcaaaatggcactcgatgccgtcccttttatcgggaccaggacgcgcggctctccatcttggccaacggcttgccggaaggccggatacgtttgtgcagacagatcaagctggacccgagaaaccacttgccgacggggcgggccatacg

SEQ ID NO: 9036 - DNA, 1287 bp, unidentified
  source 1..1287: mol_type = unassigned DNA; note = element_e2b3f38
  misc_feature 1..2: note = core
  misc_feature 3..240: note = LE
  misc_feature 241..1275: note = CDS
  misc_feature 1276..1287: note = RE
  misc_feature 28..243: note = bridgeRNA
ctgacttgtgtcattggtggtggggtgctgcaggatctgcagtcttgtagcgtccagggtgtcagtcggcacaggtccgcaagctccttgccgctcgtctcgttcgggttggctcactgatagcgtgccgcgccgctgacacccgcccggggcgtggctcgacagaggcatgcgaacacttcaagtcagggtgcccgccacgggtgatccatcacttacatcggcgtaaggaacccggacatgatcatcatcggcatcgacccgcacaaatcctccatcaccgcagcagccatcgattcctcgggctgccagctcgcggtacggcgcttcgtcgtcaacgcaggaactgccagacagttactggcctgggccgcgcagtggcctgaacgcagattcgctattgaaggcgcgaacggtctgggacggggaaccgcgcagatcctcgtggcccatggcgaggccgttgtcgacgttccctccacactggccatgaaagtcagggtcctctccaccggcggcgggcgtaaaagcgaccctgcggacgcattcgcggtcgccctgacgggcctccgtcagaagaagctgcgcgtcgtcgtggcagaggaccagaccacgatcctgcgtctgctggccgaacgccgcgaggatctgggccacgaacgcgcccggttgctcaatcgtctgcaccggctcctgcgtgaactcctccctggtggtgtcgaccccggtttgagcgctgacaaagccgccgcggtgctgcggacgatcaggccggcaacagccactgatgcggtccggcgtgagctcaccaaggagctgcttgctgatcttcgacgcatcgattcctcgatgaaaagcaacgaagcccagacccggaccgtgttggacgccgccaacaccaccctgcaagaactccccggtatcggcgtcgtcctggcagcaaagctcttaggccatgtcggtgacatcactcgattccccagcgcctcacatttcgccagctacacaggcaccgcaccgctggaagcctccagcggtaaccacaaccggcacagactcaacaccggaggcaaccggcaactcaactccgtgctgcacaccatggccgtctgccaaagccgcgaccccgggccaggccgggactactacctgaagaaaatcagcgaaggaaaaacaccccgagaagcccgcagagcactcaaacgacgcctctccaacgtcctctaccggcagatcctccacgaccaccaccacgccgaaaagaccgccgcttgacacacagaggcg

SEQ ID NO: 9037 - DNA, 1439 bp, unidentified
  source 1..1439: mol_type = unassigned DNA; note = element_e2b4eab
  misc_feature 1: note = core
  misc_feature 2..223: note = LE
  misc_feature 224..1420: note = CDS
  misc_feature 1421..1439: note = RE
  misc_feature 1..227: note = bridgeRNA
cgttaccttcctcgcgtccccgctgagggggctcctggtcaccaggtccggcatgactgactgcccctgtcgttgatgatccggggggtgttgtcaccgggcctggtggcactggtggaccgctgatagggacatggctgccttcgggtaggtcttcgtaacgtggctgccggcaaccggtgctcgactggccaggacgggcatcggtgcgggaggcacatcgatgagcgatctcggctacgcgatcttctgcgggttggacgtcggcaaaggcacccatcacgcggtggcactggaccctgacgggaagcggctgcacgacggggcgctaccgcaagacgagcagcggttgcgccaactgttcaccggcctgcaggttcacggcgacgtgctggtggtcgtggatcagccggccacaatcggtgcgctgccgatcgcggtcgcccgggacgtgggatgccaggtcgcctacctgcccgggctggcgatgcgccggatcgcggacctgcacccggggtcggccaagaccgacgcccgggacgcctacgtcatcgccgaggccgcccggaccatgccgcgcacactgcgccaggttgatcccggtgaagaagtgctggccgagctcggcgtgctgatcggattcgacgatgaccaggccgccgaggccacccggctgagcaaccgcatccgcgggctgctcacccagatccaccccgccgccgagcgagtgctcggtcctcgagtgagcaccacggtcgtgctggagttgctctcccgtttcggcggccccgccggacttcgcgcagccggcaagcggcgactgatcaccgttgcccgcaaggccgcaccccgcgctggcgagcaactggtcaccgacctgctcgccgcactcgacgagcagacagtggtcgttcccggcagcgcagccgcggagaaggtgctgccgcggctggccgaatccctggcccaagtgctcacccaacggcggcagatcgccgaggaagtggaagggatcctcgatgcccaccctcttgccaaggtcctgacctcgatgcccggcgtgggggtcaggaccgcagcccgcatcctgctcgaagtcggtgacggcagcgccttcccgacctccgggcacttggctgcctacgccggcctggcgccggtcacccgccgctcgggctcctcgatccgcggcgagcacccgccccagggaggcaacaagcagctcaagcgggcactgttcctctccgccttcgccgccctggccgacccaacctcacgggcctactacgaccgcaagcgcgccgccgggaaacgacacaacgccgccctcatctgcctggcccgacgccgagtcgacgtcctgttcgccatgctccgcgaaggcaccctctacgagacccggtccgcccgaccggcttgaccggacccatagggacacc

SEQ ID NO: 9038 - DNA, 1349 bp, unidentified
  source 1..1349: mol_type = unassigned DNA; note = element_e2b96c8
  misc_feature 1: note = core
  misc_feature 2..88: note = LE
  misc_feature 89..1120: note = CDS
  misc_feature 1121..1349: note = RE
  misc_feature 1149..1344: note = bridgeRNA
caatgggatggactcctcctccccttacggcatctatgtgccaaactggagtagttaaccaccagccacaagaaagaaggagtccaccatgaagcttagtcgtattggaattgatttggcaaagaatgtgtttcagttacacggtgttgatcgtcacgaaaaggcggtttggaagcgccggttgaagcgtgatcaatggttaaaggcagtatttaatcaggcagaacctggttgtgagattggcatggaggcttgtgccggcgcccatcattgggctcgtgaacttgagtctcgaggctacttagttaaattgatggcgccgcagttcgtgaagccttacgtaaagagtaacaagaacgacgccaacgatgccgaggcaatttgcgaggccatgagccggccccacatgcgctttgtaacggtcaagagtgttgagcaacaggatatccaggccacccatcgtattcgatctgaactgatgacgcagcggaccgcgaagtcgaaccagatccggggcttggtcactgagtacggcttggtggcaccattgacgttgcgtgcgctgcgtgcggcgataccatgttggctagaggacgctgagaacggtttgactgatcactttcgctcgctattgcatggtttgtggtccgatttgtccgctctgggtgatcgcgtgctcgaactggaccagacgatactaaaaatagccaacagcaacgaaatcacccggcgattgcagcagctgcgtggtgtgggaccgatggttgccactgcattgatcgccacggtcggtgatgcccagcagtaccataagggccgacagatggctgctgccatcgggctcacgccgaggcaacacagcagcggaggtaagaaccgtttgctgggcatcagtaagcgcggtgatgtttacttgcgcagtctgctggtacacggagcccgtgcggtggtctcacaagccaaacacagagatgatcgactcagtcggtgggtcaccggcattgcgcaacggcggcatccaaatgtagcggccgtggcgctagccaacaagacggcacgcatggcctgggccatgctgcgcaacgagacaaactatgatcctgacttcgcgaccagctaagacaggtcttactaaggagaacctcaattacgattgctaagcaaactgcatgatggcaaacaggtcgaaccggcgtcagtcaaacccggaaatagctgagtactcaaagtacgtgactcctattgggaactgacgcgcggataacccattatggcccggcatcaacgtatgccagctttagaggccggatatacttacggagtgcttgcaatgaggaggagtccatata

SEQ ID NO: 9039 - DNA, 1362 bp, unidentified
  source 1..1362: mol_type = unassigned DNA; note = element_e2bbe5b
  misc_feature 1..2: note = core
  misc_feature 3..76: note = LE
  misc_feature 77..1108: note = CDS
  misc_feature 1109..1362: note = RE
  misc_feature 1081..1350: note = bridgeRNA
tgatggggtggacgccccccgacggcaccgatgtgccaaagtggaggtgttgaacacaccacttgaggaggcgtccatgtcggaagttaccacaatcggccttgatatcgcgaagaacgtttttcatgcgcacgggacagataccagcggcagaccgctgttcagccggaagatcagccgcacgaagttgctggagttcttcggcaaacagccacattgcctagtcgcgctggaggcctgcggcggtgcgcaccattgggctcgcgaactcacgctactgggtcaccgggtaaaactgatccctccagcttacgtgaagccgttcgtgaagcggcacaagaacgatgcggtcgatgccgaggccatctgtgaggcagcgcagcgtcccaatatgcggttcgtggcgatcaagagcgaggaacagcaggcatcggcccttgtgttccggacccgcgatctgttggtgcggcagcgcacccagttgatcaacgctatccgcggtcatcttaccgagtatggctgggtcgcgccaaaggggccgtcgcatatcacactgctgagcgacatgctcgatggcaagatgggctcatcgcttccggatgcagccacgaccatgtttcgcacgatgctcagcatgctgaaggagttgaactgcaagatcgacgaactggacaaggagatcgcgcggcgcgcctgcgaggatgtgattgccagacggctcatgaccataccgggcgtgggcccgatcacggccactgcgattgccgccctcgccccgccggccgagacgttcactagaggaagagactttgcggcctggttgggtctgacgccacgtcagctatcaaccggtggcaaacaaaagctggggtcgatcacaaagatgggcgagagaaccttgcgacgcctcatcatcatcggctgcagcgcggtcgtcttgcaggcgagtaaacgcggtgcgcctccagggtcatggcttgaacagatgatggctcgcaagccacgcatgctggtgacagtagcactggccaacaagacggcgcgcatcatctgggcgctgctcatcaagcaagaggattatagagctccggtcgcagctgcggtgtaagccaaggcggaccagaggtcgtcggggacggagtcggtcgaaggaaggtatggcacaacagtcggtgagacggggtcggaaaaccaggggaatccactgtgccttgagcacgctgtgggtgatatggatccggtccgcgaactcccatacgggcccgcagcctctggcgctgcatcagaggccggacagatggcagcatccgactacgtgaaatccttcaaaaaaccacttgcgttctacggggcgtccacaga

SEQ ID NO: 9040 - DNA, 1208 bp, unidentified
  source 1..1208: mol_type = unassigned DNA; note = element_e2c7056
  misc_feature 1: note = core
  misc_feature 2..186: note = LE
  misc_feature 187..948: note = CDS
  misc_feature 949..1208: note = RE
  misc_feature 969..1161: note = bridgeRNA
gaatggaagggacttcccctgattaactcttgtgcaatcatgggataaacattgccctggagggattcgttatgaccattgccactgtcggtatcgatcttcctaaaaatgtgttcgctgttcacggcgttgaccagaatggtcatgaaccccgactgatggctggaaagttcgtctccctatcgcatggccggtaaatcagggaaaaatgatgctcaggccatcagtgaagctgtccgtcgtccgcatatgcggttcgtaccagtgaaggatgaaagccagcaggcgatgcaatgtctgcaccgtacccgccaaggttttatcgaagagaaaacagcaacatataaccgattaagaggcttgatatccgaattcggtgttattgccccacaaagcacaggcgctttgcgccatatggtttctgaacagaagagttctttaccatttccggttcagcaatgtatcgatgacctgctgaaacatattgatcgcattgaagataacgttgctgaatacgaccggatcctgtcccgtatggcaaaaacagatcaccgcaaccaacgactaatggaactgaaggggattggccccacaacagcttgtgcgctggtcgccagcattggtaatgcacatgattttaagaatgggcgtcaactggcagcctggcttggactgacaccatcgcaatacaactgcggcggaaaatcaaagctgggcaggataacgaaagcgggtgattcgtatctgcgaatactgttggtacaggggccccgttctgttctgattggcgcagagaaaaagaccgactcattcagccgttggatatgctcgctggtcgagcgcagaggatactggcgtgccgttgagaccaccgccgccaaaaacgcaaggctatgctgggcatcactgcattacggtaatgatttcaggctgtactcagtcagctaaagccagaaagagtataaccatcttacctgcaactcgttgatgataaagggttagaccccgtgaggtatatctggctattgtacaagatatacgtatctgtttaacgaacaagaacctcacgcgcgtttttcatcagggcccgaatcgataacgattaatcatggcagtttatagtaccgcagtctctcccctttatttttactgaagagcagacaagaaaccgtaaacaccggtgttgacacgccggggaagcccttata

SEQ ID NO: 9041 - DNA, 1377 bp, unidentified
  source 1..1377: mol_type = unassigned DNA; note = element_e2c9d17
  misc_feature 1..2: note = core
  misc_feature 3..82: note = LE
  misc_feature 83..1114: note = CDS
  misc_feature 1115..1377: note = RE
  misc_feature 1085..1364: note = bridgeRNA
agatggggtggttgccgccctcccagacggcaccatagtgccaggagcttgtggcgggagccacgacgcggagaagacggcaatggatgtgaggatgatgataggggtcgatctggccaagaatgtatttcaggcccacggcgcgaagatgaatggtgagattgtgttccgcaagaagctgacgcgcgcgaagtttcgcgagttcatggccggtcacgagccagcagtcgtcgtgctggaagcctgtggcagcgcacattattgggcccgtgaactgcgattgatggagcatgaggtcaagctgatcgcgccgcaatatgttcgcccgttcgtgaagcgcatgaaaaatgacgcagcggacgccgaagcgatcgttgtagcggcgcagcgtccggagatgcgcttcgtggagccgaagaccgaagagcagcaggccaaggcctttttgttccggagccgggaacggcttgtccatcagcgtaccgagattgcaaatgcggcccgctccggcctgtacgagtttggccatgtcgtaccacagggcattcaccagattgtgaaggttcagggcatcatcgatgatccggattgcgatcttcccgagatggtgatcgaggaagtgaaggccatgcttgagcaaattgcctggcttaccgacaggatcaacgggaagacggcgcggatcaaggacctggcgacccgaaccgatcagtcacggcaattgcagacaatgcccggtatagggccgatgacggcgctggccattgatgcctttgccccaccaatggagcagttcaagtgcggtcgtcactttgccgcatggcttggccttgtcccccgacagttctcatccggaggaaaagagcggctggggcgcgtgtcgaaggccgggcaagccgacatccggcgcctgctgatcatcggggccatgtcccggttgaactggctcagacgcaaacggcaggcggaaactacgtggctgacgcggatgacagcgcgcaaacctcgaatgctggtggcggtcgcgctggcgaacaagatggcccggggcatctgggcgatgctcacaaggggtgaggattttagagatccggctctggcagtcgcggcatagcgccgaactgcttcgagccggtaagacgggagtgtaagaaggcgacgacctgaatgggcaaaatgatcgaacagatctggatcaggaaaaccagcgttataacttgagctacgagctcggcagcgagatttggacctcatccgcagatcaccatcccggccagcggcttctggaatgccgcaaaaacaggcctgacagaagaccgctctcgatcacttgccccaggacccgtttcttcttgcatcacgggcggcaaccacaga

SEQ ID NO: 9042 - DNA, 1723 bp, unidentified
  source 1..1723: mol_type = unassigned DNA; note = element_e2cefff
  misc_feature 1: note = core
  misc_feature 2..285: note = LE
  misc_feature 286..1554: note = CDS
  misc_feature 1555..1723: note = RE
cggtacaatgtcatcgatgaaataaagaaattgtttcatcacagacggttatatggttgtgccggttcccgaaacatagtaacattgaagtacaaactggggctgaaagtggcaaaattgcttgcttggtttccattcaggaattactaacagtgtagaccgtccgttcgcttcgtaaaaggatcaatgtttcgattggttgggtcggcacaaccgctacccgtgtcaataacgcgcctgttgcttttgcgaagaagcgaaactgccctgagaggagaggtgtatatgaacttttgtccggtagcaggaatcgacgtgagtaaaagtttcagtgatatgtgcattttatcaccagacaacaaaatctttgcgcaagaaaagatttaccacgatgaaacatcaataaacagagcaaacgctctactccaaaaggctgaacagatcttctccagcaagcctgttattgtaatggaatccacctcacactaccatttgattcttttccaattcttctcggagcatggatatgacgtgattgtggtgaatccacttcaaagtagttctatgaaggatttcgcgatcagaaaaagaaaaacagatcgtgtagatgcttttaagttggcaatgctgtatcgaacaaagacattgcatccttctcaaattcctcaagctgcaatgcgcgcactacgccagttgtgtagagaacgggtggaatgtttaaatgatgttacaagttataaaaaccgattaacagcctttcttgaccaagcctttccgggttatgacaagattttttctgacgtaggaggaatcacttcatgtgcggtgcttgtgcatttcccaacaccagctattttgcttgcagcagaagaagcagagctggttgaagtgattgctgcagcaagtaagtctggatatggattcgccaagaagaaagctgaattgctgatctcggcagcacaaaaagcacagaccttgggaattcattcctgtgccgatgagacgctcattgtgtgtacgattcaaatgcttcgtacactatccgaaagtgtgtttcaaattgaaaaagcaataaacaatttgctggcgcaggtaaaagaagtacgaaataacgtttctttgctgcagagtattcctggcattggtagtcattcagcagctcttttattgggagaaattggagatttcacgctattcaaaaagccgaaacagcttgccgcttattttgggctggatccctcggaacggcaatcgggaacattcagaggaactaaaaacaaactttcaaagcgcggatcgccctatgcgagagctgcgcttcacatgggagtagtcaatgcgatttgtaagcacggaaagaaaactgcgccaaatcccgtattacttagttactacgagaaaaaatgtaaaaacaaaccggcaaaggtcgctcaagcagcgtcaatgcacaaattggtctttattatctttgcagtcttgcgcgaccagaagccatttgagctaaaaacaccagaacagcatgcctttgaacagggatttgtaaaggcagcctgaagcttttgagaaaatcaggccctgaatcgaacacagggctttgtttgctataccccaaaattgaactccgacagcttttatctcctttgtttcttacttggcgcaagtgttttccgggttcaaaccgattgcttttgagtttatttgttattgactttgcttaattggt

SEQ ID NO: 9043 - DNA, 1154 bp, unidentified
  source 1..1154: mol_type = unassigned DNA; note = element_e2d4d5b
  misc_feature 1..2: note = core
  misc_feature 3..206: note = LE
  misc_feature 207..1142: note = CDS
  misc_feature 1143..1154: note = RE
  misc_feature 12..212: note = bridgeRNA
cttgtcttatgttgaactcggctcctgcggtgtaaaggagccactgcccggcacgccatttatggcgggcagtggcggcggttggatcgtaaatggctgggtcgtgatggaccgttccagagtttgatcagccgccgtcttccccaagggcctgaacggatacgcgtgtgacaagtcacgcatgacaagcataggacacgaggaagatgacagatcataacattggcgtggatatttccaaatcccatctggacgtgttccggcttgaagatggtgcggcgcaacgcttcgataattccaccacaggctttcgtgcattgaccaaatggttgggcaatgcctcggtggcacgggtcgtgttcgaaccgacgggggcttatcacaaggccttcgaggtcgcacttggaggggtattgccgctggtcaaggtgaacccgttacaggcgcgcaggtttgcacaagcctatggcacgagggccaagactgatgcagtcgatgcccggatgttggcgcgtatgggggtcgcgttcgaccttgaacctcaagcacctcaatccaaaaatatacgcgttctcagagacttgcatgttgcgcgggctggtctgatcaaggaccaaaccagattacgcaaccgcgcccaaacccaagacatgtctgttctgaagcgccagaccaaggcacggctcactttggtagaacgacagatcgccgaactggacgtcgaaatttcagcattgatcgcggcgcaagaaaacaccacacgcacatgtgatattctgcgttccatgcctggaataggagcggtatcggctgcggccatgctgaccctgatgcccgagctcggcacgcttgatcgcaaacaggtggccagcctggcaggtctcgccccgatcacccgccagtcagggcaatggcagggcaaatcgttcattggtagtgggcgcaaacccttgcgcgatgccctctacatgccagcactggtcgcattgcgctggaatccagacctgaaagaaaagtacaaccgtctgcgcgcagcaggaaaacccgccaaagtggctatagttgcagtcatgcgaaacctcatcgaaatcgcaaacgctctgatcaaagcaaaccgaaaatggacaccaaaagccgcttgatcaagacggata

SEQ ID NO: 9044 - DNA, 1203 bp, unidentified
  source 1..1203: mol_type = unassigned DNA; note = element_e2db69c
  misc_feature 1..2: note = core
  misc_feature 3..188: note = LE
  misc_feature 189..1169: note = CDS
  misc_feature 1170..1203: note = RE
  misc_feature 12..197: note = bridgeRNA
cttgtatctctctagatagagtaataagctattattctatcacaggaattgagtgagtttgaccgcaaccttagagcttgactctgttacgtagatgaaaccctcaattcattttaccttaataaactggatggtatccaagtgcctttcttagaaagtgacactgcatgtacaagggaagctataagatgagttttgatattggtattgatgttgcgaaagataaaattgattgcctctggttaagagacccagtcaatttaaaggttaaaacaaaagtattaccgaatacacctaaaggatttaaatcgctaaaactttggatagaaaaaaatatctccacggaatttggaagtgtttttgttagcttagaagcaactggtgtttatcatgaagccttatcgtatgctttgtatgatatgggccttcaagtcagtgtcgttaatccagcatttattcgtgactttgccaaaggacttggagttcgcggtaaaacggataagaaggatagcatggtactggctcgttacagcaatatggttcgaccatccctttgggtcccagagccgaaagagataagagcgctgaaagctctgttaacaaggcttgcaggcttagagaaagatttacaacgtgaatcaaatcgattagaaaaagctgagataagtgacgcttcaactggagttctaggctcaatcaaaatgatgatatgtcatttagagtcggaggttaaacgagttgaaaaaatgatcgatgatcatattgataaaaatccgacccttaaaaaagatagagcaatactacgatcgatacctggcgttggggatgtactgtctcgcgaaatgctatcagttttacatagccgaaagtttgtcagagccagtcaagcagctgcatttgtgggtgtcgttcctaagctatgggagtcaggcaaaatgaagggccggacggctttatgtaaaaatggccccggtcgtttgagggcaaaattatacatggcagcagttgctgcgattcaacataattcagatattaaaattcaacataaacgattactacaagcaggaaaaactaaaatgcaggcgctcggtgcggcaatgagaaagttagtacagatttgctttggtgttttaaaacaccaatgtgaataccgacctcaaactaattaaatgatagattgaaatcggtttggagagatggtat

SEQ ID NO: 9045 - DNA, 1601 bp, unidentified
  source 1..1601: mol_type = unassigned DNA; note = element_e2e383c
  misc_feature 1..3: note = core
  misc_feature 4..120: note = LE
  misc_feature 121..1206: note = CDS
  misc_feature 1207..1601: note = RE
agttcctatgtttaaaatcggaagtgacggataacataagatagcactaaaaaagctataccattatagttaactttgtatataagagaaaaacaatattaaccaataacgatatagcttatgaagtgtgtacaaagtaacaaattagattttagtggacaaaatatttacgtaggaattgatgtccatttgagaagttggtcggttgcaattttgtcagatcacagtgttctgaagcgattcagccaaaatcccgaaccggaagcattacataagtatcttgtaagcaattaccctggtgccaattacttctctgtgtatgaagccggcttctgcggcttttggatacacgagagactgacagatttgggcataaccaacatagtagtcaatccttccgatgtaccgaccatgagtaaggaaaaacttcgtaagacagatgccgttgactgtaacaagctggctcgtgaattacgttccggttcattggttggaatatacgttcccggagtggaaactctggaacttcgctctttgataaggatgagaaacctgatagtaaaagacagcacgcgtgcgaagaaccgcatcaagtcattgcttcgttttcatggagtggatatacccgaagagtttacccgatgttctataggctgttggtccaaacgcttcctttcctggttacaggctcttgaactgtccacagaatatggcaagaagacactgggccttcaccttgaacagttcatccgtctgcgtatgatgcttctgcaggagacacgtgccatccgtgagatttcacgtaaagcaccttttgagaagcctatacgtcttctgacttctgttcccggaataggagttactacagctgccactctgatggttgaacttgacgatatagctcgtttcaagaattctgaccgtctggcttctttcatcggtctgatacccatgtgtcattctaacggtgaaagtaacggcacaggagatataacggtacgtcgccattttatgctccgatgccttttggtggaagccgcatggattgcaatccgtaaggatcctgcaatgaccttagcctatacggaataccgcaaacgtatgagtccccagaagtcaatcataaagattgccagacggcttgtaaacagaatatattatgtactcaaacatgaaaaggaatatgtaccgtgtgttgtccaatgatacagaatcctataaggtaaaacagctttcttttgagggaaatgctatcataattatgcggctttgaagtccgctcaaaaaagtttgtaaccctcattaatggtttgactgataaaggaacttgcagcccattatgcggtgtctgctgtggaaagtttgttttaccataggattatggttaggttttcttagccatatcagacgatatcagtaatacaaaaagagaggcgtgctaccgcctcccaaagtagcattactgcgtaccgtcaggatgcttattgctggtaggttgctcctcagcagagcctacttcctcttaacatcctgatacaaaggtataaaactaaagttaattattaatgaattatccaactttgtttggattttaaatggaa

SEQ ID NO: 9046 - DNA, 1378 bp, unidentified
  source 1..1378: mol_type = unassigned DNA; note = element_e2ea519
  misc_feature 1..3: note = core
  misc_feature 4..87: note = LE
  misc_feature 88..1110: note = CDS
  misc_feature 1111..1378: note = RE
  misc_feature 1146..1365: note = bridgeRNA
tgatggtgtggacggctccacccaaacggcatcacaatgtgccatgctggtgctgtttgagaccaacagtgggaaggagccatccacatgaagattacaacactcgggattgatctcgccaagtccgttttccagcttcacggcgttggtgccgatggtacgattgtcctgcaaaggaagttgcggcgaggcgccatgctcgatgttctcggcaagctggaaccctgcctgatcggcatggaggcctgcgcaacatcgcatcactgggcacgagagattgctgcgcttggtcacgaagtccggctgatcccgccggtttatgtgaagccttatgtgaaacggcagaagaacgacgcggccgacgccgaggcgatctgcgaggccgtcacacggccgaacatgcgctttgtcccggtgaagaccaagggtcagcagggagttctcgtactgcatcgatctcgcgacttgctgatgcgacagcgcacgatgatcctgaatgcgatccgggcacacttcgccgagttcggcattgttgctgctcagggtactcggaaggttgctgaacttgtcatgcgccttcgtgaagatgacagcctcggactgcccgagatcgcccggtccgcgctcctggctttggcgggtcaactcgccaatctggcagccgaggtccggaatatcgaacggcagatgatggcgtggcatcgacagaatgccgcgagccagcggctcgaaacaattccgggtgtcggccttatcacggcgactgcgctcgccgccagcgtgcccgatccgaccgccttcaaatcaggccgtcagttcgcagcctaccttggcctcgtgcccagacagaactcgtcgggaggcaaggacaggctcgggcacatctcgaagatggggaatggctacttgcgacgattgcttgtcgtcggcgccacctcggtcacacgacgggcaccaaccaccgacacccgaaccggggtctgggtcagatcgcttctcgagcgaaaaccaactcgggttgtcaccgtcgctatcgccaacaagaccgcccgaacagcgtgggcgctgttggcgaagggagaaagctacagggtcgcaccgaccatctgatccaggaaacaacccatcgtagccaagactacgatgaagagatgcaagggcaaaagtgagtgatgatgattgaacgggaccgctgcagggacaacccgaggcactgtctggacatcaaagtccgatcctctgatcgggacccggcatgcggacttcatcagggccagcggtcaaacgtaccgcgcacaaaggccggacacatgaccgcaccccgcaacgatcaaaatcagctcaaatcgatccttgcaaaaccggggccgtccacaca

SEQ ID NO: 9047 - DNA, 1175 bp, unidentified
  source 1..1175: mol_type = unassigned DNA; note = element_e2fa167
  misc_feature 1..2: note = core
  misc_feature 3..231: note = LE
  misc_feature 232..1050: note = CDS
  misc_feature 1051..1175: note = RE
  misc_feature 27..226: note = bridgeRNA
cttgtattttctttaagggggtcctgatttggggtaaaagggaggcaggtgcgagatccacgatgcagctgcttttgatcgagagattacgagcgccggttagtttgatccgcggctgcccttgggcgtgtgaagtaaactcgaacagttactggagcgaccaagccggccgaccccaggggcagaccggcctggccagctcgcattttacaagcaggagttatctatcacgtgaaagaggaagttgtctactgcggagtggatgtggccaaggcctacttggacgcagcgatgggaagtgagaagcgtcgtttggctaacgatggaacaggccatcggcagttaatcaactggatcaagcaaatggaagcgcaagtgcaggtgatttgtgaacccagcggtggctacgagcggatgttgatccaggcgctggttggtgcacgggtcaaagtcagtctggtccaggccaaccgggtccggcagtttgccagagcggcgggtattttggccaagaccgattcaatcgatgccgaggtgctccgcgcctttggacaagccatgcggccgcaaaccctcaccgcgtcgaagccacaacaggagcagctgcgcgaactggagagtcagcgccggcatttaagtcgcttgctggtgatggaacaaaatcgaggcgcccggttgggtgactcttcggtgcggatattaaatcgcagcttgaacaaacagatccaaaagcagatcgagcgaatcgatctgctcattaacgagcacatcgcagggtcccaagagctctcggccaaagcgcacaaactgacggcaatcagcggagtgggtccgcgcacggcggcattgctcctggctcagatgccggaactgggccaactcaaccgacgtgaggtagcagccttggttggagttgcaccgtttaatcgcgacagcggcaaattgcgcggcaaacgtacgatctttggcggccgccgccacgtccgtcacggcctttacatggcagctttagtggccgctcgacacaacccaatcctgcgcgctttttaacagcgattgcgcgccgccggcaaaccagccaaacttgccctaaccgccacgatgcgaaaacttctcattgtcctcaacagcgctctaaaacccgacccaatctatgcttgaactcaaggcagtta

SEQ ID NO: 9048 - DNA, 1450 bp, unidentified
  source 1..1450: mol_type = unassigned DNA; note = element_e2fa4ac
  misc_feature 1: note = core
  misc_feature 2..331: note = LE
  misc_feature 332..1426: note = CDS
  misc_feature 1427..1450: note = RE
  misc_feature 9..233: note = bridgeRNA
cgttaccttattcttaccccttataatggggtgttagccagccagacccggcatgattactgcccccggtcgtccatgatccgaggggtgatgtcaccgggtctggtggggcgctggtaaccgctaataggggtcaggccaggcacttttgccggggccgtctgtaacgtggatgccggtacctgctccccgaggttatctggttaacccgtataaacagggagacagaatgaccgaatccagtgattaagaatccgtccaggtctttattggcgtagatgtcggtaaagatacccatcacgccgttgccgttaatcgttcaggtaaacgcttgttcgataaagcattacccaacgacgaaaacaaactcagagcactgatatctgatctgaaacagcatggtcagatactgctggtcgttgaccagcctgccaccatcggtgcgttacctgtcgccgttgcccgctctgaaggcgtccttgtcggataccttcctgggctggcaatgcgccgtatcgccgacttacacgccggtgaagccaaaaccgatgcccgcgacgcagccatcatagccgaagctgcccgtactctgcctcacgcgctacgcacgctgaagctggctgacgagcaaatcgccgagctctccatgctctgcggcttcgatgatgatcttgccgcacagaccacgcaggccagcaaccgtatccgcggtctgttgacccagatacatccggctctggagcgcgttctcggtccgagactggatcacccggccgtgctcgatctgctccagcgatacccctcgcctgaaaaactcgcttcgctgggagagaaaaaactggcaacccaactcagcaaactcgcgccccgtctgggaaagagccttgctgctgacatcagccaggcacttaccgagcaaaccgtcgtcgttcccggcacgaatgctgctgtcatcgtcctcccacgcttggcactccagctcatcacactgcgtaagcaaagagacgaggtggcccttgaggtagaacagcgggttcttgctcaccctctttacccggtcctgaccagtatgcccggagtcggtgtcaggaccgcagccagactcctcacagaggtcgcctgtcgcgccttcgcctccgccgcacatctcgctgcttatgctggccttgcgccggtaacccggcgctccggttcgtcgatacgtggcgaacacccgtcaagacggggcaataaaaccctcaagcgggcgctgttcctgtcggccttcgctgcgctcagggatccgatatccagggcttactacacgcgcaaaatgagccagggaaaacgacacaaccaggcgcttatcgccctggcaaggcgacgctgcgacgtcctgtacgccatgatgcgtgacggtactttttatactcctacggcgtcataaatatgcttgacaacttaatagggg

SEQ ID NO: 9049 - DNA, 1389 bp, unidentified
  source 1..1389: mol_type = unassigned DNA; note = element_e30ddc5
  misc_feature 1..2: note = core
  misc_feature 3..88: note = LE
  misc_feature 89..1117: note = CDS
  misc_feature 1118..1389: note = RE
  misc_feature 1088..1375: note = bridgeRNA
agatggggtggttgccgtcctccctcaacgacacggtaacgtgccatgatgatgtggttttaacagtcagacgcaggagagaggcaagatggttgatacaatgatcggagttgatctcgcaaagaacgttttccagcttcacggggcaacaatgacgggcgagttgaagtttcgaaggaaactgtcgcgcgggcagtttctccggttcatggcggaagagccaccggccttggtggtcctggaggcatgcggcggtgccaacttctgggcccgtgaactggcgaaaattggccatgaagttaggctgatcgcgccgcagtacgttcgcccgttcgtgaagcgccagaagaatgatgcgactgatgctgaagcgatcgtcattgcggcacgccagcctgaaatgcgcttcgttgagccgaagacgtctgagcagcaggccagagcagtcctgttcaggtcaaggaaccgtatcgtacgtcagcgcacagagctcgtgaatgcgctacgcgccacgctctatgaatacggtcaggtagttcccctgggtattggccatatcaagcgtattgaggcgatccttgcggacgcagaaatcgaattgcctgagatcgtgcgagaagagtgccatgaccttctggcgcagatcggcgagaagacggcccggattgatgaaaagatgaagaagcttgctggactggccgggcataatggttccacacgacgccttcaaacgatgccgggtgttgggccgatgatcgcgttggccgtcgaagcatttgcacctgccatgcagagcttccgacgcggccgagacttcgcttcgtggcttgggcttgtcccgaaacagttttcctcaggaggccgggaacgtcttggccgggtatctaaggccggccaagccgacatccgtaggctgcttatcatcggggccatggcccgggtgaactgggcaagtcgaagaccgcccagggtcgacagttggctttcgcgaatgctggccaggaaaccgcgtatgctggtggcaatcgctttggcaaacaagatggcccggaagatttgggccatgctgactaaaatggaagattatcgagaaccggccatggctaaggcagtctaagatgccactgcgcttgcacagccaatctcggtaaagatgtgttgagaagtcgacgacccgaatgggcgcatgatcgattgatctggaacggcgaaaccagttggagacgtagagccaacaagctcggaatgtagattgggacccgatccgctgatcaccataccggccatgcggcttatgtaggtgccgcacacaaaggcctgacacaagaccgcactcgatcgcacctcattaggaagaaaacttcttgcgcaacggacggcaaccacaca

SEQ ID NO: 9050 - DNA, 1539 bp, unidentified
  source 1..1539: mol_type = unassigned DNA; note = element_e312e1d
  misc_feature 1..2: note = core
  misc_feature 3..241: note = LE
  misc_feature 242..1420: note = CDS
  misc_feature 1421..1539: note = RE
  misc_feature 19..220: note = bridgeRNA
cttgtattatagagtagtagttattagagcccctctccaagggctgtgctacactgtaagggatgctgtggattggtgtgtgcctcctaccacaagatggttccagaaaggttccaaccacagccccttacacttttgttaatcagttaaataccgccagacggtttatgtggaacaaggctacaaaagtaaggtgcactgtggatgcagcatcacaaatctaaccgctggagggttttctatggtagtttctgttggtattgatgtctcaaaagataagcatgattgcttcattctcagttcggagggtgaagtcctggtggatgtgttcactatcccaaatacaatggatgggttcaactgcctgttgcagagaatccaggactgcaccacaccacagggcaaaatgaaagtagggcttgaggcaaccggacattacagctacaatctgcttgggtttcttcttgacaacggtctggccacctatgtcttgaaccccttacgcacaaacctttaccgaaagagccttagccttagaaagaccaaaaccgaccgggtggatgcacgaacgattgcttctatgctgttatccgatgcgggcctcaaaccctacacggacacagcataccacaatgaggagctaaagtcactgaccagataccgttttgacaaggtgaaagaacgcgccaaactgaaaagctctgtctcccgactggtctgcatcctgtttccagagatggaaaagctggtctccacgcttcacacggcctctgtttacaccctattggaggaatttcccggcgcaaagcaggttgccagagcccatttgaccaggctgaaatcgctccttgaaaccgcctccaaaggccgctacaaacgggatatggctttagaaattcgagaggctgccagaaattccattggatctcggatgcctgccaagtcccttgaattgcagcataccatccgccttatccgtgaattggataccgagattgtggaaattgaagagcagatccaatccttgatggatgagctcgcgtctcccattactacgatcccggggatggggttccgcatggccgccatgattttggccgaggtgggcgacttcactcggtttgactccccggacaagctgttggcctatgccgggatgtccccttctacttaccagtccggacagctcaaaaactgttaccctcacatggaaaaacgcggctccagatacctgcgctacgccctttacaacgcgaccaagtatgtctgccgctgggacccgacctttgctgcctatcttgctaagaagcgggcggagggcaagcactacaatgtcgctctttctcacgctgccaaaaagttggttcgtctgatatttgccatggagaaatccaggcggccatattgcttagcgacttgagcgcaactactcgaatagccagcaggggtctgacaagacctcagctttgctataccctttctgagacatcttttctcttcaccaccattcattttgtgggttgacacttaatagttaat

SEQ ID NO: 9051 - DNA, 1166 bp, unidentified
  source 1..1166: mol_type = unassigned DNA; note = element_e3262c7
  misc_feature 1..2: note = core
  misc_feature 3..158: note = LE
  misc_feature 159..1160: note = CDS
  misc_feature 1161..1166: note = RE
cttgtattaaaccgatctgctattttgtgctcgttccatgaggaacgacccgctccggatggccatccggagcgggtcgccggtcgtcggatcgtccgctccaaagccttttgggctgttggtgagcaagatcgcgatcggctcttcatcgggcccggatggttgaaggaacctggggttcgcatcacaaggaagggtcgaggaagatgagcaagactaacacaatcgtggccggaatcgacgtggccaaggccaaattggacgttgccatccacggctgcaagctgcgctggcaggtcacgaacgaccctgccggttttcacgaccttgccggcctgctgcgctcccgcaaggttacccgggtcggtctggaagccaccggcggctacgagcgcgacgtggttgaatatctgcgcaaggccggattcaacgtcgtcgtgctgcagcccaggcaggtgcgcgcctttgcagaatttatcctgtgccgcgccaagagcgattgtatcgatgccggcttgatcgccgcctgcgtggctcatcatcagatcgaacgggaggcgccagaccccagaattgctgcgtttgccgatcagctcaccttcatcgagcagaccgaagaggatatcgtgcgcatcaaggttcggctcgagcatacccgcgatccgaagctgcgccgcgtcatgctggccgacatcgagcggctcaagagccgccgcgctaaagtaatcgccaggctggtcgcggccttgcgcacccatgaagatctcgcccggcggctcgacctcctccgttccatcgatggggtcggaccgcgtaccgcgctcgccttcatcatccggatgccggaactcggtcgcttgtcgcgcgagcaggccgccgcgctcgccggcctggcgccgttcgttcatgacagcggcgatcgcaagggcgaacgtcatatcgccggcggcagagaccgattgcgcaaaagcgtttactcggccgctctgccggccgcgttccgctggaacactcagctgatcaccctctacaaacgcctcaccgaggctggaaagccgcataagctcgcgcttgtcgcctgcgccagaaaactcgtcatcttcgcaaataccgtcctcgcgagaggaacagcatggtcttcacgtccggcaacttgctaatggttg

SEQ ID NO: 9052 - DNA, 1357 bp, unidentified
  source 1..1357: mol_type = unassigned DNA; note = element_e32e67f
  misc_feature 1: note = core
  misc_feature 2..66: note = LE
  misc_feature 67..1104: note = CDS
  misc_feature 1105..1357: note = RE
  misc_feature 1133..1351: note = bridgeRNA
taatgggatggtccgccgcttttaccgagccaacggggcggttataagaggtggaggaggcctcccatggaactacacaccatcggcattgatcttggtaagacagtctttcatctggtcgggctcgacctgcgcggcgaggtcgtggtgcgcaagaagttctcgcgcacacagctgctgcgcttcactgccaacgtacgcgtggggttgattggcatggaagcctgcggaggttcgcattttcttggccgagcactgcgggaacagagacacgaggtgcgactgattccggcgcagtatgtaaagccgtacgtgaaaacgaacaagagcgactacatcggtgcccaggcgatcgctgaggctgtcgcacggccgacgatgcgtttcgtgccgatcaagacggatgaccagctggatatgcagtccctgcatcgcgtccgcgagcgctgggtgatgcgtcgcacggcagtcatcaaccaaattcgtggattgctgctcgaacgaggaataactctgcggaaggggcggcaccacgtggatgccgctttaccgctgatactggaagacgccgacgctaatctatcgggcgccgtgcgcctgctgctgacccaactgaagctggatcttgatcagttgtcggtgcggattgacgaggccgatgcggtgatccagaagaccgctcatgagaacgaagcctgccggcggctggtggccatccctggcatcggaccagtcacggctaccgcactcatcgcggcgatcggcaacggaggggcctttcacaaagggcgggagttcgcagcgtggatggggttggttcctcgcgaacactccaccggtggccagcagaagctgctcggtatcagcaaacgtgggaactcttacttgcgaagactgttcgtgcaaggcgcacgtgcggtcctgcaacagcgcaccaagcagtcttccggtctgagtgcgtggttggcacagctcacatcgcgcacgcaccgcaacgtcgccgcggtagcgttagctaacaaactcgcccgaatcgcctgggccgtgctcgcgaagaatgaacaatatcgaccctcagtggtggccgatgtagctgcagcttagcgacgacggcggagaacatgatttcttaccaggtctgctggcgaatgaggagatggcacaacggtcgaacccggcgctctttaaacccgtaaccggaagaagtctcgtaagactgaataactaatggggaaaagagcgcagcgcattccatcctggccaggagtgattcactccaacaaaggccgtatacatttgcgcagaccaacttgtgacatcctcacatttcgcttgcggcgaagcggcggaccataca

SEQ ID NO: 9053 - DNA, 1361 bp, unidentified
  source 1..1361: mol_type = unassigned DNA; note = element_e330018
  misc_feature 1..3: note = core
  misc_feature 4..192: note = LE
  misc_feature 193..1104: note = CDS
  misc_feature 1105..1361: note = RE
  misc_feature 1127..1348: note = bridgeRNA
tgatggggatgacggccccgctccctcggacgccggcgatatactgcgatggacgaagccgcgaacaggagcaattcactaatggaagtcgcgacaattgggttggacatttcgaagcacgtctttcacatccatgcagttgatggctaaggccaagtggccggtcgccaacgcctccggcgaggcgagatcgtgtcgttcttctcctcgctcgcaccttgcctggtcggcattgaggcctgcgcgactgctcaccactgggcgcggcagattcggcagtttggacacgatgtgagattgatcccgccaggctatgttaaactctacgtacgaagaggagccaagaatgacgccgctgacgcggccgcgatctgcgaagcggtcacccgtcccaatatgcggttcgttccaatcaagagcgtcgagaaccagggcttcttgatgcttcatcgtgcaagaggcttgttggtccgccaacgaaccacgacggcctgcgccgttcgggctcactttgctgagttcgaaatcattgtcgggcaaggccgacaacgggtggatggtctggtggacttgttgggtgacgaggaactgacgctaccgacccacgcccgcatcgcgctagccgtccttgtgaaccaactgaaggaattggaccggcaggtcgaggcaatccagcgcgagctggctcagatccagcgagtaaatccgatggcgaagtcactgtcctcgattcccgggatcggtcccataacggccacggctctcgccgcgaccgtgccggacgcgaccatgttccgctccgggcgggagttcgcgtcctggcttggcctgacgcctaagcagaattccaccggcgggaaggatcggctcggccggattacgaaacagggcgattcctatctcaggcacttgcttgtcatcggagcacgtaacgtcgttcggtacccaaaggcacgctcccgggttggaggcggctggattgaagccctgcttgaacggcgtcgacccatggtcgtcgccgtcgccgttgccaacaagttagcgcggatcgtctgggcgatgatgacgaccggggaattctatcggcctaagctcgcggcctgactttccgcgtatgttggccaccttatggtgtgagggcaaatgacagcatgatggacaccggcggagctggggatcgagcaagcccgaagagctttaagcgcaacaagcgcgacccgttgatgaggcctcgatccgcgatctccatcagggccagcggccatggcatcggtcgcaccaacaggccgtatacatgagcgcacccgaccggtatccaaagtgctgctgaaatcccttgcatccgcggggccgtctataca

SEQ ID NO: 9054 - DNA, 1152 bp, unidentified
  source 1..1152: mol_type = unassigned DNA; note = element_e331ed7
  misc_feature 1..3: note = core
  misc_feature 4..211: note = LE
  misc_feature 212..1129: note = CDS
  misc_feature 1130..1152: note = RE
  misc_feature 23..194: note = bridgeRNA
gcttgtgtctgagtaagggaataaactctggggtgagaggggtagatggcaagctgtgagtccgcggtgcttgaagcacgagtgggagcaaagctgccatctacctttctactctggcccataagcccgaacagttgtacgagcggcactcgaatcacaagcgtgggcaaagccagagcactctcatttctgagtgtaagagggttttgccatgatttcctgggtcggtatcgatatatccaaatcaaatctcgtcgtttgggttcgaccacagaaccaaggctatgaggtccccaatacgtctgagggttttgcacagctggtcgaacagctaagccaatacacgattggccgggtgttactggaagccacgggcggctatgaacgaaaggttatggcagcactgcaggaggcaggtttcaatgtgctcaggatcaaccctcgccgggctagagccttcgccgtagcaatgggcaagaatgccaagaccgaccccatcgatgcggctgttcttgccgattttgccgaagctctgcatgcgtctcacgaaaagcccatttcacctgagcgtgaagcactgcgggagctgattcagctgcgcgaacacttcgtccagcaacgagatgacaacaagcgccgactacagcaggctcagcttccggcggttatcgaggtgatcaaagatcatattcgctacctgcaaatccaaatcaagcagtttggcaaagccattaatcaaagcatgcgtaagctggatgcggagaaagccgatcgactcacatcagttaaagggatcggcactgtggcgactgctagtttgttggtttacctgcctgagctcggtgagcttgatcgcagagagatcgcggccctggcgggaatcgccccctacaacgacgacagtggcaatcacagcggcaaacgtcagatttacggaggaagagcgcgggtcagacgtgcgctttatatgtcgtgctgggttgtcatccgctatcacgccgacttcaaggcccggtacgaagcacttcgagggcgaggcaagagcgcgaaagtcgcgctcatcgcctgcatgcgaatattgctaatcagactgaatgccatgcttcgagacggcactgaatggcggtgacgggtggcagaggtaagacagtt

SEQ ID NO: 9055 - DNA, 1433 bp, unidentified
  source 1..1433: mol_type = unassigned DNA; note = element_e3327b1
  misc_feature 1: note = core
  misc_feature 2..132: note = LE
  misc_feature 133..1152: note = CDS
  misc_feature 1153..1433: note = RE
  misc_feature 1192..1433: note = bridgeRNA
gaatgaaatgaacgcctccctccttgccagggggtgatgccggagaagggtactccctcacgggccgacggcatcagagtgcccagattgggagaccatagaggttccacaggcaaaccggagggagcacaaatgaaacttataccagtcgggatcgacattgcgaagagtgtctttcaggtgcactacgcggatgaagaaacgggagagatcgtgagcaaggcggtgaagcgcgcgaagtttctggaattctttgccaatcgtgcgccatgcctgattggcatggaggcctgcggtggcgcccaccactgggcgcggcgactcatcgcgatggggcatcaggtcaggctgctgcctgcccggttcgtcaaggccttcaacattcgcaacaagaatgatgcggccgacgccagagcgatctggctggccgtgcagcagccaggcaaggcggttgccgtgaagacggagatgcagcaggcgatgcttgcgctccaccggatgcgctcgcaactggtgaagatgaggacgatgcagagcaatgggctgcgggggttgctggccgagtatggcgaaattgccggggcagggcgcgccagtcttgccaaggctgtgccggagatactggagcgactcgccgagcgactgccggccgtgctgatcgacagttggcgcgagcactgggcggaaatcgtccggcttgatgagcgtattacgctcatcgaacaacgcatgcaggcatggaagaaagaagacccggcggtaaaggcgatcagcgatattcccggcgtgggattgttgaccgcaacggcggcggtagccgtgatgggggacgcccaggccttccggtcggggcgggagtttgccgcctggctggggctggtgccccggcagacgggcagcggcggcaagatccagttgcacggcatcagcaagcggggagacacctatctgcgaaccttgctgatacacggcgcccgaagcgtactggccaatgccaggaagccgggtccgtgggtcgaagagattacgaaacggcgaccgcacaacgtggtggcggttgctctggccaacaagatggcgcgcacaatctgggccttactggcccatggccggacctaccagagggactatgtgagcgtgaggccggcctgactggatcacgaagacagggcactgttcagtttttgaagggtaattgccaacgagttgcgcaggcaacgtcagtgatgacaaagacaggtcagaccgggatccacaaaacctgaaccccaacccgaacttcgagttcgccgtaggaatgaggcgtgggtcagcggaattcatcagggccagcagtggaaagacttactgctttgaaggccggatatagagctgcaatccttcctgtcagtcaaaacaaaactttgcttgcacaaacgggaggcgttcatata

SEQ ID NO: 9056 - DNA, 1500 bp, unidentified
  source 1..1500: mol_type = unassigned DNA; note = element_e341d90
  misc_feature 1..2: note = core
  misc_feature 3..247: note = LE
  misc_feature 248..1480: note = CDS
  misc_feature 1481..1500: note = RE
  misc_feature 7..241: note = bridgeRNA
ctaatgagagttaacgggtccgctgtccggcagactcgttagctggtggccgccggcgggtgagcactgtacccgacagggcgttggagccctttagcccaagatcgtgcccccgccggtgtccgggagagttgatcgctgctgggatgtcgtgcccgccgctggcgtgagcactgttcattagtctgctgatggttctcccgctggctgctgacggtatccggcgcggtgtgcgggagagggcgcgatgcggctgtgcgtgggtgatgactgggcggaagaccatcacgacatcgaggtgatgggcgaggccggcacggtgctggctaggaaacggctgccggagggggttgcggggatcgggcaactgcacgagctgatcggccggttccttcccgccggtggtgatgcggaggtgcaggtcgggatcgagaccgaccgtggcccgtgggtggcggcgctgatcgccgcaggctacacggtgttcccggtgaacccgttgcaggcgtcccggtaccggggcaggtacggcgtgtcgggggccaagagcgacggcggcgacgcgcacatgctggccgatgtggtgcgcaccgatgcgcatcagctgcgcccggcggccggcgacagcgcggcggccgaagccgtcaaggtgctggcccgcacgcacaagaggctgatctgggagcgggccgcggtggtgctgcggctgcgggctcagctgcgggagtacttcccggccgcggtggccgcgtttgaggacctggacgcccccgacgcgctggagctgctgggcaaggcgccggacccggcccgtgcggcgaagctgacccgcgcccaggtctcggcggtcctcaagcgggccggccgctacaagatcgcggagcgggccgacgcgatcctggccgcgctgcgcagcccgcagctgggccagccgcccgccctgaccgccgcctatgccgctaccgtgcggtccctgatcgcggtcatcaccaccctcaacgagcaggtcaacagcctgcaagggcaggtggaggcacattttggccagcacccggacgctgagatctacctgtcccagcccggcctgggcgcgatcaccggtgcccgggtgctcggcgagttcggcgacgacccgtgccggtacacgtccgccaaagcccgcaggaactacgcgggcacctccccgatcacccgtgcctccggcaagaagaaaaccgtcgccgcccggttcgtgcgcaatgaccggctcatcgacgcgctgatgatccaggcattcgccgcgctgcgggtctcacccggcgcccgcgcgttctacgacgcccagcgcgctaagggactcgaacataacgacgccctgcgaagactggccagccggctcgtcggcatcctgcacggatgcctcaagaccagcacctgctacgacgaggccaccgcgtggggccaccgggaaaacattcctcaatctgaagccgccgcttgacatctaaattcctgggatgt

SEQ ID NO: 9057 - DNA, 1198 bp, unidentified
  source 1..1198: mol_type = unassigned DNA; note = element_e3454ac
  misc_feature 1..3: note = core
  misc_feature 4..235: note = LE
  misc_feature 236..1183: note = CDS
  misc_feature 1184..1198: note = RE
  misc_feature 27..207: note = bridgeRNA
cttgtatggtgcggcggggtgagtcgtgttgagatagaggacgctggggtgaccgacagattcccgtttctgccattgcattggacagactgcgaaagcgctctgcgccccgtgcccaacgtcgataaggaatgcaacggccgcgtaagcggaccgtcgatcgctctgcaagctcacgtgtgcacggcctcaccccagcttttttagcgtagcacaccgacatagaggaggtcgaatgagtaaggtgcattatttcgccgccgatgtgagcaagcgcgagttggtgttcgcggtctatccggaagcggccgaggtcgtgcgcgtggccaacgcgacggcggcgatcacggcctggctggacgtgctgccggccggcagcgtgatcgccatggaagccaccggcacctatcatcgccggctcgctgcgttggcgcatgagcggggtttgatggtttatgtcgtgaatccgcgcgatgtctattactacgcccgcgccatgggcgctcgcgggaagactgatgccactgacgcccgcctgctggcgcgctacgtggcccatgagcaggcccacctgcatcgttatgtcccaccctcgccgcgcagcgaacaactgactgcgctgctggagcggcggggactgctggtgcgcacccgccaagccctcaagcagagcctggccgagctgcccgccctggctgccgagaagcggcgcgcgctgacggcgctggactccttggtgaatgccatcgatcgcgaactcgcacggctgaacggcagcgaccctccgaccgcacagttggtgacccgccttagaaccatcagcggtgtggggccgctggtagcgaccttgctggccgccttgttccagcgtttcgccttccaccaccccgacgccttgatcgcctatgtcggcctcgatccgcgacccgatgagtcgggccaacatcagggccgtcgacggctgtccaaacgcggtcatcccgagtggcgacgcttgctggtcgcggccgccatgtcggccgcgcgtagccacgtctggcgcgactacatcgcccatcaacgcaccaaagcgcttcccgctaccgccgttcatgtcatcctcgcacgcaaaatgctgcgggtcgcgtatgccttacacaaaaacggccaagcattcgtcgccccgccaatgcagaccgcttgacaacgaccatagaat

SEQ ID NO: 9058 - DNA, 1566 bp, unidentified
  source 1..1566: mol_type = unassigned DNA; note = element_e345631
  misc_feature 1..2: note = core
  misc_feature 3..245: note = LE
  misc_feature 246..1424: note = CDS
  misc_feature 1425..1566: note = RE
  misc_feature 3..226: note = bridgeRNA
ctcgtattataaagtagtagtgtttatagactctctccaaggtctgtatgctatactgttggagatactgtggattgtttatcaccccctaccacttgatggtttatgaaaggctacaaccacagtctctttgtatagttgttaatcagttagataccgcatgacggtttatttagaacgaggttacaatcgcaaagagtaccagtggtcctaaacagtatcaaatttttttaaggagattggttatgatttacgtaggaattgatgtcccaaaagataagcatgattgttttatcataaactcagatggagaaatattatttcatacttttactatctccaataatcatgaaggctttaacaccttatttcaaagaattgaatctgtttcagatgattttacaaaagtaaaagtaggactcgaagccaccggacactacagttacaatcttctgggattccttcttgataaaggtttgccgacctacgttatcaatccgttacataccaatctttacagaaaaagtctaactcttagaaagacgaaaacggataaagttgattcccgtaccattgctactatgattatgtccgatatgaacttaaagtcctactcagatatatcttaccacaatgaggaattaaagtcactcactcgttatcgtttcgataaggtaaaagaacgggcaaaactcaaaacctctatttccagactggtaaatatccttttccctgaactagaaaaactggttccctcacttcatctttcttctgtatatgctttgctttctgaatttccgggagctgcacagatcgctgcttcccaccttacaaaactgactaatctcttatcccaagcatcaaaggggcgttatgggaaagagaccgctattctttttcgtgaaactgctagaagctctattggctctgttatgcctgcaaaatctctggagctgaagcacaccatcaaacttattcaagaattaacagcagagattgacgaaatcgaagtagccattaaacagatcatggatgaggaaatccattctcctatcctgacgattcctggtatcagttaccgaatgggtgcaatgatccttgctgaaatcggggactttaaccgatttgattcagccgatcagatactcgcttacgcaggtatgtctccctccacctatcaatcagggcaattaaataactgttattctcacatggaaaagcgtggctcacgttatcttcgatatgccctttataatgccacaaagtatgtttgccaatgggatgaatctttcagtgcatatcttgcaaaaaaaagatcggaaggtaagcattacaatgttgccttatctcatgctacaaaaaagcttgtgcgtctaattttcgcaatggaaaaatcaggacgaacatatcagccagcagcttaactgattctgtaaatatctcctttcagagtgccagcaatgacactctgttcgtcatgcaattttcaaggtacaaatatatctgaagtgcatttctgcaattcatccaaaacttttattttagacttgacttttaatagttagt

SEQ ID NO: 9059 - DNA, 1427 bp, unidentified
  source 1..1427: mol_type = unassigned DNA; note = element_e34c116
  misc_feature 1..2: note = core
  misc_feature 3..343: note = LE
  misc_feature 344..1180: note = CDS
  misc_feature 1181..1427: note = RE
  misc_feature 1188..1427: note = bridgeRNA
gaatgaaatgaacgcgtcccacccaggcgacgcggcccgaagccgtggctccttataggtcaacagcatcaatgtgttcaggtggagaatccacgaatgtgccggcaaccggaggaacccgaaatgacccgtacgacagtgggtgtggatatcgcgaagaacgtgtttcaggtgcattacatcgacgaagagacgggcgagatcgtgaacaagccgatcaggcgcgcaaagtttctggagcactttgcgaaccgtgcccagtgcctgatcgggatggaggcgtgtagcggagcgcaccactggtgcgagacagcttacgaagatgggccatcaggtaaagctgatgccggcggcgttcgtgaaggcgttcaatatccgcaacaagaatgacgcagccgatgcgcgagcgatctggctggcggtgcagcagcccagcaagccgatcgcagtgaaaaccgaagtacagcaggcaatgctggcactgcaccggacgcgggagcagctggtgaagtttcgcacgatgcaaatcaacagtctgcggggactgctgacagaatatggcgaagtaatgggtagaggccgggccgcattggacaacaaggcgataccggatgtgctggcaagggttgcagagcgtcttccggcagcgttaatcgatacgctgcgcgagcagtggaacgggctcgcgaaactggacctgcagattggcgcgatcgagcggcggatgcgcatgtgggtcaaggaagaccgggctgtgagagcgatcagcgatatccctggtgtcggaatgcttacggcgtcggccgcagtttccatgattggcgatgcgaaggtcttccggtcggggcgcgagttcgctgcgtgggccggcctcgtgccgaaacagacgggctcgggcggtaagacgaacctgcacggaatcagcaagaggggcgacacgtatctgcgcacgctgctgatccacggcgcgcgctcggtactgactcactcgaaggaaccgagccagtggctcgagcagatcagcaagcgccggccgccgaacgtggtgatcgtggcgctagccaacaagatggcgcgaacgatctgggcagtcctggcccacgatcgaccgtaccagaggggctatatgagcttgaaaccggcaccaacggtttgcactcgggaaggaatcaacttttagataggctgttaccttaaaaggttgcgcaggaaatcgtatgtgatgacaagccaggtaggaccgggattcgctaagcctgaatgataggtcgagcgtcaagctcgtcagttgaatgaggtgcgagtcagcggatttcataggggcccgcagcggtactaccagctgcaacaaggccggatatagatctgcaagccagcctgtctgccacagtacacgataacttgctcaaacgggacgcgttcatata

SEQ ID NO: 9060 - DNA, 1389 bp, unidentified
  source 1..1389: mol_type = unassigned DNA; note = element_e351581
  misc_feature 1..3: note = core
  misc_feature 4..88: note = LE
  misc_feature 89..1117: note = CDS
  misc_feature 1118..1389: note = RE
  misc_feature 1088..1376: note = bridgeRNA
agatggggtggttgccgtcctccccgaacggcatcgcagtgtgccaacgtggtggttggtaacgcaaccacggaagagaggacggcagatgacggatacaatgattggggtggatctggcaaagacagtcttccagattcacgcggcatcgctgacgggcgaattgctgtttcgcaagaaggttcgtcgcccgcagtttctgcagttcatggcgagtcaaccgccggcacttgtagtgatggaggcgtgtggcagcgcccattactgggcgcgggaactgatgaacgctgggcacgaggtgaaactgatcgcaccgcaatatgtgcgtccgttcgtcaagcgccagaagaatgacgcagccgacgcagaagcgatcgtgatcgcggcccgccagccggagatgcgtttcgtgatgccaaagagcgaggaccagcaggcgcgtgctgttctgttccgctgccgcgaccggctggtccatcaacggaccgaactcgtcaatgcactgcgcgcgacgctttatgagttcggcctgatcgtgccaaagggcattgctcatcttaaacgcatggaggaattcgtcgaagacgagagcgtgtcgctcccgacgctcgtccggaaggaatgccgcgatcttctggagcagatcgatgagcagttggctcggatcatggaaaagacccgcgccatggtcgggctttcggaagaaagcggtgtggcgcagcgcttggagacgatgcctggtgtcggaccgttgaccgcactggccgttgaggcctttgccccttctatggagagcttccgtagtgggcgcgatttcgcagcatggctcggccttgtcccccggcagttttcgtccggcggtaaggagcggctgggccgggtctcgaaagccggtcaggccgatatccgacgtttgctgatcatcggcgccatgacgcgtgtgaactgggcgagccgcaagccgcctctgcccggcacctggatggcacggatgctggcccgcaagccccgtatgcttgtggcgatcgccctggcgaacaagatggcgcggacaatctgggccatgctgacgaagcaagagaattatcgggatccggttctgtccgccgcagcatgagatgatctcaactacgcgcgggcggaatcggtaatggagtgtgagaaggcgacgacccatatgggcgcatgatcgagccgatccggatcgggaaaaccaactgacgtcttggtgcccttgagcacgtttgtgagatttggacctgatccgcagatcaccatatcggccagcggcttctgaaagtgccgcgttcaaaggcctgacagaagaccgcagtcgatcactcgttcaaaaggtcagatacttcttgcactacggacggcaaccacaga

SEQ ID NO: 9061 - DNA, 1589 bp, unidentified
  source 1..1589: mol_type = unassigned DNA; note = element_e35ea05
  misc_feature 1..5: note = core
  misc_feature 6..271: note = LE
  misc_feature 272..1471: note = CDS
  misc_feature 1472..1589: note = RE
  misc_feature 3..231: note = bridgeRNA
cccccattaccatgttttgtaggcctcgttagtcggggcctggtcgccggttccggtatgactctcttgccctgtcgttgatgatccggggggtgttgtcgccgggagcgggggcgttcgcagaccgctgataggaatcagaccgcccgcatggacgcttcggggcgcatggcgcaggtctcttcgtaatgtggatgcggcgcggacgcccggacccgcatccatacggggtccacggcggccgaaacgaccagcggaaggaaaacggacgatgacaccggacgacatcgacctatgggtcgggctggacgtgggcaagagcgcgcaccacgcgtgcgccctcgaccgcgacggccgcaccgtgtacgacaagccgctcaagcaggacgagagggccatccgcgccatgctcgaacggctctccgggcggggacgggtgctgctggtcgtcgaccagcccaacaccatcgggtccctgcccctgaccgtggcgcgcgacatgggcgtgcgggtcgcctacctgcccggctcgtcgatgcgcaagaccgcggacctgctgcccggcaaggccaagaccgacaggcgcgacgcgtacgtgatcgcatgggccgcgctcaagctccccgaaagcctgcgggacgcgggcccggacgacgagaccctcgccgccctgaagatcctggccggccacgacgaggacctcgcccacgaatccacccggcacatcaaccgcctgcgcagcctgctgctgcacacccaccccgcgttcgaacgcgccctgaagggcgaacgcatcacgcgcgacgcgaccctcgcgctgctcgaacgctacggcgggcccgcggccatgaacgccgcgggcgccgacgaggtccgccggtgggcgcgcgacaaccggctgcacgccggacggatcatcgacgacatgttccgggcgatcggcgagcagaccgtcaccgtgcccggcaccgccacggccgagagcatcatccccgccatcgtccgggacatcagggccatcaaggaacgccgccggcaggtcggcgaacaggtcgagtccctgctggacgaccaccctcttctcacggtcctgacgtcgatgcccgggataggcgtcaggaccgcaagcaacatcctgctctccatcggcggcgacgtcaccggcttcgcatcggccgcgcacctggcctcatacgccggcatcgcgcccgtcaccagccagtccggcaccagcatcaaaggcgaaaggcccgcacgcgccggcaacaagcgcctcaagaacgccctctggcaggccgcgttcgtggcctccgtcaaacaccccgcctccaaggcctactacaaacgcaaacgcgaacagggcaagcaccacaacgccgccatcatctgcctcgcccgacgacgctgcgacgtgatctacagcatgctcaaaaacggcaccctctaccaggaacaaaccctcgccgcctgaaaccaaccgacacggaccacggcaacgaacagccaaggccaaggcgaagcacgcccatcacaaccaacccagacacgacacaacaacccctcacaaggttgacaaaaacataggaaca

SEQ ID NO: 9062 - DNA, 1376 bp, unidentified
  source 1..1376: mol_type = unassigned DNA; note = element_e360b3c
  misc_feature 1..2: note = core
  misc_feature 3..78: note = LE
  misc_feature 79..1113: note = CDS
  misc_feature 1114..1376: note = RE
  misc_feature 1113..1363: note = bridgeRNA
tgatggtgtggacggccccctacggcatcggttgtgccagaatgaggttgtttcaaatctcagacaagggagccgtccgtgaaccagattatccgcattggaatggatacgtctaagcatattttccagttgcacggggttgatgctgccgagcaggtggtgctgcgcaggaagctgcgacgccaccaggttttggagttttttgcgcggctgccgcggaccgtgatcgggatggaggcgtgcggagcggcccactactgggcgcgggagttgcgcaagctcgaccacgaggtgaagctgatagcgccgcagcacgtcaaggcctacgtcaagcgcaacaagaacgacgggcgcgacgcggaaggattgtgcgaagcgatgagccggccgacaatgcagttcgtgccggtgaagaccgaggagcagcaggcggtgctgatgctggcgggagttcgtcagcagatgatcgcaaggcgcacccagcttggcaacgcgatccgcggctacgcgacggagttcggcctgacggcggccaagggtgtcgacaagatcgagccgctgttggcgcagattgcgcaagacaacacggtgcctgcgatggcgcgtgagctgtttgctttccagggtaaggattacacgcgattgcaaagcgagttgaaggcgatcgaggcgaggctgctggcctggcaccgcgccaaccccgacagccgacgcctggcgcagatccccggggtcgggccgatcagcgccacggcgctggtcatgaagacgcccgatcctcaccggttctcgtccggccggcagttcgcggcctggatcgggctgaccccgaaggatcattcgaccgcgggcaagacccggctcggcaagattacccgcgcaggtgatgagatgttgcgcagccttctggtggcgggagccaccgcggtggtcaagcaggccaaacgcggccgcggttcgccctggttgcttgagctgctgaagcgcaagtcgccgaagcaggcggccgtggcgctggccaacaagacagcccgcatcgcatggaaactgatggtgacgggcgagagctacgacggcgcgcggatgcccggtgcatcggcgctcgccgcctaaggaatcggctggtcggctaccaaggcctaccggtcgagccggagctgcaagaggaggagatggtaggatcgatcgatccaaggtgcgagacagtccgtgggacccattggccgaagaaaggtcgcgtggttgattggagctcgcgtcgcggaagccatcttggccagcggtgaaaacccaccccatcaacaggccggacatatggatgcaagcgatccgatcagacctcaagaatctcttgcagcacgggggccgtccacata

SEQ ID NO: 9063 - DNA, 1374 bp, unidentified
  source 1..1374: mol_type = unassigned DNA; note = element_e363231
  misc_feature 1..2: note = core
  misc_feature 3..73: note = LE
  misc_feature 74..1108: note = CDS
  misc_feature 1109..1374: note = RE
  misc_feature 1150..1367: note = bridgeRNA
ttatgggatggcccgcccctcccgccagcttcgagttatgatgctggtgtgcttgagaggaaggaacgagccaatgaccatagtgacccttggaattgatctgggcaagaacctcaacagcgttgtgggtctggatgcgcaggagcgcgttgttctgcgccggcgtgtgagacgtgcgacccttgccgaactcgcagacaaacttcagccctgtactgttgccatggaggcgtgctgcggcgcgcaccatgtcggtcgtctgttcgcggcgaagggacatgaggtgcgcctgatgtctccagagtatgtccgcccctatgtacgggcgcaaaagaatgacgacaatgatgcggcgggtatcgccgaggccgcaacgcgacccagcatgcggttcgttgagttgaagagccaggaacgcctcgacctacagaccctccaccgcgctcgttcgcgtctggtcgcagcgcgaaaggcccttgtgaaccagctccgggcgatcctgcttgagcgtgggtatacctttcggcaggggcgcgagatcctcgaacgggagatcgatccgttccttgctgagccaccggccgacctttccgcacgcatgctcaggctcgtcggcgatatgcgagctgagtggcgctctctcaacgagcgtatcgatgacctgaacgacgatctgagtgagcacgctcggacagatgaagctgcgaaccgtctgacttcgatcccaggcattggggtgcttggcgcgaccgcccttgttgcagccgtcggagatggtgaggcgtttcggcaggcccgcgacgtctccgcctggctgggtcttgtgccgaagcagatgacgacaggtggaaagccgcggctactgaggataaccaagcggggtaacgtctacctgcggatgttgctgatacatggtgcgagggcggcgttgccaagcctctccaaacaagcaacgcctttgggcgagtggttgcgagggctgttgtcacgcgctcaccgcaatgtcgtgattgtcgcgctcgctgccaaactcgccaggatcgcctgggcaacgctgcgacgtggcgtgcgcttccagccgcagatgggggctgctgcaatgacgtaagctgacgacagaccaagaagaattggttccggcaggctggagccatgtcaggttggcggaaggatattgatggccagaagggtcgaacacccgcgtctctggaagcctggttcaaaaaacggcgcaacaacgccgagtcttttatgaggaccagaacgcgcggatctccatcatggcgagggccaaggtgccactatgccggatacgtttgcgcacgaccaaataaagccatcaaaaaccctattgccaacggggcgggccatacg

SEQ ID NO: 9064 - DNA, 1459 bp, unidentified
  source 1..1459: mol_type = unassigned DNA; note = element_e363fbd
  misc_feature 1: note = core
  misc_feature 2..248: note = LE
  misc_feature 249..1445: note = CDS
  misc_feature 1446..1459: note = RE
  misc_feature 41..219: note = bridgeRNA
cgttatgttgttgacagcccctaaaagaggatcatagggactgtcggccgaccaatctcggcatggtgtcttgcccctgcttatccaatagtccggggggtgttgccaccgagattgggatggcagcagggtgattgctaattaggggcgcggcgccaaaatggacgcctgtcataacgtggatgtaagactttgctaccgacggttggccgaccttgaacagaaactagttcaaaggagcactagtcatgatcaccacggatgtcgacattttcctcggcctcgacgtcgggaaaacagaccactgggcctgtgccgtcaccaaagacggcaccaaaatctggaacaagaccctgcccaacgacgaagccaaactcaccgctgtctacgaaaatctcagtgccaagggcaccgttctggtggtagtggatcagccagccaccatcggcgccctggccgtcgccgtcgctcagcacctcggcattccggtggcctacctgcccggactctcgatgcggcgcatcgcagacatgtatcccggcacagcgaaaaccgacgaaaaagacgccttcatcatcgcggactctgcccgcaccatgccccacacgctgcgcagcattcagctctctgacgaggacgaagccaccttaggcatgctcaccggactcgacctggatctaacacgtcagatcacccaaaccagcaaccggatccgcggattgttcacccagatccacccgtcgctggaacgcgttctcggaccctggctggagcatgacgctgtgctggaggtcctcgcctcctggccgacaccggcgctgctgaagcatgctggcaaagcgcggatcgatgcgaagctgaaaaagcacggagcccgccggcacaccgcgtggaccggggccattctggaagccttggaccaacagaatgttgtcgtggtcggcaccgatgctgctggcctggttattccgcacctggcacggcagttgatctcattgcatgcccagcgcgtggacgtggccatgcacttggaggcaatggtggaggctcaccctctttacccggtcctgacatccatgccaggggtcgccgtcaggaccgccgcgatcatcatcgccgagatctccggcaaaaccttcgctagtgccgcggcactggcctcctacgccggattggcgccgaccacccgccagtcgggcacctcgatcaagtccgaacgcgtcagccattccggcaacaaatgcctcaagcgggcgttgttcctctcggccttcgcctccatccgttttgatccgaccagccgggcctactacgacaggaaacgagcccaaggcaaacgccataaccaagcactcatcgcactggcccaccgccggctcacagtcctgttcgccatgatccgtgacgcgtcactctatgaccttccagagctgaaaatagcttgacttttacatagggg

SEQ ID NO: 9065 - DNA, 1449 bp, unidentified
  source 1..1449: mol_type = unassigned DNA; note = element_e369444
  misc_feature 1: note = core
  misc_feature 2..127: note = LE
  misc_feature 128..937: note = CDS
  misc_feature 938..1449: note = RE
  misc_feature 1208..1447: note = bridgeRNA
atgttatggacgcctccctcccgccgtgggtggggagagggtgagggagccctcgctgtacccgacggcatcggagtgccaaagtggtggtgttgcgaaggaccactgagggtaaggagggctcgacatgaaggttacgacgtttgggctggatttggcaaagtcggtgtttcagctgcactgggtggatacggcgacgggtgaggtctgtcggcggcgattgcggcgggagcaggtgctgccgttctttgccaaccgggagccggcggtggtggcgatggaggcctgtggcagtgcgcactactgggggcggcaggtgcgggccttggggcatgaggtgaagctgattgcggcgcagttggtgcggccgttcgtgccgaccaacaagaccgacgccgcggatgcgcgagcgatctgggaggcggtgcaacggccgcagatgcgcttcgtggcgctgaaggacgaggggcagcagagcgtgctggcgctgcaccggatgcgggagcaactggtgaaggcgcggacgatgcagagcaaccagctgcgcgggctgctgtacgaatttggggtggtgctgccggtgggacgggaacgagcgctgctggtgctgccggacaagttggagcaactggcgtcgcggttgcccgcgatgctgctcacgatgctggagcgacaacaggcgcggctggccgagttgaccaaggacatcgtggcaatcgagttgcaactcaagggctgggccaagacgaacgcaccgagccgccggctgcaggatatccccggcgtcgggttgctgacggcgacggcagcggtggcgatgatcggcgaggccaagcatttccgctccgggcgcgagttcgccgcttgcctgggcctcgtgccgcggcagagcgggaccggcggccgggccgctgctggggatcagcaaacgcggtgacgtgtatttgcgcaccctgctgatccacggggcgcgagcggtgctcaatcggcgccgggaacccgagccgtggctgcagaagctgttggcgcgacgaccgccgaatgtcgtcgcggtggccttggccaacaagatggcgcgcaggatctgggccctgctggcccacggccggacgtatgagccaggctacgtttcgacccgcccggtccggggacaacccgtcccccagggacactgacgcgaggttatcgagcatgagctgttgttgtcgctgcattccaggttgcgcaggttgatatcagcgtgatggcaccaccggtcggaccacggggaagcaaacctgcaaggcgctcgtccttcgaggacaagtgggagatgaggccttccccggcgtattccatcagggcccgcaggcacacccgcctgcaccacaaggccggatataagactgcaaccagaccgtccatgccaaaatgccaatatcgcttgccaaaccgggaggcgtccatata

SEQ ID NO: 9066 - DNA, 1332 bp, unidentified
  source 1..1332: mol_type = unassigned DNA; note = element_e36a434
  misc_feature 1..2: note = core
  misc_feature 3..256: note = LE
  misc_feature 257..1318: note = CDS
  misc_feature 1319..1332: note = RE
  misc_feature 33..227: note = bridgeRNA
ccgacttgtatgagtgtcacgggacggtgagagggattgcagcccatagcgtgccgtagcaggccggaggggatgactcgcgaaactcctgtcacccgcagttggggttgacccttgtgaggtttgtcagcccctccggtctgcgttcgcggcgtgactgaagagaggcgtgaccgcaagctgctgtgagaggtacttgaagtcggattgtccgccgcggatcccccacccacacaagcgaagggaaccgcactccatgatcgtgatcggcatcgatccgcacaagtccactcacaccgccaccgcactggacccggccaccaacactgacgtcgggtcactccgtatcgaggcgtccctcgccgaataccagcgactgatcgcctgggcgaaaccctggcccgaacgcacctgggcgatcgagaacgccgacgggctcggacaccacttggcgctgtggctgctggctcggggccaggttgtcttcgacattccgacgaccgcgaccgcgcgggtccgggaactctcacgcggaggtcgccgcaagaacgaccgcatcgacgccgccgcagcagccagtgtcgcagcgctgcagggcgatgcccgtcaggtctacccggagaccactacggactctctggcgctcctcgatgagcgtcgagtcaacctgtcccacagtagaacccgtgctgtcaaccagttgcacgcgctgctgcgggagctgatggccggcggcgcaccgacctcactgacccccgtcagcgccaccagcgcggtacgcggacttcggccccgcaccggcccagaccggattcgggtggaactggccaaggagctcattgccgacgtccgacgttttgatgaacaactcgccgccaacgccgcgaagatcaccgtactcctcgaagagcacggcaccaggctgcgcaagatcgacggcatcggcccgatcctggccgcccgactgctgggccgcaccggccccccgaacaggttcgcctcagccgcggcgtatgcgaactacaccggcaccgcgcccgtccaaatcgccagcgccgattcctcccgccaccggctctcccgctacggagaccggcaactgaactccgcgatctacacgatcgccatgatccaaatccgcatgcccgccagcaccggccgcgcctactacgacaagaaaatcgccgaaggcaaaacaccgcgatacgcgacccgcgcgctcaaacgacacctcgccggacacctctggcgcaccatgctcgccgaccaaacccgcaccgcacgaacgccttcgaaagacgtggcaaacgcctcttgacaaatagagaggca

SEQ ID NO: 9067 - DNA, 1589 bp, unidentified
  source 1..1589: mol_type = unassigned DNA; note = element_e36b6d3
  misc_feature 1..2: note = core
  misc_feature 3..283: note = LE
  misc_feature 284..1456: note = CDS
  misc_feature 1457..1589: note = RE
  misc_feature 40..263: note = bridgeRNA
ctcgtattatatagtagtagtgtttagagaccctctccaaggtctttaatactccatacccattctttaccttttctacaggttgggttatgatattggagatactgtggattggttgtctgctcctaccacttgatggtttttgaaaggctccaaccacagtctctttgttcatttgttaatcagttagatactgcacgacagtttatttagaacgaggttacaaccgcaaagagtatctgtggtcctaaacagtatcaaatacatctcaaaggagaggcttatgatctatgtaggaatcgacgttgccaaggataagcatgactgctttatcacaaactctgatggtgaaatactctttaaagttttcactattacaaacaacctggaagggttcgacagtctttatcaaaagattaaatccattacaacggatccaaagataataaaagtaggactggaagctaccggacactacagttacaaccttctcggctatcttattgataaaggtctacccacctttgtcataaacccgttacataccaatctgtacagaaaaagtctaagccttagacagacgaaaacggataaagttgatgctcgcacgattgcttatatgctaatgtctgatgtgaacttaaagtcctactcagactcattataccacaacgaagaattaaaatcactaacccgttatcgttttgataaagttaaggaacgtgcaaagctaaaatcatctgtctcgcggctagtctgtatccttttccctgagttagagaagctggttccatcacttcatatgtcgtctatttacaaaatgcttgccgaatttccgggtgccaagcacatttccaatgctcatcttacaagacttacaaatcttttatcggaagcctcaaaagggcattacggaaaagaaaccgctattaccttcagagatgcagccaggaattcaattggctcatacatgcccgctaaatcccttgaactgaagcataccatcaaactcattcaggagcttgattcagaaatcgatgaaattgaaaatgaaatcaaaaccattatggatgaaatcaactcacctatcttaagcatccccggaatcaattaccgtatgggtgcaatgataatttccgagataggttcctttgaccgttttgattcacctgataagttattagcttatgcaggtctttctccctccacacatcagtccgggcaattggatggtgcctatgcacacatggaaaagcgtggatcccgttatcttcggtatgctctgtataatgctacaaaatatgtatgtcattgggattcagtctttgcagcttatctttcaaagaaacgagccgaaggtaagcattataatgtcgccatttctcatgcagcaaagaaactaatccgggtcatctatcatcttgaaaagactaagcagcaatatatcaaatcttagaacatcccaaacctatatccctttagcaagcacctgtaaagatgctctttttgtcgtgcattttttaacttttacgaatacctttttgaattttaaaaaatttcattttttctcttgacttttaatagttagt

SEQ ID NO: 9068 - DNA, 1669 bp, unidentified
  source 1..1669: mol_type = unassigned DNA; note = element_e37128e
  misc_feature 1..3: note = core
  misc_feature 4..309: note = LE
  misc_feature 310..1569: note = CDS
  misc_feature 1570..1669: note = RE
tataatccgcctttctgcgaaaggcaccaatgcgtcatgaaactggtgcacgatctttcgctatctaatctgttgtctttctgatattatcttcttataagactgacacactacagaacacgtggaggtgagtggcggggctgtatagcggcgacctcgcatttgtatatgttgtcggtcatccgttaaggcatcaatgaatggcgcataacatagcccgtaaacttatctcttccaaagtcgactcgattttgccggatgactagtcactgtcagttttaaacttacaatcatcaggaggttattttattgtcgtttaaaattcttaaaaataactgttgcggacttgatgtccacaaaacttggatctatgcctgcattggtattaccgatcccaacggacgtacagaatataaacaagctcgcttttcttcctttactaaaggattgcaagagttgtgtgactggcttgttaaatataactgtaacgacgtttgcatggaatctaccggcaagtattggattccggttttcaatgtcttagagaagaataacttatgggttactctgtctcatcccaaatataccaaaccacaaaaaggaaataagactgaccgcaaagacgctaaatggatctgcgatctatatatgtgcggcatggtcaagccttcctttattccaccagctgatattcgccagttaagagatcttgtaagataccgtttcaaactcacctgcatgattaccggtgaaaagaaccgtgcccagaattgtcttactgtatccaactttaaacttgacgatgtcttttctgatgtatttgggaaatcttctcgctccatcacggaacagattttacaacaccccggggaaacttttgatgtggcaccttttgttgatggcaggtgtaaaactcctattgaagaaatacaggctgctgttgatggcgccatttctacggaacaagctgtaaagcttagacaatgtctgaatcacatcgatgaattaaaaaagcatcaagcagaaatagaacgggaaatctttcgtctcagtgataagtatgaaagcgttctcaatcttatacgaaccgtaccagggttcgataagaacccattgactgctattcaggtgctctctgaaatcggaggtgatatgtctgtcttccccacagctaaaaacctcgtatcatgggctggatgttgtcctcgtaatgatcaaagcaatcataaaatcaaatccactaggatttcccgtgctggtttctattttaaaccagttttggtgcaggttgcaaatgctttgatcaaatccaagaaacatcctgaatttactacccgttatcggcgtataaaagcacgccgcggtcacaagaaagctgtcattgccatctgccgtatgatcctgaccgctatctggcacatactcacagatttaaaaccatatacaccggaaggctttcttgagtcgcgtcttgtgaatgattcaaaagtattgactacttcgcaggcacttaatctgctgaaacaacgaggatatgtcatcaaagatgatactgttcctgttacctgattaggtgttgtgtctatatttgatttttaaaccaccggaagatggtttatttgccatgtcctttatttcttggttgtcttctacttatttgtttcaaact

SEQ ID NO: 9069 - DNA, 1197 bp, unidentified
  source 1..1197: mol_type = unassigned DNA; note = element_e378723
  misc_feature 1..2: note = core
  misc_feature 3..222: note = LE
  misc_feature 223..1182: note = CDS
  misc_feature 1183..1197: note = RE
  misc_feature 22..224: note = bridgeRNA
cttgtatctagctctcgagagaagttgcgagcattctgatcggggcgccagctcgatgctgcctgggtggagctgcgaggcgaacaccgtgcgttagccggagcggcgtacccgatctctcgtcgcacagagcccgaacagttgcgggggccgaccgccgagtcgagcccggattctcacaaggacgggcgacgcgacactccgataccatggggggagcgcatgttcgtgggcgtcgacgtggcgaaggccgagctggtagtgagcattgtgccgtcggccgagcggttctcggtggagaacgacgagcgcggcgtccgcacgcttgtcgaacggctccgcgcggtgagcccgacgctgatcgtactcgaagcgacgggtggctatgagttgctcggcgtcgcggcgctcgccgcggccggactgccggtcgtcgtcgtaaatccgcgccaggtgcgcgacttcgcccgggcgaccggccagctcgcgaagaccgaccggatcgacgccgacctcctcgcgcgcttcgccgatggggttcggcccgcggtgcgtgcgatcccggatgccgaggcgcaggagctcgacgcgctgctcacgcggcggcggcagttgctcgagatgctccacgccgagcggaatcggaccggccaggtcttcggccagggcaagcgcatggtgaagaagagcctcaagaatcacatcagctatctggagcgtgagctgcgcatgaccgacacggacctcggcgagatgatcaaggcgagccccgtgtggcgtgaacgtgatgagctgctgcagagcgtgccgggcgtgggcccggtgctctcgcgcacgctccttgccgacctgcccgagttggggcggctctcgcggcgcgagattgcgaagctcgtcggcgtcgcgccgctgagtcgcgactcgggcacgatgcgcgggcgccgcttcgtccagggtgggcgcgcgacggtgcgtgcggtgctgtatatggcggccctcgtcgccacgaaacgcaacgcggtgattcgggccttctatctgcgcctcgtcgccgccgggaagccgaagaagctcgcgctggtcgcctgcatgcgaaagctgctcacgatcctcaatgtcatggtccggaccgcgcaaccgtggtcggtcaatgctgcatccgacgcactcattcctgcttgactttcaagacagttg

SEQ ID NO: 9070 - DNA, 1179 bp, unidentified
  source 1..1179: mol_type = unassigned DNA; note = element_e37c3bf
  misc_feature 1..2: note = core
  misc_feature 3..210: note = LE
  misc_feature 211..1176: note = CDS
  misc_feature 1177..1179: note = RE
  misc_feature 3..185: note = bridgeRNA
cttgtatggtaggactcgaaggggtgggtgggaccaaaagccagcttctgactgttagccgcagtacagaccgtgggagaaatcgtccccaccccttccaccaaagcgccgataaagaatgcttcgttttcctcagcgacgatagaaacaagcctgcgcctcttggtgaacccctccgagtcgaaaaaccttacagcgggagagcctgcaatggcaatgaaagcgaaccactttgtgattggcatcgatgtggccaaggccgaattggtcatccactaccaagacagtggcgcgcaggtttgtgtgagcaataccaaacccgaaatcaagaaatggttgaagcagcaaccggccaatacagccctgtgtgttgaagcgaccaacgtctatcaccttgacgttgtcgaaatggcatacgaaaagggttttacggtttacgtggtcgacggctttcaactgagcaattaccgcaagagcatcggtgcaagggccaagacggattccagtgatgctgcattactggcgcgatatctagagcgcgaaggcggcgagctgcgtccgtgggcaccgcctccggccgtctatggcaagctgcagagccttctgcgacgtcgagctgccctggtatcgatgcgcactgctctgagccagagctggggcaacgagacgctgctcaaggccgcgttcaagagttttacggcgcaaatgaacaggcttgacctgttggtccagaagaaactcaaggagttacttcaggaagcaggactgcttgagcaaattgcacgttgccggtccattgaaggcattggttttctgaccgctactgccttagtgatggcttttatccggggtgaattcaagaacagcgatgcctttgtcgcatttctggggatggacctgcgtgtgtctgattccggtcagaaaacgggacgtcgccgcttaaccaaacgaggctgctccgagacgcggcgcttgctgcataacgcctcgatgtcagccagtcgctcgaccgcttggaaagatgtgtatgaacattatcggagcgagggtaaagctacgactgaatcactggtgattctggctcgcaagctcgcccgcgtcgcattttctctgatgcagaacaaggacgcataccaggcaggaaagagggctaaaaaactttgccctcaaccatagaat

SEQ ID NO: 9071 - DNA, 1388 bp, unidentified
  source 1..1388: mol_type = unassigned DNA; note = element_e37f2e9
  misc_feature 1..2: note = core
  misc_feature 3..88: note = LE
  misc_feature 89..1117: note = CDS
  misc_feature 1118..1388: note = RE
  misc_feature 1088..1375: note = bridgeRNA
agatggggtggttgccgccctccccagacggcatcgcaatgtgccaaggtcgtggtgttcaacgccacgcgaagaggaggacggcgagatgaaggatatgatgataggggtcgatctggcaaagaatgtttttcaggttcatggtgccttgcgcaccggggaggttcagttccgcaagaagctgacgcgcaagcagtttcccgcgttcatggctcagcaggagccctgcttggtcatttttgaagcctgcggcggcgcgcattactgggcgcatgagatgacagaaatgggccatgaggtgaagctgattgcgccgcagtatgttcgcccgttcgtcaagcgtcagaaaaatgatgcggctgatgcggaggcaattgtgatcgcagcgcgccagcctgagatgcgtttcgtcgcacccaaaactgttgagcagcaatcacgcgcagcggtcttccgcggccgagaacgcctggttcatcagcgaactgccgatgtgaacgcattgagggcgctgttgcatgaacatgggcatgtgtttccccaagggatacagcgccttagcgggatgaaggcacttgtcgaggatgaaagctctaacttgcatcccctcatccgggaggagtgcgcggacttgctcgcacagattgcagagaaaacggcgcggatcatcgagcgcaccgcgaaacttaaggtcctcgccgctcagtcagacagggcgcgccagctccagaccatgccgggtgtgggatcgctcacggccatcgcggtggaagccttcggacccgacatggcgcagttcaaaactgggcgcgactttgctgcctggttggggctcgtgcccaagcagcattcctcaggaggaaaggagcgcctcggccgcatgaccaaggctggccaggccgatattcggcgccttctgattataggggcaatgtcgaggctgacttggattggtcagcgcacaattgtcgaaggcagctggctatcacgcatgttggcgcgaaaacccaaaatgcttgtcgcgatcgcgcttgccaacaagatggcccgtcagatttgggcgatgctgatgaagaacgaagactacacggatccggcgctggtggtcgcggcatgatgctcatgtcggcccattagcaacggtgccaagggggtgtgagaagacgacgacctgaatgggcaaaatgatcgaacagatctggattgggaaaaccagagagaagctgagtgcagaaagcacgcccgcgagatttggacctgatccgctgatcaccatcccggccagcggcttctggaaatgccgcatttcgaaggccttacagaagaccgcgctcgatcacacgccaaaagggtcaaaaacttcttgcactacgggcggcaaccacaga

SEQ ID NO: 9072 - DNA, 1578 bp, unidentified
  source 1..1578: mol_type = unassigned DNA; note = element_e381e03
  misc_feature 1..2: note = core
  misc_feature 3..237: note = LE
  misc_feature 238..1509: note = CDS
  misc_feature 1510..1578: note = RE
  misc_feature 16..246: note = bridgeRNA
tctgactgagacttgtcgcgggctctgcggttggtcgtagcgtcctggtggtgcgacgggccggctcgctaaccgtctgccgaccggtgtggtttggctctagaacgaggtgccggcctgtcgtgtctgacccgtggtgtggctctaaagaggcgcgctcgccgatcgtcgtcctgaagtcagacgtgcccgccgcggtctgttctgccagacctgatcgtatggaggtgacggacggtggcaggcgtgatgatcgggatcgatccgcataaggggtcgcacaccgcgtttgtgatcgatggacgcgagaagccactggggcagctgcgggtgcgggcctcgtgcgaacaggccgaggcgctgctgggctgggctggtcgttggcggcagcggacgtgggcgatcgaaggggcgcgcgggctggggcagctgctggcgcagcagctgctcgccgccggcgagcgagtgctcgacgtgccgcccaagctcaccgcccgggtccggctgctcgaatccgggcagatcaacaagaccgacgagaacgatgcccgcgcggtcgcgatcgccgcgctgcgggcccgccagctgccgcagctgaccgtggaggatcagaccatcgtgatgcgggtctgggcgcggcgctaccacgacctcggccggctacgtacccaggcagtgtgtcggctgcacacggtgctctgcgagctcgtccccggcggtgtgcgcaagcagttgcggaccagccaggcgatcgcggtcgtcgacagcatcacggccgaatcccctgtggcgcaggcgaaactcgagctcgcccatgatcttgtcgcagacctgcagcgcctcgatgcgcaacgccgtgaggtcaagcgtcgggtctcccgcgcggtggccgccgcccccaccagcatcaccgaggtctacggcgtcggaccgatcgtggccgcctgcgtgctcggctacgtccgcgacattcgccgcttccccagccgggaccggttcgcctcctataacggcaccgccccgatcgaggtctcctccggcgaccggaagatctaccggctctcccgccgcggcaaccgccagctcaaccacgccatccacatcgccgcggtcagccagatcagccaccgcggcagcgaaggccacgcctactaccagcgcaaacgcgccaagggaatgaccggcaagtgcgcgctacgcgcgctcaaacgcaaaatcagcgacaccctctacgagcggatgctccacgacatacgcccacgtaaggacccgggagggcactcggggaacgacgctgcatccagcgcggccggctcacaccccgatggaccggctcttcggacaagccactcccgggccaccgccaactctaaaaccgccaccaccaaccagcgaccgctcacatctccgcctgctcctgataagcgccgaaccagccggagcggaaccggagtcaagctgcagccccgcccgagaccgcgacgcgggcgcgggcaggaacgagcttgacaccggcgagcaccggccacaatccccggcgcaggagcaggccaccacgggcttgacacaaagaggtcc

SEQ ID NO: 9073 - DNA, 1340 bp, unidentified
  source 1..1340: mol_type = unassigned DNA; note = element_e38420e
  misc_feature 1: note = core
  misc_feature 2..147: note = LE
  misc_feature 148..1098: note = CDS
  misc_feature 1099..1340: note = RE
  misc_feature 1111..1331: note = bridgeRNA
taatggaatggtctgcccctcctctcgcacaatggccaccgtcggccatcatggaggagcagcaatgacgacagtcccaacatcatcggcctcgatcttggcaagaattggtttcacctcatcggattggatgaccgaggcgccacggtgctacgccggaaagtgaatcgcgtgcagctggccgagtatgcggcgacggcgccgcgatgcgtcgtggcgacggagtcgtgtcctggctcgcagtactggggtcgcatcttcacccaggccggccacgaggtccggatcctgccggcgcagtttgtgaaaccgtatctgaaggcgaacaagaacgacttcaacgacgccgaggcgatcgccgaggcgggcggtcgtgcaagcatgcggtgtgtgccgctcaagacgaacgagcagctcgagctgcaggccctccaccgcgtgcgccggcgcttcgtcatcgagcggacggcggtcatcaatcagatgagggcgctgctcctcgagcacgggatcgtgattccgctcggccgcgcactctttgcccgccggcttcccacgatctttgaagacgccgagaatggattgtcaccacggctggtcgtcttgctgcatcggcttcgccagcggtggctcgcgatagacgtcgagattgaccaagcgacacgcgacctgaccgaatgggcagaacaatcagacttatgtcgtcgtgccacgacggtcccaggcatcggcccgatgatctcaacggcagtcgtcgccgcggtcggcgatggtcgaatgtttgcccgcgggcgggacatggccgcgtggctcggcctcgtcccgagccaatactccaccggcggaaaaccgacgctgggtcggatcagcaaacgtggaaacacctacctgcggcagctctttatccaaggggcccacaccctgtacctgaacatgaagcgcgatcgctcatatctcggcgaatggcttcgacaggtcgaagcgcggagccaccggaacgtcgcgatcgtcgcgctcgccaacaaaatggtccggatctgctggaaggtgctcacgagcgagcagctgtatcagccatatccatcccgcgtcgcatagaaccaaacacgtgtcttcgaattgcgagggtgtctcgatgtgatggcccaaccgtcgaccggcgcatcgccagcctgattaaaaatgcggttgatcgtgaccgaccgttttatgaggatcggtgcgcgcggattccatcaaggccaggagccgctggctccaccagtaggccgaatacattgacgcaaacggcttcaccatcgctcgatctcgacccttgcaacggaggggcagaccataca

SEQ ID NO: 9074 - DNA, 1584 bp, unidentified
  source 1..1584: mol_type = unassigned DNA; note = element_e393d0d
  misc_feature 1: note = core
  misc_feature 2..249: note = LE
  misc_feature 250..1458: note = CDS
  misc_feature 1459..1584: note = RE
  misc_feature 6..225: note = bridgeRNA
tcgtattatgagatcaaccagttctttctggttgatccttttttcatttgcatagaggattaaagtagcctggtcgaacgtacctgcccgtgggacttgatcccgagagctatagtgttcacccctacttgtcatgaccatgattgaggctggttgggacgtaagatcccgtataacaagcgatgctatggaccgacaagaggaatcttgggggataccagtaaatctaaacttacagggagagatgatatgaatccagttgtcggtctagatatttctaaagcagaaagccatggacaagcctttttagctcgtggaaagccactcagagggacattccatttcgagcacactcgtgatggtttagcagatctctataaagttttaaaagacgttgaatctgcatctaaacaacgtcctttgattattctagaagcaactggccattaccaaagccccgttgttcagttcctagaagaacatcactatatttacattgtcataaatccactcatctcaaatcggcttaggaagtctcaacttcgtaaagtaaagacggatgctgctgacgcttatctattgggggagttgtactacaaggaagagtttgaagcttttgagaagagaggagtgcaacttctcaatctgcgctatcttacaagacaatatgagtctctttcaaagatgtgtgtacagactaaactacaatttcaagctgttttagatcaggttttcccggtttacaaaggcgtctttggagctatatattctggtatttcactacgatttttaagtgaattcccaacctcatactcagttttacagacggatgaagacacactcaaagctaagatgaaagaactgctttcaacgaaacgggggcgttcagaggaatggattaaccaacgggttcaacgactggtagatgcggcaagacaaaacccatttcagcaagaccatgtatgcaagtcatttaatcatttaaaaatccttattacccttaatcttcagtaccaagagcatcttactgaattggaacagaacatagatgctctggctgaggaaattgaagagtatgaattaattcagtcgatccccggtattgggcataaaattgctgcaacaattttatctgaaattggagaagtcgaccgatttgatcatcctaaaaagttagtagcctttgcaggaattgacccgagtgtctttgcttctgggaagtttacagccacccgaaaccgaatcacgaaacgtggttccagacagttgcgttacgcgctaatgatggctgttcagtgtggacttattcgttctcgcaacactcgactcaaagaattttacgaacgaaaaagaaccgaaggcaagccgcataaagtagcattggtcgcatgtgcaaataagctagttcattggctccatgccatcttgaaaagtaaaaagccattccatctggcttaacaagcataattgggttaaccttccaaaacgttggcgaactggagggttatttggtttgcctattttaactataacataagatatatggtctttttactggtaatcttgacatgctattagctggta

SEQ ID NO: 9075 - DNA, 1473 bp, unidentified
  source 1..1473: mol_type = unassigned DNA; note = element_e398b0c
  misc_feature 1..2: note = core
  misc_feature 3..222: note = LE
  misc_feature 223..1185: note = CDS
  misc_feature 1186..1473: note = RE
  misc_feature 9..181: note = bridgeRNA
cttgtatcttagaaatagtagtagaccgtcccaaccttggtcaagaaagaccgctttgtagcatgggtcactacaacaatctctttgacagaactcgaacagtcgccaggggcaaaaatttcaatactgatatttagatgatacagtccgtatcgtgcaaggatgagtgtaatcaaggggatgagaatcaactataacaaacacaatccgtgagagtgaaatatggaaaatattgctcaatgggtaggtattgatgtgagtaaagccacattagatgtttatatccgtcctctgggtaaagctatgattgtggcaaatacagaatcagaaatatcaaatctagtgaagctactcttgtcctatagtttaaatctgattgtactagaagcaaccggaggattagaaactgaactagtaatccaattgcaagctgcacttttaccagtagcattaattaatccccgtcaaggacgagattttgctaaagctacgggtaagctggccaaaactgatgctattgatgcacaaatattggcacattttggcgaagcgatgaaaccccaagttttagccattcaatccgaaacggcgcgtcaattatcggaattaattagtcgcagacgacaattagtggagatgcagacagccgaaaagaatcgccgctcactcactcgtggccaagccttggcagatattgaggctcatattgaatacctggaagaacacctcaaacaactcaatcaaaaaattgccgaattgacgcaaaacaatcttcaatggattgataaagttaatttacttaaaagtactcctggtattggtcaagtaatttcgacaactctggtttcggatttaccagaactgggtcaactcactgccaaacaaatttctcgcttagttggtgttgcaccaattaatcatgatagtggtcaacacaaaggtaagcgcatgattaatggcggtcgcgctcatgttcgtgccactctttatatgggtgctgttgttgctatggttcataatccggttatcaaggccttttatgagcgccttatcgaacgtggtaaatcgaaaaaattagctctcactgcttgcgttcataaaatgttagttattctaaatgcaatggttcgagataatttgccttggcgtgtaactgaaaacttacaacccattgccaacgcttaatcacaactcaacgtttttatactttggaatagtccccccgatgatcccattgtggcatttgggtcaactttttatgctcttttttatctccatgggaaatccagcaactgggggaagattctgcggcgaagcggagtggctggtgcgggctgctaccatcttaaccaagagccacaagtctttttgcccgtaccagccaccgcagaatctagcgcagcgttccacagttgcgtcaatgttaagagtaccggttttttgttaacgatcgcttgacttttaagacagtcg

SEQ ID NO: 9076 - DNA, 1170 bp, unidentified
  source 1..1170: mol_type = unassigned DNA; note = element_e398c2c
  misc_feature 1..2: note = core
  misc_feature 3..205: note = LE
  misc_feature 206..1141: note = CDS
  misc_feature 1142..1170: note = RE
  misc_feature 41..214: note = bridgeRNA
cttgtatgtttaaagtcacttcagttacccgccgtcaggcgggtacactgtcaccgtgtttgacctgatgccacagcccgttaaccctccgggtttacaagcccgcgggagagcttatggcgtggcgtcagttttcctgtaaacccgaacagctgccagggcggcatacgccagcccgtatcttacaaggccgggagacatgaacatgacgcaaggctccactgttggcgttgatatcgccagagacacttttgatgtgtttatcagccctgaaaaccgcttccttcatctggaaaataccccggacggacatcagcaacttatcgacaacctcacctcacttaacgtcacactcgttgtgatggaggccaccagtcgttaccacaaccttctcgccgccacgcttgaacttgccggcatacctgtcgcggtggtcaacccccggcaggtcaaaaacttcgcccgtgcactgggcaccctcttcaaaacagacccgaacgatgcccgtgtcatctgtgaatttggtcgtcgtatggagcctgaagtgcggcccgccccggacgaacagacgcaacgcctggcgatgatggtgtcccgccgccgccagcttgtggacaaccggacgatggagcagaaccgccacggcacctgcgatgacgtctttatccgggcggggataaaacggcatatcgactggctgaatggcgagataaaagacgcagacgacgacattgaccggcagataaaagtgatgccgttgtggcgggaaaaagtgaagctgctggaagaggtgaagggtatcgggaagaccacgctggcggtgctgctgtcgatgttaccggagctgggaaaactgagcagaagaaagataagtgcgctggtgggtgtgtgcccgtatgcaagggacagtggcaaaatgaaagggaaacgctgtatctggggcgggcgaagcgccgtgcgggcagcgatgtatatggcggcgatgtcagccgtgcgttacaacccgaccatcagggcgttctttgagaggttaagagccaacggaaaaccgtacaaggtcgccatgactgcctgcgtgaggaaactggtgactatcctgaacgctatggtgcgtgacaatacaaaatgggcgacagattaactgccacccgttgactttgaacacagctg

SEQ ID NO: 9077 - DNA, 1378 bp, unidentified
  source 1..1378: mol_type = unassigned DNA; note = element_e39b0e2
  misc_feature 1..3: note = core
  misc_feature 4..86: note = LE
  misc_feature 87..1112: note = CDS
  misc_feature 1113..1378: note = RE
  misc_feature 1086..1365: note = bridgeRNA
tgatggggtggatgccccctcccgacggcgtcgaagtgtgccaggctggtgatgttgcacgaccagccacaacggagaaggcatccatggagaaggttacgatcattgggatcgacttggcaaagcgggtcttccaagtccatgcggcggcgaaggacggccggccggtattgcgcaagaaggtgtcgcgttcacagttgctcggcttcctggctaagcagccgcctgccgtggtggcgatggaagcgtgcgcgacggcgcacgattggggacgggccatcagcggtctcgggcacgacgtgcggctcgttccaccgatctacgtcaagccgtttgtgcgtcgccagaagaacgacgccgccgacgccgaggcgatcgtcgaggcggcctcaaggccaacgatgcgctttgtggcgttgaagacggaagagcagcaagcgcgatccatgatctttcggacgcgcgaccttttggttcggcagcgaacccagctggtcaatgcgctgcgcggccatctggcggagcatgggattgtcgccgcacacgggcttgccaaggtgaaagtgctggcgactgcgatgcgagacacgggttcactccatccgctcgtgtgcgagctgggcgagcgatacctcgagcatattgcccgccttgatgtcgagattgcggagctcgacaagagattgcggcgatggtccaaggacgatgagacggcgaagcgtcttcagagcatgccggggatgggaccgatcaccgctgcggcgatcgaggcctttgcgccgccgatggcgaccttcaagcgcggccgcgactttgccgcctggctcggtctggttccgcggcaacacacgactggcgggaagccgcgactggggcgcacgtcaaagatggggcagcgcgacatccgccggcttctgatcatcggcgcaatgaccgtcgtcagatgggcagtccgcaagggcgcggcccaggggtcgtggctggctcgaatgctggccgagaagccccgcttggtggtggccatcgccttggccaacaagatggcccgctcggtctgggcgatgcttagcaagggcgaagactatcgaggatcagcgctggcgccggcctgatcggcaggcagcttccgctggtgcgtcggcgatgaggaggtcgaggaacggtaagggcaaaccgatcggacaggtcgaggccaggaaaagcaattagggtcaacgagcttaagccgctcgcagttttgatctgcgcctggtctacgtatctccatactggcccgcggcatgtggcaaagccgcacttcgaggcctgacacatgaccgcacccgatcatcgccggcgccgctaacaaacctcttgcatcgacgggggcatccacaca

SEQ ID NO: 9078 - DNA, 1569 bp, unidentified
  source 1..1569: mol_type = unassigned DNA; note = element_e39b825
  misc_feature 1..3: note = core
  misc_feature 4..273: note = LE
  misc_feature 274..1470: note = CDS
  misc_feature 1471..1569: note = RE
  misc_feature 8..251: note = bridgeRNA
cttgtatatttagtttactcaattaatcagctattccgttttaattagctgttattttatctataattgagttaggtgctgtggactagtattacctccaccagattcctttggaatactgttagtgaaaggctctagccacagctctttgtcaaattgttaataagtttgttagcgcgtagctttgactatgacgcttgatttttcacaaggttacataggcaatgagtaagtggaacatggcgcataattagaatttaggagttgatttttatgctttacgttggtattgatattgctaaatacaaacatgatattgccattattgatagtgaaggaactatttttgttaaacatcttcaaatcagtaatgatcgagagggattcactaagcttcaagcaactttgaccaatcttcaaaaatcaacgggagacaaacttcaaattgccttagaagatactgggcattattgctttaatcttttgcgatttttacgtacaaatggttatccaacacttagttataatccgttattgattaaagaatttgctaaacatcattctttacgtaaaacaaaaacggataagaaagacgcaatgactattgctcgtaaattaaaagacgacataaataaacaactttttcaaacggaaactattataagcgaactaaaatatgccacaagaaatgtcgctagaattaaagaaaattgtacaaagcaaaaaataaactacactcgtttgttagatattcttttcccagaactagcaacgtttttaggttcgcctacggcgaaacatgatagttgtatttatgccatgttaaaggaatatccttcacctaaaaaactaaaaaatgctcatttaactaaactaacaaacttactttcaagtcattcacgtgggcattttggaaaagaacaagcgcaagctttaaaaaatttagcttctacatccattggtagtgactctccctctctagaatttgaattacttcaaacaatcgacaccattcaatattttactaaccaacgaaaattagcagataaggtcgttgctaaactgatgcaagaaattgactcaccaattttatctattcctggaatcggtgtgaatctgggtagcattatactcgctgaaattcgcgacattcataattttaaatccccaaatcaattacttgcttacgcaggttgtgaaccatcaattagtacttctggtactaatcaaatagaatcaggtcatatggtaaaacgcggttcttctcaattaaggtgggccctacacgaagccgctaggctcatgtctgtttggtctccatccatgcgactctatttagagaaaaaacgttctgaaggaaaacattacggtgtcgcaattagtcatgttgttaaaaaattagttcgaattattttccaactcctaaaaaataatgaaccctacgatgaagagaaaatgattgttaactaacctacctgaaaaaaatttcattttgttcaggtttatttgttatactctaaaatcagttattttattttttaatttttctcttgacttaatatagtttgt

SEQ ID NO: 9079 - DNA, 1451 bp, unidentified
  source 1..1451: mol_type = unassigned DNA; note = element_e3e76a8
  misc_feature 1..2: note = core
  misc_feature 3..161: note = LE
  misc_feature 162..1199: note = CDS
  misc_feature 1200..1451: note = RE
  misc_feature 1217..1446: note = bridgeRNA
agatggggtaacgggccggccgatccagccgcccgctcgctacggcgcaatttgaaagcgcgctcgcgggcggcttttctggaaggcggtcgtccctcaaaatgatggtgtcaataaccggagtcgggcaggcccgctccaagcatcatcgagggacgaccatgtactactatgcaggaatcgacgtgtctttggaatactcgagcgtttgcgttgtcgatggcaccggcaagattatgcgtgagaggaaggtcgcgagcgaaccgggggcgctgatcgactggttccgatcgcaaggcctggcgcttgagcggatcgggcttgaagccggtcctctgtcgcaatggctatacgcggctctgcgggaggcgggctttgcggttgagcttttggaaacccggcacgtccgcgatgccttcaaggcgatgccggtgaagtcggaccgcaatgatgcccgcggaatcgcacatctgatgcggctcggctggttccggccggtgcactgcaagtcgatcgaggcgcaggagacgcgggcggtcttgacggcgcgcaagctgctgcagtcgaagctgcgggacatcgagaacagcctgcgcggcatgctgcggggcttcggcctgaaggtcggcaaaaccaccgagcgtacgttcgccgaccggatcagggaactggtcgcgggccaccccggacttgaactggtggcacaggcgctgctcgaagcccatgccgtgctacggcgcgagttcaatggcctggacaagcaggtccagaagctcgccagatcgcatccatcggccaagcttctcatgacggcgccggccgttggtccgatcgtggctctcacctatgcctctgcgatcgacgatccaaaaaggttcagttcatcgaaggcgaccggcgcgcatttcgggctcactccgaagaaataccagtcagggcaaaccgattataccggccgcatcagcaagatcggcgatgcgtccgtgcgcgaggccctctaccaggccgcccacgtcatgatgaccaagccggtcaggaattgctcggcgctcaagagctgggccatgcggattgctaaacgtgcgggcatgcgtaaggccaaggtggctctggcgcgtaagctcgccgtcattcttcatcgcatgcttgcagacgcaaaaccgttcattccgatggctaagaccgccgcggcaacttaagcaaggagcatcaatcgggttctgggcggccacgacaccaggcctccccgagcgaagtccctcgccgggacgacggatccggtcaggccgccatccgggaagtcggctcacaaccacgcttccgtagattggccggccggctcctcaatgcaccccatgaggtgacggcctcagcgccgatcccgtacagaagcaagtgcccggcaagagacgacgcaaaaaagggattgactaaccaaggcccgttacaga

SEQ ID NO: 9080 - DNA, 1519 bp, unidentified
  source 1..1519: mol_type = unassigned DNA; note = element_e3e8376
  misc_feature 1: note = core
  misc_feature 2..227: note = LE
  misc_feature 228..1454: note = CDS
  misc_feature 1455..1519: note = RE
  misc_feature 14..242: note = bridgeRNA
ctacttgttgacttgtgccaggaccggtgcctggcgaggctcggtctaggtgcccggctcgtcgctctcaattcggctgcccgcgctggtcgcgtggctctgatctggcctgcgcgggccgggtgccgaggtgagcggggagaggctcaagaggggtttgctctgctcgaagtagcggtgccctccttgctcgaagactgtcccaagagcgagcaggaggactggggatgagcctggtagttatcgggatggacccgcacaagcgctctgccacgatcgaggtcatggccggtgatgaggctgtcctgggcggcggccggtatggcaccgacgccgctgggtatgcggcgatgctggcggcggtgaaggcatggccggagcgaatctgggcggttgagggatgccagggcatcggcaggcacctggcgaacaggctgctggctgatggcgaacaagtcgtcgatgtgccgcccaagctgtctgcccggatacgtgtatttgccaccgggcagggccgcaagaccgatgcgaccgacgcgcactcggtcgcgctggccgctacccgcatgggcaggctgcggccagttgccgacaacgcccagctggcggtgctgcggatcctggccgaccggcggcggtccctgggtgaggatcacacccgcatggtctgccagctacaccatttgctgctcgaactcatccccggcggggcgaagaaagacctgtccgcggcccaggccaaggccctgctggccaaagtccgcccccgcgatgccgcgggcaaggcccgccgccgggttgccgccgagctgatcagcgacctggaacgcatctaccagcgcaagaaggccgccaacaaagaactccgtgacctgctcaaagccaccggtagcacactgacccgcctgcacggcatcggtccctccggcgccgcccggctgctggtcgaagttgccgacatcacccggttccccagcaaagcgcatttcgcctcctgggacggcaccgcaccgatcgacgcctcttcgggtgaccaggtccgccaccggctgtcccgggcgggcaaccgccaggtcaaccgcgccctgcacatcatggccgtcgtccagctgcgcacccccaccgaaggccgcgcctactacgaccacaaagtcgccgccgggaaaacaccgatggaagcgatgcgggccctcaaacggcggctctccgacatcgtctaccaccagatgatcctcgaccaccaggcagtgcaaacgggcccgggaggacacctgggggcggctactggctccagcgcggccggcttcaaccccagcaccggcgcttcggagaagtcacttcccggacccgccaaccaccgaccctaccccggcaggccgatccgttcttcaggtcgttcccgccgcacccagcaagcgccggcccgcagccgcggtcaaacgcactttgcttgaccgcggcgaggaccggagcacactcacaaaggcgggaatgaccccctcttgacacagaggggagc

SEQ ID NO: 9081 - DNA, 1351 bp, unidentified
  source 1..1351: mol_type = unassigned DNA; note = element_e3e9c23
  misc_feature 1..2: note = core
  misc_feature 3..275: note = LE
  misc_feature 276..1337: note = CDS
  misc_feature 1338..1351: note = RE
  misc_feature 14..271: note = bridgeRNA
tctgtgagtgtgtcgttaaggcagttctgggtgggctgccgccaggatcggtgtcggcgggctgggtgactcgctacggatctggccgctgcggcgtgcctttcatctgacctgtccccagatcgccggccccggcctggcccaccgcgttgacctgatcagaagcctgtccgccagctggcgtgacccgtcacagatgtgccgcccggtgactccgcccaggccggtgccgacgtcggccctgaccctggaaggagacatcaggccgcgtgaccatgctggcagaggtagtggacgctgtcatcgggatcgatacccaccgggatagtcatgaggtggcgatcgccgatccggccggacggccgatcgcggtgctgcggatcggcaacgacagcggcgggttcgcccagctgctggccgagatcgccgaggtggcgcccgggccgcgggtggcggtctcggtcgagggcacccgcagcttcgggatcgggctggcccgggcgctggccgccgcgggcctgctggtgctggagtgtgagcagcccgcctgtcggcagcggcgcgggaagggcaagtccggcccgatcgatgcgcacctggcggtgctggccgcgctgcgcctggacacgggccggctgctggtgccacgggccgacggtgaccgggaggcgctgcggatcttgctcgtggcgcggcaggagatcaccgaggcccgcaccgcgcagatcggacggctgcgtgccctgctgctggccggtgatgacaccgaccgccaggccgcccgcacggccctgacccagacggccttggccgccctggccgggcgggtgctgcccgctcatgccagccgcgagcaggccgtccgccaggccgagatccgccgcctagcactcgcgctcggccaggccaggcaggacctcaccggcaaccgtgcccagctgcaggccatcgtcgatgagatcgctcccggcctgaccagccgcttcggggtcgggccggtcagcgccgcgcaggccatcgtgagtttctcccacccaggccggtgccgcagcgaggctgcgttcgccgcgctgagtggcaccagcccgctcccggctagcagcggcatgaccgtccggcaccggctcaaccgcggcggcgaccgggcgctcaaccgcgccatccacgccatcgcgctggtccggatgcgcacctgcccccggacccgcgcctacatcgcccggcgcagcaccgagggcaagaccacccgggaaatccgccgctgcctcaagcgttacatcgcccgcgagctctaccggcagctcacccgctcgatgaatcctcccgtgggtccttgacaaacatagaagcg

SEQ ID NO: 9082 - DNA, 1380 bp, unidentified
  source 1..1380: mol_type = unassigned DNA; note = element_e3ec5e1
  misc_feature 1..3: note = core
  misc_feature 4..89: note = LE
  misc_feature 90..1112: note = CDS
  misc_feature 1113..1380: note = RE
  misc_feature 1111..1367: note = bridgeRNA
tgatggggtggatggcccctgtgtccggcgtcttagcgccttagggtggccgttgcttgaagcgcccacctaaacaggagccatccaccatgaacgttaccacgattgggattgatatcgccaagtcggtgtttcaggtccacggcgtcgacgccgttggccaggtcaccgtcacgaagaagctgcgccgcgcggaggttatgaggtttttcgaggcgatccctgcatgcctggtcggaatggaagcctgcgccacggcgcacttctgggcccgtgagctctcggcactgggccaccaggtgcggctgatgccgccctcatacgtgaaggcctatctgcgtcgacagaagaacgacgcggccgacgccgaggcgatctgcgaggcggtcacccggccgaccatgcggttcgtgccgatcaagagcgccgagcgccagggtgttctcgtgctgcaccggacccgcgagctgctggtgcgccagcggaccatgctgatcaacgccattcgcggccactgcgccgagttcgggatcatcgccccgcagggcgcgcgtcgggcctgcgaattggtcgagcaggtccgtcaggcgggagctggcgagcttccggagctggcccgatctgctctgctgagattggccgaacagctctgcactctcgccaccgaaatccatgggctcgaacgccagctgctcgcctggcatcgccaggacgaggcaagccagagactggcgaccataccgggcatcggcatcatcaccgccaccgcgctttcggccgccgtgaccgaccctggcctgttccgctccggccgtgagttcgccgccttcctgggtctggttccacgccagaactcctcgggcggcaaggaccggctcggccgcatctccaagatgggcgacggctatctgcgcaagctgctggtggttggggcgacctcggtgatccgtcgtgcccggaccagtacatcggcatcggcgtcatggatcaacgccctgctggagcgccggccggcacgcgtcgtgaccgtcgccatggccaacaagaacgccaggatagcctgggccgtgttgaagcggggcgaggtctaccgcccgccagtcatggcctgaccgagaccgcggcgacccggcgtcgccgctccgaactgtaagggtgcacaagggatgatgatgacgatctgaacgcggccgcaggccaggacaacccgaggtgctgtcggagccttgagctcgatggactgatagggacctggctagcggactccatcagggccagcggacatcagcgccgcgccaacaggccggacagatgaccgcaccccgacagatcccaacatcaaaccaaattcacacttgcagcgcgggggccatccacaga

SEQ ID NO: 9083 - DNA, 1318 bp, unidentified
  source 1..1318: mol_type = unassigned DNA; note = element_e3ed8b3
  misc_feature 1..2: note = core
  misc_feature 3..71: note = LE
  misc_feature 72..1109: note = CDS
  misc_feature 1110..1318: note = RE
  misc_feature 1084..1300: note = bridgeRNA
agatgtatggactcccacttccctcaggagtaacgtaataagcgataaaacttttaccaaggagcccatacatgtttgattgtaatgtaatcacaattgatttagcaaaaaatttatttcaggtttgtaaaacagataagaatggacatgttatttataacaaagcaatcacgagagctaaacttaaagaattgttaattaaagagaagcaatctttagttgctatgggatcgtgtggcggaacacattattgggcacgctttgcgaaacaggctggtcatcaagtaaaagcgattaatgcacgacaggtaaaagcattccgtcaagggcaaaagacagatgcgaatgatgcgctggctatttctgttgcggctcgcctgcctcatattaaaggaagtcgtttactttcagcccatgagcaatgcctgcaaggcattgaatgtatgcgtgatttattggtcaaacaaaaagtaagtttaagtaatcaactcagaggcttacttttggagttagggtatccaatagctcaaggcgataccccgttaattcacgctatacctgagatactagaagaggcagaaaatagtttaacagcctcatttcgtttttcaattcacctcctttttaaacgctttaaggagacaattgaagaagcaaagctgattgaaaaacaattgcatgaaataattaaagaagataaaacatgtaaccgcttacaagccttagagggagtcggtccagtctgtgcaattttgataaaaatagcgctaggtaatgcaacacatttcaaaagtggtcgagaagccgccgcatgttttggtctaacaccagtacaacatagcagtgggggtaaagaaaaaataggcgcgatatctaaagtgataggaaataagaagctgcgaagtgctttgtttaaaggtgcattagcggttgtttcccaactagaaaaaagagaaagtcgcagtgaaaaagatgtatggttgaaagcattaaccgcgcgtcgaggaaagaaagtagcagccattgctttagcgaataaaacgataagaacggcttttgcaatgcaaaagcatgataaagaataccagccacaattacttgcggcttaaaatttgtcaataagagcgcttaaaataggtaagaccaaccttcaatagactgttagggcctgaagtttcataaactgctcaacagaaaagtcatgaaggtgcgaatacataagaggccagaggtagcccctcaatttgagcccgtatataagctagcatctaaatttattttaactttttctttttgacattgacggagagtccatata

SEQ ID NO: 9084 - DNA, 1400 bp, unidentified
  source 1..1400: mol_type = unassigned DNA; note = element_e401896
  misc_feature 1..2: note = core
  misc_feature 3..81: note = LE
  misc_feature 82..1116: note = CDS
  misc_feature 1117..1400: note = RE
  misc_feature 1114..1387: note = bridgeRNA
tgttggtgtggacggcccccggcggcatcgagcgtgccagaatgaggtcgtgtgaatgatctcagacaaaggggaccgtccgtggaccagattagccgaattgggatggatacgtcgaaacacgtttttcagcttcacggggtgaatgccgccgaggcgccagtcctgcgcaagaagatgcggcgcaaggagatggtggcgttcttcaagaagctcgcaccgactgtaatcgccatcgaggcctgcggtgccagccatcatttggcacggttgctacaatcgtttgggcatacggtgaagctgatcgcaccgcagctggtcaaaccctacgtcaagcgcggcaagaacgatgcggcggacgccgaagcgctgtgcgaggcgatgagccgaccgacgatgcgcttcgtaccggtgaagacgaccgagcagcaagccactttgatgctggtgggcgtgcgtgaccggctgatccgcaatcgcacgcagctggctaacaccatccgcggctatgccgccgagttcggcgagatcgccgccaaggggatggcgcacctggttccgctactcgagcgcatacaggccgacgagagcctaccggtcctggcgcgcgagctgtttgccatccaagcgaaggaatacgtagagttacagacgcaaatcgacgaggtcgaggccaagctcacggcctggcaccgggccgatgaatgcagccgccgtctcgctaagatcccgagtgtcggaccaatcggcgcggtgctgctacgaatgaagactccggatcccgcccaattccgatcgggacgccagttcgcagcctggatcggtttaacgccaaaggatcattcgaccgcgggcaagatcaggctcggcgtgatcacgcgcgccggcgacgagggattgcgcagcgtgctcgtggtcggcgctacctcggtgatccaacatgctatgcgcagcggcaaggcgtcgccctggcttgccgcacttctcaagcgcaagccgccgaagttggccgccgtggcgctggccaacaagaccgcgcgcatcgcctggaagatgatgctgacaggggaggattacagcgcaaaatccgccgccaccccagccggtgtggtctagagattggccagacacggggagcaactgaactgcaaccgtgctgagccgatgccagaacttgcaagataaggagcagatggtgtgatcgatcgatccacgacacgggacactccgatagacccaatggcctctttcgaaggtcgtaatgttgtttggaacccttgtcgcggaaaccatcttggccagcgttcatgtgcgagcgcaccgacaggccggacatatggacgcaagcgatctgatcaaaacgctgcaaaaatccttgcaaggagggggccgtccacata

SEQ ID NO: 9085 - DNA, 1394 bp, unidentified
  source 1..1394: mol_type = unassigned DNA; note = element_e4020d4
  misc_feature 1: note = core
  misc_feature 2..92: note = LE
  misc_feature 93..1127: note = CDS
  misc_feature 1128..1394: note = RE
  misc_feature 1164..1386: note = bridgeRNA
caatggtatggacgccccacctctttccctcgtggcgccgctgtgccaaattggcggtgcttgatcaaccgccaacctgaggagcattcgtcatgagaattacgacagtaggtatcgacctggccaagaacgtgtttcaagtgcacggcgtgaacgagcatggcaagccggttttgaagaagcaactcaaacgtgaccagctggtcacctttttcgtcaacctcgagccgtgtctgatcggcatggaggcctgcggcggcgcgcaccactgggctcgcaagcttcagtgcctcgggcatgaagttcgactgatggctccgcagttcgttaagccgtacgtcaagtcgaacaaaaacgatgctgccgacgcggaagcgatctgcgaagccgtggccaggcccaacatgcggttcgtgcccatcaagaacattgagcagcaatcggtgttggcattgcatcgcgtgcgacaagggctcgtcaaggcgcgaacggcgcagggcaatcagatccggggcttgcttgccgagttcggcctggtcattcccgtgggcctagccaacatcgccaagcgagtgccggagctgatcgaagatgcctccaacgagctaactggctcgttcaggttgctggtcgatcggctgatggagcgcctgaaggagatcgacaagcaagtcaaagaactggaattgctgatcaggagctggcatcgcgccagcgatgccagccgcaagctcgagaaggtccccggcatcgggccgatcacagccagtgcgctcgttgccacgatcggcgacgcaaagaatttcgacaacggaaggcaggttgcagcttggctgggcttggtgcctcggcagcattccagtggcggcaaggcgaatctgcagggcatcagcaagcgaggcgatacgtaccttcgcaccctgctcgtgcaaggggcacggtcggtgatcctcagcgccgcgaagaagctcgacaccaccagttggctgcacaagctcatggagcggcgcaacacgaatgttgcagcgattgcgctggccaacaaaaacgctcggacggtatgggccttactcgcccacgaccgcgagttccgccctgactattcccgctcggcggtggccgcgtagaaacgcctcggtcataactgaactaacaaaagacttcccggttgctcaggcgagcatgcagtgatggcacgataggtaagaccgtggtcgataaagcccgcaccagtcaacgcacttcgagtgcaacatggcaatggggcgtcgatcagcagattccattagggacagcgggcaactcaacgccgcaatcaaagtccggatgtacagcagcaatctttaccttcgagctgaatcgaattgatcgcttggcataggggcgtccatgta

SEQ ID NO: 9086 - DNA, 1557 bp, unidentified
  source 1..1557: mol_type = unassigned DNA; note = element_e402d67
  misc_feature 1..2: note = core
  misc_feature 3..260: note = LE
  misc_feature 261..1394: note = CDS
  misc_feature 1395..1557: note = RE
  misc_feature 3..237: note = bridgeRNA
cttgtatgataattaggaagttaattatcacatgtttcctttcttttaatatcgtggttcaatacattcagatactgtggacttttgattttgccctgtagctttgactactctaaggagtgtattgccgctacctttatctgaattgtttatagctggatgttaccggagtaatccgagttcttatttccatcaagtctacgatgataatcgctggtggatatcacggtatcagactttagaaagggaggtacaacctcatgatttacgtaggcattgacattgcaaaactcaatcactttgcctcagccatatcttctgatggtgaagaactaatcaagccgttcaaatttacaaatgacaatgatggcttccaactgctgatttccaagctagctcctctagacaaggacagcctcatcattggtcttgtatcgacggcacactacggcgacaaccttgttcgatatcttgttgccaagaattacaaagtgtgtgtgttgaaccccatcaagacttctactatgcgtaagaacaacattcgcaaaacgaagactgacaaagtcgacacatacatcatttgcaaaactctcatgatgcaggaatctctcagatttgtgaccttttatgatcttgacctgatggacttaaaagcccttggtcgattccgtcagaaaaccattaagcagcgaactcgtttaaagattcagctgacttcttacgtggatgagatattccctgaattgcagtatttcttcaaatcaggtctgcatcaaaaatctgtctatgcgcttctcaaggaagcaccaacaccggaagctattgcttctatgcatatgactcatctggctcatcttctcaaagtgaactcgcatggacgctttgacaaagagatggcacagcagttaagagttctcgcacagaagtctgtcggtgccagcgacagttctctatctatccaggtaactcacaccatacaacaaatagagttactcgatagccaattagaaagagttgaagctgaaatgacggaaatcatgaaattcaatgattctgtcattatgaccattcctggtatcggatatatcaatggaggaatgatacttggtgaaatcggtgatattcgccgtttctccagccccaacaagctgcttgcatatgccggtttggatccttctgtctatcagtctggaaactttcaggctaagaagaccagaatgtcaaaacgtggatctaaagtcctcagctatacacttgttaatgcagctcacaatgttgttaaaaacaatgccaccttcaaggcttactatgacgcaagatggctgaaggccggactcactataatgctcttgggcactgtgccggcaagctcgtcagaatcatctggaaaatgatgactgacaacctggaatttaacctcgattaagaggtctggatacctacatcatagatttgtttaaaagcacccaccagggatccttattaaggttacccatttttacacgaaaaggatttattaatttccagctaatttaagcttgacttttcatagctggt

SEQ ID NO: 9087 - DNA, 1619 bp, unidentified
  source 1..1619: mol_type = unassigned DNA; note = element_e4057d2
  misc_feature 1..2: note = core
  misc_feature 3..251: note = LE
  misc_feature 252..1487: note = CDS
  misc_feature 1488..1619: note = RE
  misc_feature 7..225: note = bridgeRNA
ttcgtattataaaggtcagccagttatttctggttgaacaatttttatatcgatatatgataacggtatccggggtagaacgtacctgcccgtggggcttaagatcccgtcaactaaacagttcgccccctacttgcttaaacatgatttggctggttggaaccaagatctcgtataacaagcgaagctatgatactgcaagaaggattaggggttaccggcaaatattatgtttttggaggagataaaaaatgaatccagtagttggtctggatgtagctaaaggtgaaagtcaggttcaagcattcttggataagaagaagccttataaaagaagttttaaagtagcacataccattgaagggctagagagcttacaccaatatcttagagagatagaaaacttagcaggaattcgacctccggtcgttttagagtctactgggcattatcatactccagttgttcagtatttcgaggaaagaggttatttactaattatcattaacccacttgtctcctatcgagcaaagagctcatctctacgaaaagtaaagacagatgtgattgatgcttaccatctctgcgagctgtattataaagaagatttggaaccaaataaaaaacgaggaattcaactcttaaaccttcgtaatcttacaagacaacacgaaaatgtaacgggtatatatgtacaaacgaaacttcaatttcaagcagttcttgatcaggctttccctgagtatcatggggtttttggggacttatattcagttgtctctttactaaccttattagaatttcctacatctaaagatgttttggtagtcgatgaagaagcattaggtaataaaatcgatgaattatgtacaagtcgttcaagaaagtgggcaaatacaaaggcaaagaaacttatagctgcagcagctaaaaatccctttcagacaacactgtatcaaagtcacataatgagcttagaaatgtatatcaaaatgcttatggaataccaaaagcacctatcaaagttggatgaagagataggtgctttggctaaagaaattgaagaatataagataatccaatcaatccctggtatcggtgaaaaaatcgcggcaacgattatttctgaaattggtgagattgatcggtttaatcaccctaaaaaactcgtagcatttgcaggaattgatcctagtatctttgaatctggtagattcaagggatccgtaaacaaaataaccaaaagaggttcgagtagattacggcatgccctatatatggctgttcgatgtgccattcgtgattgtcgcaaaaagaaaacgactgatgaagtcatccctcgtaataagagattacgtgagttctatgataagaaacggaaagaaggaaagccctataaagtagctgttatagcatgtgctaataagcttctacaatggatttatgcactattacaaaacaactcgactttccaagatctagactagtttgaaagtgcaactaaatatcacaaaactttccaaacgctgttcgtagggggctatttggtatgcatatttttagtatagcatgaaatatttttagtttttattgataaatgttgacaaactattagctgg

SEQ ID NO: 9088 - DNA, 1223 bp, unidentified
  source 1..1223: mol_type = unassigned DNA; note = element_e40bb4a
  misc_feature 1..2: note = core
  misc_feature 3..209: note = LE
  misc_feature 210..1124: note = CDS
  misc_feature 1125..1223: note = RE
  misc_feature 22..202: note = bridgeRNA
cttatctgatcggaatgtggcagcgtaggtgtcgagagccggcgtgggccgccgtatgagcctggatctggacgatcgccatgtagcttggcgcccacgccggaatctcccttgatccgcccgaacagttgctggagcagacactcgcagtgataagactgggcaagcgggggagctctcgacccttccagactatacggagtccggtgatgaacgggatcgggattgatgtcagcaagcgccagctggatgtcggcacgacggatggagagactctccaggtcagcaataacctcgccgggttttctgaattggatgtttggctgagaaaacaccctgccgcccagatcgtgctggaggctaccggcggctatgaacagccagtgctggatttcctgcacaaggctggccatccggtggtccgtgccaatgccctgcgggcccgcaggctggcccaggggatgggccatatcgccaagacggaccgcttggatgcctacgcgctggcgcagatggcggcgctggtgaaactgcctccctatcagccgctagagctttggcagcagaagatgcgggagttcgtgcgagcgcgtcgtcaggcgatggaaatgttgaccatcgcgcggcagcagcaggaaatggtcggtgatcgtgaattgcgccggctgctgcaggccaacatcaaccgccagcaggcgctggttgaacggctggggaagcagattgccgagcaggttgcccagcagcctcaactggctgtcctgaagtcgatgaaaggcgtgggaccagcgctgcaggccgtactggcaagttatctgccagagcttggcaggatcactggcaagcgcatcgccagcctggtcggtgtggcgcccatgtcccacgacagcggcacgatgcggggaaaacgaagcatccacggcggtagagcagagatccgccaggtgctctacatggcggcaatgtcggccatgcggcatgaacctcgattgcgcgacttctaccaatcgctgcgagcccgcggcaaggaaggcaaagtggccatcgtggcggtgatgcggaagatgctggtgatcctcaacgcccgcgtgcgtgacgctgaaagcggaccgatccccgcttaataggcgcgtatatgggcatcctcagaggctgccggccagcggccggcactaccgtgcgcgtctgctggaagggcctgagcccctccaacaacacagttg

SEQ ID NO: 9089 - DNA, 1376 bp, unidentified
  source 1..1376: mol_type = unassigned DNA; note = element_e40caf6
  misc_feature 1..3: note = core
  misc_feature 4..76: note = LE
  misc_feature 77..1111: note = CDS
  misc_feature 1112..1376: note = RE
  misc_feature 1138..1373: note = bridgeRNA
tataatggaatggtcgctccttccctgaacgcacggtaggatatcactgataattctaccccagcggaggcgcgatatgactgttataacgattggcatcgatttggcaaaaaacgtatttcagatccacggcgttgatgaaaacggtaaatgtcagctcaaaaaaaggcttaaacgttcacagatgacgacattctttgcaaacatgaaaccctgtcttattggtatggaagcctgtgccggagctcatcactgggcgcgcattcttattgcgcagggtcattctgttaagctgatgcctccgcagttcgtaaaaccttacgtgaagacaaacaagaatgatatggcggatgctgaggcaatctgtgaagctgtatcgcgtccgaacatgcgcttcgtcagtattaaaacgtctgaacagcaatcgttattatcagttcatcgtgcccgtacggggtttgtcaaagcaagaacagctcaaatcaaccaaatcagaggattactggctgaatttggtattgttctcccgcagggagctgttgcgataaaccggcatgtaccggaattacttgaagatgcagataacggattacccatgtcattccggcaccttctgtcatctctctataaaaatataaaacaattaagcgaacatatcgaaacgctggaagcggcaatcaacgaacagttcaggcaggatgaactgtgtaaaaaaatagccgcaatcccgggtgtgggagtactcaccgcaaccgcgattgtcagtacagtcggtgatggtaaaggctttaaaaatggccggcagcttgccgcatggcttgggttggttccgttacagcattccagtggaggtaaaaatgtactgggaagaataagtaaacggggtgacgtttatatccggacacttttaatccacggtgcccgttccgtcatagttgcacggaaacacaaactcctgccgggaagctggctgagcaggctcctcacccggagaaataaaaatgtggcggcagtggcactggccaacaaaaatgccagaatgctctgggtgttactgacaacagataaagaattttcacctgatcaaaccatcggtgctgtttatatgtaaataaacaacaccttttaaataaaacatcaacttactgattgctaagggtaaacgtgaattaaaggccagactggtaagaccgcgactcaatgaacctgtatttaacatggcatagcttcgctaatgcgccattatgattaggactgagtctgcgaattcctttagggaccacggctttaagccgattctgagtccggatgtatgactgcaatcttacacggctgacttttttaagacgggtacttggcaaacaggagcgaccatg

SEQ ID NO: 9090 - DNA, 1520 bp, unidentified
  source 1..1520: mol_type = unassigned DNA; note = element_e411f56
  misc_feature 1..4: note = core
  misc_feature 5..253: note = LE
  misc_feature 254..1495: note = CDS
  misc_feature 1496..1520: note = RE
ctcactggattaccttcctcgcgtcggcaggaacagatggcctgctgatgcatccctggtccccaccggaccaccgccacgagcgctcgaccgttgttgaggtcctgcatgagttctgcggggtccggtggcccaggaccctcggaccggctacagggctgtgcgccagcgagcgccgatcagtgagcgaccggcggtggggtcccgggaccaccgggtggctccccactgctgcaacagcgaggaaaccaacatgagtgtgaccccgatccatccaccgatgcgagtctgcggcggcatcgactgggccaaggatgaccacgcggtgtgcatcgtcgacaccgacggtgaggccatcgatcggttcaccatcacccacaccgcggccgggctgcggcgcatggtcgcccggctgctcaaggccggcgtggaggaagtcggcatcgaacgaggtgatggtcccgtcgtcgacgcgctcctcgcggccggcttcacggtgctggtgatcgctcccgcacaggtcaagaacctccgctcccgctacggctcgacggggaacaaggacgaccggttcgatgcctacgtgctggccgacgtggtccgtaccgaccgacgacgactcaccccactcacccggtcgagcccggccacccaggcgctgcgctccagcgtgcgtgcccgacgtgacctggtcgagcaccgcgtcgcggccgcgaaccagctccgcgcgcacctgcagatcgtgttccccggtgtcgtggacctcttcgctgccctggactctgcgatcagcctgtcgttcctggagcggttccccacccagaccaaggccgattggctcaccgtggaacgactcggtgcctggctgaagaaggtcgcctactccggccgcaccgaccccgccgtgctgcatgctcgtctgctggccgcgccccggggaaccaccggccccgaagccgaccaccacgccaccaccacactggcgttcgtcgcggtcctgcggtccctgaacgcccagatcgcagtcctggctgactcgatcgctgagcagctcgacgtccatcccgacgcgcacatcgtcaagtcgctgccccgcgccggcaccgtgcgcgccgcgcggctgctcgccgagatcggcgacgcccgcggcaggttccccaccgccgactcgctggcctgcctggccggcgtcgcgccctcgacccgccagtccggcaaggtcaaagcggtcaccttccgctggggagccgacagggaactcagagacgccctgtgcgacttcgccgccgactcccgacacgacaacccctgggccgcgcagctctacaaccgagcccgagcccgcaaccacgaccacccccacgccgtgcggatcctcgcccgagcctgggtcgacatcatctggcgctgctggcaagacggcctcgcctacgaccccgaccagcaccgcgcgctccagcgcgtcctcaacgagcaagcgctcgcggccgcctgaaaccacagaggttgacacagggcaa

SEQ ID NO: 9091 - DNA, 1830 bp, unidentified
  source 1..1830: mol_type = unassigned DNA; note = element_e4130f6
  misc_feature 1..3: note = core
  misc_feature 4..234: note = LE
  misc_feature 235..1434: note = CDS
  misc_feature 1435..1830: note = RE
  misc_feature 1..218: note = bridgeRNA
cccgttaccttcttcgtgatcccgctacggggtcacggtcgccaggcccggtatgacttcttgcccctgtctttcgcatgatccggggggtggtgtcgccgggtcctggtggtgtcgatggaccgctgatggggacagggccgagcgcaggtctcttcgtaacgtgggtgccggacgtcgacgccggatcggcgaccattcagggtgcgacgcgatgaagggacactcccgaaggtgacacaggcgtatgccgtgttctgcggcgttgacgtgggcaagggcgagcatcacgcggtcgggctggacccgaccgggaaacggttgcacgacagagcattacccaacgacgaagcccgcctgcgtgcggtgttcgagaagctggccgcacacgggccgctgctgatcgtggtcgatcaacccaacaccattggcgcgttgccggtgaccgtcgcccgcgccatgggccacgacgtggcctatctgcccgggctgtcgatgcgccgtattgccgatctgtatccgggacaggcgaaaaccgacgctcgcgacgcgttcatcatcgccgacaccgctcgcaccctgccgcatacgctgcgccgggtcgatgtcggcgatgaagcgctcaccgagctgggcttgttggtcggctacgacgacgatctggctggggaagccacccgcaccagcaaccgtatccgcggcctgctcaccatcgtccatcccgccctcgaacgcgtcctcggcccgcgcatcgcgcatccggcggtgctggagatcctgtcgcgctgcggcggaccggaaggcatccgagcgaccgggaaacgcaagctcacagcgctggcggtcaaacacgcaccccgcatgggcgcgcgcctggccgaggaaatctttgccgcgctgcccgcgcagacggtcaccgtcccgggcagcaaggccgccgaggtcgtgctccccaaactcgccgactcgctgaaatcggtgctgctgcagcgacaatcgatcgccgccgatatcgagaggatgctcgatgcgcaccctcttgccaaggtcctgacctcgatgcctggcatcggagtcaggaccggagcccgcatcctgctcgaagtcggcgacggctcggctttccccaccgccgggcacctggccgcctacgccggcatcgccccgatcacccaccgctccggcagctccatccgcggcgagcaccccgcccgctcgggcaaccacaaactcaaacgcgccctgttcctgtccgcgttcgcggccctgcacgacccggccagccgcgcctactacacccgaaaacgcgacgagggcaaaaagcacaacgccgccctgatctgcctggcccgccgccgctgcgacgtcctctacgccatgctgaaaaccaaacagccctaccgtgattcacccgcatcagcgagcaccggctagcgcgactcctcccgatcggcgcgcaccacgatcacgactgggtcgtcgtcttcgccgactgcctggtcgagcctcaacatctgcctggaccgggtttcctcgacgacatgtcgataggacggggacagcagcgactccacctgaccgagcatgcccgaaccgactccagcggtcttgggccggtgacgccagtagatccaaccgcggcgctccgcccacaccgcgatccgatcgatcacggccaccgccacgacaagcccggccaccccgatcgcccagtgcatgctgcaccagcctcccaccgctcgaatcgacacccgaaaccaacgtatccgacgatcaccaggagagcagatccaccgcagccgcaacttgacgaaaaccatagggacaccc

SEQ ID NO: 9092 - DNA, 1486 bp, unidentified
  source 1..1486: mol_type = unassigned DNA; note = element_e422c4d
  misc_feature 1..2: note = core
  misc_feature 3..242: note = LE
  misc_feature 243..1466: note = CDS
  misc_feature 1467..1486: note = RE
  misc_feature 13..239: note = bridgeRNA
ctaatcagttctgggagcgagccgtgcggcagactcctggtcggtagccggctggcgggtgagcactcgggtttcctggacgttgagtcctgacgaaagaccgtgcccctgccggttggccgggagagttgatcgctgatgggatgtcgtgccccgcgtgttgttgggcgtgagcactgcttgattaggtcgccgatggttctcccgctggctgctcagggtgatcgagatcgggaggatcgttgcggctgttcgtaggagatgactgggctgaggctcatcacgatgtggaggtgatggacggcgccgggcgcagactggccaaggcccggctgcccgagggtgtgacggggatggcccggctgcacgcgatgatcggtgagctggtcggggacgaggccgacgaagccgaagtgctggtcgggatcgagaccgaccgaggcccctgggtcgcggcgctggtcgccgccggatacacagtgctggcggtcaacccgctgcaggcggccaggttccgggaccggctgggggtctcgggcgccaaaagcgaccccggtgacgcgcacgtgctggccgacatggtccgcacccacggccacgagctgcggccggtcgccggggactccgcgcgggccgaggccatcaaggtcgtggcccgcacccataaaaccctgatctgggaacggacccgccatacccagcggttgcggcacgccctgcgggactacttccccgccgcgctggccgcgttcgaggatctcgacgccgctgacaccctggaactgctcggcaaggcgcccaccccggcccaggccgcccggctgacgatcgcccagatcagcgccgcgttgacgcgggcgcgccgcaagaacgtcgccgagaaggcggcggtgatccaggccgcgctgcgcgccgagcacctcggtcaacccgatgtcgtggccgccgcttacgccgcctcggtccaggcgctgctggcagtcctgaccgtcctggacactcaggtcaaaaccctgcaagggcaggtcgaggcctattttgggcagcacccggccgctgaggtcatcttgtcccagcctggtctggggccggtcctcggcgcccgggtgctcgcagagttcggcgacgacccccaccgctacaccaccgccaaagcccgcaagaactacgccgggacctccccgatcacccgcgcctccggcaagaagaaggtcgccctggcccggttcgtgcacaacgaccggctcatcgacgccctcctgacccaggcgttcagcgcgctcaaccgctcgcccggcgcacgcgcctactacgaccggcaacgagcccgcggcgccagccacaacgccgctctgcgccagctcgccaaccgactcgtcggcatcctccacggatgcctcaaaaccagcaccctctacaacgaacagaccgcctggtcgcatcacgtcgagaacattgctgcttgacatctacgctcctgggatgt

SEQ ID NO: 9093 - DNA, 1387 bp, unidentified
  source 1..1387: mol_type = unassigned DNA; note = element_e428330
  misc_feature 1..2: note = core
  misc_feature 3..130: note = LE
  misc_feature 131..1153: note = CDS
  misc_feature 1154..1387: note = RE
  misc_feature 1166..1356: note = bridgeRNA
acatggggtaatcgcgggagcgagctacctcgatctgcgatgacgtggaggaaggtggctgtttcccggtagatgaaggtgcgggctcacgactggcagccgggcccataaatcggaacggagaacagccatgggtgagtatatcgggctcgacgtgtcgttgaaagagacagcggtttcgatccgtcggggtggcaagcgtgtctggcgtggcaagtgcgcgtcggatccccagctgctcgccgcactgatccgcaagcatgctcgagaggcggagcgggtggtgttcgagacggggccgttgtcggtctggttctttcatgcgctgacggcggaaggattgccggcgatctgcatcgacgcgcggcatgcgaaggccgcgctccacatggcggcgaacaagacggacgccaacgacgctgatggtctggcgcacttggcgaaggttgggttctacaaggaggtgcgggtcaagagcttcgacagcatgctcgcgcgcacgctggtcgcggcgcggacccgcctggtgcggatcggcaccgagctgtcgaaccagatccgaggcttgatgaagacgttcgggctcgtcgttccaccggcgtcgggcagcaagttcgagcgggaggtggaggctttgctcgccgacaatgccgaccttggccggatcattcagccgctacttgaggcctggcacgcggttcgccttcgcgccgcagagctgggacgcaagctgctggcggacgcgcggcgcagcgatgcctgccagctgctcatgtccattcccggcgtcggcgtcgtgaccgcgacctccttcatcaccgccatcgagaacccgaccaacttcaagcggtctcgatctgtcggtgcctgggtcgggttaaccactcgccgctaccagtcgggcgagatcgactatgacggccatatctcgaggcggggcgacagccatttgcgcgggctgctctacgaagccgcgaccgtactgctggtgcggagccgatccgagtgcgacctgcgcaagtgggggctgcagctgcgcgagcgggtcggcttcaagcgcgctgcggtcgcagttgcgcgcaagctggccgttatcatgcacactatgctggtcactggcgaaccgttccagcaaacacgcgcctcagcctgacacccgaactcgtccgcgtcgcaaggcgctgcgagacgtcctgccgtgacgtaggccgacccactccgcgacgctcgttgcatccgttgcctcaacggcagcagaatgcgtgatgaacctcggaggggtcgccccgcgaagccccatcatgcggcggcacatgccgaccgcgaagacgaccatgctcccggcagcggcatctcagaaaacccttgcgcccgacgcgattagacg

SEQ ID NO: 9094 - DNA, 1217 bp, unidentified
  source 1..1217: mol_type = unassigned DNA; note = element_e429fae
  misc_feature 1..2: note = core
  misc_feature 3..215: note = LE
  misc_feature 216..1202: note = CDS
  misc_feature 1203..1217: note = RE
  misc_feature 19..197: note = bridgeRNA
cttgtatcttgaatcttgcagtaggtgatggttagctaccttcacctgaaacagggtgaatctgacgcgtccattaaggtaagaccttgtcccgcagcttagctcccctgtttcacctttcacgccagcattaactttgaacggttgccaggagctcagactccgtatgcacaaggaaaacgggcgtgatggcttctatgtgaaaggggaacactatgatccagttaggaattgacgtcggtaagagcaaaatagatttgtgccttaaacctgatgctccggacggtcgtaagaagaccaaagttctactcaacgggccggatgttgccgtcactgtactggagtggctgaccagacagaaggtcagccactcagaggtgcaggtcgtcatggaacccaccggcacgtatcacgagcatctggcttatggccttcatgaccgggcagtgcgcgtcgtgatagccaaccctgcgcgcgtccggtcttttgctcagggcatgggcattctgaccaaaaatgatactgtcgatgcggatgtactggcccgttatggtgccatgcgccagccggatgtgtggcagccaccgtctctggccatccgtgaactgaaagcgctactcagcaggcgtgatgcgctggtgcaggatgtaaaccgcgagaataaccggcttgagaagctgctttcaacatgcggctcagcacgggtcgagttatcagtcaggaagatactgcaggcgctgaatggcgagctggaagccgttcaggcactgatagatgaccatatcgacaaccatcccgacctgaagcgggatatggagtatctgacatcgataaaaggggtcggtacagcggttggcagcactatgctggcggttctgcggggaaatcacttcaggagtgcggagcaggccgcggcctggctgggggtagttccgaaggaaaagcgctcgggaagctcagtacggggaaggacaagactgtcaaaatgtggccccccgtcggtgagggccaaactctatatggctgccatggtcgcagcgaagcataatcctcatcttaaagcgttctatgatcgccttgtttcggctggcaaggcgaggagatcagcgctgggtggtgtgatgagaaagctggtgcatatctgcttcggtgtgctgatgaaacagcagagatatgacgagaattacgcagtagcggcttgacgtgcaagacggtag

SEQ ID NO: 9095 - DNA, 1376 bp, unidentified
  source 1..1376: mol_type = unassigned DNA; note = element_e42aeb5
  misc_feature 1..2: note = core
  misc_feature 3..211: note = LE
  misc_feature 212..1183: note = CDS
  misc_feature 1184..1376: note = RE
  misc_feature 41..217: note = bridgeRNA
cttgtattagcgcactgggttaggatggccacgttccgtgaggaatggcccagctcgggtggccgcctgagctgggccgccgatcgatcggatcgatgcccaccgaagccttgagggctgcgtttcgtagcaggatcgcggtcggcacttcatcgggacccgcatggttgaacgaactctaggttcgcataacaagggagggtcgaggaagatggccaagcgtatcacgatctgtgccgggatcgataccggcaaagataagctcgacgtggcgatcgatggcagctcggagcagctgcgcgtcgacaacacggcggaaggccaccaggcgttggtggagtggttgaagggccacaaagtcaagcggatagggatcgaggcaagcggaggctatgagcaggccgtcgtcgccgagctgcggcgcaggcggttcgtcgtcatcctgtttcagccgaagcaggttcgcgcctatggcacgttccatcggttgctcgccaagaacgacaggatcgacgcagcgctgatcgcaatgtgtactgccgcagtcaagacgatccatcccgccccggacccgcggctgcagcctcttgccgagcatttgacgatggtcgaacagctcaccgaggacattgcaagactgaagaaccggctcgagagctgccgcgacaagcgtattcaagggctctggaaggagcagattgctctcttggcgaagtcaaaacgagccgagttcaaggccctggtggcggcgatccgcaagcatcctgatttcgccgcacggctcgatctgatccacagcgtcgccggctgcggccgcccgaccgcggtggccgtgctggtcaggatgcccgagatcggcaacgtcacgcgcgagcaggccgcagcgctcagcgggcttgcgccctacgacgacgacagcggcaatcgcgtcggcgcccgtcacatcacaggcggacgcgaacgcctgcgccgggcgctctacaccgcggcttttccggcatccttccgctggaatccgcaactcatgggcctgtacagccggctgatcgccgccggcaagtgccacaaatccgcgctcgtcgcctgcgccaggaagttgctcgtcattatcaacgccgtcgtcgcccgcggaacgccgtggggcgcccaggcgccacaaaatgccaaactgtccgtcgcctgacccgcgtttctttgttcgatcaggcgaccgtttcttcgtcccgacctgccatcacaacgacgccgcgtgccgcggccgtcaaggctggccgtcgctcagttcccgcctcacacaagatgccgccaggccacgccttgacggccgcaagcgcggcgtcatgctccaggcaatcggggcgtcgctttaatggttg

SEQ ID NO: 9096 - DNA, 1535 bp, unidentified
  source 1..1535: mol_type = unassigned DNA; note = element_e42ce26
  misc_feature 1..2: note = core
  misc_feature 3..243: note = LE
  misc_feature 244..1416: note = CDS
  misc_feature 1417..1535: note = RE
  misc_feature 3..222: note = bridgeRNA
ctcgtataataaagtagtagtttttagagttcctctccaagaactatatgatatactgaaaaggatgctgtggattggttttcatctcctaccgcttgacggttcttgaaaggctccaaccacagccctttacagtattgttaatcagttagataccacccgatggtttatttagaacgaggttacaagagtaaagtgttctgtggatacatagcatcacaataaatttattgggggtattttatggtatttattggaattgatattgcaaaggacaagcacgactgttttattattaattccgaaggcgaggttctcaaagatgtttttaccattgagaacagtagacaaggctttgagttgctatttcaaaccattaacacctgtacaggtgtcggcgaaaaaacaaaggtagggcttgaggcaaccggacattacagttacaatcttcttggcttcctgttggaaaacggtttgacaacatatgtcattaaccctttgcacaccaatctttaccggaagagtctcagcctgcgtaaaaccaaaaccgaccgtgtggatgcaagaacgattgcttctatgctaatgtctgatatgagcctcaagccctacacaaacatagcataccacaattccgagttaaagtcactaacaagatacagatttgataaagttaaggaacgagccaagctcaaaagttctgtttcaagattagtaaatatcctgttcccagaattagaaaaaatggtttgcacactacatatggtctctatttatgcccttttaaccgaatttccaagtgctaaacacattgctgaagcacaccttgttaaactaaccaacttactttgttctgcatctaaaggcagatacaacagcgagaaagctcatttgattcgtaatgctgctaaaaattccatcggtgtatttatgccggctaaagcattggaacttaaacatacgatttgtttaatacaagaattaaccaaagaaattgacgagattgagtttgccattaaaaacataatggatgttattaattcacctatttctacaattagaggtattggacaagacacaagtgctatgattcttgctgaaattggcgacttcaacaattttgattcgcctgacaaaatcttagcctttgcagggctttcgccctctacataccaatccggtcagcttaacaactgttatgctcatatggaaaagcgtgggtctcgttatcttcgttatgcgctttttactgcaacgaaatctgtttgtatgtggaatcctgtttttgcacattaccttgctaaaaagcgttccgagggcaagcattataatgttgcaatttctcacgctgccaagaaattagtccgtttgatttttgctatgcagaaatccggtcaaccttacagattaaattaaaatccttatttactttttaaatttcggcgtctttgacgtcagctttgctatacctttttttacttaatcccaattcacacctttttactgaaatttagacttgactttttatagttagt

SEQ ID NO: 9097 - DNA, 1432 bp, unidentified
  source 1..1432: mol_type = unassigned DNA; note = element_e42ec2c
  misc_feature 1..2: note = core
  misc_feature 3..226: note = LE
  misc_feature 227..1417: note = CDS
  misc_feature 1418..1432: note = RE
  misc_feature 10..221: note = bridgeRNA
tccctaccttgttgatcgggatgagcgagccattcgtagggttggctcacccaggggtgtcgggtgtggctttcagtggtctgccgtccgtggcttcctacgattcgccgcccgacgccccacgacgactcggctgctgattaggaatcgcgatccgatcgctgagtagggactcgccagcgaggtcgtctgtggtgcaggtaggcgagcgacccgtggagagcgcgtgacagcgatttgggccggcatcgatgccggcaggacccatcaccattgcgtggtgatcgacgacaccggcaagcggctgctgtcgcggcgcgtggccaacgacgagtcggaattactgaagctcctggccgatgtcctcgctctgagcgttgaggtcacctggggcatcgacctggccgacggcggcgccgccctgctgatcgatctgctgctcaaccacggcaagcacatgctctacatccccggccgggccgtcagccgtgcctccgagggttaccggggcgaaggcaagaccgacgccaaggacgccgcgatcatcgccgaccaggcccggatccgccgagacctgcaacccttgcggccgggtgacgaactcgtcgctgagatcaaggtactcaccggccatcgccgcgacctcgccgacgaccgcacccgcgtgatcaaccggctccacaaccacctcaccagcatctttcccgctctggaccgggctctggacctcaccaacgccggcccgctgatcctgctgaccggctatcagaccccagccgccatccgcaggaccggggcccggaggctggagacctggctgcgtaaccgcaaggtccgcagtgctgcccagctcgccgagacggccctggcggctgccgagagccagcacaccagcgtgaccggggagaagccgacagcccagctcgtgcacacgctcgccagggaggtgatgcgcctcaacgagcaaatcgccgagaccgacaagctcatcgaggcccggtttcgcgagcacaaacacgccgaggtgatcgcgagcatgcccggcatcgggcctttgctcggcgccgagttcctcgccgtcaccggcggcgacatggcggccttcgacagcccggaccgcctcgccgggttcgccggcgtcgcccccgctccccgcgactcgggcaagatcagcggcaacctgcaccggcccagacgttacagtcggcgactccaacgcgtcttctacacctccgcgctgatcagtatccgctgctgcgaggaatcccgccgcttctacgaccgcaaacgcgccgagggcaaacggcacacccaggccgtcctcgccctcgcccgccgccgggtcaacgtcctgtgggccctgttgcgtgacggacggtgctacgaacccataccccccgtcacaaacgccgcttgacaaagagattaggaa

SEQ ID NO: 9098 - DNA, 1566 bp, unidentified
  source 1..1566: mol_type = unassigned DNA; note = element_e432eb4
  misc_feature 1..3: note = core
  misc_feature 4..270: note = LE
  misc_feature 271..1398: note = CDS
  misc_feature 1399..1566: note = RE
  misc_feature 5..246: note = bridgeRNA
tccttgtatgatgtttatagaagcaaaaacaacatacttcctttcttttcttgttctgtggtttaatacattcagatactgtggacttttgatttttccctgtagcttgactactcaataggagtgtattgccgctacttttatctgaattgtttattagctggatgttgccggagggttctcgctgagtacttatttcaatcaagtctacgatgataatcgttggtggatatcacagtatcagactttatgaaagggaggttcaaccttatgatctacgtgggcattaatattgccaaattcaaccatttctccgctaccatttcttccagcggcgaaatcctcatcgagccgtttaaattctctaatggctatgatggcttctatctgctgctttctaatttggcaccacttgaccaggacagcatcatcataggacttgaatctacggcacactacggtgacaaccttgttcgcttccttatctacaaggattttaaagtgcgtgttctcaaccctatcatgacttcatctatgcgcaaaaataatattcgcaaaaccaagaccgataaagtcgacacctttgtgattgttaaaaccgttctgatgcagaattctttaagatttctgaccttaaaggatctggattacatcgaactcaaagaacttggcagattccgccagaaaaccattaagcagcgtacccgtttgaaaatacagctaacttcttatctgtatcaggtcttcccggaactccagtacttcttcaagtctggtctgcatcagaagtctgtctacgccctcctcaaggaggctccgacacccaatgccattacctctatgcatatgactcatctcgctcatatccttgaaaacgtttcccacggccatttcaataaggataccgccagagaattaagaattctcgcacagaggtccgtcggtgtcaacgacagttctttctctattcaaataactcaaaccattgagcaaatcgagttattggatagccagttatttcatacagagcttgaaatggcaaatcttgtcacctgcctgcactctgtcattatgaccattccgggcattggtagtaccaatggcggaatgatactgggggaaatcggtgatatccaccgattctcctcgcccagtaagctgcttgcatttgcggggtcgaatccttcggtctatcagttcggcaactttcaggcgaagaagactagtatgtccaaacgcggctcacgtgttctccgctataccctcgtaaatacagcacacaatgttgtaaagaataatgcgactttcaaagcgtattatgattccaagagagacgaaggtcggtcccactataatgtccttgggcactgcgccggcaagcttgtcagggtcatctgaaagatgcttactgacgaagtggaatttaacctcgaataagaggtctgtataccaacatcgatcgattttgaagggcacctttcgggagctttattaaagttaccctttttaccaccgacaagaaaaataattttttgttaatttatacttgacttttcatagctggtc

SEQ ID NO: 9099 - DNA, 1359 bp, unidentified
  source 1..1359: mol_type = unassigned DNA; note = element_e43a538
  misc_feature 1..4: note = core
  misc_feature 5..92: note = LE
  misc_feature 93..1121: note = CDS
  misc_feature 1122..1359: note = RE
  misc_feature 1151..1340: note = bridgeRNA
acatagcgtcaatcgcgggtgggcttcccctgccgggacatgccctccacactgacaatggcctgcgggccgaagctgtgaggagaaccgccatgaagcattatgccgggcttgacgtcagccaacaaacgacgtcgatttgcatcgtcgatgaggatgggcgcatcgtcgccgagcgcaaggccgtaacttgcccccaagcgatcgccactgcaatcgagccattccatgttgcacgagccggcttggagacggggccgttgtcagtttggctgtggaatggtctgaacgcggccggcgtgccagtcatctgtatggatgcgcggcatgccaatgcagcattatcgatgatgccggctaagaccgaccgcaacgatgccgccggcctagcgcagatcgtgcggaccggctggtgcaagagggtgcacgtcaaatccgcgcccagccacgaagcacgtgccctgctcgccgcacgcagccagctcgtccagatccgctgcgatctggagaacgaaatcaggggagtcctgcgtaccttcggtatcatcttcggcaagcgtatcggcggcttctccaagcgagctgaggagatcgtcgccggcgagctcgatgcatcaccgacgatccgcatcgttctggaggcgctaatgaaggcgcgggtcgatatcctggcgcaggtcgccatcctcgacggaaaggtccgatccttgtcacgcgggaatggtatagtgcggcacctcatgaccgtacctggcgtgggcgccatcaccgcgcttggctttgtcgccaccattgacgatcccgcaaggttccgccgatcggcgagcgccggtgcctatctgggtctgacaccgaagatatacgcatcgggggaaacgatgaaggtggggcggatatcgcgccggggcgacgacttcctgaggcgcagtctctatgaggcggcgaacgctttgctaactcgcgtcgcgcgcccctctgcactgaaggcatggggcttgcgcatcgcgaagcgcggcggcttcaaacgggcaaaagtggccgtagcccgcaagctcgccgtcgtgcttcatgccatgtggaccactggagaggagttccgctggtcaaccagcacttcgtaaccactcgccgcttagcctaagcgaacgatcgagctgccgagatcgtccgaccaggacgatggcgagaaccgagttccgactgtcaacaggcgcgtgcccggccccggtcggcaaccgcgtacaccacattggccggttcaacccatcctacgccatgctgaggcggagccgttctgacctcgaagagaaccatgagcctggtcgccgataccatcagcttgacaaacgcgattagaga

SEQ ID NO: 9100 - DNA, 1191 bp, unidentified
  source 1..1191: mol_type = unassigned DNA; note = element_e43b727
  misc_feature 1..2: note = core
  misc_feature 3..225: note = LE
  misc_feature 226..1176: note = CDS
  misc_feature 1177..1191: note = RE
  misc_feature 1..202: note = bridgeRNA
cttgtatctcgtgctgtgcggattttgcaggcattctcgtcagggcgccagctcgctgcagtctgggtggagccgcgaggcggacaccgtgcgtgagccggagcggcgtcctgattcgcccatcgtcgagcccgaacagttgcgggggccgctccacggagcgagcccggattctcacaagagcgggccagcgcgagggcacttccccggtgcatggagggtacgatgttccttgggattgatgtggcgaaggcggaactcgtcgtggcggcgcggccgagcggcgagcggtggacggtggcgaatgatgagcgcggggtgcaggcgctcgtcgagcgactgcgcggcggggccccgacgctcatcgtgctcgaagccacgggcggctacgagctgctctgcgtcagtgcgctggcggccgcggcgttgcccgtggtcgtcgtgaacccgcgtcaggtgcgcgatttcgcgcgggccaccgggcagctcgcgaagaccgaccagatcgacgccgggattctggcgctgttcgccgagcgcgtgcggcccccggtacgcgcgctgccagcagcggacgcgcaggccctcgaggcgctgctggctcggcggcggcagttgctcgagatgctgcaggccgagcgcaaccgactcgggcaggtcttcggcggggacaagccgttggtcaagaagagcctcacgacgcacatcaccttcctgcagcgcgcgctcgacgccgcggaccgggagctgcgcgaccagattcagcagagccccgcgtggcgcgcgcaggacgagcagctgcagcgcgtgaccggggtcggccccgtcctgtcgctgacgctgctggccgagttgccggagctcgggcgcgtgtcgcggcgcgagatcgcgaagctcgccggcgtcgcgccgctgagtcgcgactccggcacgctgcgcggccggcgcgtcgtgcaggggggccgcgcgagcgtgcgtgcggtgctctacatgggcaccctggtcgccacgcggcacaatgcggtcatccgggacttttaccagcggctcctcgcggccggcaaaccgaagaagctcgccctcgtcgcgtgcatgcggaaactgctcaccatcctcaacgccatggtgcgcacccacgagccgtggcgggccgagatggcgcctgtacccgcttgactttcaagacagttg

SEQ ID NO: 9101 - DNA, 1199 bp, unidentified
  source 1..1199: mol_type = unassigned DNA; note = element_e43e2ba
  misc_feature 1..2: note = core
  misc_feature 3..205: note = LE
  misc_feature 206..1177: note = CDS
  misc_feature 1178..1199: note = RE
  misc_feature 12..190: note = bridgeRNA
cttgtatcttgttctcattgatggttagctaccatcaattgaggtgaagatcagcttgggcccacccttaaggctcgaccttggaaggtagatcaagcccttcacctcgttcccacaccataccaaacactggacggtagccaagggcgctgaccctgcatgcacaaggagagtgggtgtgttgatcgagaactaaggagagtttatgttttacctgggcgtggatgtggccaagaaaaagcttgattgcatgctacttgattcgtcgagcggcaagctgaagtcgaaagcggtcgataacacggcagatggttttgccaaactgttggaatggctggacaagcaaaatgcagccagtgctcatgtggtgatggagccgaccggggtgtatcacgaggcggccgccctggcgttggccgacgctggcctgacagtatcgtttgtcaacccggcccagctgcgctcattcgcgcaaggcttgggggtaaagaccaagaccgataagcaagacagcacggtgctggccaagtatggcgccacgcagaagcctgcgccatggcagccgccatcgatgtctgtccggcgtctcaaagcactgctgacacgccgcgatgccatcgctgacgacctgcagcgcgagcgtaatcgccaggaagccaacggatttagtttgactcctgaagcggtgagcgagtcgattgcacaatcgatcgcctttctcgaagctgaactcaagcggcttgagaaaatgattgcatcacacatcgataacgatcctgacctgcgcaacaagaaggacctgctggagaccattcctggcgttggtccacgcgttgcgacccacatgaccacgctgtttgctgggcgaacgtttgacagtgccgagcaattggccgcttacctcggcctggtgcctgtggagcgacaatccggcacgtcggtgcgcggccgcccgcatatgtccaaggctggccctgcccacctgcgcaaagtgctgtacatgcctgccgtcgtggcacggcgatggaatccacacattaaagcgctcaatgagcgcctactcgccaagggcaagtccaagatggccgctatcggcgctgccatgcgcaagctggcgcacctgtgcttcggtgtcgtccataccggcaagccctacgacccgaaatttgcgatgtagggcttgacgggcaagacggtat

SEQ ID NO: 9102 - DNA, 1382 bp, unidentified
  source 1..1382: mol_type = unassigned DNA; note = element_e43fe83
  misc_feature 1: note = core
  misc_feature 2..70: note = LE
  misc_feature 71..1111: note = CDS
  misc_feature 1112..1382: note = RE
  misc_feature 1131..1372: note = bridgeRNA
tatgggatggcccgcccctcactgaaccatcgtggcattctcctgccacggacacgtggagggatctggaatggcaaagagctcgatcgccgtgctgggtatcgacctcggcaagaacagctgcagccttgtcggtttcgatgcggctggagttgtcgtcctgcgccgccgcgcgcggcgtgagacggtcgtcggactgacggccaagctaccggcttgtgtggttgggatggaggcctgctgcggagcccatcatctcggccggttgctcgtagcgcaagggcacaccgtccgtctgatatcgccggagtatgttcgcccctacgtcaaagcgcagaagaacgacgatcgtgatgccgaggcgatcgcagaggcagccacacgcccgaccatgcgctttgtgcccctgaaggaacaggaacagctcgatatgcagagcctgcatcgggttcggtcgcggctggtcagcatgcgcaccatgctcatgaaccagctccgcgcgatcttgctggagcgtggtctcaccttcccgcagggccggcgcaagttcgagatggcaatcggagctctgatgcaggaccctgaggcgcagatcggaccacgcatccgatccctcatcggagaggtccgcgacgagtggacggacctcgatcgccgcatagcggcgctcgatcgcgagttcgtcgagcatgctcgtgccgacgaggcggcgcgccgcctggtgtcgatcccgggcatcggaacaatgacggccacggctctgcgtgctgccgtcgatgacggcagcaccttcacgcgtgcccgtgatctcgcggcttggctcggcctcgtaccacgccagcacacgacgggcggcaagccgaagctgctcggcatcagcaagcgggggaactcctacctgcgcgggctcttcatccacggggcgagagcggcgctgccctcgatggctaaagctgaggacgcgaccggccaatggctgcgaggtctgctggcgcgggcgcactacaacgccgtggtcgtcgcgctcgccgccaagctcgctcggatcgcctgggcaacgctgcggaagggcgtgagcttcgagcggcagccggagccggctcacgcctgagacatcgcaaacgtcgaccctaaccggactacgagaggccggcgcgggtccatgaggtctgcgggaggacagtgaagatggccttacggtcgagcggcgttccggaagcctggcaaaaaaagcggctcttcgaggccgacgtgcttatgaggcccggggcgtgcggctctccatcttggcggcggccactgcgccgacatgccggatacgtttgtgcagaccggacacaggcaccttcaccgaccaccttgcagacggggcgggccatacg

SEQ ID NO: 9103 - DNA, 1254 bp, unidentified
  source 1..1254: mol_type = unassigned DNA; note = element_e444671
  misc_feature 1..2: note = core
  misc_feature 3..246: note = LE
  misc_feature 247..1239: note = CDS
  misc_feature 1240..1254: note = RE
  misc_feature 6..192: note = bridgeRNA
cttgtatgttgcttccatcgtcaaggcgacgataatcgaggcaacatcgggaggccgttccacccttgaggcaccttgcgtgacctcgtttgtagattggccccccgcctcattaccactacgtggagtatcccgaagccggactcgtaagagtggcggacttcgtatcacaaggttgtagcggtaagaagtgcgaggtcggggaaccggtgaccattgtacccattacgtatctgaggtgaacctgtgagcgattatgtgggcatcgatatcggagccaagtcggtagtcgtgagtgtaagacgagctggacgtacgctcgtctctcaagagttccgtcaaaccccggaggggcaccaggctttgatcgataagcttggcagccaggtggtctgcgtggtgctcgaagcaacgggggtttattacctggatctggcaatggccttgcaccgggctggtttgccggtagcggttatcaacccacgcagcttccatcattttgccaaccttaagctcaacagcagcaagactgatgctgtcgatgccgcactgctggccgaatatggcgagtgcattaagcccactctgtggcaggcgccggacgaagcattgatgggcttgcgcgacatcggtcggcagatcaaccgcctgactgctgctcgcacccaagcgaagaatcgtttgcatgcgctgcgctctaaatcgaataccttggccttgctgatcgaggacgaagccgacggcatcgaacggctggatctgcgtatcgataggctgagcaaggcagcactggagctcatcaaccaacagccgcacatcaagcagcagttggccaacattacatgcgcaaaaggcatcggacagaccagcgccattgctatgctggccgaactttgcgtgctgccccgagagctgaagtctccccaagtgagtcgctacgctggcctggacgtacgtctctgccagtcgggcagcagtgtgagcaagccgggacggctgagtaaagcgggcaatgcttacctgcgtagcgcctttttcatgccagctctatctgcggtacgccatgatcccaatgccaaggccttctacgagtcgttgcaacagcgcggcaagaagaaaatccaagcgctatgcgctgtcatgcgtaaatacctgacaggcgtttgggcctgcctgaaactcggcgtacctttcgactcatccaaactgttcagcactgaacacttggaaaatgcttgaccaccaacagagtat

SEQ ID NO: 9104 - DNA, 1352 bp, unidentified
  source 1..1352: mol_type = unassigned DNA; note = element_e44d8aa
  misc_feature 1: note = core
  misc_feature 2..73: note = LE
  misc_feature 74..1099: note = CDS
  misc_feature 1100..1352: note = RE
  misc_feature 1102..1342: note = bridgeRNA
tatggatggcccgccccttaaccgaaccgttgttgtttaaccgacatcggatcgtttgaggaaggagaaggtcatggaaatttcggttctggggattgacctcggcaagaacagctgcagcgtggtgggtctggacggcaccggtagggttgtggttcgcaggcgtatgcgacgtgagacggtcattacctttgcagcgtcactcgcgccatgcgttgtggcgatggaggcctgttgcggtgcccaccatatgggccgtgcgctggcagcgcatggacataccgtccggttgatgtcgccggaatatgtccgtccatacgtgaaggcccagaagaacgacgatcgcgatgccgaagctatcgcagaggcggcgacacggccgaccatgcggttcgtggaactgaagagccaggagcagctggacatgcagacactgcaccggattcgcgaccagctcgtcggcgagcggacctcactgatgaaccagatcaggagtctgctgctcgagcgcgggcacatcgtcccgcaagggcgtgcgaagctcgcggttcggctcggcgaaatcctcgaagcccaagaacccgttctggggtttcgcattcaccggctcgtcaccgacatgcgcgcccgctgggtagcgctcgacgagaggattgcggacctcgacgccgagttcgcgcaagcagcgcggaccgacgaacgaacgcagcgcctgctgaccattcccggcattggcgccctcaacgcgactgcactggtcgctgccgtcggcgatgcccggacctttgcgcgtggtcgcgatcttgctgcatggttgggcctggtcccgcgtcaggccaccaccggcggcaagcctcggttgctcggcattaccaaacgcggcagccgatacctgcgtaagatccttatccagggtgcacgttcgtcgctgccgacgatgagcaagagcgatacacgtctgggcgcctgggtgcgcggcctactctcgcgggcgcatcaaaacaccgtcgtcgtcgctctcgcggccaaaatggcgcggatcgtctgggcacttctacgccatggacggacctacgaacccacattgctggcggcgtgaacgagatcggccggtgcccttggcatccgctggatgatgtctgcgggaggtgagaagaagatggcctgacagtcgaccggtgtcttggaaccctatggcgcaaaatggcacttcgatgccggcccctttatgagggccaggacgcgcggatctccatcttggccaacggcaatgcaccgaaaggccggatacgttttcgcagactgcttagatcatctgatgcaaaccgcttgccgacggggcgggccatacg

SEQ ID NO: 9105 - DNA, 1523 bp, unidentified
  source 1..1523: mol_type = unassigned DNA; note = element_e456802
  misc_feature 1..2: note = core
  misc_feature 3..248: note = LE
  misc_feature 249..1475: note = CDS
  misc_feature 1476..1523: note = RE
  misc_feature 49..223: note = bridgeRNA
cttatattaactcggttgcagattttcatagaggagaccatcttagcgtaacaccgatttcaggagcttgctggactgaggaccatacctgcctgatcccctggaggatctcgcacagactgtcccgaccagcgagagaacggagcgagaggttcaatagaaagttgtccccaggaggaccgatataaggcgaacattccgttcagcgctattggaattggaagtacacgataaaggagaagtagaaaatgaagcgatactacgtgggagtggattgggcggaccgggagcaccagctgtacgtgggggatgaggagggaggaaagataaccgagaagaaggtgcaagagatccctgaagagatggcgcagttgggacgctggctcgatgagagtcgggctacggggatcgagctttgggcggccattgagaagccgcacgggcgcatcgtggattttcttttggatcatggagtggtggtctatcctgttaatcccaaggccctggatcgggtgagagaccgctatcgcatgagtcaatcgaagagcgatccgtttgatgcccgggtgctgtcggaatttctcagaaccgatcatgttcacttgagaccccttcgacccaattccgagcaggcccaggaacttaagctgctcacccgggatcagcacagacttgtgcgccacaacactcggcttcttaatcagctcaagataaccctcaaagagtactatcctcggcccttggaggtctttggcgacctgggaactaagatagcccaggattttctcagagcgtatccgaccccggcggccctcagccagcttagccgtacaaagtggaatcgcttcgcccaacagcagcatcatctcggcaaggcgcgctgtgatgagctgtgggagaagcttaacaagcctcaactggtggttccccaacacgtggtcagagccaaggcgcagttggtcgaggtgctgctcgaccagcttaagccctcgatcaccgcggttaagacctacactgagagggtcgagcgttttttcgcctctaccccggccgctgagcttacccacacgctgccgggaggaaagagcggcaccctggtgccaacgatctgggcggagctgggagatgcccagggtcgatgggagtccttccaacaccttcaggccgaggcgggagtagtcccggtgacccgatccagtggcaaaagccatgtcgtacagtttcgctttgcctgtaacaagcatctgcgccacgcggcgtacttgtttgcctttgccgcgctcaaccgcagtgagtgggcgaaccgatactatcgggatcaacgggctaaagggcacagccatcctcaggcgcttcgggctctggggacgaagtggttgaagattattttcgtgatgtggagagaccataaaccgtacgacgaaaactaccacctggcgaacatcacacgacagaggatgcgccaggcggcgtgaaaataaatcgactgaggacttgaggacttgacaagcgtcatagaaagt

SEQ ID NO: 9106 - DNA, 1372 bp, unidentified
  source 1..1372: mol_type = unassigned DNA; note = element_e457148
  misc_feature 1..3: note = core
  misc_feature 4..114: note = LE
  misc_feature 115..1125: note = CDS
  misc_feature 1126..1372: note = RE
  misc_feature 1145..1370: note = bridgeRNA
agatggaatggtcgcctcccgccttaacgggccaaccgacgccgcagcaaccccggcgacgatgtcgagcccgagtatcgtctccgttgggatatcccgttaaggagaaagctgatggaacccacgactattgccatcgacctggccaagcgcgttttccagattcactacgtcgagcctgtgaccggcgcgattcgcagcaaggtgctcaaacgcgcccagctcgtgccgttcttcgccaaccggcctgcgacttgtgtcgttatggaggcctgcggcagcgcccatcactgggcccgtgtcctggcgcggcttggccacgacgtgcggctcatcgcagcccagttcgtccgaccgttcgtgaagtcgaacaagaacgatgccgcggatgccgcggcgatctgggaagcggcccaacgtcccggcatgcgtttcgtagctgtcaagacggaagaccagcaggccatgcttgcgatgcaccgcatacgccagcaacttgtcaggatccgtgtcatgcaggtcaaccagcttcgcggattgctctacgaatttggcgtgatactgccggcaggtcgccgtgcatcgatagaggcagccaaagtcgcgctggcgtcgatggctgagcagttgcccactatgctggcagacagcctgcaggaccagatctcgcggctacgtggactcgacgagcagattgcccggatcgaacagcgcattctcgagtggcgacgcaacaacgatgcatgcagacgcatttccgaaatccccggcgtgggagtactcacggccactgctgcagtatcggtaattggacaggcgaagacctttcgctccggccgggagttcgctgcctatttgggcctcgtgccgcgacagaacggctctgggggcaaggtaaagcttggcgggatcagcaaacgcggggacgtgtacttgcgaacgctactgatccacggcgcgcgatcggtcatctcaagttcaaggtatttgccggagcgcttgcgccagatgctgacccggcgtccaacgaatgtcgttgccgttgcgctcgccaacaagatggcgcgaacaatctgggcgctgctcgcgtatggtcgaacgtatcaggcagcaccagcgcagtaagcacgaaccgtagcctttaacccatccacggttgcacaggtgtattgaacgatggcaagacaggttggaccgcgtgaaggcaagcctgagacatttctcggacttcgagtccgttatttagattaggacctttgcggcgaaatccatcggggccggcgggtacgttccgcaatcgagtccggatataagtccgcaaccacccttctcgctacgaacaattaccttgcaaatgggaggcgaccatata

SEQ ID NO: 9107 - DNA, 1425 bp, unidentified
  source 1..1425: mol_type = unassigned DNA; note = element_e4604bf
  misc_feature 1: note = core
  misc_feature 2..173: note = LE
  misc_feature 174..1145: note = CDS
  misc_feature 1146..1425: note = RE
  misc_feature 1185..1424: note = bridgeRNA
attgaaatgaacgcgtcccacccgtgaacgtgagagcagaaaaaggggtggaccctcacgggccaacggcatcgatgtgcccaagtggaaaatgcacgcatttcccggcaaccggaggatccacgatgaacagtatggccgtaggagtcgacgtcgccaagtaggttttccaagtgcactacgttgatagggaaaccggcgggatcgtgaataaggcaatcaagcgggcgaaattccttgagttcttcgcgaaccgcgcggcctgtcttatcgggatggaagcgtgtggcggagcccaccattgggcgcggcaattgacgcagatgggtcacgaggtcaggctgatgccggccgagttcgtgaaggcgttcaacatccgcaacaagaacgatgcggcggacgcacgggcgatctggctggcggtacagcaacccggcaagccggtggcggtgaagaccgagatgcagcaggcgatggtagcactgcaccggatgcgcgagcagttggtgaagttccgcacgatgcaggtcaacggattgcgaggtttgctgacggaatacggggaggtaatgagcaaggggcgggcgaagctggacaaggaaataccggccgtgcttggccgaatcgcggagcgcttgccagcggcgctaatcgatacgttgcgcgagcaatggaacgggttggcaaagctcgacgagcagatcgcggaaatcgaacgccggatgcgcgaatggaagaaggaagacaaggcggtgaaggcgattagcgagataccgggcgtaggtttgctgacggccaccgcagcggtagcaatgatgggcgacccgaaggcgttcagctcgggacgagagttcgcggcgtgggccgggttagtgccgaagcagaccggctcgggcggtaaggtgaacttacacgggatcagcaagaggggcgacatgtatctgcgcacgctactgattcacggggcacgaagcgtgctgacgcatgcgaaagagcccggtgagtggatcgagcagatgaagaagcggcgaccgccgaatgtggtgatcgtcgcactggccaacaagatggcacggacgatctgggctgtactggcccatgaccggccgtaccaaaagggttacgtgagcgtgaagccggcctgatcggtgaatgccacgttgaagatcaacgtttaacactgggtgaacgtcgaaaggttgcgcaggaatcgagtgtgatgacaagccaggtaggaccgggactcgctaaacctgaatcgtggtaagagcttcgagctcgccaggagaatgaggcgcgagtcagcgaatttcataggggcccgcagcggcagtactggctgcaacaaggccggatatagagctgcagcccatcctgtctgtctgaacacacgaaaactgttgcaaacgggacgcgttcatatag

SEQ ID NO: 9108 - DNA, 1453 bp, unidentified
  source 1..1453: mol_type = unassigned DNA; note = element_e46cb8b
  misc_feature 1..5: note = core
  misc_feature 6..231: note = LE
  misc_feature 232..1437: note = CDS
  misc_feature 1438..1453: note = RE
  misc_feature 1..235: note = bridgeRNA
cccccgttaccttcttgaagtccccggcaaccggggatcttggtcgccgggccgggcatgacttactccccctgtcgttgatgatccggggggtggtgtcactcggtctggtggcgttgacggaccgctgatagggaccaggccgcccccgtgggaaggtctcctcgtaacgtggctgccggacgtcctcgccagaccgcaaccgttcacccacaacccaacaggacgtcgatgagcagcgaatacgcggtgttcctcggactggacgtcggcaagggcacccaccacgcctgcgcgctggacaccgctggcaagcggctgcacgaccagccgcttcccaacgacgaagcccggctgcgagccctgttcggcaagctcgccgagcacggccaggtgctcatggtggttgatcagcccgcctcgatcggtgccctgccggtcgcggtcgcccgagccgctggttgccaggtcgcctacctgcccggtctcaccatgcggcgactggccgacctgcaccccggtgccgccaagaccgacgcccgcgacgcttacgtgatcgccgatgccgcccgcaccctgcctcacacgctgcggcgggtcgacatcggcgacgaggcgctggccgagctggaggtgctggtcggctacgacgacgacctcgccgccgaggccaccaggatccgcaaccgcatccgcggcctgctcacccagatccaccccgccctggaacgcgtgctcggccccaaggccgatcacccggccgtcctggaactgctggccagattcggcggcccagccggactgcggcaggccggccgacgacggctgctgaccgtcgcccgcaagctcgccccccgcatgggtgaacagctgatcgacgacatccacacagcactggacgcccagaccgtcatcgttccgggcaccaccgccgccgaagcaatcctgccgcacctggcggcttcgctgcgcaccgtcctggaccagcgcaaacacctcgcatccgaggtcgaaaggatgctcgatgcgcaccctcttgcccgagtcctgacctcgatgcccggcttcggggtcaggaccacagcccgcgtcctgctggagatcggggacggcacctcgttccccacctctggtcatctggccgcctacgccgggctggccccggtcacccgccactccggtacctccatccggggcgagcgcccgcccaagggcggcaacaagcaactgaaacgcgcgatgttcctggccgcgttcgcgtccctggccgacccggtctcgcgagcgtattaccagcggaaacgcgatcaaggaaagcgacacaacgcagctctcatctgcctggcccgccgccgctgcgacgtcctgttcgccatgctccgcgacggcaccacataccagcccccaaccgagcaggcggcccccaacgccgcttgacagatccatagggaca

SEQ ID NO: 9109 - DNA, 1318 bp, unidentified
  source 1..1318: mol_type = unassigned DNA; note = element_e474780
  misc_feature 1..2: note = core
  misc_feature 3..69: note = LE
  misc_feature 70..1086: note = CDS
  misc_feature 1087..1318: note = RE
  misc_feature 1088..1312: note = bridgeRNA
ttaattagatggtacgccccacacctaaactacactcagcttagtcgctgaacttcgggaggtgccattatgtcagctatcaaaacaatcggtatcgatcttggtaaatctacctttcacttggtaggtcacgaccattctggtcaagagctttatcgacataagttttctcggacaaaactaattcaatttatctccgcacatgaacctgtaactatagcaatggaagcttgttgtggcgcaaactggctagctaggcgctgccaggagtttggtcatgaggttaagctcattccgcctcaatacgttaagccatatgttaaaagccacaagaatgacttcattgacgctgacgctatagccgaagctgcgactagacctaaaatgaggtttgtaacgcctaaatctgagcaagcgcaattaggaagtgtgattcgtcgaattagaactggctacattagggaaaggacagctgtgatgaaccgaatatcttcaattcttgtcgagttcggtttcagtttccctcgtggtcatgcaaatatgaaacggctttttcagtggcttgctgacactaggcaatcagttcctccactacttgtttttgagttgcgagaacaattagatcattacaatcacctcaatgagaagattaaagaacaagacaagaagattgaaacgctcaatcatgacaatgagctgtttactttgctgcaatcaattcctggtatcggtcctatgactgcggcctgttgtctgtctgcagtatccaatccaaaagatttttctaacggtcgtaattttgctgcttggatagggttggttccattccaatattcaacaggtggaaaatcgaggcttcttggtatttcgaagcggggtaacaaagagcttcgcgaactgtttgttcacgctgctagatcagtgctgtggcgagatgcaactgcggagaaatattttggtacatggttactagacttgaagcgtcgtaagcctttcaatgtagctttggtagcattggcaaataagctagccagaatcgcttggtcagttatggcaactcataagactttcgaagtcagaacataaatcaagtttgcatatgaaaatgaaagatgacaaaacggttagaccaccagattgaaaacctgttgtccagaacagcaactagagtgctttcacatttttgaggacaatctggcgcggatctcatcgtggagctgaggctaaggaaaaaagtctcaattagactccgaatacattagcgcaaaccagctccgttattttgagtttttacttgcaaaacggggcgtaccataca

SEQ ID NO: 9110 - DNA, 1582 bp, unidentified
  source 1..1582: mol_type = unassigned DNA; note = element_e476a25
  misc_feature 1: note = core
  misc_feature 2..79: note = LE
  misc_feature 80..1144: note = CDS
  misc_feature 1145..1582: note = RE
  misc_feature 1349..1573: note = bridgeRNA
taatgggatggtgcggccgtgctcctgcccctcctgcatatgatgctgggacggggctgccaaccaaaggagcaccgccatgtccaacaaatcaaacgcaactgttgccacgatgggcatcgatattggcaagaattcgttccacgttgtcggcctcgatcagcggggcgcaattgtgctgctgcagaagtggtcacgcagccaagtcgaagcacggctcaccaacatggcaccgtgcctgatcgggatggaagcttgtgtcggcgcgcatcacttgagccgtaaactgcagttgcttggtcacgatgcgcggttgatgccggcaaaatacgtccgcgcatattccaaaggacaaaaaaatgacttccgggacgcggaagcgatcgctggggcggtagagcgccccacgatgaaattcgtcgctaccaagacgatcgagcagcttgacttgcaggcgctgcaccgcgtacgcgagcggctggtcagtcagcgcactggcatcatcaaccagattcgcgccttcctgctggagcgcggggtcgcggtgcgtcagggtttgcgcttcctgcgcacagaattgccaaacatcctcgccatccggttggacgtgttgtcgccacgcatggtgcatgtcatcgagcaactggccggtgactggcatcggctggacgagcgcatcgaaggcctgtccaccgatatcaaagcattggccgatcaggacccggcatgcgagcggttgatgacggtgcctggcatcggaccgatcatctcgagcgcgatggtggccgcgattggcaatggcgcggcgttctcgaagggacgcgacttcggcgcgtggctcggattggtgcccaggcagatgtcaactggagaccgcacgatcctcggtaagatatcgaaacagggcaatcgctatctgcgcgtcctgttcgtggaggcggcttgggtcgtgttggtgaagccgacgacctgggaacgccacgggctcaagcgttggatcgaagccgccaagaagcggctgcacccaaacgcgttggcgatcgggctcgccaacaaactcgcccgcatcgcatgggcggtcctcaacaaggaacacaaattcgaatgcaccaggacaaacgcgatggcgtcccgatctgcttgagcatggcaccgtgctcggaaccgtcaaggcgtggcctggaaacggcggcgcccgaggcgggccaagcgcgacggccagccttgacggcccctgcgcgcggcgcccgatgtcaaccgcacgccgggacgaaggaacggccgcatggcacgaacaaaggaactgcaccgataaggagccagcgatgacgtagcctcacatcctgtttcccgcagaggtctgcgagaggatgagatgagatggaggaccggtcttcccggcgcatgcgaaccctggtgacccaaatggcccagttgaggcctggcaggtaatgagaacgtatgcgcgctgatatctatggtggcccggagcaaatgctccaaaatgaggccggatacattgatgcaagaccgcaccgacagatcgacgaaaacctcttgcaacgcacggccgcaccataca

SEQ ID NO: 9111 - DNA, 1428 bp, unidentified
  source 1..1428: mol_type = unassigned DNA; note = element_e476a59
  misc_feature 1: note = core
  misc_feature 2..227: note = LE
  misc_feature 228..1415: note = CDS
  misc_feature 1416..1428: note = RE
  misc_feature 12..242: note = bridgeRNA
ctactagacgattcccgtaggaccgatgtctggccagactcggtccaggtgctcggcgggtggctctccatgcggctgcccacccttgtaggtcgggtgtggctctctttcggtctgcggcccgccgggcaccgtgacgaggcgtggctcaagaggggactgccctgctcgtagtagcactgcccacctcgccgttcccatcggcaatcgagagcgaggaaggcgtcatgacgggcgtgatcatcggggtcgatccccacaagttgtcggcgaccatcgaggtcgttgatcaccacgagaagctgctcggctccggtcggttcaccaccgaccaggccggctacaccgcgatgcggaggtacgtcgcagcgtggccagaccgcatgtgggcggtcgagggcagcaacggcgccggccggccattggcgcagcgactgctcgaggccggcgaacgagtcgtcgatgtgccagcgaagctgtcggcgcgggtgcggctcttcgacaccggccacaaccgcaagaccgacgcccgcgacgctcactcgatcgcggctgtcgcggtccgcaccaagaccctgcgggtactccgcgtggacggtgagctcgaggcgcttcggatgctcgccgaccgacgcgaggagctgacccgctcgcgggtccagactgtcaaccggctccagcgactgctgtccgaactgctgcctggccaggccaaacgcgacatcaccaccgcccaggccaaggcgctgcttgccacggtccggcctcgcgacatcgccggcaagacccgtcggcgcatcgccgcggaggaactggccgagctcgtcgcgatcgaggtgaagatgaagaagtccaccgccgagctgaaggccctggtcgctgcgcgcgggtcacgactgatggacctgcacggcgtcggacccgtcgtcgccgcacggactctggccgacgtcggcgacgtcacccggttcgctgatcgaaaccggttcgcgtcctggaccggcaccgcccctttggacgcgtcctccggcgagcagatccgccaccgtctgtcccgggcgggcaaccgacggatgaaccacatgatccacatcgccgcgatcagccagatccgcctcgagacccccggccgcgactactaccgacgaaagctggccgacggcaagaccaagctcgaagcgctgcgctgtctcaagcgccggatctccgacgccatctaccgccagctcgtcgctgatgcccaagccgctgaaggtgcgggtccgggagggcaccgcggggcgtcacaagaatccagcgcggtcgactcgcacccgccacatcgacacttcggatcagccactcccggatccgcaacaccgacgctacgcccgaccacgccgacccggaagaggcaactcagaccacccgcttgacacagaggggagc

SEQ ID NO: 9112 - DNA, 1599 bp, unidentified
  source 1..1599: mol_type = unassigned DNA; note = element_e477358
  misc_feature 1..2: note = core
  misc_feature 3..503: note = LE
  misc_feature 504..1487: note = CDS
  misc_feature 1488..1599: note = RE
  misc_feature 16..302: note = bridgeRNA
ctcctaatatataagtgtagggtttagataccccaacagccagttggttctatccctcttattgctaaagctgtacaatgatgaggtatcggtctgacagtattctccttggactcaatagacgtccgtatgaaagccagtcagccagcctatcatttgcagccgttcgatttatgcaggttggactgccctgtgcacgtccgtttgataccccaggagattgaataagcaatgagaaatagctggacaccatacaaattcactttcggaggtacgagaatgtacaacgcagtaggtattgatgtatcaaaaggcaagagcaccgtcgccgtcctgcaaccagcaggtgttattattcgtaagccttttaatgttaatcacacatccagtgaactggatgagcttgccaaatacattggcagtctggaaggtgaaacccgtgttgttttggaatgcaccgggcgttaccatgaaccagtgtaaaaactctttctgaagccggtttgtttgtcagtgctgtcaatccacatctgatcaagaactttggcaacaactccatccgcaaagtcaaatccgaccctgctgatgcgaagaagattgcacgctatactcttgacaactggatagaactgcgacagtattcaagtatggataatacacgtactcaattaaaaactttaaactcacaattcagcttcttcatgaagcaaaaggttgccgctaaggctaacctgattgcactattggataatacctatcctggtgtcaataaactctttgacagccctgtccgcgatgatggcagtgaaaaatgggtggattatgcttactcattctggcatgtggattgtgtccgcaaaattggattaaaaacattcacggaacgctatcaagcattctgtaaaaagcatcactataatttccaaccagcaaaaccagcggaactatttcttgcatccaaagaccttattgctgtctttccaaaagaagcgtcttataaactgcttattcagcaaagcattcagcagcttaatcttgcttcttcccatgtagaagaactacgttcaaagatgaatgaacttgcttctactctgcccgaatacgcaacggtaatgggcatgtatggcgtgggaaaaacttttggcccccagcttatagcagaaataggtgatatttccaatttctcacatcgtgaagcattgactgcttttgccggagtagacccaggtgtggatcagtcaggcacccacaattcaaagagtaataaagcatctaaatgcggttccaaccgtctaagaaagactttgtttcaaatcatgtctacactgcttcaaacagctcctgaagatgataaggtatatcaatttcttgtcaagaagcgtgcagaaggaaagccttactatgtttacatgactgctggggctaataagttcctgcgtatctattacggcaaggtcaaggaatgcatccgtaatttagagcaataaccaagtctaaactcatttttcttcaaaccggcaaatatggcggttcaaaacttgtgcccaaaatcacaatcataaaaataattcattttactattgactttttattagcagg

SEQ ID NO: 9113 - DNA, 1418 bp, unidentified
  source 1..1418: mol_type = unassigned DNA; note = element_e47b1b0
  misc_feature 1..4: note = core
  misc_feature 5..144: note = LE
  misc_feature 145..1404: note = CDS
  misc_feature 1405..1418: note = RE
ctccgtaagttgttgggtggcccgggagggccgggtgtggcttatggggtcttgtcgtcagtggctgaccaggagtggccgcccggttctcttgggtgccctgactgctgattgagatctgcgattcggtcgctgtttacggagatgacggcggggcgctcttcgggccagaacgtgttggtatggctggaggaggggcgtgtggggcaggttcgggcccgggtctgggtcggcgttgacgccggcaagggccatcactgggcggtcgccgtcgatgaagtcggcgcctcggtatggtcgaagaagatcgacaacgacgagacggcgatcctgaacgcgatcggcgaggccggagcgctggctgagcaggccgactgggcagttgacatctccgggacggcctcggcgttgttgctcgcgttgcttgccgcggccggtcaccggccggtctatgtccccggccggacggtcaaccggatggccggcggctatcggggcgaagccaagaccgacgcgcgtgacgcctacgtgatcgccgaaaccgcgcggctgcgccgggacttcgccccgatcgatgtgccgggcgaactcgtgaccgagctggcgttgctcaccgcccaccgatccgatctgatcgccgaccgggtccggatgatcaaccggctgcgtgacctgctcacaggcgtgttccccgcgctggaacgcgcattcgactactcggccgccaagggaccactgatcctgctgacagggtttcagaccccggcggccctgcgccgacgcggtcgcagccgcctggaagcctggctggtcaaacgaggtgtccgtagtgccgacaccgtcgctgacaaggcgatgaccgcagccgccgctcagacggtggcactgcccggtgaggcggtggccgccgacctggtcgccgacctcgccaggcagatcctcgccctggatgagcgcatcggcggcatcgacaagcagatcggcgcgacgtttcgctgccacccgcaggccgagatcatcgagtcgctgcccggcatgggcccgatcctcggcgcggaatttctcgcgtccgtcggagacctgaccgcctacgccgactccggcaggctggcctcggccgcaggcctcgccccggttccccgtgactccggacgccggaccggcaacctgcaccggcccaaacgctacaaccgccgactgcgacgactgttctacctgtcggcccagaccgcgatgatgcgccccggaccctcccgcgactactacctgaagaaacgtgccgaaggacaacgccacgtccaggccgtcatcgccctggcccgccgccgcgtcgacgtgctgtgggccctgctgcgcgacggaagactgttcacccccaacgcacccgtcacgcatacggcttgacttcatcattgaga

SEQ ID NO: 9114 - DNA, 1186 bp, unidentified
  source 1..1186: mol_type = unassigned DNA; note = element_e47be09
  misc_feature 1..2: note = core
  misc_feature 3..220: note = LE
  misc_feature 221..1171: note = CDS
  misc_feature 1172..1186: note = RE
  misc_feature 46..194: note = bridgeRNA
cttgtatcttcattctgatgtgtgtgtatgaacatagttaaagcgaaacaggacgggacagatcgattacgccttgatccgaagagatcgtgggtgagcaagggtcgtccggtcctgcctccccaaaagctcgaacagttgcctgggatattaaagcccgcatcattggcaaggttgagctgtgttggaggaaagtaagatgattaaggaggattgaattttggaagtgagttctaactttgtcggtatcgacgtctctaaagaacggctcgatgtgtctatgcgtccctcgggtgagcgggagtcgattactaacgataaagccggcatcgaggctttggtccaacgcttgggaggaatccgacccactttgatcgtgctggaagccaccggtggtctggagcgaggtgtcactcgtgctctgacgagtgctgaacttcccgtcgtggtggtcaaccctcgacaagtcagagacttcgccaaagccaccggtcagttggccaagactgaccgcatcgacgctagggtgctggcacgtttcggtgaagccgtacggccggcactgcgcccgatgcccgacgaggtgactttggagctgcgcgcactgattgcccgcaggcgacaaatcacggaaatgatcgtggccgagagaaaccggctccgtggagcttccaagagtgtcacaaagcgaatcgatgctcacatccgctggttggaagccgaactggacagggtcggcaaagacctcgatcaatccatccgccaaagtccgatctggcaagagaacgaagatcttctcaggagtgtgcccggcatcggtccggtcgttagtcgtagccttattgcccaactgcccgaacttggagaactcaaccgtaaacagatcgcttctctggtaggtgtcgcaccgctcaatcgcgacagcggtaccttgcgaggtcgtcgcaccatctggggcggcagggctagtgtacgggcagtcctctacatggccgctttggttgccagcagacgcaatgctgtgatccgagctttctaccaacggctgcgcaacgccggtaaagctcccaaggttgccctcgtcgcttgcatgcgaaaactcttgacgattttgaactcgatgctcaaacataaaactcgttggtctgaaactagtcttcagacctcttgactttcaagactgttg

SEQ ID NO: 9115 - DNA, 1307 bp, unidentified
  source 1..1307: mol_type = unassigned DNA; note = element_e47e7fc
  misc_feature 1..2: note = core
  misc_feature 3..251: note = LE
  misc_feature 252..1187: note = CDS
  misc_feature 1188..1307: note = RE
  misc_feature 81..229: note = bridgeRNA
cttgtatcttaaaaattaggtaacccgtcccaacctaggtgaaaaaacaccgctcagtagcttgggtgcctgtattgtaaaaaggaggcgcggtaaaccagtccaaccagggtgcttgacaccgcatagtagcaaccggagccacgcttttagtccaataagcaaactcgaacaatcgctggaggatcataacctcgcattggcaaggacgagttattaacggacaaaacaacttaaccacagtataaactatgacttcagaagcaatatgggtcggaattgatgtctgtcaagacatgctagatgtctatcttctgccacaggaagaatctctacaactaccgaatacgaaagcaggggtacaagtacttgtagcaaaattacaaccacttgctcctagcttagttgtggctgaatcaacaggtggattagaacgacttcttgtcagtggtttacaagaagcatctcttccagtagcgatcgcgaacccgcgaaaagtcaaaggctttgcgatcgctttagggaaagccaaaacggataaactggatgctcaggtaatagctcgctttgcccaaagtgttaaacccgaaccactgccactagtgaagcctgaagctcagcaattggctgctctgaggcgtcgccgtcagcagttagtagcgatgcaagtcgcagagaaaaaccgtctctctcgtgctgctgaaattgtgaaagctgatatcgaggagcatcttgagcagatagaacaaagactcaagtccttaaaccagcaaattcaaactttgactcagcaacaatctgattggaaacgcaaagataccattttgcaatctgttacagggattggcaaagtgacatcagctttatgtttagcagaattaccagagttgggaaccctttctgaaaaacaaattgctcgattggtgggagttgctccgattaaccatgacagtggcaaacatcaaggcaagcgcatgattcagggaggacgaacctccgttcgctgtggtttatacatggcaactttagttgcgactcggcataatccggtgattcgtgatttctatgagcgtttactcgccaaaggaaagctgaaaaaagtcgctctcgttgcctgcatgcgcaagttgctagtcatcctcaatgccatgctccgagataacaagctctggcaagcaccagcttaatcaagttcccagtaaaattttcatctgtgaactcaacggttaataaactaccgtggctttctcatggtcatttgaaattcagaaatttttcttcatttctcttgacattcaagacaatcg

SEQ ID NO: 9116 - DNA, 1418 bp, unidentified
  source 1..1418: mol_type = unassigned DNA; note = element_e4811c2
  misc_feature 1: note = core
  misc_feature 2..95: note = LE
  misc_feature 96..1130: note = CDS
  misc_feature 1131..1418: note = RE
  misc_feature 1190..1410: note = bridgeRNA
caatgggatgaacacccccgcctttaaacgacgtccagtcgcaccaaagtagagggttacctttttcacgttaaaccggaataggagtgttcaccatgcagaccaccaccatcggaattgaccttgcgaagcaattcttccaagtccacggcgttgacgagtttggcaagacggtgctcaagaagcaactgcgccgccagcagatggccgagttctttgtcaatctgccgccctgcctaatcggcatggaggcctgtggcagcgcccactattgggctcgcaaactgaagggcatgggccacaccgtgcgattgatggcccctcagtttgtcaagccctatgtcaaaaccaacaaaaatgacgccgctgacgcagaggccatctgcgaagcagtggcccggcccaacatgcgctttgtgccgatcaaagatgtcgcacaacaaagtgtgctggccctgcaccgggcacgccagggctttgtcaaggccaggactgcgcaggccaaccagatccgtggcctgctgggcgagtttggccttatcatcccgcagggcatcggccacattgcccatcgggtgcccgagctcatcgaggacgccagcaatgagctgcccggcatgtttcgtttgctggtgcagcgcctgctcgaccacctcaaggtgctggacaaacaagtcgatgagttggaggcgcaaatcgttgcctggcaccgccagaatccccaaagtaaaaagctggaaaaaattcccggcatcggtcccctgactgccagcgccttgatagcctccctgggggacgcccgtaactttgagaatggccgacaggtagcggcctggctgggcttggtgcccaagcagcacgccagcggcggaaaacaaaacctgctggggatcagtaaacgcggcgacacctacttgcgaaccctcctgatccacggcgctcgcgtcgtgattcaccatgcgagccaacgcgctgacagctgcagttggatcaacaaaatggtggcgcgacgcaacaagaacattgcggcggtggcgctggccaacaagaacgccaggacagtctgggcgctgttggcgcacgagcgggagtatcagcccgagcatcactctcaaggtgttgctgcgtaagtcgccaactgtttttttcagcaaccagcaaagacaagtcaaacagggaggactgaaccaccgattgctcaggcgatcatgaagtgatggcaagacaggttagaccgtggttggcaaagcccgccgaaaacgatgcactccgagtgctttattccgattgaggtgccgaccagcaaatcccatccgggacagtggcattgccacactaaaagtccgaatgtacgggtgcaatctttaccttcacgctgtcatgaattgaggacttggcaaacagggggtgttcatgta

SEQ ID NO: 9117 - DNA, 1268 bp, unidentified
  source 1..1268: mol_type = unassigned DNA; note = element_e486d92
  misc_feature 1..4: note = core
  misc_feature 5..290: note = LE
  misc_feature 291..1253: note = CDS
  misc_feature 1254..1268: note = RE
  misc_feature 51..216: note = bridgeRNA
tcatcatatgttaaaaaagaggttttctttttaagatagtaaaaaaataaacttaacaagagagaggggaggagaataaaccgagtccgtgtcattggtcagaaagaccgacgggaatgcaggttcaccaaccctaaattaaaactctggacagttcagtaggcttcgagcctgtatgcgtgatgatagagtctaattttttctctcctgctaagccgttttttgggtaatttccgttattcaaaaggacgaaattttttacaagaaaaattttaatagaggtgataacgatgagatacattgggattgatgtggcaaaggatacttttgacgtagcgtttccttcttctaattcaaattacaaagtcgttcagtttgtaaataatgaagaaggtgtgaaaaagtttatcaagaagttaaaacaagatgatagaagtgtattagaggcaacgggctcttattcaacactgctaaccaaaagaatcatggaatctggatttgaggtttctgttgttaaccccttacagacaaaatatttttctaagatgacattgagaagaacgaagacagatgcgtcagacgcggagatgattgcagagtatggcttgaagatgtctccggagcctgaaaaacctactccagattacattgacgatatgcgtcaacgtagagcagttctaagtcaacttaaagaaactgtagttcgatttaaaaatcaattacatgcaatgaaagcgagagtgcgtcctgataagacttcaattaaatttatcgaggaaacaattgcgaatttgcaaaagcagattgatgaattagaaaaaaatatgcaagaggtagtaaaagaaaaagcaagtaagtcttatgaaagtttagtaagtattcccggcataggaaagttatccgctattgaattaatagcaatcacttcgaatttcgaaaactttacgaattacaagcagttatccgcatacgttggattatgccctcgtatttctgaatcgggaacaagtgtaaagggaaaaagttcattatctaaaatgggtatgagttccacgcggcaactattgtatatgtgctctatggctgctatcaaatgtaataaatcgtgtaaggaaatgtttaaaagactaatagagaatggtaagcatcgaatggttgccttaatggctgtcgcgaacaaactagtaaagattgctttcacaatcgtaaaaaaaggcgaactgtatgatgataaaaaagtatgtttttcttgacttttttatcacagt

SEQ ID NO: 9118 - DNA, 1559 bp, unidentified
  source 1..1559: mol_type = unassigned DNA; note = element_e4896c5
  misc_feature 1..2: note = core
  misc_feature 3..251: note = LE
  misc_feature 252..1478: note = CDS
  misc_feature 1479..1559: note = RE
  misc_feature 78..248: note = bridgeRNA
aacttcatgccgcatgagatgcttgcaccacgatgaatgaaaaccaggtgcagcaagtaaggcggcatggtaaaatataaatgcacggcatgagatcggctttttttgccgctacgagcgcgcgcatgaaactgattttgctctcctgttgaaccacaaattgtcccagccaaaaggcaataaggacgtatagcaaaataaacgctattcggagagcgcgccgtgacaacttttataaggagcgctggagtatggaagttgtctatcggtgttgttgtgggattgatgtgcacaagaaagtcattgtggcctgcttaaataatggcggagagcaggatctacgtgaatttggcacaacgaccagcgagatcaagtctttggcaaaatggctcacagaatcaggctgtgaaatgattgccatggaaagtacaggcgtattttggaaaccactgtataatttgtttgaactaatggatttggatgccatagttgtcaacgcggcgcacatgaaagcgttgccaggccgtaagaccgacgtgaaagacgcagaatggattgcggatctacttcgtcacggactgttaaaagccagttatatccccagccgggagcagagggaattgcgtgaaatcacccgttaccgaaaaagcctgacagaggaacgatgcagagaaaccaaccgtttgcaaaaaatcctggaaggcgccaatattaaattggactccgtggtgaaggacatcaatggcaagagtgcccgcaagctgctggaacggattattgaagatgacgttccaaccagtgaggcagaagtatcacggattgttcatggctcgatgcgctcaaagttggggcaacttgttacggcgattgagggaatcaccacgcctttgcagagaaaactgttggcgcaggtgatagaccatatcgatgatctgaacagacgaatcgccaacttggacgaactggttcaggattacatggatgaatacgtagcggcgattgcggctctttgcgagattcccggcatcgcccggcgcagcgctgaggtgattctggcggaaatcggtctggatatgagcagatttcccagtgctgcacacctctgctcctgggcgggtgtttgccccggaaactatcaaagtgcgggtcatcgaaagcatggaaaaacaacgaagggcaataaagctctcaaaacgattttgacccaatgcgcgaaatccgcgcgttctgtgaaaaagtcttacttctccgcacaatatcagcggatttctgcaagacgaggcaagaatcgtgctacattggcagttgctcattccatgttaatcgccatatatcacatgctcaaaaataatgtgcctttccgtgatttaggcgctgactattacgattccttcaatcgagacaaaaaaatacatggatatctaaaacgtctgaaagcgctgggttgggagcctgataccctgcctggctccgcctgaatccatgtttcctatagtgtaaacagcctgtccttggacaggacggattgttgcgcccttctgagggaaggttttcataac

SEQ ID NO: 9119 - DNA, 1532 bp, unidentified
  source 1..1532: mol_type = unassigned DNA; note = element_e4899e3
  misc_feature 1..4: note = core
  misc_feature 5..259: note = LE
  misc_feature 260..1507: note = CDS
  misc_feature 1508..1532: note = RE
ctcactggtgcacctttctgtccgggcgcggtaagttggccgtgctcaggtaggcttcggcgtccgggtagggagagccaggtccgcttgccgctcgacggcccggatgagacccgctcccctgcccggcgtggaaggccccaaccgaccacagggtgtagcgccacggcaccagaagccgagagcgcctttcagtgagcgatcggtgagaccttccaacgccggagcgagagagtgaatctctgcacggaggtgagacgtggaaggactgcatccaagctacttcgtcggaatcgactgggccagcaacaagcacgacgtctgtgtggtcgatgtcgccggcacgatcgtcgaagcgttcatcattgctcacacggccgagggactgggtgagctgatccggcgccttcgtcggttcggctccccgcagcacctgccgatcgcaatcgagcggccctccggtctgctggtcgatacgctggtcgaggccggtttctcggtcgtgcctgttcacccgaatgcactcaaggctacgcggccccgctacgccgcggctcccgggaagagcgatccgggcgatgcttacatcctcgccgacatcctgcgcaccgatggccaccgcttccggccgctgcgagccccctccgatcgcaccaaggcgctccgggcggccgtccgcacacgcgatgacctggtggcgactcgcgtgcagctcgccaatcagcttcggagcctcctggagagcttctgggccggcgcagcggccattttcgccgacgtcgacagccccatcgccctcgacttcctcgactcctatcccacccctgagagcgccgcccgcctcggacccaagcggcttgagcgcttcctcaagcgtgcggcctattgcggacgccggcccgtcgaccatctcctggatcggctccgatccgcacccgccggccatgctgctgaactggagagtgagaccaaaggccagctcgtgcgctctctggtcgccgtcctgcgccccctcgtagcgcagatccgggaactcgacggactcatcgctgcccacctcgctcagcaccctgacggcgagatcatccagtcctttcctcgcactggaaccgtgaacgccgcccagatcctggccgagctcggagacgaccgcctccgcttcaccacggaagcccagctcgccgccgaagcgggcgtggcacccgtcacccactcctccggtaagcaccgcggcgtcgcgtgtcgcttcgcctgcaacaaacggctccgcaaagccctcaccacctgggccgacaactcccgtcacgcgcacccatgggcccgggccgtctacaggaatgcccgcagccggggctgtgctcacccccacgccattcgcatcctcgccagggcatgggtgcgggtcctctggcgctgctggcaaaacgaaagcacctacaacccggccaaacacggaagggctacccccttcctgaccaccgctcaacccacctccgcggccgcttgaaccaccgagggttgacacagggtgt

SEQ ID NO: 9120 - DNA, 1622 bp, unidentified
  source 1..1622: mol_type = unassigned DNA; note = element_e490a32
  misc_feature 1: note = core
  misc_feature 2..301: note = LE
  misc_feature 302..1534: note = CDS
  misc_feature 1535..1622: note = RE
tgaccattcctttccgccttgctacaaggcacaaaaataaatgaaagcaacttgtagtaaagctatgtaaaaattgttagaatgtacttgagaaagcaaacacactacagagcacgaagaggtgagtaggttcagcgtatactgaactgaatatttatgtgtgtcagatgctctttcaagcacaattaattagggcattgaaccctgtaaacttatctttggagagatatactactcaatctttcagtgagcatccaatccctgtttgtttcctcaaaatattaattttgagggatgtgttgtgttaaaaatcgtttattctgtttgctgtggaatagatgtccacaaaacctttatctattgttgcattgcaactaccgacaacaagggtattaccacctacaaaagcaatcgtttttcgacttttactaatcaactgaaacgatgtgcaacttggctcaaagagaaagattgtaaggatgtttgtatggaatccacgggcaaatattggattcctgtttacaacattcttgaattgtcctgcaatattgttttgactcacccaaaatatgttaaagcaattaagggaaagaaaactgacaaaagggatgccaaatggattgctgacctttttaagcatgatttaattaacggtagctttattcctccggctgatattcatcagttaagggatttaacccgttatcgaaacaagctaactatttttattgtcggtgagaaaaaccgtgcgcaaaattgcctgactgtttccaatatcaaattagattatgtttttacttatgttttcggtaaggcttcgtcaagtatcatcaatgcccttcttctgaatccatcagagaaaatcacggatgtgtctaaatttagaacaaggggtatgaaatctactgatgaagaaatactcgctgcaatagacggtaacatctgtaatgaacaggctgaaaaactcaaaattattcgttcacatatggatagtattgaagagtgtaaggctaatcttgaatcggttattctcaatcttgctgagaagtacctgccaaagctaaatctgattttgagtgttctgggtatcaaatccttttccgcagtttctataattttggaaattggcgttgatatgtccgtgttcccaacatcaaaacatctttgctcttgggcaggtttaacttctcagaacaatgaaagcgccggtaaaaagaaaactactcgtattagtcgtggtggcgcttacattaagcctttattggttcaatgtgcacttgctgctgtcaagagcaacaagcaccccaaaatacgcaatcgttaccttgctctaaaaaagcgtagaggtcacaagaaagcaattattgctatcgctagaactctccttaccgcaatttacaatatcttaaagaaaaatgaaccctacaatccggatttgtacaaaaaatcggatttaccgccccaacataaaactgtcagctttgacgaggctgtattcattcttcaaagacagggatatatcattacttcctgattttcaactttttatttttgccgccttgtgggggcttactttgttatgcctttttttaaggtgtgttaaaatcatattctttcaaact

SEQ ID NO: 9121 - DNA, 1434 bp, unidentified
  source 1..1434: mol_type = unassigned DNA; note = element_e4a9a3a
  misc_feature 1..2: note = core
  misc_feature 3..115: note = LE
  misc_feature 116..1153: note = CDS
  misc_feature 1154..1434: note = RE
  misc_feature 1190..1384: note = bridgeRNA
agatggggtatccggcttgagcctcaccctggggacggcggtggatggtaggagaaaggtgctgcgacgtggtcatgttttgcaacagccacaagcatcggaaaggaagcgcagcatgaagcattatacgggccttgatgtctcggtgaaagagaccgccatctgcattgtcgatgaaacgggcgagatttgccgtgaggtgacggttcccagccaccccgatggcctgatcgcggtgttgcgagatccggcttggaatcttgagcggtttggtcttgaagccgggcctttatcgcaatggctattcgaggccctagccagggccggcctgccggtgatttgcatcgaaacgcaccatgtaaaagccttcctgaaggctcagccgaacaagatcgatcgcaatgatgcacgtggcatcgcgcagatgatgcgggtcaacctgtatcgtcctgtgcatgtcaaaacgctgacgagccaaaagcggcgagctctgctgacggcgcgcaagctgctgcaaggaaaggcgatcgccattgaaaacaatattcgcggactgttgcgcaattttgggctgaaggtcgggaaggttggagttgtcaaattcgaggagcggattcgagagttggtcgatgacatggcggatcttcaggaagtcatggatccgctgctgacagcgaggcgtaagttgcgtgaggaattctcccggttgcacaagaaggttctggatatctcgcgcaacgatgagatgtgccggcttctgatgacgatccccggtgtcggtcccgtcgtatcgctggcgttcacgagcaccatcgacattccgcaacggttcaagaactcgaaggctgttggaccgatactgggggtgacgccgaagctcaacgagtcgggagaaagcaagcgtgttggatgtatatcactgtgcggtgacgcgatgatgcgaacgctgctttacgaagccgcccagaccttgatgatcaatgtgagaaaatggtcatggctgaaggcctgggcgatgaacatcgccgaacggcgcggcatgcgaaaggccattgtcgcgctcgcccgcaggctggcgggcatcatgcatcgcatgatgagtgacggcactgaattttgctggacgcgggatgatttgctagccgccatctgatctcaacgataacggcgcggcataaaaaggagataacgggatccgcaaccggcggataggtgtctgtcgcaggacgatggtgaagtgagttcgaagatcgctttgttcggtcgtgaaattacgctcagaacgcacgcaagattgttctacttcatcattctaaccccatggtgggagggccaaaggccgatcccggagagaagcaagaccctgcgaaagacaccaaaaccggagaagcggaaaagttcgaaagcgcttgacctttaccagccgaatagaga

SEQ ID NO: 9122 - DNA, 1402 bp, unidentified
  source 1..1402: mol_type = unassigned DNA; note = element_e4ac96a
  misc_feature 1..2: note = core
  misc_feature 3..133: note = LE
  misc_feature 134..1150: note = CDS
  misc_feature 1151..1402: note = RE
  misc_feature 1170..1361: note = bridgeRNA
acatggggtaatcgcgggagcgcggcgcctccgggcctctactggccgttcgaatgggtggttgttccccgataagatgaacgaacgggctctcgacttgcggccgggcccaagcatcgaatggagaacaaccatgggcgagtatatcggtctcgacgtatcgttgaaagagacggcagtatccgtgcggcgggcaggcaagcggatttggcgcggcaagtgcccgtcggatccgagacttctcgctgaggtgatccgtcagcgggcgcccgaagttgagcgggtcgtattcgagaccggtccgttgtcggtgtggttttaccatgcgctgacggcagaaggccttccggcgatctgcatcgacgcgcggcatgccaaggcggcgctcgacatggctccaaacaaaacagatgcgaacgatgccgacggcctggcgcatctggccgaggtcggcttctttcgcgaggtccgggtgaagggctatgacagcatgctgatgcggaccttggtcgcagcgcgcaccaagctggtccggatcagcaccgagctctcaaaccagatccgtggtctgatgaagacattcgggctgctggtcccatcaagcaagggcggcaagttcgaggagcatgttcggcggctgctcgccggcaaggaggagcttgcgcgcgtcatcctcccgattctggaagcgtggcgcggcctacgcctgcgggcagccgagctcgggcgccagctcctgagcgccgcacgacaaagccaggcctgtcagcttctcatgtcgatccccggggtgggcgcggtcacggcaacctccttcgccaccgccatcgaagatccggccaacttctccaaatcccgctccgtgggagcatggcttggcctgacgacccggcgctaccaatccggagaggtcgattatgacggccacatctcgaggcgcggcgatgcccatatccgaggcctgctctacgaggccgcaaccgtcatcctgacgcgggcgcaggctgatagcgccctacgtagctggggcttgaagctgcgtgaaaagctgggcttcaagcgcgcggccgtcgcagtcgcgcgcaagctggccgtgatcatgcacgccatgttgaagtccggcgagccattcaaccgaaccgccgcctgacgcgtccaggctcgtttgcgccaatcctgaaggcgctctgagacgtcccggccgggacgtaggccgaaccattccgccgaggctgttgcagtgtcgagccatgctcgccgcctgcgctccacacattggaaggttcgccccgcgaagccccatcatgcggcgacttcatgtcgaccgcgaagacgaccgtgctcccggcaagcgacatcccagtccgcaaaaaaggcttgatcttcgagctgcgattagacg

SEQ ID NO: 9123 - DNA, 1386 bp, unidentified
  source 1..1386: mol_type = unassigned DNA; note = element_e4b0599
  misc_feature 1: note = core
  misc_feature 2..75: note = LE
  misc_feature 76..1131: note = CDS
  misc_feature 1132..1386: note = RE
  misc_feature 1151..1376: note = bridgeRNA
taatggcatggaccggccgtgctcccgggcggagcatgggagaacgggattgtcccgcagccacggagccatgccatgacacatcagaccgcaagtgagtgcgtcgccaccatcgggatcgacctgggcaagaacaccttccacctcatcggcatggatgcacgcggcaggatcgtgctgcgccggaaggtctcgcgtgggcaactgcagtcctgcctggccaatctgccggtctgtctcattggcatggaggcttgcgccggagcccatcacgtcgggcgtcagctcgctgcccttggtcatgacgtgcgcctgctgccggcccaatacgtcaaacccttcctcaagggacacaagaacgattatcgcgatgccgaggccatcgctgaggcggtgcagcgcccgactatgcgtcccgtgccgctgaagtcggccgagcaactcgatctgcaagctctgcatcgggttcgccgtcgactgatcggccagcgcaccgccgtcatcaatcagatccgaggcttcctgctcgagtgtggcatcgccgttcgtcaggggccggctggtttacgggaggcacttccggcccttctggcccaacgcacggacgtgctctcgccgcgcatgatccacctgatcgaagatctggcggcagactggcacgggctcgatgaacgcatcgagacgctcacccgtgacatcacggctctggcgcgacaggatgcaagctgccgtcgcctgatgggtattcctggggttggggtaattacggccagcgccatggtggcggcggtgggaaccggggcagcattcgccaaagggcgcgattttgctgcctggctcgggttggtccccaagcagatctccaccggtgaccggacgatcctgggtggcctgtccaagcgcgggaaccgctatttacgcaccctgtttgtcagcggcgcacaggccctcctgcagcgtccacgctactgggacggacacggctttgggcgttggttacaggcagcaggcgcgcggctacaccgaaacgtgcttaccgcggctctcgctaacaagctcgcccggatcgcttggggcgtgctgtatcgcggacgcgactacgaagcggagtatgcgacccgcacagcctgagcggggtgccgcagcagaatcctcccaaggttcgcgagaaggatgtaacaggatggacgaacggttgcccggcgcaccggaagcctgaacaaaaaaatggcccgtcgaggtcgtggcgtctaagcaggtcccgtgcgcgcggatttccatgatggcccggagccagagctccacaacgaggccggatagattgatgcggaccgtctctcatccatatgccacagccctcttgcaacgcacggccggtccatagat

SEQ ID NO: 9124 - DNA, 1559 bp, unidentified
  source 1..1559: mol_type = unassigned DNA; note = element_e4bb1f9
  misc_feature 1..4: note = core
  misc_feature 5..253: note = LE
  misc_feature 254..1549: note = CDS
  misc_feature 1550..1559: note = RE
  misc_feature 16..224: note = bridgeRNA
ctcactggtccaccctggtctgatcggtggttgaagagccaccgatgcacctgaggtgccgccgggtcatcgccctgctcgcttgacgcttggacgtcctgcgtgagttctgcgagacccggcggtcgcccaggacacgccgacggtcgacagggctgagcgccaccgagcgccgatcagtgagcgaaccggcagccgcgtcctggcaccgaagttcaggtgcctccccaccggtggaagcagcgaggaggctgtgaataagcatgccccgaacagtctgatccggaccagcgaccccgggcccacgagtctgccgccggtcccgccgggcggtctgaccgctgggctggactgggcccaggacgaccacgtgttgtgcgtcgtggacttcgcgaccggcaaggtccgggaccgcttggagctgccgcacgccagcgacggtctgaccgcgctggtgcgccggctggccaagctcggctgcgccgaggtcgcgatcgaacgcccggacgacccggtcgtcgacgcgctgctcgaggagggcctgacggtggtggtgatcagcccgaaccaggtcaagaatctgcgctcgcgctacggctcggctggcaacaaagacgaccggttcgacgcctacgtgctggccgacaagctgcgcaccgaccgggcccggctgcgcgtgctggtcccggacagcccggcgacgctgaccctgcgcgcgaccgtgcgggcccgcaaggacctggtcggcacccgggtcggcgtcgccaaccagctgcgggcgcacctgaacaacgtcttcccggccgcgaccgtgctgttcgccgacaccgacagcccgatcagcccggcgttcctcgcccggttcacccaccagggcctggccgactggcttagccccgagcggctcgcgcactggctgcaggccgtcggctactgcggccgcaccacctccgagcaactgcacgcccggctgctcgccgcgccccgcggcctgaccggcgacgacgggctggcccgggctcacatcaccctggcctatctggcgaccctgcagacgctgcgcgagcagatcaccgccctggagcagcagatccgcgagcaactcgccgcccacaccgacagccacatcttcaccagcctgccccgctcgggcaccgtgcgcgccgcccggctgctcgccgagatcggtgactgccgcgcccgcttccccacccccgcctcgctggcccgcctggccggcgtcgcccccagcacccgcgcctccggcaagagccggcacgtcggcttccgctgggcctgcgacaaacaactccgcgacgccgtctgcgacttcgccggcgacagccgtcgcgccaacccctgggcccaagacctctacgcccaagcgcgcgcccgcggacacgaccacgccgtgcacgtcctggcccgcgcctggctctacgtcatctggcattgctggcagaacagcaccgcctacgaccccactcagcaccacgcactccagcgcgtcctcacccaccaaaacaagatcactccgggggcggcttgacacagggcta

SEQ ID NO: 9125 - DNA, 1549 bp, unidentified
  source 1..1549: mol_type = unassigned DNA; note = element_e4be37b
  misc_feature 1..4: note = core
  misc_feature 5..265: note = LE
  misc_feature 266..1453: note = CDS
  misc_feature 1454..1549: note = RE
atcatgtataatgttaaacataaagatttcaaagttagaattttgatttttttatgttttttgttattataacaaacatcggtaaagacggattataacaggcacttcgagtgcgtatttttgaatgtctgccatataattatttattaatttggttgtagataatggaaactaattttaatattagagttcggatgattaagcatgtagaaatataggtaattcaatatgttgttaaccgaaatattaaagaaaggagatttttatgaaatatattttaagttttgatattgctaaaggtaaaagtgtttattgttttattgatgaactaaaaaatattattattgagccaacattaattgaacataataaaaatgattttgacaatttatttaatttaattaaagattatcctaatttaattgttgtaatggagtctacttctatttatcatttgccagttgaaaattattttagatctaaagcttttgatactgttgttatgaatcctaaactagttaaacaatttaaggatactttaaataagtctaaaactgataaattagattgtttcaaaattgctagatgttatttaagcacaattgataatttttattataaaaatgatgaatactttatgtataacccacttgctcgacaatattggtctttaattgaaggacaaaccagattaaaaaatagatataaacaattagttgaaattattttccctgaatttaaccttatttttaatgatttatatgatgatttagctctgaattttatacatgatttccctcatcctgttttatttattaatagacgcattgattatttaatgaattatttaaaagagaaaaatggtactacacaagcatataggtttaaaaacaaagttttaaaaatgaaagaacttgcttctaattcattgtgctttgtttgttttgattcatatcaagttaaaaatttagttcaaattattgaaatgattcaatatcataagtctgaaataaacaaaattaaaaatcaattaatcagtaaaatgaaagataaaaaattatttaaaattattaattctattcctggatttggagaattttccactgctttattcttggctgaagttggggatataacaagatttgatgataaatatcaatttatatcttttattggtattgattcagttacatcccaatctggtgtttctgcttatcatggcccaatttccaaaacaggttgtaaatttggcagaacccttttatttaatgttataactactactattcaaatatcagctcattctgataaatcaaaccctatatatttgttttttagaaaaaaacaatccgaaggtaaacatcattacaagtgtataatcgcatgcgaaaccaaattatgcaaaattatatacaagttatgttcttcaaattgtttgtacgaaaacaaatagactaatttatcctaatttttttaaaattgaggaaactcagttctttttgtcgtgattataatatcatatatttttgaatttgacaaaacttagata

SEQ ID NO: 9126 - DNA, 1400 bp, unidentified
  source 1..1400: mol_type = unassigned DNA; note = element_e4cc053
  misc_feature 1..3: note = core
  misc_feature 4..92: note = LE
  misc_feature 93..1124: note = CDS
  misc_feature 1125..1400: note = RE
  misc_feature 1095..1387: note = bridgeRNA
agatggggtggttgccgccctccccagacgacggcatcgcaatgtgccaggaaggtggtgtttacagccactgagcggaaaggacggcaaccatgacgaatgatgtaatgattggggtagatctggcaaagaatgttttccagctgcatgcagcgtcgatggcgggccagccacagttccgcaagaagctttcgcggcagagttttggcaagttcatggcgcagcagcctccagcggtggtggtgatggaagcctgtggcagcgcgcattactgggcgcgcgagatgatccggcttggtcatgtggtgaagctgattgcaccgcagtacgtgaagccgtttgtgaagcgtcagaagaacgatgcggcagacgccgaggccatcgtgattgcggctcagcggcctgagatgcgtttcgtcgagccgaagactgccgagcaacaaagcagggcaattttgtttcgcgcccgagaacggctcgtccaccagcgaaccgaaatggtcaacgcactcagggcctgcctctatgaatatggtcatgctgttccgcaggggattcaccagatcaagcggattgcagagatactggatgcgccgaacagcgatttgcccgatttgatgcgcgaagaatgcagggatttgctggaacagattgccgagaagacggtccgcatcaatgctcggactggcaagatcaaggcgctggcggctgaggctgacacggcgcggcgattgcagacaatcccaggggttggcccattgaccgctctggcagtcgaagcctttgcaccgccgatggagaactttcggtgtggtcgcgactttgccgcctggctcggcctcgttccacgccaattctcatcaggcggcaaagagcggctcgggcgcatttcgaaggcagggcaggctgatatccgcaggctgctgattatcggtgcgatgtcgcgcctgaactggctgggccgcaaatctatcccggaaggttcatggctggcgcgcatcgcagcgcgaaagccgaggatgctcgtggcaatcgcgctggccaacaagatggcgcggacgatctgggcgttgatgacaaaaaatgaggattatcgagatccggcgcaggctgcggcggcatgattggcatgccgcaaaatctacctgacgccagataatgggggtgtgagaaggcgacgacccgaatgggcaaattgatcgaacagatctggatcaggaaaaccagtttagagtcgtgagcattgcagctcgagagtcagatttggacctgatccgcagatcaccataccggccagcggcttctcgaaaatgccgcattcaaaggcctgacagaagaccgcactcgatcacatgcgcatcggatcagagacctcttgcatcacgggcggcaaccacaga

SEQ ID NO: 9127 - DNA, 1437 bp, unidentified
  source 1..1437: mol_type = unassigned DNA; note = element_e4d1ee0
  misc_feature 1: note = core
  misc_feature 2..218: note = LE
  misc_feature 219..1238: note = CDS
  misc_feature 1239..1437: note = RE
  misc_feature 15..230: note = bridgeRNA
ctgattgatacttgtgtcgggtgttgcggtgtttcgtagcatctagaggtaccggctggctgtctctctaagtgcctgccacctttcggttggcttcctatcgagctgtcggccggtcggtgtccttgccggggtgtggctcgaaagaggtgagaacactatcgacccgaatcaggagtgcccatctcggtttcaccgtcaacgagaaaggcattgttatgacgatgattggaatcgatccgcacaaggcaacccacacagcggttgcggtcgatgacgacgagcaggtgatcgacgagttcacactcggatcttcaaacgaccaggccgagcgtctcacaagttgggctgaaggactcgggaagcgtgagtgggctgtcgagtccgcgaacggcctcgggtatctggttgcccgccagcttgtcgcagccggtgagacggtgtttgatgtcccgcctgtgttggcgtcacgggttcggctgttgggctctggcaggtcgcagaagaacgatccgaatgatgcccgttcgatagcgatcgctgcgttgcgttcccaccggctccgtgtggttgagccggatgatcatgttgttgtgttgcgtttgttggtgaaacggcatcgtgacatggcgagactccgcaacaagcactgcagccgtctccacgcgttgctcatcgaactcgaggcaggtgggatcggtgtgaagatcagtgtcaccaacgcatccgggctcctcgaccgtatcgatgtcgtcgatgaggcttcccggtataggatcctggttgccagagaggtcgttgacgacatagccagactcgaccagacgctcaaggcctcgaagaagcggattgcagacgctgtcacagcatccgggacgtcgttgactgacattgtcggggtcggcccgatcggtgcagcaacgatcatcggctacaccaaagatgtgacccggttccccaccagaggccactacgcgacatacaacgcaacggcaccgatcgaagtgtcctcaggaggcaacacccggcatcggttgaacctgagagggaaccgcatcttgaaccatgcaatccacattgcagctgtcacccagctgcgccacgacacgaacggacgtgtctatttcgacaagaagatcgcagaaggcaagaccccgaaagaagcgatccgggcgttgaagcgacgcatctcagacgccgtctaccggcgactcatcgccgacaccaacaaccaatagaaaagggggcccgggaggacaaccaggaacgcctcgcgagttccacgcggccaacctaaatcctgtacagctggctctttggatcggtcactcccgaaccctgacaacaacgctacgacccattgcggcacaacgccagcgattccaacccacgcgcccgaaacgagcccacaaacatccccttgacacaaagaggctt

SEQ ID NO: 9128 - DNA, 1447 bp, unidentified
  source 1..1447: mol_type = unassigned DNA; note = element_e4d4342
  misc_feature 1..5: note = core
  misc_feature 6..231: note = LE
  misc_feature 232..1431: note = CDS
  misc_feature 1432..1447: note = RE
  misc_feature 1..235: note = bridgeRNA
cccccgttacctttttcgtggctcctgagcagggagttgtggtcgccaggttcggtatgactgatgcccccagtcgagtccatgatccggggggtggtgtcgccgggcctggtggcatcgaaggaccgctgatagggacacggccaccgctgggtaggtctcgtcgtaacgtgggtgccggccatcgatgcctgaccggcggccgcccgcgacgagcgaaagataccgtgcatgaccagcagttatggtgtgttcctcgggctcgatgtcggtaaggacgcccaccacgcggtcggtctcgaccccgagggaaagcggctgcatgacgggccactgcccaacagcgagcccaaactccgggcgttgttcgacaagctcgcccagcatggcccgttgctggtggtggtcgatcagcccgccacgatcggtgcgctgccggtcgcggtcgcccgcgcgaccggacaccaggtcgcctacctgcctggtctggcgatgcgccgcatcgccgatctctaccccggcaaggcaaaaaccgacgcccgggacgcgttcatcatcgccgacgccgctcgctcgctgcctcacgcgctgcgcccggttgatgtcggcgacgaggctctggccgagctcgatgtgctggtcggcttcgacgacgacctggccagcgaagccacacgcctggttaaccgcatccgcggcctgctcaccggcatccatccggcgctggaacgcaccatcggacctcgtatcagtcatccggcggtgctggaaatcctgtcgcgttgcggtgggccgaccggcatcgcgaaggccgggcgccgcaaactcgccgcgatcgcgaaggtccacgcacctcgcatgggcgacaagctcgttgaagcgatcatgaccgcgctcggcgagcaaaccgtcaccgttcccggcaccgctgccgcggacacggtgctcccgcgactggcggacagcctgagagctgtgctgcagcaacgggcgcagcttgccaccgaagttgaggagatactcgatgcgcaccctctcgccggggtcctgacctcgatgcccggcatcggagtcaggaccgccgcccgcatcctgctcgagatcggcgacgcctcgaacttcgccagctccggccacttggccgcctacgccggcatcgcccccgtcacccgcagctccggcaccagcatcaagggcgaacaccccgcccacaccggcaaccgcaaactcaaacgcgccttcttcctcgccgccttcgccgccctttccgaccccaccagcagggcctactaccagcgcaaaagagccgagggcaagaaacacaacgccgcactcatctgcctcgcccgccgccgctgcgacgtcatctacgccatgctccgcaacaaaacccactaccgacacccagccccgacgcccgctgccgcttgacaaccccatagggaca

SEQ ID NO: 9129 - DNA, 1170 bp, unidentified
  source 1..1170: mol_type = unassigned DNA; note = element_e4d5358
  misc_feature 1..2: note = core
  misc_feature 3..204: note = LE
  misc_feature 205..1167: note = CDS
  misc_feature 1168..1170: note = RE
  misc_feature 3..180: note = bridgeRNA
cttgtatgtttagacttgaaggggtgggcgggactaaaagcttgattccgactctagccagtacggaccgtgggagacttctcgtcccgccctttctacccaaagcgccgataaggaattcatcggtaaaaccgacgatagaggcaagccagcgcaacggtagcaccccgacaagtacctaaaccctagctcggaggattcgtcatgacaatccttacctcgccaacggtggtaggcatcgatgttgccaaagccgaaatagtcgtttatcgcgaagacctgaaaaccattcaagccatcgacaacaaccgccaggctgtaggccgctggctcaaaacgctgccagcgcaaagctcgattgccttggaggcgaccagtatctaccacttggataccgttgaaatggcccacaaaatgggccatcgggtttacgtcgtggatgcttatcgggtgagtcattaccgtgaaagtgttggccagcgggcgaagaccgatccctgtgatgcgcggttgttggcgcgttatctgagcagtgaacaggagcggctgcgcatttggagcccacctccgcatgcctacaaagtcttgaaaagcctgcttcaacgacgtgcagaactcatcaagttgcgtgtcagtatctcgctgagctggtctggcgaaccgcttctgcaagagtcattggccctacttctgaagtcctacgaacaagctgaacaggcccttcagcaattgctgcgcaaagtcagccgagaggctggcatcactgaaaacatcaagcgttgcaaagccattgaaggggttggagaacttacggccactgccttggcaaccgctttcatgcgcggccaattcgccagcagtgatgctttcattgcttttttgggtatggacttgcgagcaaaggactcaggcaaaaagaacgggcctcgccatctgtccaaaaagggcgatgcggagttgcggcggctggcacacaacgcggcaatggcggcgtgtcgatcgcccgcttggaagccgtactacgagtcttttctggccagggggctcgccaaaacccaagccttggtcatcctcgcccgcaagctttgccgggtggcattcgccctgatgaaaaaccagagcgaatatctacctaatttaaggttgcagggttcccctgcaacatagaat

SEQ ID NO: 9130 - DNA, 1392 bp, unidentified
  source 1..1392: mol_type = unassigned DNA; note = element_e4d5649
  misc_feature 1..2: note = core
  misc_feature 3..123: note = LE
  misc_feature 124..1137: note = CDS
  misc_feature 1138..1392: note = RE
  misc_feature 1154..1388: note = bridgeRNA
agatggtatggacgcctccctttctgacgatcaaagaggccaaagcaagcagggcctcgcgatccaacggcatcgatgtgccacagtggaagtgtgatccccactgatagacggaggccccaaatgaagcttacgacatatggcgtagatattgccaaacgcgtgttccaaatacattgggtcgttcccgaaaccggcgagatacagcgtaaaaagctgaaacgcgctgacgtcatggcgttctttcgtctgcaagcccccgggcgggtcgtcatggaagcctgcggcgcggctcaacactgggcgcgacagtggcaaccgctgggccatacggtccagctgatccatccgaagtttgtgcgtccgtttgtcatgaccaacaagaacgacgctgcggatgcgcaagcgatttggaccgccgcccagcaacccggcatgcgtttcgtcctgatcaagagcgaagccgctcaagccgtcttggcgctgcatcgcatccgcagccaactggtgaagtttcgcaccatgcagatgaatcagctacgcggcctgctgggggaattcggcatcgagctccccggcgggcgcgaagccggtctggcggcgttaagggacatcgactgggaacgtgtacctgcgttgttgcacgccgccttgcaaatgcagatgcagcggctgcgggagctggatgagcagatggcgctgattgagcgccagcttgcgcaatggctccgttccgatgacacctgcagtcgggtggcggagatcccaggagtgggcttgctgacggcaacggccatgattgccgcgatgggagacgcgcaccattatcgttccgggcgagcttttgccgccagcttgggactcgtacccaggcattccggtacgggcgggcatgtgcagttgggcggtatcagcaaacgaggagatcgctatttgcgtaccttgctgatgcatggggcccgttcagtgattctgcaccagggtaaggataaggcctcgccctggttacgtgatttactggcacgcagacccttcaatgtggcggtagcagcactagccaacaagatggcgcgcaccatttgggcgctggtggcccatcagcgtcgatatgagtcgggctacggcatcgtagcctgaggaaggcttgaacatggtttcactggttgcgtaaggagcagctgcatgtgatggcatacaggttggaccgcgggaggccaagtctgataagagcgcaggatctagaatccgcttgttagcagagaccgtcttccggcgaattccatcaaggcccgcagccctatcggtctgcaacaaggccggatataagcgagcaaccaaccgctgcatgtcatcttgtgaaactgcccttggcaaacgggaggcgtccatata

SEQ ID NO: 9131 - DNA, 1376 bp, unidentified
  source 1..1376: mol_type = unassigned DNA; note = element_e4e55d6
  misc_feature 1..3: note = core
  misc_feature 4..87: note = LE
  misc_feature 88..1110: note = CDS
  misc_feature 1111..1376: note = RE
  misc_feature 1118..1362: note = bridgeRNA
tgatggggtggacggctcccgattccacggcatcgtgctgtgccaaggtggcgctgtcacgggccaccaacggagaggagccgccccatgaagattgccacgatcggactggatatcgccaagagtgtttttcaggttcacggcgtcgatgcagacggcggcgtggcgctgcggcgcaagctgcggcgggatcaggttttgaagctgttcgggagcctggagccgtgcttggtcggtctggaggcttgcgcgaccgcgcaccattgggcacggcagatattggcgttggggcacgatgtgcggttgatgccgcccggttacgtgaagccgtatgtgaagcggaacaagaacgacgcggcggatgccgaggcgatctgcgaggcggtgacgcgaccgacgatgcggttcgtaccgatcaagtcggcggaggggcagagtgtcgtgatgttgcatcgggcgcgacatctcttggtgcgtcagcgcacggcgcaggtgacggcgttgcgggcgcatttggccgagtacgggattgtcgcggccaagggccgggaacgggcgcgcgatctctggacggtgctggaacgcggatcggatgcgctgccggagttggcgcggcggacgctggtcctgatcgcgcgcatgatcgaggcgctgagcgagcaggttcgcgccatcgagatcgaactccaggcctggcatcgcgctcacccggccagtcagcgactggagggcgttccgggcatcggcctgatcacggcgacggccttggcggcgacggtaagcgacgcacgcgcatttcgttcggggcggcaattcgcggcttggctggggctgacgccgcgccagcactcgagcggcggcaagcaacgcctcggcggcatttcgaaaaagggggatcgctatttgcgccagctcctggtcgtcggcgccactgccgtcgttcggttcgccggtcgccgaaccaacgacctcagcctctgggccaatcgactgctcgaacgcaagccggcccggctggtgacggtcgccgtcgccaacaagatggcgcgaatcgcctgggcggtgatggcgcgcggagaggcctatcgccccatgccgagcgcaggctaaggcgggtcggcgccaacgacgatccaaccatttgggcaagggagagcgacgaacgcgatgacgatcggtcaagccgaggatcgggacgccccgaatgattcaccgcgccaccaagcgcgcaagcgtgatgaggacccgatcccaggacatcatcatggccagcggctctcacgatgccgcgcgacacaagccggacacatgaatgcatctgacccaatcgtcacgccgccgtcgaaagttcttgcccaacgggagccgtccacaca

SEQ ID NO: 9132 - DNA, 1553 bp, unidentified
  source 1..1553: mol_type = unassigned DNA; note = element_e4f367d
  misc_feature 1..2: note = core
  misc_feature 3..76: note = LE
  misc_feature 77..1246: note = CDS
  misc_feature 1247..1553: note = RE
  misc_feature 1267..1487: note = bridgeRNA
agatcccatggggaggtggatagcgaccagcgctctggcagagtgaggttgcgaaccactcactctggagacgaccatgccgactgttgctgaccgagctgaagcgccgaccgctatccaaacgaatcttgccgcaatattcacctcattggaactgagccgctctatctggctgatcacatcgctgtcgccgggctgcggcgagaaaatgtcaaagcattcagttccggccggcgacattgcggcgctgctggcgcgcttttcggagttgaaacagaaagcgttggcgcggacggggaaatcctttccgatcgtcgctgtccaggaagcgggtctcgacggcttctggcttcatcgcgtgctggagaaggaaggaatcgaaagccacgtcgtcgatcccgcctcgatcgcgacgtcgcgccggcggcggcgcgccaagaccgacaggatcgacggcgagacgctgcttcgcgcattgctggcgtataagcgcggcgaacctcgggtgtgcgcgatggtcaggacgccgacgcccgaggaagaagaccggcgacgcctctgccgcgagcgcaaggtgttgatcgccgagcgcgtcgagcatgtcaatcgcatcaaagggctgcttttcgcacaggggatatcaggttacgagccgctacgccgcaatcgccgccaacgcctcgacgagctgatgacgggcgacggccgtcccctgccgacgcatctcaagacccagatcagccgcgaactcgatcggctcgaactgctgctggatcaaatcaaagcggcggaagccgagcgggacgcgctgctcgccgcacaacaggccgccgcgccagcgccggtggggaaaatgttgctcgaatttaagggcatcggcgcggagttcgccgccaacctctggttggaggcgctattccgccacttcgacaatcgtcgccagctcgcgtcttacgcggggctggcgccgacgccctggcaaagcggatcggtcgatcgcgagcagggcgtttccaaagctggaaatccacgattgcgagccacgctcgtcgagctcgcctggctatggctgcgccatcagccgcaatcggcgctggctctgtggttcaaagaacgggtcagccgcaacggaggccgcatgaagaagacgtttatcgtcgcgctcgcgcgcaagctgctggtggcgctgtggaaatatgtcaccgccggcgtcgtcatcgagggagccgtgatgaaagccgcctgacgacaagcgctcaatagcttctcaaatcttccaggacctgatcagttctggcggatccgggtggacgaaccgcgattgcccatggcctgaaatgccgatcacaagaatggtttcgcccacctgagcccctgccgccgcaagcgggatgttggtgttgccgtcttgagcggcgaccgtatgtgaggttgatcgtgctcggaaacgggccgcgtcatgcaatagggctcgggactcggatactgaaacaatcaagcgaggtttagcatgcacgaatgaatcgcacccttgacccgaagctccccatgtg

SEQ ID NO: 9133 - DNA, 1363 bp, unidentified
  source 1..1363: mol_type = unassigned DNA; note = element_e4f7ac7
  misc_feature 1..3: note = core
  misc_feature 4..245: note = LE
  misc_feature 246..1037: note = CDS
  misc_feature 1038..1363: note = RE
  misc_feature 3..219: note = bridgeRNA
cttatattatatttagcgcagttagctactgccaaagcccaagtggtatacttggaataagccactgtggattagttcatttcctccaatcgcttgacgatttccgaaaggatctaaccacagcttttgtttcaattggtaatgagtttgataacgcatagacgttttatctcgtctaaggtaacaaggcaaaaagttcgtggataaccaagtagacttgaaatactatatctggaggtactcccatgctttatgtgggcattgatatcgctaaaaataaacacgatgttacagccttgaatgttccaggaaaaactgttcttaaaccactcactttttcaaataataaagctggttttgaactcttagatctgtctcttcgacagctcaaccaagactgtctcatcgctcttaaacttctttctgaccccaatcgtgaacaatttcaacacgataatcggcaagtagacctaaaaatactggctagacatattcatcgtctcaagaaaaaacagtctgattggaaagtacaatacactcgttgtcttgatatcatctttcctgagttggataaaatcgttggaaagcattcagaatatacctaccaactcttgacgcgctaccctaatcctcagaaaaggattgaggcaggatttgataagctgatagaaattaagcgattgaccgcttctaaaattcaggatatcctctcagtcgcacctcgttctatcggaacaacatctcctgctcgtgaattcgaaatcatcgaaatcatcaaacattacaagaggctcattgacaaggcggaaacatgtgtcaatgacttgatggctgagttcaactcagtcatcacgacggttactgggattgggggtcgtttaggggcggtcattttagccgagattcgaaatattcatgcctttgataatcctgctcaattacaagctttcgctggactggattcttctatttatcagtcaggtcagattgatttagctggaagaatgatcaaacggggttcccctcatctgcggtaggcactcatacaagctgccaaagcatgcgctcgcttttcacctgcttttaaggcctatcttaagactaagttagaacaaggaaaacattacaatgtagccatcatccaccttgcaaaaaaacttatccgaaccctgttttatatcctaaaaaagagctgccatttgacgaacaaaaagtgatgtaatttctgaaatcaacacaggattacctttgaaaaaatggactttttcaagggctttttgccgtgctctaaaatcatcgccaaatcatcaaattgaaataagaaatagtttagataaaactattgacttttcttatagtttgt

SEQ ID NO: 9134 - DNA, 1375 bp, unidentified
  source 1..1375: mol_type = unassigned DNA; note = element_e4ffc66
  misc_feature 1..3: note = core
  misc_feature 4..75: note = LE
  misc_feature 76..1107: note = CDS
  misc_feature 1108..1375: note = RE
  misc_feature 1112..1362: note = bridgeRNA
tgctggtgtggacggcttcttaacccaccggcttaatgacgtcgctgtcaaaagccagttgagaggagagatccgatgaagaccatacccatccgtatcggcatggacacgtcgaagtccgtcttccagttgcacggagttgacgccaacgaaaatactgttgttcgacgtcagcttcggcgcgccgagatgatccgctactttgagaagctgccccctgcgctggtcgcgatcgaatcctgcggcagctcgcatcattgggcgcgcgttctctcgtcgttcggtcatgacgtcaagctgataccgccgcaatatgtgaagccttacgtgaagcgtgggaaaaacgatgcggccgacgccgaagccctttgcgaagcggtaacacggccgaacatgaggtttgttccgatcaagtcgacggagcaacaggcggcatgcatgctgatgaccgttcgggaacgtctggtcagcgtcaagtcgcagctttccaacgcctttcggagctatgctgctgaatttggcatcgtcgggccggcagggcggcagaacgttaatgcattgatcaagcgggttctcgaggatgacaccctcccagagctggcgcgggatcttttccgttttcaggcgaaagaatacgcagcggtcgaagcacgccttgaggagatcgaaaccagactgatggcgtggcatcgggacgatgatgtcagtcggcgacttgcaacgatccctggtatcggccccataggatcggccatgctgagcatgaaggccccgcccgccaagagttttcgatcaggtcgcgacttcgctgcctggatcggtctgacaccaagggaccattcgacgggtgggcgaatgcgtcatggtggcatcaccaaggctggcgacgccgggttgcgatcagtgctggttgtcggtgccacggcgttgctcaggcatatcagggcgggccgacacaagccgacaccttggctcgcggcgctcctcgagcgcaagccgccgaagctagtcgccgtcgcactggccaacaaattcgcgcgtattgcctggcgcctgatggtgtcgggtggaatttatagtcgaccacctgacaggatggcggcataatccgagatagggctgtcgcgggcgggtgcccggcagatagtcttgccagacttgcaggacgcaggagatggaaaaaccaatcggtcgatacgcgcgtgattccgaagattacactggcatcgacgatgccgcctgtgtgcttggagcgggcgtagcgaacaccatctgggccagcgagctaacctcgcacaaacaggccggacatctgatagcaagcgatttggttagaagtctgctacaatcctgacaagtgggggccgtccacatc

SEQ ID NO: 9135 - DNA, 1611 bp, unidentified
  source 1..1611: mol_type = unassigned DNA; note = element_e50d749
  misc_feature 1..2: note = core
  misc_feature 3..275: note = LE
  misc_feature 276..1484: note = CDS
  misc_feature 1485..1611: note = RE
  misc_feature 12..295: note = bridgeRNA
ctattacaataaatttggacaggaaagccggacagccagtccggctttccctccatctcgtgcctaagctacaatgagaggagcaactggctgaccaatcactccttgggcttgtatgtccgtgtgaaagactgttagccatcctctcgttgcagcgttcgatttaagcaggttgaaccaccggatgtcggagagttcgtgtcacacaatagattgaatcggcagcgagaaaagatggattccggttgcagattctttgtattggaggaatgtgaatgaactgcgttggcatcgatgtttccaagggcaagagcatgattgcagtcatgcgcccttttggagaggtggttgtctcgccctttgaggtgcttcacaccgacagcgagctaagcaagctggcagggctgctaaaaagtctggacggtgagacccgtgtggtgatggaatccacaggttatcaccacacacctgtggcctggctgctccacgacgcgggcctttatgtctcagtagtcaatgcaatgctggtgcatgactacgggaacaacagtttaaggcgggccaagaccgacaagaaggatgccgtgaagctggccaactgcggccttgatcattggctcacactgccgagatatgtccctgaggaggatacccggctcatgctaaagacctgctaccggaagtaccagcagtattctaaagtacagaccatgctgaagaataacttgatctccctgctggacattgctttcccggacgcaaaccgcctgtttaccagtccgccccgcgccgatggcagcgagaagtgggtggactttgtagccgctttttggcattgcgagtgcgtctgcaacctgtctgagaaggctttcaccgccaagtaccataaatggtgcagaaagcacaggtataaattctgcgaagataagacgctggacatttattcctctgcctgtggacacttcggtgtcattccaaaaacggatacggcaaaacttttggtagaacaggccatttctcaactccagacaacttcttccgcgttagctgctctcaaacaggagatgcagtctctggcagcttctcttccggagtatcctgtggttatggggatgtttggtattggacctgccctcggccccccactcatggctgaaattggcgatgtacgccgcttttactccaagaaagcattggtggcctacgctggactggatgctcctccgaacgattccggcgatgtgactggcaggcacaaatccatgagcaaaattggcgcatcctccttgcggcggacgctgttccttgtcatgagcgtctatttgcagaatgcgccgctggatgaaccggtctaccagttcatggacaagaaacgctctgaaggcaagccatatcgtgtctacatgatggcctctgccaacaagttcctgcgcatctactacgcttctgtgaaagcctacttggaatccctggagcacgactgatttttacactctataccatctggctggccgccgttttaattttgagatgctcagcggcttgattttgtattgcattttttcgcctccctaaaaatctgaaatttctacttgacttttattagcaggt

SEQ ID NO: 9136 - DNA, 1317 bp, unidentified
  source 1..1317: mol_type = unassigned DNA; note = element_e514a45
  misc_feature 1..2: note = core
  misc_feature 3..59: note = LE
  misc_feature 60..1079: note = CDS
  misc_feature 1080..1317: note = RE
  misc_feature 1100..1305: note = bridgeRNA
ttatgggatggacgtctcccgcttttctgccagcatcgctggccgcaaaggagggaagcatgtcacttaagttacttgctatcgatctcggcaaacgttcgttccactgccatggcgtcgacagcgatggggtgatcatttcgcgcaagacgagccgatccaagctgctcgagacgatcaaggacctggctccggagatcattgccatggaggcgtgcgctagcgcgcactattggggccggcgctttcttgctgatggtcgtcgggttcttctaatcaatccttggtttgtgaagccgttcgtaaagggatccaaaaacgatgccgcggatgcagatgggatttacgaagccgctttgcgcccgacaatgagattcgttccggtcaaatcccctgagcaacaggatttgcaatcccttcatcgtgcgcgggagcgggttgtctgcgctcgaaccgcgctcatcaaccatatgcgggggcttctcggcgagtatggcgtcatcctaccccaaggcgcatggcgctttctggctcaggcgcaggacgccatcgcggacgcggagctctctgatctcacgcgggagctctttggcgatctgctggaggaactccgcgctctcgatcttcggctcgacaaactcgaccgacagcttgtgagcctttgcaggacgaatgaagcttgtcggcggctgtcgaagttgccgggcgtcggccccgtgatcgcaacggcgctcgtcgccgcggttgatgacggtcgtcattttcgctccgggcgtgaactggcggcgtggattggcctcgtgccccgtcaatatacgacgggaggcaaacctcgcctcggcggaataggccgacgcgccaatcactatctccgacgtcagatgatccatggcgcccgcgccgtcatgtttcgattgacgaaacacgacgatcatcgttcccagtggttgaaagcgcttgcggcgaggcgaggctttaatcgggcgatcgtggcgctcgctaacaagacggcgaggatcgcctgggccgtactgacgcgtaaggaggattatatggccttgcatgatttaccccattaacgctgaagtgaagactgtttcgaatgcgaggtgatatttgatggcgcgtcggcaaggaccgcaaacttctaagcctgatctacgacatggccttcgcggccgatcatgttatgaggccggaagcagcggattcccatcaaggccaggggcgcacaatcgtcccgcgacaggccggatagattcgtgcattacagccgcccacgccaacaaatcgccttgcgcgggagacgtccataga

SEQ ID NO: 9137 - DNA, 1407 bp, unidentified
  source 1..1407: mol_type = unassigned DNA; note = element_e516c8e
  misc_feature 1: note = core
  misc_feature 2..90: note = LE
  misc_feature 91..1125: note = CDS
  misc_feature 1126..1407: note = RE
  misc_feature 1181..1399: note = bridgeRNA
caatgggatggacgcccccacccgcaaacggcatcgatgtgccagagtggaagtgtctagcaaccacttgaaccgagaggggcgtccgccatgaagcttacgacagtcggcatcgatctcgcgaagaacgtgttccagatccacggcgtggacgagcggggcaaggccctggtcaggaagaaggtgagccgtgatcagatggcgacgtggttcgcgcgcctggagccttgcctgatcggcatggaggcgtgcggcagcgcgcatcactgggcgcgcaagctgcaggcgatggggcacaccgtgaagctgatggcgccgcaattcgtcaagccgtacgtcaagagcaacaagaacgacgcggccgacgcggaggcgatctgcgaggcggtgacccgcccgaacatgcggttcgtgccgatcaagaacaccgaacagcaagcggcgctgtcgattcaccgggcccggcagggcttcgtgaaggcgcgcacggcgcagggcaatcagatccgcgggctgctggccgagttcgggttgatcgtgcctcagggtatcgcccacatcgtgacgcgcgtgcccgagctgatcgaggatgcgaccaacgagttgacggcgccgtttcgccagctcatcgaccggttgatcgagcatttcaaggagctcgatcgccaagtcaaggaactcgaagtccagatcaaggtgtggcatcgcgacaacgcgctcagccgcaagctcgaggagatcccggggatcggcccgatcacggccagcgcgctggtggccacggtgggcaacgcgacgagcttcgaggatggccgacaaatggcggcctggctggggctggtgcctaagcagaattcgagtgggggcaagcaactcctgctgggcatcagcaagcgcggcgacgtctatctgcgcacgctgttgatacatggcgcccgatcggtcgtgcgaatggctcaggcgaagatcgccgcgggcattgcgcagccgagctggctgcacaagctgctggaacgcaagcacgccaacgtcgccgcggtggcgctggccaacaagaacgcacgcatcgtgtgggccctgctggcgcacggacgcgagtacgaggccggctacgcgatggcgtagcgcagccgcaccgcataaccctcgaatacgcttaggaaaaggagaaaaccccaccaccgattgcacaagcttgttcgcagtgatggcaaaccaggtcagaccgtggatggccaaagtcttcggcagctcaggcacctcgagtgcgacggagcgatgagaccccatccagcaaatcccatcaggaacggctgcttgcacagggcacagttcggatgtacgggagcaatctattcctgtagtcagcacacgcgaaagagcttggcaaacgggggcgtccatgta

SEQ ID NO: 9138 - DNA, 1343 bp, unidentified
  source 1..1343: mol_type = unassigned DNA; note = element_e5203d5
  misc_feature 1..3: note = core
  misc_feature 4..275: note = LE
  misc_feature 276..1100: note = CDS
  misc_feature 1101..1343: note = RE
  misc_feature 13..256: note = bridgeRNA
cttatataatgtatttaggttgttaaaggtaacctatgatcctttatcgactaagtattattcagttttactgtatactattgttattagatagagtgtactcgttccctccttgagatttaatctcgtacttgaaagagtgagtcctctaatcttttaactgtttacgaataagttagatgttgacccttccagggtacttcgtatataccataaggcagtaacgttattagattttgaggtgtctatctaaaatttcattttcgaggtatcttatgttttatttaggtattgatattggtaaaaatactcatgttgcttcattagttgatgataagaaaaaagttatctttaaagctttttctttttcaaattccattgatggtgctgagagtttaatccttaaactagaggctttcaaaaatgaacttgaagttggtatggaagctacaggtcattattggttatctctatactcatatcttgttgaaaaaaactttactgttcgtgttatcaatccaatccaaactgacggttggcgacaaggtgctgatcttcttagatatggagatttcgttgagacttcactttctaatgaagattatttatctttgagaaatctttccagatttaggtcctacctcatttcttcaattggcgatcttaaaagaaaaactattgcacttttagaccaagtttttcctgttcaatatgcctcttttagtaatatttttgggaagacttctaaggaaattctttcaaatttctctactccttctgattttgaggatattaaaagattttctaatccttctaaacttgtcgcttatgctggtttggatgctagcgtttctcagtctggagaatatgaatctacttacaatcatatgagtaaaagaggttctccttacttaaggcgtgctctttttcaatccgctcttagagctgaattttgtgaccctgttttttctgcttattatcaaaagaaaattacagaaggaaagcatcatctagttgctaccaatgcagttgctagaaagctttggcatactatttttgctgttcttactaagaatgaaccttatcaagcgcagagttagtttttgcttaactgtatacaaatttttgataaaggttctgtaaatgacgagctttgctcgggcatagcctttatcatttacaggttcttttgagaaaattactatttaaaaggcaaaaactttactaaccctattttaaatcttaaactttagggtgctttttcatgcttatttttattcagtttttatcaatatcattccttatattttctttgtttcacctcttgacttttaatagttagt

SEQ ID NO: 9139 - DNA, 1415 bp, unidentified
  source 1..1415: mol_type = unassigned DNA; note = element_e522617
  misc_feature 1: note = core
  misc_feature 2..89: note = LE
  misc_feature 90..1154: note = CDS
  misc_feature 1155..1415: note = RE
  misc_feature 1157..1407: note = bridgeRNA
caatggaatggacgtcgccttcctcctgcattcaggcgtataacgatatgtgatagttcgtcgtcaccataatcaaaggagaaacctccatgtgtaaagcagcaaccttgattggtatcgatctggctaaaaatgtatttcatattcattctgttgataataaaggtaaccagataaaagcactgaagctttctcgtcataaactcgaggaatatctacaccgtagtcaacctgttattgtcgcaatggaagcctgcgccagttcgcatttctgggggcgactttgcatgtcactggggcatgaggtacggttggtttcaccccagtttgttaaacccttcgtcaaatcaaacaaaaatgatcgtaacgatgctcgtgcaatctgcgaggcggcgcttcggccagatatgcattttgttcctgccaaaacggttgagcagcaggcggtattgagcctgcatcgcattcgcgaagttctgatagggcagagaacagccacgattaaccagctcagggggctattaagtgaattcgggctcccaacccccgtcgggcgcagcggtttatacaaaatccttcccacattacttgaagaactgagtgaactctcgcccggatttctcgtgacctgcatcagccagcaatgggtgcatttgcaacagttggagcagcatattaacaatgtgacacatcagatcgaagcacatgccagacaatctgatgtcgcctaccgtctgcagaccattccgggaattggtccgattacagcttccgcactggatgccagcataggtaatgccaggcagtttcgggcaggtcggcacttggcagcgtggctcggtctcgtacccagacagcattctacaggaggaaaacctgtgttactggggaccagtaagcgaggagactgttatcttagacagctatttgtgcatggtgccagagccgttatctccgttgcacaacgcaacgagggaaaacgggataagaccatcaccgggtggctaagcagaaaacatatcaatgtggctgtagtagccatggcaaacaggaacgcccggattgcgtgggctattatcgttcacgaacgcacctatgacgcacagtttcgtgaggaacttgctggcagattgttggccagaaaagatgaatgaaccccttcccagattgctacaggtaattaactgacataatggcacagacaggtcagaccggtgttggaacatcccgtggagttcgatagtcaggaactttccgttcaagacttagcggtcgtttgggagccagcaagcagattccattatgggcagcgtacgataaactgacgcacaaagagcccggatatacgactgcgatcttcactgtcggcatcagaatggcaacaattacctggcaaaacaggagacgtccatata

SEQ ID NO: 9140 - DNA, 1208 bp, unidentified
  source 1..1208: mol_type = unassigned DNA; note = element_e525180
  misc_feature 1..2: note = core
  misc_feature 3..187: note = LE
  misc_feature 188..1180: note = CDS
  misc_feature 1181..1208: note = RE
  misc_feature 12..197: note = bridgeRNA
cttgtatgttgaagctttgggtgattagctatccccaagctctaaaatcagtgaggatgcttgaccacataatgctcgacattgatctgtagattatcccctgattttacttactcaaatactggatggtatccaagcgcgtagtcgtatgactaatgatgctgaatgtacaagtggagtcgttgatatgagtgtaagtgttgggattgacgttggtaaagaatatttagatatttgtttgctacacgaccaaaccaagagcgggcgaaagcatcgtaaatttaagaacacaaaaggaactcattcggaaataagtcgttggttgataaaggtttcaaagtgcaaacctgaagatactttgatcacgatggagtcaacaggcgtttaccatgaatcgatagcattgtacctacatgctgttggttttcgcgttttcatatcgaacccaggcaaagcacataaattttcccaatcactagggctagtacataagacagacaaatcagactcttatatgcttgccttgtatggtgacgctcagcgtgaacgtgctcaaatatggacacctgacaatattaatactcgaaacatcaggtcattggttcgacggctttcagctctagaaaaagatcgattgagagagtctaatcgcttagaagctagcgaaatcagtgatgcaaatgagcgagtaaaaagctcaattatgcggatcgtcagcgtaatcgatgaagaaattgcttcaatcgaacaagagatcgagttagctattaattcagatgctgatatggagaggaatcaccaacttctacaaagtgttgtaggtattggtaaagtcatgtcacgtgaacttgtttacttgttcagctctaagaaattcgccaccgccaagcaagcagcagcatttattggtctcatccctcaactaaatgaatctggaaagctaaagggtagaacgacaatgagcaagaacggaccgtctagggttcgggctaagttgtttttagcagcaattagcgcaagcacccataaccctgacattagagaacagaaaagacgtttgctagcagcaggtaaaaccaaaatgcaggcacttggtgcggcgatgagaaagttgattcaaatttgctttggtgtgctgaaaacacaaacaaaataccagccccaagtgaccttaaactaggtttgcgtacaaggatgagagatggtat

SEQ ID NO: 9141 - DNA, 1434 bp, unidentified
  source 1..1434: mol_type = unassigned DNA; note = element_e526e82
  misc_feature 1: note = core
  misc_feature 2..85: note = LE
  misc_feature 86..1117: note = CDS
  misc_feature 1118..1434: note = RE
  misc_feature 1207..1425: note = bridgeRNA
taataagatggtccgccggcttgatcagtggctgagcagtgagcgatcttggaggcgagcttttatccgaggaggatcattcgacatgcagattcgttcggttggcatcgatcttggcaagacgacatttcacctgggggcacttggcgatggcggccaggtgctgctgcgcaggaagtttacccagaagcagctcatccatttcaccgcgaagatgcagacttgcctgattggcatggaggcctgctccggggcgcactttctgggccgtgttttgcgcgggcagggccatgacgtgaagttgatcccggcgcaatttgtaaagccgttcgtgaagtccaacaagaatgacttcatcgacgctgaagccattgccgaggcggtggatcgtcagaatatgagatttgtgcctatcaaaacagaggaccagtcggatttgcaggccatgcaccgcgtgcgggatcggctcatctcaaggcgcactgcggtgatcaatcagttgcgcgcgtttcttctagaacgcggtatggtgtttgcgaaaactccgtcaaagctgcgccagcagatgccctatgtgctcgaagatgccgaccagaacttcactccgcggatgcgtaatctgctcggcctgctgtggagtgagtggaaagaattggagcagcagcttgaggggctcgaccgtgaagtcgagcagatcgccagcggcgatgcggcgtgccagcggctgcggcagattccgggcataggcccattgattgccaccgcgatgatcgcggcgattggcaacggagcagcctttcacaaaggccgcgaatttgccgcctggctgggcctggttccgaggcaatattcaaccggcggcaaggcgaaactatgcggcatcagcaagcgcggcaattcttatttacgcaaaatattgatccatggggcgcgcgccgccgtgactcgcatgaagcgtgagcgagccccgatgggttcatggatgacggcgttggaagcgcgagcaccgcataacgtattggttgtcgccatggccaacaagttggctcggattgcatgggcagtactgtcgagcggcgaaaactaccgggcactgccgagcttggctcccgcataagcgagggtggaaaagacgcctgcggcttcaaaaccggtggaactgatttccactttctccaccctacgacggcgatgatttataactttacccaccgaggtctgcataggaatcgtcaggatgaaagaacagtcaaagcggcgtgtctgaaacctgtcctcgaaaacggccttcgacggccgcttaccttattaggacggacacgcgcgtatctcatcatggtcagcaggaagctctccatacaaaggccggatacattgacgcagactttcttcacccatgcacttttcccttgcagtcggacggcggaccataca

SEQ ID NO: 9142 - DNA, 1611 bp, unidentified
  source 1..1611: mol_type = unassigned DNA; note = element_e52ca73
  misc_feature 1..2: note = core
  misc_feature 3..345: note = LE
  misc_feature 346..1488: note = CDS
  misc_feature 1489..1611: note = RE
  misc_feature 15..296: note = bridgeRNA
ctcctaatatataagtgtagggtttcagtacccaacagccagttgggacttaatcctctcattgtttaagctgtataatgattaggcatcggtctgacgacacctcctaggaccattggcgtccgtacgaaagcctgtcagccagcctgtcattgcagccgttcgatttatgcaggttgaactactacttcacgttcgtttgataccccaggagattgaataggcaatgagaaatgctggaatccatgcaaattcactttggagggacgtagaatgtaaaacgcagtaggtattgatgtttcaaagggtaaaagcaccgttgcagtcctgcagcctggcggcactgtgatccgcaagccctttgatgtctcccacacatcccaaaacctcaatgaactggcagattatttgagttcattagacggcaccacaaagatcgttatggagtgtacgggtagatatcatgagcctatgataaaggctctatccgaggctggattgtttatttccattgtaaatcctcacctgattaaaaactttggcaacaactccctgcgcaaggtgaaatcggatccggcggatgcccgcaaaattgcccgctatacgcttgacaactggacggaactgcgccaatattcaggtatggacaatacacgtactcagttaaaaactttaaactctcaattcagcttctttatgaaacaaaaggttgccgcaaaagcaaatctgattgcactgttggataatacttatcctggtgtaaacaaactctttgacagccccacccgtgaggacgggagtgaaaaatgggttgactatgcttattctttctggcatgcggattgtgtccgcaagattgggttaaaggcatttacagaacgctacatgtctttctgtaagaagcaccactatatctttcagcaggacaagccagaaaaactgtttaatgcctcgaaggagttggttgccgtctttccaaaggagaagacttataagctgttgatccagcaaagcatccagcagttaaatcttgcctccgaacatgtagaacgactccgcagggaaatgaacgaactggcatccacacttccagaatacagcaccgtaatgggcatctatggcgttgggaaaacctatggtccccagctcatcgctgagatcggcgatgtatcccggtttacccacagggaagcactgaccgcctttgcgggcgtagaccccggtgttgatgaatccggccagcacaagtcaaagagcaacagggcttcaaaggtcggatccgcaaggctgcgcaaaacattgtttcagatcatgacaaccttgttgcaaaatgctcctgaagccgatccggtgtaccgttttcttgacaaaaaacggtctcagggaaagccttactatgtctacatgacagccggagcgaataagttcttacgcatttactatggtaaagtcaaagaatgtctgcggaacttagaacagacagaataacacccttttctatatcaccactttcaaagccggcatttctggcggcttaaaagttatgcacaaaatatcaaatcggatttttgaaattttcttcaaaaaaacacttgactttttattagcagg

SEQ ID NO: 9143 - DNA, 1294 bp, unidentified
  source 1..1294: mol_type = unassigned DNA; note = element_e53b93d
  misc_feature 1..2: note = core
  misc_feature 3..247: note = LE
  misc_feature 248..1282: note = CDS
  misc_feature 1283..1294: note = RE
  misc_feature 27..238: note = bridgeRNA
ctgacttgttcaatggaaaccaggacaaccgggatctgcagtctcgtaaagtccacggtgtcggtcggcgcaggctcgcaagctccttgccgccacaatcaggtggttggctcactaatagcgtgccctgccgaccggcaccggcctacggtgtggttcgacagaggcgtgaaacgatcaacttcaagtcaggatgcccaccgcaggtgcacaccgaaaccgcaccaggacaacaggagcatccgaattgatcgtcatcggaatggacccacacaaagcatcactgacagccgtagccgtcgacaacagcggcgagaccgtggcacgccgcaggttcgccgtcaattccggcactgccgcgcaactacggaaatggtcacacagatgggccgagcggcgcttcgccgtcgaaggcgcaaaaggattggggcgcggtatcgcgcaaatactgctcgccgacgctgaacatgtcgtcgacgtaccgtccaccctcgccatgcgcgtgcgcgtgctcgataccggcggaggacgcaagacagatgcggacgatgcacgcgctgtcgcattgaccgcattgcgccacaagggattgcatgaagttcggtacgaggatcagtcgactattctacggctgctcagtgaacgccgagacgacctcgtccgggaacggacgcgtgtcctgaaccgtctccaccagcttcttcgggaactcattgccggtggtgttccgaccgggctgaacgctgcacaagcagctgccgctctgcgacgagtcagaccggtcacggcaaccgatgcatgccgacgggacctggcgaaggagcttctggccgatctgcgccggatggattccaacatcggagccaacgaagcacagatgcgtgatgcggtcgccgcgaccaccaccactctgccgcaggtacacgggatcagtaccgttttgacggcgaaactgctcggccatgtcggtgatatcagtcggtttccgtcagcggatcacttcgccagttatacagggacttcgccgttggcggcgtcgagcggggagactgttcggcatcgactcaacaccggcgggaatcgtcaactgaactcggtactgcacaccgtcgccgtctgtcagagccgagatcctggcctcggaaaaatttactacgagaagaagatcgcgcagggaaaaactcctgctgaggcacgtcgagcgctcaaacggcggctggcaaacgtcatttaccgccacatcatccgggacaacctacatgcaccggtgactgctacttgacacacagaggcg

SEQ ID NO: 9144 - DNA, 1437 bp, unidentified
  source 1..1437: mol_type = unassigned DNA; note = element_e5408f9
  misc_feature 1: note = core
  misc_feature 2..144: note = LE
  misc_feature 145..1167: note = CDS
  misc_feature 1168..1437: note = RE
  misc_feature 1205..1435: note = bridgeRNA
atggaatgggcgcctcccccgaaagggctgacgatctagaagtgatgtgggacaaggaaagaaggtgggttcccgcacctgaacggcatcgatgtgccaaagtggaagatgcgaatcgaaccactgctatggaggggaacccaaatgaagcataccgtagttggcgttgacattgcaaagagcgttttccagatccactcagttgatcttgagaccggcgaaatcatcagcaagcaactcaaacgtgcccgcctgcttgagtacttcgccaaccgtaagccatgcctgatcggtatggaggcatgcggaggctcgcagcactgggccagatgcttaacggcaatggggcatcaggttaagcttatgcctggcaatgcagttaaggcgttcgtgacggggaataagaatgacgtcggcgatgcaaaggcaatctggactgcggtacaacagcctggtgtcagggctgtcgcgatcaagactgaagagcagcaagccgtgctggcaatgcatcgcatgcggcagcaactggtgaagttccggacgatgcaaagtaacggactgcgtgggctgatgatggaatatggtgaagtcatggcagtgggccgagcggcattgaaccgggcaatgccagacgcacttgcacggctaaataagcgattgcctgccatgttgattgcctctctcaggcagcaatgggaaatgctgagcaagcttgatgagcagattgcccacatagagcaacggctgctggactggatgaaacaggacaaggcctgcaaaacgatcgccgccattcctggtgtggggatgcttacagccacagcggtagtcgcgagcatgggtgatgccaaggcattccggtgtgctcgtgaattcgcggcatggctgggattggtacctcgacagtgtggcacgggaggccgggtcaggctgctgggaatcagcaagcgtggtgatacctatttgcgcacgctgcttatccacggtgctcgggcggtgcttacacacgcaaaggagcctggtgcttggattgcccagctcgcaaagcggcggccgcccaacgtagtaacagtcgcgctggccaacaagatggcgcgtaccatctgggcactactggcacatggccgggaatatagcaatacgcatgtcagcgttggaccggcataacagtatcaggcactatcgtaggaccgtaacgaagtacaggcacatcagagttgcgcaaggtaattgagcgtgatggcaaacaggtcagaccggtactcactcaacctgaataacacgtcgggtaacaagcccgttctagaaatgaggtgtgagtcagcggattccatcaaggcccgcagcggtaaaacgctgcaacaaggccggatataaaactgcaacctcgcctgcccaacacgtcaattctcttgcaaaactggaggcgcccatata

SEQ ID NO: 9145 - DNA, 1383 bp, unidentified
  source 1..1383: mol_type = unassigned DNA; note = element_e548371
  misc_feature 1: note = core
  misc_feature 2..96: note = LE
  misc_feature 97..1128: note = CDS
  misc_feature 1129..1383: note = RE
  misc_feature 1150..1375: note = bridgeRNA
caatgggatggactcctcctcaaccttaacggcatcgcaatgtgccagactgaaagaagcgtttttttcagtgacaggaataagaaggagtccgttatgaagcttagtagagttggcgtggatttggcaaagaatgtgtaccaactgcatggtgttgatcggcacggcaagacggtgtggaagcgccggttgcggcgtggccagtggctgcaggccttgctggataaggtcgagccaggttgcgagatcggcatggaagcctgcaccggtgcgcaccactgggctagagagcttcagtctcgaggctacacggctcggctgatcgcaccgcagttcgtgaagccgttcgtgaagagcaacaagaacgacgccaacgatgccgaggcgatctgcgaggcgatgagccgaccacacatgcgctttgtgtcggtgaagacggttgagcaacaggacatccaggcaacacatcgagtgcgcgaggaactcaaggcgcatcgcaacgccaaggccaaccagatccgcggcctggtggccgagtacggactggttgcacccaagacactgctcgctctgcgtcgcgcgatcccggagtggctggaagacgccgagaacggtctcacagatagcttccgttccctgttgcacggagtctggaatgatctgctggcgctcgaggagcgtctcaaggaactcgacaaggagatcgagaagctggctcgaagctttgaagtgaccaagcggctgcaacaactacgcggtgttggaccgctggtggcgacagcgctggttgccacggtgggcgatggcagtcagtacaacaaaggcaggcagatggcatctgccctggggctaacgccccggcagagcagttccggtgacaagtaccggttgttcggcatcagcaagcgcggcgatgtttacttaagaacgatgttgatccacggtgccagggccgtcgtctcgcaggcgaagcaccgggacgatccgttgagtcgctgggtcaccgacatcgccaaacgccggcaccccaatattgctgctgtagcactagcgaacaagaccgcacgcatggcctgggccatgctgcagaacgaaacgaactacgatgcaagcttggccgttggctgagcctggataacaaaggagaacctcaatagcgattgcttgagcaaactgcttgatggcaaacaggtcgaaccggcgtcggccaaacccgtgaatgtccgagtaacttgattacgaagaagcgattgggagctgacgcgcgaataacccattatggcccggcatcaacgtatgccaactacaaaggccggatatacgtaagcagtcgcgccatgtttgccttcagtaatttgcttgcaatgaggaggagtccatata

SEQ ID NO: 9146 - DNA, 1568 bp, unidentified
  source 1..1568: mol_type = unassigned DNA; note = element_e553c78
  misc_feature 1..2: note = core
  misc_feature 3..479: note = LE
  misc_feature 480..1424: note = CDS
  misc_feature 1425..1568: note = RE
  misc_feature 3..225: note = bridgeRNA
ctcgtataataaagtagtagtatttatagaccctctccaaggtctgtgtgctataatgatagagatactgtggattgtttacaatctcctaccacttgatggtttaataaaggctacaaccacagtctctttgtatatttgttaattagttagataccgcatgacggtttatttagaacgaggttacaatcgcaaggagtaccagtggtctaaacagtatcaaaaatacactcacaaggagttttcattatgatttatattggaattgatgttgctaaagataaacacgactgttttattaccaattcagatggtgaagtcttatttaaatcttttactatctctaacaatcgtgaaggctttgaaaccttatttcaaaagtacaatccatttcagatgatttaacaaaagtaaaagtaggacttgaagctaccggacactatagttacaatcttctgggatttcttcttgataaaggtttgccgacctacattatcaatccattacatacaaatctatacagaaaaagtttaagtcttagaaagacgaaaacagataaagttgatgcccgtacaattgcttctatgattatgtctgatgtgaacttaaagtcctacacaaatacatcataccacaatgaggagctaaagtcactaactagataccgttttgataaagtaaaagaaagagcaaaattaaaatcttctatttctagacttgtatgtatcctttttcctgaattagaaaaactcgttcctacacttcatatggcttcagtttatgccttattatctgaatttccatctgctaatgctattgcatcttcacaccttaccagacttaccaatttgctatctgaaaattcacatggacgatatggtaaagatacagccaatctaattcgtaatgctgccagaaattctattggttcacatatgccggcaaaatccttagaactaaaacacactattaagcttatcaaagaattaactactgaaattaatgaaattgaaacagaaatcaaatctattatggataaaattgattctccaatacttacaatcccaggtatcggttataatacaggagctatgattatcgctgaaattggagatttcaatcgctttgattcagctgataaaatacttgcatatgcaggtatgtcaccttctacctaccaatccggtcaattagagaactgccattctcatatggaaaagcgtggttcaaggtacttacgatacgctctgtacaatgcaacaaaatatgtttgttactgggatgaatctttcggtgtatatcttggtaagaaacgctcagaaggcaaacattacaatgttgcattatcccatgcaacaaagaaacttgttcgcttaatttttgcaatggagaaatctaaacaaccataccaaccaacagtttaattcttttcataaatatcttatttttgagcaccatttatgatgctcttttttgtcatgctatttttacgattccaatacgatctaaaggatttttttgattaattcaaaatatcttcattatagccttgacttttaatagttagt

SEQ ID NO: 9147 - DNA, 1613 bp, unidentified
  source 1..1613: mol_type = unassigned DNA; note = element_e5565ec
  misc_feature 1: note = core
  misc_feature 2..266: note = LE
  misc_feature 267..1493: note = CDS
  misc_feature 1494..1613: note = RE
  misc_feature 13..286: note = bridgeRNA
cctgttacaatataattgccccatgtttatggcagccagccacaggcttgggacatctcatgccaaagctgttagaatggaagggcaatggtctggcgaattcctccaagaacaaagcgctcgtaaaaaagtccgtcagccatccccccattcgcagcgttcgatttgtgcaggtagagcatccgctcgagtcagcaaacagatggaatcggtgatgagaaaaggatggattaccgttgtaattacataatcaggaggattccaaaatgtatgctgtgggagtggatgtttctaacgggtggagcaccgtggcggtgctccggtcaaagacggatattgtgatccgtcccttcaatgtgacacacaatagccaggggtttgccaatcttttggagaaattgggcgctctggacggtgaggtcagggtagttatggagcacaccggcaattattatgagtctatcgccaatgtactgtatgaaagcggcctgtgggtttcagcggtcaatcccttgttactcaggaactatggcgacaattctctgcacggcgtcaaaactgacaaggcggacgcaaagaaaattgccagatacactcttgacaactgggaagaattgcggcaatatagtcccatggacaccataagatatcaactcaaaacccttaaccgccagttccagctggccagcaagaaccgcactgcctgctccaacaatctgatcgccctgatggagcagtcctatcccggcgtacgctctctgttcagcagccctgtgcgctcagacggcagccagaagtgggtggattttgcccaaaccttctggcacgtggactgtgttgccaagctcagcctgaacgcttttactgtgaaataccaaaagtggtgcaagcgtcatggctacaatttcagtgaggcaaaagctgcggcaatccacgagaatgctcggacgctgtttccgctggttccaaagtcggagaccacgaaactgctggtgagagaggccataacgcagcttaataccatctcgcacactgctgaggtcttccgtgcggaaatgaaccgattggccgctcagctccctgagtatgataccgtcatggctatgaccggcgttggcccctctgtgggcccccagctcatggcagagatcggcgacgtgcgccgctttgcacaaaagagttcgctggtcgcttttgcaggcatcgacccaggcagggacgattcgggttccaaagtgtccaataagggcaaaatcggcaagcggggttctccacatttgcggaaaactctgttcgtcatcatgtccatcctgctccagctgaagcctgttgacgatcctgtgtatcaatttctcgataaaaagcgttcggaaggcaaaccgttctacgtctacatgactgctggaggcaccaagttcctgcgtatttactatggcagggtcagggattgtcttaaagagaagggtctctgggacgggtctttgatggattagatgaaatataaccttttctctgactgccgcttttcggtggcggtctgtttgttgtattcattttttgtttcactttcttttgacttttttcatttggggacttgactttttatttgcagg

SEQ ID NO: 9148 - DNA, 1796 bp, unidentified
  source 1..1796: mol_type = unassigned DNA; note = element_e557059
  misc_feature 1..2: note = core
  misc_feature 3..281: note = LE
  misc_feature 282..1484: note = CDS
  misc_feature 1485..1796: note = RE
  misc_feature 15..301: note = bridgeRNA
cagttacaatatataaggcgggtgaaacctcgcatccagtgaggggttgctcgtacttgttgcttaggctataatagaagtatcggaacggtgtatattaccaagtgccatgaaaatgagcccgagcttatgaccgccgtccatacttctgttatagcgttcggtttttgcaggttgttccgcaggaggctgtgtgtacgtgtcaccaaactgattgaatttgtagcaagtgaagtatgacatccgaaatgcagaaaaacaagcaagaataggagaatgaaatgaccgcagtaggcattgatgtatctaaaggaaaaagcacagttgcactgctcagtgatactggagaagtccttaaaaagccgtatgatgcaccgcacacaagatgtgcattgtcagaattagcaaagcttatcaaagaatgtaaagatgacgtttgtgttgtcatggaagcgaccggaaactatcacaaaccaatcgccaactttctctgtgaacaaggtctcagcgtgagtgttgtaaacccaaaattaattcgtgatttcggcgataatacattgcgtaaacccaaaaccgataaaaaggatgcgataaaaatctgtcgctatgcactgacttatcgtgtgcagcttcccaattattcgccagaaaatgatgaacgcagtgcacttaaaatcctgaatcgtcagtatagtctggcagaaaagacacttacgatgcacaagaatttgctgatcagctatttagaacttgtgtttccggagatcaataaaatgtttacttctcacatacgcaacagtgatggacatgaaaaatggattgattttcttgttcgttttccgcatgcagatatggtcgcaaaagtcagcctgaatgaattccgcctcaaatacaaaaactggtgtaaaacggcaaagtatcggttctgtgaatcaaaggcggaagaacttcaccagtttgcaagggaatgtgtttgtgctgtgcagaatgatgagaaaatgcgatttctggtaaaagaacaggcgaaaatggtcaatcaactccttgaacatatgcagaatatccgcacaaaaatgaccgcgattgcacagactttgcctgaatacgatacagtaatcgaaatgtatggtctcggcagcacacttgccgttcagatgatggcagaggtcggtgatgtacgccgttttcaaaaccgaagggcggtcactgcatatttcggttatgattctgaatcggatcagtcaggtacccatgaatcaaaatcgaacccgatgacgaagaaaggttctgcatatcttcgacgaactttgtttctggtgatggtggcacatatgcaaaatcagccagataatgctgtttatcaatttcttgataaaaaacgttctgaaggaaagaattattactcttacatggctgcaggatcagcgaagtttctgcgtatttattatgcaaaggtaaaaaaagtgatggaacaaattacataacacagcaaatctattcatagattctgaaccagaggcaaaaggcaggcacggcgtagccgcttgaccttgacaggttatcataaaaatgctacagtgttcttcacaacggtgactaatttcatctattcatgagttcctcaccgtcggcacgacacccacagcatttttataatgttctgtcaaggttgccggtcggatataactgcatttcatttttcagatcgcttcggcggtcttattgtcatgtctatattttcttttgtgaaaattttgtgaaactttcattttatctcttgacttttatttgcaggt

SEQ ID NO: 9149 - DNA, 1390 bp, unidentified
  source 1..1390: mol_type = unassigned DNA; note = element_e5605a2
  misc_feature 1..2: note = core
  misc_feature 3..87: note = LE
  misc_feature 88..1110: note = CDS
  misc_feature 1111..1390: note = RE
  misc_feature 1157..1385: note = bridgeRNA
cgatgtgatggacacctcccaccttacggcatcagaacgtgccagactggaagtgttacctgcagtccacaggaggaggtgtccaccatgaatattaaacgtatcggtcttgacctggcaaaaaatgtctttcagatccatgccgtggatcaccatgagcatgtcgtcgtacgaaaatctattcgccgcgcccacatgcacgcttatttctctcagctggctccctgcaccatcgggattgaagcctgcgcatcatcccactactgggcccgcgaactcacccgcatgggacataccgtgcacattattcccccgaagtttgttaagccctacctcaggggcaacaagaatgatgccaacgatgccgaagccatctgtgaagccatcagccgccccgccatgcgcttcgtcgcggttaagacagagcgccagcagactcttcaggctgagcatcgcgtgcgggccagagtgataaaaagccgcacggcgctgtgcaacgagatacggggctttctgggcgaattcggcgtggtgctgccggtcggcatcagccagttgcgtaaggcgctgccggagatactgtcacagcaggagcagtgggatgaccggtttatgcgcctgctgtgcgagctggccgaagagctgcggatgctggatgaccgggtggcggggcatgaccggcggctcgcagaggcggcgcgggaagatatctgcatccagcggctgatgaaaatagaaggtatcggcgtgataaccgccagcgcgatggtggcgttgttgggtgacgcgacgcagtttaagaacggtcgggagatggcggcttatgtggggctggttccccggcagcactcaagcggcggtaagcagcagctggggcatatcagcaagcggggtgacagctacctgcgtacgctggtcatccacggggcacggtcagttctgaagacatgtgcaggcaaagaagaccggcggagccagtggctgcagtcggtggcggaaagacggaaccggaatatcgcgacggtggcgctggcgaacaagaatgtgcggatagcgtgggcggtgatgagtcgcggagaagattaccatggctcacgggtcgccggttaaccgacgccccgtgagccatgcagtaaaaagagcagtaaccctgtcgtgagattgcgaagcgatttagcgtgatgagtaaccggtaagaccagcacctgagaaatccggcctgtccgaaggctccctgcgaagcaaagccgatagcccgaaaggaagcaggtgcgcagaacacatcatggcccgggtacgacggtaccgaacgagaggccggatatacgaacgcaacttaccctggtgactcacacaaaaaatagcttgcatcacgggaggtgtccatata

SEQ ID NO: 9150 - DNA, 1327 bp, unidentified
  source 1..1327: mol_type = unassigned DNA; note = element_e57367d
  misc_feature 1..2: note = core
  misc_feature 3..72: note = LE
  misc_feature 73..1110: note = CDS
  misc_feature 1111..1327: note = RE
  misc_feature 1085..1312: note = bridgeRNA
agatgtatggactccctatctccctcgggagtaacgtaataagtaatgacacttttacaaggaagcccatacatgactcattctacggtgctcgctatcgacttagcaaaaaacgttttccaagtttgtaagatggatcgacatggaagaattattttcaacaaagaagtctctcgaaaaaaacttacagagcttcttatcaaagaaaaagcatcgctcatttccatggaatcttgcgcgaccgctcatcactggggacgacttgctattaaactaggtcataaagtaaaagccatcgcacctaaacgagtctctgcattccgccaaggtcaaaaaacggatgctaatgatgctttagccatcgctatcgccgctatgcagcctaacgtgaaagcttgccgcatacttaacattgaagaccagtgccaacaatctattgttcatattcgcgaattgcttgtccgacagaaagtcagctccgcaaatcaattaagagcactgttacttgaatttggcttccctatcaacaaaggcgattttgcgtttaggaccgaaatccccctcatactcgaagatgctgaaaatagtctcacctgtacattcagggaaaccctggcaatgatgtatgaccgattcgtcgatttaattcaccaaatcgataacattacacaaaaactgaaagtcattacatctcaagacttattgtgcaaacgcctacaagcattagagggtgtcggccctatttgtgcagctttattaaaaattgccctcaaccaaaaagaccatttttcaaaaggacgacaggcttctgcctgtctgggattaacccctgttcaacatagtagtggaggcaaacaaaagataggggctattgctaaacgctgtggcaacaacactctgcgtaacgccctctacaatggagccattggggtcgtttgcaaattagaaaagcgagaagctcgtacatcaaaagagcaatggcttaaagcaatgacggtaagacgtgggaaaaaggttgctgcaatagcattggcaaataagaccgtaagaacagccttcgccatgatagaaagtggagaggattaccagccacaatttcttgtggcttaaacagagttagtcaaaaagaccgtgataacgaacaggtaagaccaaccttcaagagactgtacaacgcttaggtattaaatgccgctgccaagataaagtcatgacggtgcgaacacatcaaagtggcccgagatagcttctcaactagagcccgtatataagcaagcatctaaccttcgttaacaatactttttgacaacaatagggagtccatata

SEQ ID NO: 9151 - DNA, 1663 bp, unidentified
  source 1..1663: mol_type = unassigned DNA; note = element_e581a9f
  misc_feature 1..3: note = core
  misc_feature 4..126: note = LE
  misc_feature 127..1320: note = CDS
  misc_feature 1321..1663: note = RE
agtaattatgtaagaaaagcatagtgcagtatgtgcggtcatcctaatcaattaggagccgaaatttttaatttagtacgcgataactcttggtttcgcaattattaacaattaaaagactgcactatgccgaatacaaatttgcaaaattctattgactttaatggtcagaaattttatgttggccttgatgtccacaaaagatcgtgggccgtaaccattcgcagccttggaatgcaggttgctcatttcactcagcctcccagtactgatgcattagtgacgtatcttagaaagaacttccccggaggactttatttatcagcatatgaagctggcttttgtggtactgttatccatgaccaactttgcaaattgggtatccgcaacatattggtaaatgctgcggatatacctgctacagacaagcaaaaaaagaataaaacagatttacacgatagtcgtgccatagcttcctttttggagcaaggtgcgttgaaagggattcatgtgttgacccgagaacaacaggaactacgaagtttatttcgtttgagggaaagtaaagtcaaagacgtaaccatagcgaataaccgacttaaaggcttcttgatgttttttagcattgatctacctgaaactgtttctcggaaagaatatttatccctcaaagcgctggagtggttaagcaatcttgaactggcttgctctgcaggcactattactttaaaacaacatattgaagaactgaaatatcaacgtaaaacgctctatcaaataactaaggttctacgagagcaaattcaggagacctacaccaaaacctacgagtgtttactttccgttcctggcattggaggtgttacggcgatgggcttgattgccgaaattgctgactttagccgatttgaagaccctcatcaatacagcagttttctcggattgtgtccatgggaaaacagttcaggtgaaacaattaaaaccaagggaatgcaacctcgctgcaatagacatttaagaccgttacttattgaagcatcatggatggccattcgaaaatcacccgctctatttgcttattatagtaaacacgctgtgcgaaatcccaaacaagctatagtcaaagtagccagaaaattagcaatgattgcaaaaggagtagcaacaacaaaacaaccttaccaagcaaactatttagaagacaaaaggctggagcaagaagaaaaaaaagtacaaaaaattaaaaggttttcttcaggcattgcggaccagcatataaagaaacagccagataatgtacaaataacattacctggctgatatgctcatccggctgtaatatccctggtgggttgctcctcagcagagcccgcttccgtttcttacagcgcttcaaatttataaaaactaattaatcatgtttgattgaaacaattacaaatctcaactaattttaaagaggaaaacgcaatgccacagacggttatttaataacaggcgcgagtaggcgtacctctttttacttcatacaattactggcggcttctataatataagtttgaccgcatatagcagttggagattattttttaaaaatcgaacaaaaaacttaattttatgtgataccattaccacatatcagcactatacttttctacatagc

SEQ ID NO: 9152 - DNA, 1389 bp, unidentified
  source 1..1389: mol_type = unassigned DNA; note = element_e58fe3f
  misc_feature 1..2: note = core
  misc_feature 3..88: note = LE
  misc_feature 89..1123: note = CDS
  misc_feature 1124..1389: note = RE
  misc_feature 1163..1375: note = bridgeRNA
gatgaggtggatggctcccgctcacggcatctaggtgccaaggtgtgaatgccatcaggcgttcacgagcaaaagggagccatccgccatgcagattaccacgatcggcctcgacttggccaagagcatttttcaagtccacggcgttgatgcgaccggtcaggttgtggttcgcaagtcgcttcgtcggtcgcagatgctggcattttttacgaagttgcctccatgcctggtcggcatcgaggcgtgcggcacgtcgcaccactgggcgcgcgagcttatcaagctcggccatgaggtgcggctgatgccacctgcttacgtcaaagcgtatgtgaagcgcgggaagaccgacgctgccgatgcggaagcggtttgcgaggcggtggcgcgaccgacaatgcggttcgtccccgtcaagtcaccccagcagcaggcggcactgtcgatgcaccggacgcgcgatttgctggtcaagcagcgtacgcagttgatcaacatgatccgcaatctgctcgccgagtttggcgtcgacatccccaaaggactcgaacgagcgcttctgatggcgcgacagatcgtcgatggtaaagcaccggatgtgccgattgaagctgcgaagatccttggcacattgtcacagcaggtactcaccacccacgttcggcttcgcgagatcgatcgcgatctggccgttttgctacgaggcaacgaggttgcacgtcgtcttatgaccatccctggcatcgggccggtcggcgcgacggcacttgccgcatcggtcaccgatccgcatcaattccgctcggggcggcaattcgctgcctggctgggactgacgccacttcagaagtcgagcggtggcaaagagcggctcggtcgtatcaccaagatgggcgacaagtacctacgcaagctactcattgtcggcatgacgtcacttgtgcgccgtgcaaaatacaatcccggcaagatcgatccacgcctggcggatctgctcacccgcaagcccacgagggtcgccaccgtcgcgatggcgaacaagaccgcgcggatcatctgggcgatcatgacacgtggcgagacctgtcgtgccggccaccggccaacgttggccgcatagacaacgatagaaaatttagctgaaaaggagatcagcttcacgaggttgcgagcgcgatgcgatgtaatggcagacggtcagaccgggaaacaacctaacttgagtgtaaggcatcatagcctgataagcagaatgggaccttgttcgcggactccatcagggccagcagtctcaactgactgcatctacaggccggacagaagactgcacccgaccaaggccactacgtcaatttagctcttgcaacgcgggggccatccacagaa

SEQ ID NO: 9153 - DNA, 1597 bp, unidentified
  source 1..1597: mol_type = unassigned DNA; note = element_e590412
  misc_feature 1..4: note = core
  misc_feature 5..314: note = LE
  misc_feature 315..1478: note = CDS
  misc_feature 1479..1597: note = RE
tcacgtataatcaatcttatagaaatattaattaatttcttattgattgatccctttctatttatatttttttgatatatcatacagctagttgtataatatatcttgcactgtggatttgttcctattttattacagccactttgtggactggttttaggtgactcaaaccacagatttttaatttaattgttaattagttagttaacacgttagtttttactaatcgatgttttattagattacgtgattacatgattagaaaccttgtggcaaactcatcagtgcaaaaaactaattggaggtgcttatacatgatatattacattggtattgatatatcaaaatacaaacacgatttctgcattatctcaaatgcaggtgaagcaattgttgaaaatgattcttttgataacacaaaaaatggatttcaatactttgttaatctattgaaatcctatgataaatcaaaagtccgaattgcttttgaggcaactggacactactctaagaatttggaacttttcttaattaatcaagactattcatttataaaaataaatcctcttgtcattcaccagtttttaaaagctcgaagcttacgtagaactaagactgataaagcagatagcatagctatcgctaattatcttatgtcagttccttacaaaccaaattcaaatttattatacaacatttatacattaaagtcattatgtagaagtagagaacaattaattaaggaaagaagtaagttttatgtattgttaacaaatgaattagatcttacatttccagaattaaagccattttttagcaatgatttttcagctacattattatatattttagataagtacataaacgctgaacacatttctttaatgagagattttgaaacaatttcaaagaaatcacgtggaaggttctcttatgctaaattcgttaaccttaaagaacttgccaaaaattcagttggtcatcacgataaaaatactgacttacttatttctacttatgtttctattattcaaaactttaatgataaaattgacccaatagataaacaaatttcaacaattatcaaagaactaaatcctagaatgctatccattcctggattaggtgaaatatccgctgctaccattatatcggaatacggagatattaagaatttctcttcttcaaataaaatgttagcgtttgcaggattagaacctagtataattcaatctggcaccattgaaaacaatggtaagatggttaaacatggctctggtcatcttagatattctattatgaatacagcaatgattattttaagatattcacctactttttatgactattaccataagaaatgctctgaaggtaaatgccatagagtcgctctatctcatgtttgtaaaaaactattaagagtaatttacacattagaaaagaacaacatggattttaatccgtctttattacgataagtcattattgactttttgtgaattttgcttttttgcaaaatcttttttggcatgggataaactccaatttataacaactattaaaaaagttaattttagtattgacttctaatagttag

SEQ ID NO: 9154 - DNA, 1503 bp, unidentified
  source 1..1503: mol_type = unassigned DNA; note = element_e594217
  misc_feature 1..2: note = core
  misc_feature 3..247: note = LE
  misc_feature 248..1483: note = CDS
  misc_feature 1484..1503: note = RE
  misc_feature 6..241: note = bridgeRNA
ctaatgagagttatcgggtcgccatacggcagactcggtgcctggtagccgctggcaggtgagcacttttttctcctgggccttgagccctgccgacagaccgtgcccctgccagctggccgggagagttgatcgctgctgggatgtcgtgcccgcccgctgagggcgggagcactgtttcattagggcgctgattgttctcccgcaggctgctgaccagatccggaacctggggacgggagaacatatgcgattgttcgtcggggatgactgggccgaggaccatcacgacgtggagctgatggatgccgcaggcaaggtgctggcccgcaagcggctgccggaaggcgcggccgggatgacccggctgcacgagctgaccggccagcagttgggccaggacgatcaggatgcggaggtggtaatcgggatcgagaccgaccgcggcccgtgggtggccgcgctggtcgcggccggatatgtggtgtacgcggtgaacccgctgcaggcctcgaggtaccgggaacgccacggcgtctcgggagccaagagcgataccggtgacgcgcacatgctggcggacatggtccggaccgattcccaccagttccgcgcggtggcgggcgacagcccggacgccggcgcgctcaaggtggtggcgcgggcccataagacgctggtctgggaacggacccggcaggtccagcggctgcgccaccagctgcgggagtacttcccggctgcgctggaggccttcgctgacctggacgcccccgacgcgctggagctgctggcgaaggcaccggacccgggccgggccgcgaagctgacccgggcgcaggtcagcgcggcgctcaagcgcgcccgccgccgtgacatcgccgccaaggccaccgcgatcatggcggcgctgcgcagtgcccagctgggccagccgccggccatcaccgccgcctacgcggtcaccgcccggtccctgatcgcggtgatcaccaccctgaacgagcaggtcaagaccctgcaagggcaggtggaggcggattttggccgccacccggacgctgagatctacctgtcccagcccggcctgggacccatcctcggcgcccgggtcctcggcgagttcggcgacgacccggaccggtacgccagcggcaaggcccgcaagaactacgccgccacctccccgctcacccgcgcgtcggggaagaagaaaaccgtcaccgcccggttcatcggcaacaaccggctcatcgacgcgctcatggcccaggccttcgccgccctgggagcctcgcctggcgcccgggccctgtacgacgccgagcgcgcccgcggcaccgagcacaacgccgccctgcgcaaactcgccaaccggctggtcggcatcctgcacggatgcctcaaaacccgcaccctctacgacgaggcaaccgcctggcctcaccgcgaaaacctcccgcaatctggcgtagccgcttgacatctaagctcctgggatgt

SEQ ID NO: 9155 - DNA, 1379 bp, unidentified
  source 1..1379: mol_type = unassigned DNA; note = element_e594d6c
  misc_feature 1..2: note = core
  misc_feature 3..87: note = LE
  misc_feature 88..1119: note = CDS
  misc_feature 1120..1379: note = RE
  misc_feature 1149..1367: note = bridgeRNA
tgatgctgtggacggctcctcgaccggcgcatgagcgccatggatgtgggtgctgttgcggcgcccacgattcggaggagccaaacgatgcaagcgattacgacagtcggcctcgatatcgcaaagtcgatctttcaggttcacgggatcgatgcggaaggcaatgtcctcgtccgccgccggttgaagcggcgatacgtgctggccttcttccagaagctgtcgccatgcctagttggcatcgaggcctgcgcctcttcgcatcactggtcgcgtgaacttcaggcgctcggccaccgtgtgcggctcatgccgccagcctacgtgaagccttacgtcaagcgacagaagaacgatgctaccgacgcagaggcaatctgcgaggccgtgagccggccgaacatgcggttcgttgagaccaagacacctgagcagcagagctgcttgatgctgcatcggacgcgtcatctcttcatccgtcagcagactgcggttatcaattcgatccgcgctcatcttgctgagtttggcatcgtcgcgccggtcgggcgtcacggtgtcgatcaactgctcgctgtcgtcgcagatactagtgataagcggctgctcgaggtcacacggagctgtgttgctgcgctcggcgctcatctgcaaatgttgaaggcgcagatcctccaatttgaccgtctgatcagggtttggcaccgatccagtgaggtgagtaagaggctcgatgcgattcccggcgtcggccccgtgctggccactgctctggttgccagtgtcactgacccgaaggctttccgatcaggaaaggatctctcggcctggatcgggctcgtcccgaagcaaaattcgagcggtggcaaggacaagcttggcaacatcagcaaacgaggcgatcgttacttgcgcagcctgtttacgaccggtgcgctggccgtcatccgctacgccaaaatccatggcacgacgcatcggccgtggctcacagcgctgctggcgcgacgtccaaccaaggtcgcggccatagcgctggtcaacaagctcgcccgcatggcctgggcgatgatggctcgaggtgagcggtacagagaacccgccgcgctcgcggcataacgagatcattccgaacatccggcgtgatgtgacggttgggagggcgaacagcacgtaatgcagagccggtcgttccggcgatcaggacaacccactcgggccacagcatcatcgaatgcgtgcttttgaccgggacctgatccgcggagggcattatggccagcggtcatgtgaaccgcactaacaggccgaacacatggctgcaccgaccaagcctgcgacgtgaagattctccttgccaacccggagccgtccacaca

SEQ ID NO: 9156 - DNA, 1409 bp, unidentified
  source 1..1409: mol_type = unassigned DNA; note = element_e595d04
  misc_feature 1: note = core
  misc_feature 2..305: note = LE
  misc_feature 306..1379: note = CDS
  misc_feature 1380..1409: note = RE
  misc_feature 119..274: note = bridgeRNA
ctttaactttgcagtttgaatagagagtccttccgaactcttaaataaattaacgttcaataagtgaagaaaacatgaagagatataacggtttttccttacctttgttgtagaaaggaaggattaactgccggaggtcaccccatccctcctcagaggccatgagcctatccttagttgaaggccctccggatttcaagctgcaaattccaaataggaaggtaggctcgaagcctaattaaagtagtagacactcacagctttccttcagttaaccgcttcctgtaacaattaaacgtaaagacatgaagaaaattgttgtcggcatcgacatttcaaaggaaaagattgacgcaagcgcaatcgacgtgagaggcagccagcttggcgtggtgaaactggactaccaggtgttcgagaaccgcccgatgggtttccgccgcctgctggtatgggcaaggcaccttgtcaagggtgtcggcctggaggacgtgctgttctgctgcgagacgacggggggctatgaccgcgctctgtgcgactacatctatgccaagggccaggacatctggcgtgagggtgcgcttcagataaagcgcagcatgggtgtgcgcaagggcaaggacgacaaggccgactcgctgatgattgccgagtacgccatgcgccacatggacaaggccgtcatctacgagacgcccagccagaccgtacgcgagctgaaggctctcttcctctaccgccacaagctggtgcaggagaagaccgagaagacggtacggatgaagcagatggaagccacggccgccagaagcaagtccatgagcttcatcctgcgcgacgcacgcaagagcatcagggctatcgaaaagagcatcaaagagtgcgagaggcagataatgcagctctaccaagacaacggggacctgaagaagaactacgaacacatcacctcggtcagcggcatcagcatagtgaacgctacggcattcatcgcctataccaacaacttcaagggcatcagcacggccaacaagatcgcgtcatactggggctgcgcctcgtacagggaacggtccggaaccagcgttgacaagaaggcgtacgtgaagtgctacagcagctcacagctcaaggcatacctcacgcaggcggcagaatgtacagtcaaggaacacggcatataccgcggatacttcctgcgcctgaaagcggcaggcaagccatacagggtcataataaacaacgtccgaaacaaactcatccacctggtgttctcacttgtcaccaacgacttggattacgaaaagaatcacgaagtcctcagagagaaaagaaagagcagacaagaggtgttgctcccaattagggattattaaccaaatatgtttgctcatttccataggaag

SEQ ID NO: 9157 - DNA, 1332 bp, unidentified
  source 1..1332: mol_type = unassigned DNA; note = element_e59841e
  misc_feature 1..3: note = core
  misc_feature 4..217: note = LE
  misc_feature 218..1183: note = CDS
  misc_feature 1184..1332: note = RE
  misc_feature 39..199: note = bridgeRNA
cattgtatattcaaattaatttcttatatttgcactcgttaacaacatcaaggaagtggaataaggccgctcttccattcgtcataagacagtaagttatgttcagcccccactccttaacatccgaatccggacagttcactgggctttgaccccgcatttgcaatgatggctccaagatgtttcgatgttgcatattatttaaaatgttaatgttatgacttacattggtatcgacgtcagtaaggactctttcgttgtcgcttattctccagacaagaacagcaagacgaagacattcaagaacactaccaagggaattcatgagttcatcaggaccatctccaaggatgagcaccactgtgtcatggaagcgacaggcaattacagtgctctgcttgtctatctgctttcagaggcaggtattacgacaagtctggagaatcctcttaaagtgaagaacttcgctcgtgcaatgctatccaccattaagacggatgagatagatgcccgcctgattgctctctatggagagaagatgcagcctgcgccctacaagctccgcagtgatgccattctcaccttgaagcaaaaacgcactgtcatccgccagctcaagaaacaactcattgccacaagaaacctcaaaggctctatggaggcactgccgttctttgatgccaagtgtaggaaatcggtcgagaagaccattgccttccttgagaaacagattatagacctcgaggaagatcttgcgtctcttgccaaatccgagtacaagaagcagatggatttactcacctctgtgaaaggcataggcatcacacttgctgctgcactcatcatggccactggcggcttcacttactttgataatgcaaagcaactcacccgtcatctgggattgtcgcctacatatcagcagtccggtacttcagtcaatttcaaaggtcacatcaaccgcaacggagactcttctttgaggagtcagctctacgtggcagcattctcttctataagatgtaatactgaatgcagagcttgttatgaccgtttgcggtctaatggcaagcctgggaaagtcgctgtcattgcagtagcaaataaactcatccgacaggcttttgccgttgtcactcaggagaaaccctatgttgatggttacatatcttcaaagaagtaactcctgcattatcccgaagtgtatcaggttagaaaaactaatacctgaaaacaccgaggggtgtgggggcgagaagcccccatgagagggaacgtattagcctcaagtgctaaataacgttaaccatattcaatttctttattacagtt

SEQ ID NO: 9158 - DNA, 1384 bp, unidentified
  source 1..1384: mol_type = unassigned DNA; note = element_e59a96f
  misc_feature 1..2: note = core
  misc_feature 3..88: note = LE
  misc_feature 89..1120: note = CDS
  misc_feature 1121..1384: note = RE
  misc_feature 1152..1372: note = bridgeRNA
tgatgctgtggacggctcctccaccggcacatgagtgccatgaacggtgggtgctgtgagggcacctgtgattcggaggagccagatcatgcaagcggttacgactatcggtctcgatatcgcgaagtcggtttttcaagttcatggcgtcgacgcggatggcaatgtggtgctccgccgtcagttgaagcgtcgctacgtgctggcgttcttccagaagctgcctccgtgcctcatcggtatcgaggcctgtgcgtcatcacattattggtcgcgcgaacttcaggctctcggccacaccgtgcgcctgatgcctccggcctacgtgaagccctatgtcaagcgacagaagaacgatgcggctgacgcggaagcgatttgcgaagccgtcaccaggccgaacatgcggttcgtgccaaccaagacgccggagcagcagagctgtttgacgcttcatcgtacacggcatcttttcattcgccagcagactgctgtcatcaactcaatccgcgcctatcttgccgagttcgggatcgtggcgccggtcgggcgcagcggtgtcgaggcattgctcgaagtggtcgccaatgcaaatgacactcggctccccgaaatcgcgcgcgcgtgcgttgccgctcttggcacccaattgctcgggctgaaaacccagatactggcattcgaccgccgcatcatggcctggcaccgatcaaacgagacgagcaaacggcttgatgagatccctggggtcggtccggcgctggcgactgctctggtcgcaagcgttgccgatcccaaggcgtttcgatcgggacgtgacttctcagcctggatcgggctggtgccgaagcagaactcgagcggggggaaagacaagcttggcagcatcagcaaacaaggcgatcgctatctgcgcagcttgttcacgaccggcgcgctcgccgtgatccgccaggcgaaactccacggcaccaagcatcggccttggcttacagccttgttggcacggcggccgaccaaggttgccgccatcgcactagccaacaagattgcccgaatggcatgggcgatgatggccaggggcgagcgctataaggaacccgtcgcactcgcggcataaaaggagatcgcgtcgggcatccggcgtgacgtgacggttggaaagggcgaacagcacgtaatgcagagccggtcgatccggcgatcaggacaacccacttgggccagagcattgtcgaatgcgaggttatgaccgggacctgatccgcggagggcattatggccagcggtcacgtgaaccgcgctaacaggccgaacacatggctgctccgaccactgctgcacgcgtgaagaaatcccttgccaacctggagccgtccacaca

SEQ ID NO: 9159 - DNA, 1306 bp, unidentified
  source 1..1306: mol_type = unassigned DNA; note = element_e59c04b
  misc_feature 1..2: note = core
  misc_feature 3..188: note = LE
  misc_feature 189..1151: note = CDS
  misc_feature 1152..1306: note = RE
  misc_feature 28..201: note = bridgeRNA
cttgtgtccgaaaaatctggcagaatgtgcgaacgggcggctatcgaccaaccgcccgtcgctggatctgagcccgttcgtgctcaaaggctgcgagcctgacggggagctagggacagatccggtgtcttcctcaacccgaacagttgcatgggcttcgagcccggaccgagcaaggaagggagtggatgatggcacaagacgatctcgttgtcgtcggcattgatgtcgcaaagaataaggtggatgcgtgcattcgcgcgttgtgcgtgcggcggacgtttccgagtaccgcgcaggggcggcgcaagctggtctgctggctccgcaagcacaaggcgagcgcagccgtgatggaggcaagcgggggatacgagcgcgaatgggccaaggtgctgcgtgagaaggccgtggaagtccgtattgtcgatcctaagcgggtgcgcaactttgcccgttcggccggtcgattggccaagaacgatgtgatcgatgcggagatgatcgcctggtttgccgggacattcgccgaggcctccagccagggccacgatgcggcacgcgagaagcttgcgcacatcgtcaacgcacgttgcgccctgatcgacctgcagatcaaactgcaaaaccgcgaggagcatcccgcgccggaaccggtgcaaaaaatgcaggcgcggctgttgcggcaactcgcccgcgaaattgccgagctggaagctgcgatcgctgccatgatcaaggcgacggcgcattttgccgagctcgccgagatcatcgagagcgtgccgggacttggccggatcacctccgccggcctgatcgcggcgatgccggaactgggtcaggtgagcaatcaggcgatctccgccctgctcggcgtcgctccttacgatgacgatagcggcaaacgacgcggcgagcgccagatcaagggcggacgccgcaagatgcgcaatctcttctacatggcttgtctcggggccgcgacgcggcacaacgccgtgctgaaggccttctatgatcgcctgatcgccaaaggcaaggagcgaaaggtcgcgctggtggcctgcatgcgcaagctgatcgtcatccttaacaccatgatcgcgcggcgccagaaatgggatgccagtcgctacgcggtgagctagcgagcgcgccaactcgcgctcggtcctcgaccgagcgcttgcaaagccaaacagaacagcgagcggacggggtcaaggccgtcagccgccggaggcgggggcgcgtagcgccagccttgagcccggccgatcactggtctacgtcagcacagttg

SEQ ID NO: 9160 - DNA, 1397 bp, unidentified
  source 1..1397: mol_type = unassigned DNA; note = element_e5a200d
  misc_feature 1..2: note = core
  misc_feature 3..89: note = LE
  misc_feature 90..962: note = CDS
  misc_feature 963..1397: note = RE
  misc_feature 1165..1383: note = bridgeRNA
gatgaggtggatggctcccgctcacggcatctaggtgccaaggtgtgaaggctatcaagcattcacgagcaaaatgggagccatccgtcatggagattaccacgatcggcctcgacctggccaagagtgtttttcaggttcacggcgttgatgcgaccggtcaggtcgttatccgccggtcgcttcgccgagcgcagatgctgccattctttgccaggttgccttcctgcctggtcggcatggaggcgtgcggcacctcgcattactgggcacgcgagctgatcaaactcggccatcaggtgcgcctgatgccgccggcttacgtcaagccgtatgtcaagcgcggcaagaccgacgcggccgatgcggaagcggtttgcgaagcggtgacgcggccgacgatgcggttcgtgcccgtgaagtcgcccgaacagcaggcggcgctgtcgatgcatcggacacgcgatctgctggtcaagcagcgcacgcagttggtcaacatgatgcgcggcctgctcgccgagtttggcatcgacatccccaaggggctcgagcgggcgctgttgatggcaagacggatcgtcgacggtgaagcaccagatgtaccgacggaagctgccaagatcgtcagtacgctgtcgcagcaggcgctcgacatccacatccggcttcgcgagatcgatcgcgatctgcttgtctggcaacgtggcaacaatgttgcgcgtcgtctcatgacgatccctggcatcgggccgatcggcgcgacggcacttgccgcatcgatcaccgacccacgtcagttccgctcggggcggcagttcgccgcctggttgggattgacgccgcttcagaagtcgagcggcggcaaagagcggctcggtcgcatcagcaaaatgggcgataaatacctgcgcaagctgctcattgttggcatgacctcactggtgcgacgggcaaagtaaatcccaagacggtcgatccccggctggccgatctgctcgcacgcaaacccgtgcgggtcgcgaccgtcgcgatggcgaacaagacagcgcggatcgtctgggcggtcatggcacgtggcgagacctatcgtgccggccaccggccagcattggcgacataaatcaacgattacaaggcttggctgaagaggagatcagcttcacggggttgcgagagcgatgcgatgtgatggcaaaccggtcagaccgggaacaggaacaacccacccgatgtccaaggcgtcagagcctgataagcagaatgggatcttgttcgcggactccatcagggccagcagtctcaaccgactgcatcaacaggccggacagaagactgcacccgaccaaagccagcacatccatttaccccttgcaacgcgggagccatccacagag

SEQ ID NO: 9161 - DNA, 1593 bp, unidentified
  source 1..1593: mol_type = unassigned DNA; note = element_e5a5417
  misc_feature 1: note = core
  misc_feature 2..92: note = LE
  misc_feature 93..1157: note = CDS
  misc_feature 1158..1593: note = RE
  misc_feature 1363..1585: note = bridgeRNA
caatgggatggacgcccccgatcaaagcggcatcgagtgtgccaaagtggaaggaagaagaccaaccactacgaatgaaggaggcgtccaagatgaaaattgcggtgatagggattgatctggcaaagaatgtttttcagctacatggggtggatgaccatggcaaggttgtgttgcgcaagcaattgcggcgaaaccagatgatgttgtttttcgcccagcggtctccgtgcttggtgggaatggaggcctgcggaggtgcccatgattgggcgcgacggctgatcgagttgggctatacggtgaagctgatggcgccacagttcgtgaagccgtatgtgaagacgaataagaacgatgcggcggacgcggaggcaatctgcgaagcagtcagccgcccgaatatgcgttttgtgccggtcaagacaaaagatcaacaggcggtattggcactgcaccgagcgcggcagggctttgtgcaacagcgcacagcgcaggcgaatcagattcgtggccttctggctgaatatggcatcgccatgccacaagggatccgacacatctacaagagtctaccggagattctggaggacggggagaacgcgctgcccggtctgtttcggcagcttctacgacagcttggtgatcatctgaagacgctggaccggatggtggaggaaatggatcaacaaattcagcagtggcatcgcagtaatgaagcgagcctgagactggcggcgatagccggcgttggagcgatcacagccaccgcaatggtagcgtccgtaggcgatgcccgtaacttcagcaatggaaggcaactggcggcttggctggggctagtgccgcggcagcattccagtggtgggaaaccgcagttgctcgggatcagcaaacgcggcgattgctatctgcgcacgctgctgattcacggcgccaggtctgtgattcagagcgcgcaaccgagggtaaggacaacgctcaatgagcgtgctaattctccaagcatacaatcctctccgtggttgccagcgctggtgctacgccgagggaaaaacatatccgcagttgcactggccaataagaatgcaagggtgatctgggcactcctggcaaaggatcagcactaccagtcatcctatcttgctgtggcatgaaaatcgatagcgcgaggaagggtggccgtggaaaaggcgcattgagaaaagtaaaccaccacttttcacaatgcttggaaacccgcaaaaagcgcggctttccacttttccaccgccacggtgacgacggggaaattcaatgcatgtgaaatcgtaaaacccaaattgaaccggaacaagaaaacatccgacaagaacttttccaatgagttgctcaggcactcacccgatgatggcgaatcaggtcaagaccgtggttggcaaaaccctgtcctctcaaggcacttttcaagtgcgtacaagcgattgcggagccaaccagcgcattccatcagggccagcagctaaagctgcacaaaaaggccgaatgtacggctgcaatcttgcctctcctcagcgtcggttaagtacttggcaaatcgagggcgtccatgta

SEQ ID NO: 9162 - DNA, 1152 bp, unidentified
  source 1..1152: mol_type = unassigned DNA; note = element_e5b5d24
  misc_feature 1..3: note = core
  misc_feature 4..208: note = LE
  misc_feature 209..1141: note = CDS
  misc_feature 1142..1152: note = RE
  misc_feature 17..188: note = bridgeRNA
gcttgtgtctttgcaggggattaggcttgggggtgagagcggagtgcggcaagccgtttagcggcggtgctgcgagcacgtgtaggagctaaggctgccgcactccctccacctaagcccgaacagttgcccgagtccgacctcgaattcacaagccggggcatggtggaggtgctctcgctcccgatcctaacgccggagtgaggccatgaacatctttgcgggtatcgacgtgggtaaatccacgctggaccttgggttacagcccagcgggcgctgcgaacgctttcccaatacgccccagggccaccgcgcgctgctgcatgcgctggcccccctgaaggttgagcacatcgcgctggaggccaccggtggctacgagcgcggcatcctggatgcgttggtacaagcgggttactgcgtcacgcgcctggcctcccatcgcgccacggcctacgcccgtgccttgggtttcttcgccaagagcgatgccatggatgctcaggtgctggcgcggatggcggccacggtaccgcggcgtccctatgaaacgcctccacccgagcgtgcggaactggctgaactgctgcgttgccgtctgcaattgattggccaacgggacgacaatcggcgtcggttgaagcaaacccagttgccgccggcccggcgcgccctgcaggccatgattgatgcggccaaagaccagatcgtcgatctggaccggcgtatcgccgcttcggccacgcacgtggatcccacctcgcggctgcgcgaaatcccgggcgtggggccggtgactgaggcgactctgctggcctaccttcccgaactgggtcagctgagccgacaacagatcgcggcgctggtgggggtggctccctatgtggatcaaagcgggcgccgtgacgggccgcgtcgcgtaagggctgggcgatggatcgtccgccgcgccctttatatggccacctgcgcggctatcagggtcaaggacggtgccatcgcagagcgctatcgcgccctgcgcgcacgaggaaaactggccaaggtggctatcgtcgcttgcatgcgccatctgatcacggccatcaatgcgatggtccgtgatcgagccggctggcgatgcgacgtagccgcctcctgaaaaagacagtt

SEQ ID NO: 9163 - DNA, 1377 bp, unidentified
  source 1..1377: mol_type = unassigned DNA; note = element_e5ba69b
  misc_feature 1..3: note = core
  misc_feature 4..89: note = LE
  misc_feature 90..1115: note = CDS
  misc_feature 1116..1377: note = RE
  misc_feature 1119..1363: note = bridgeRNA
tgatggggtggacggcccccgacccagcggcatcgcaatgtgccaagatggcgttgtcaaaggaccatcagagggaaggaaccgtccgcatgcaagttatcacgattggattggatatcgccaagaacgtctttcaagttcacggcgtcgataatgctggaaacgcggtgctccgtcgaaaagttcggcgcgatcagcttatcccgttgcttcgcgatatgcagccgtgcctcatcggcatggaggcctgcgcgacggcgcaccattgggcgcgggagctgattgcactcgggcatgtggtcaagttgatgccgccggcttacgtaaaggcctacgtcaagcgcaacaagaacgatgcggccgacgcggaagcgatctgcgaggcggtgacgcgaccgacaatgcggttcgtggctgtcaaatcggcggatgcccagagcattctgatgcttcatcgggctcgccacctcttggttcggcagcgcacagcgcaaatcagcgcgatgcgggcgcatctggccgagtatggcgtcgtcgcaccgaagggccgggcccatgtccgtggtctaatcgaagctcgacaagggcgatgggccgctccccgcgatggcgcgacaggttcttatcctcctcgcccgaacgatcgaagggcttggcgcacaaatccggaagatcgagatcgagcttctggcgtggtatcgcacgaaccaggtctgccggcggctttcaactattcccggaatcggcttcatcacggcgaccgccctcgctgccaccgtcgtcgaggcaaagtcttccgctccggtcgtcaattcgctgcttggctcggccttgttccaaaacaacattcctccggtggcaaagacagaatgggaggaatctcgaagatgggagatcgctatttacggcatctcctcgtcgtcggcgccacggcggtcatccggtacacgcggcgaaaagcgacgaccgtcagcacctgggcgaaccagttgctcgagcgtaagccggcacggctggtcacagtcgctgtcgccaacaaggtagcgcggatcgcctgggcggtgatggcgcgtgaggaaaactaccgcgcgacgccgtcaatggctcgagggtaacgacggtcgcgcgaaatgacatccagtttgggcaggagagaacgacatcagtgatgcagatccggtcaagccggggatcgggagaacctgagtgattcaacgcgcatcgcagcgcggcagcttgatgagggccagatccaccgacaccatcatggccagcggcctgaggccgcacaaaaacaggccgaacacatgaatgaacctgaccgcttcagtattgccattgtcagtatcttcttactcaccgggggccgtccacaca

SEQ ID NO: 9164 - DNA, 1433 bp, unidentified
  source 1..1433: mol_type = unassigned DNA; note = element_e5bde1e
  misc_feature 1..3: note = core
  misc_feature 4..120: note = LE
  misc_feature 121..1152: note = CDS
  misc_feature 1153..1433: note = RE
  misc_feature 1187..1388: note = bridgeRNA
agatggggtaatcggcctgccagcttgtggatagctgaagaattagggtgctgcgcttcaggctgatggtgaaacgaggtccgcatatgcggcctcaagcatcagaaggagaagcgcagcatggcccattttgctggactcgatgtgtcggtcaaggaaacgagcgtctgtattgtggatgacacgggcaagatcatgcgggaagtgagggtggcgagtgagcctgaagctctcctgcaggtgctgacgaacaccatctatcgcttcaagcgaattgggctggaagccggaccgctgtcgcagtggctttacagcgttcttgccgaagcgggcttgccggtgatctgtgttgagacgcggcacatgagcgcgatgttgaaggcacagatcaacaagacggaccgcaacgatgcgcgcggtatagcgcagatgatgcgggtgggactctatcgtgcggtacatgtgaagacgttacgcagccagaagcttcgggtgctgctgacccatcgcaaactgcttcagtcgaagaccatcgccatcgagaacgacctgcgtgccaccttgcgcaacttcggccttaaggtgggcatggtggggacggtgaagttcgaggtgcggatcagggagcttgtcgaaaaccttcccgatttggccgtactggtggaaccgctgctcattgtccggcgggtgcttcgcgagcagctcggcatcctgcatcgccgcgtgctggccgtcgtccgggacgatgatgtgtgccgccgcctgatgacgatccctggtgtcggccctgtggtcgcgctgacctatcgcgtcacggtcgatgtgccggcccgcttcaggaactctaaggcagtcggagcagtgtttggattgacacctgccaagtatcagtcgggcgagaacgaccgaaccggcgcaatatcacggtgtggagatgagatgatgcggatgatgctgtacgaagcggcccagagcatgttggtgcgttcggcaaaatggtcctggctcaagggctgggcgatgaagatcgtcaggcatcgcgggatgaagaaggcgatcgtggcgctggcgcgtcgcttggccgtgattatgcatcgcgtgtgggttgacggcaccgcgttccggtggaccagggagatcaccccggcttgagatctgtgcaggatcaaatgcaataggaggaaatcgagctccacctagcggtggaatgatgtccctcgcggggcgatggatgaggtgagttcgtatgtccgcttgaacctgcagtcacattgacggcaaggtcgcccaagagattgttccacctcgtcttcgaatcccatgatggaagggccttggtgccgagtccgaagagaagcgcgagcccgcgagcgacatcggcactggagtggtggatagcctgaaagcgcttgacccagacggccgattagaga

SEQ ID NO: 9165 - DNA, 1464 bp, unidentified
  source 1..1464: mol_type = unassigned DNA; note = element_e5c7fa2
  misc_feature 1..6: note = core
  misc_feature 7..241: note = LE
  misc_feature 242..1450: note = CDS
  misc_feature 1451..1464: note = RE
  misc_feature 24..236: note = bridgeRNA
gtccttaagttcgtaggtgcagttacttcgtgttgttacgttgtgctgtgacccgggtgggccgggtgaggcaatggttggttgccggctctgtgagtgcggcttgaaaggactggctgcccggcccgcctggacttcctcgagccgctgattgagatctgcgaattcgtcgctgctttaagggaatgctggcgaggtcgtccgttgggatcgtgttggcagacaagtgaaaagaggtcggatggcagctggacagctgtgggcgggtgttgatgtcggtaaggagcatcactgggtcgctgtggtcgatagcgcgggcacgatggtgttgtcgcgcaaactggccaacgatgagcagcagatcagcaagctggtcgccgaggttgaccggttgggcgcccaggtgtcgtggacggtcgatttgaccaccgtgtatgccacgttgttgttggcggtgctggccgaggccggtaagtcggtgcggtatctgtcgggccgctcggtgtggcaggcctcggtgatctatcgcggcggtgaggccaagaccgatgccaacgacgcccaggtgatcgccgatcaatctcgaatgcgcggtgatgacctgccggtgctgcatcccgacgatgacctggtcaccgaactgcggatgctcaccgcccatcgcgctgatctggtcgctgaccgcacgcgcaccattaatcggctgcgccagcagctggttgcggtgtgtcctgcgttggaacgggccgcgcagccggcgcaagaccgcggctgggtggcactgctggcgcgataccagcgcccgaatgccattcgccacagcggcatcacgcgactgacccgggtactggccgacgcgggggtgcgcaacgcacccgtgatcgcccaggccgcggtcaccgccgccaagacccaaacggttcgactgcctggcgaagaggttgccgccgcgctggtggcacagttggcgcagggggtgattgccctcgatgaacggatcaagcagatcgatgccgacatcgaggaccgatttcgccgccatccactcgccgaggtgatcaccagcctgcccggcatcgggtttcggctcggcgccgaattcctcgccgctgtcggtgatcccgcgttgatcaactcggccgaccaactcgcggcctgggccggactggctcccgtacccaaagattctggtaaacggaccggacgaatgcacacaccgcagcgctacagccgcagactgcgccgggtgatgtacatgtcggcactgaccgcgatccgctgcgacccgcatgcccgctcctactaccagcgcaaacgcaacgaaggaaaacgcgccgtcccggcgaccatctgcctggcccgacgccgcaccaacgtcctctacgcgctcatccgcgacaaccgcacctggcaacccgactcacccccaatcaccacgacggcggcttgacaggaacattgaga

SEQ ID NO: 9166 - DNA, 1402 bp, unidentified
  source 1..1402: mol_type = unassigned DNA; note = element_e5d889c
  misc_feature 1..2: note = core
  misc_feature 3..126: note = LE
  misc_feature 127..1152: note = CDS
  misc_feature 1153..1402: note = RE
  misc_feature 1169..1397: note = bridgeRNA
agataccgtaatgggccgcgcctccaggtagctggaggagtggctgtcccccggtcatgatggagtgacggggtttcaggtttgtgtgtggtgccagaagccccgctagcctgatggaggacagccgtggagcattatgccggattagacgtgtcactggaactgacgagcgtgtgcatcgtggatgcgcaaggtggcattgttcatgagacgaaggtgccgagcgaacctgaggccctggttcgctacttcaccatgtcgaagctttcgataacccatattgcgctcgaagctggtcccctgtcgcagtggatccatgctggactggttgctgccggcttcgagacggtgctcctggagacgcgccatgtgaaggcggctttgtcggccatgaccgtgaagacggaccgacgcgatgctcggggcattgctcagttgctgagactcggctggtaccggccggtgcatgcgaagtcggtcgggggccaagaggtccgctcgctgctcaccgcgcgcaagctgatgcaagcgaagctgctcgacgtcgagtgcagcatccgtggtgtactgcgcggcttcggactcaaggttggtccgaccagccgcggccgcttcgcaatgcgggtagccgagctggttgaatcctcgagaccgtcattggcgcgatgctcgccgccaggtctgcgctcgaggccgagttcaagcgcctccatcgtgcgctgcttttcgctggttcgtgatgatcctgtctgtcgccagctcatgagcgtgcctggcgtcggagcgatcgttgcgatcacgttcaagagcggcgtcgatgatccctcccggttcaagcactcgcgcgacgttggtcctcacttcggcctgacaccaagaaagtaccagtcgggcgagctcaatgtgaccggctcgatcactaaggtcggagaccgcatggtgcacaccgcactctgcgaggcagcgagcgcgatgctcacacgcaccgtccgcttctcagggctcaaggcctgggcgatggcggtcgccaagcggcgcggcacgagaaaggcacgcgtcgccttagcgcgcaaacttggcgtcgtcctgcatcgcatatggatcgacggcagcagcttccgctggtccaatgcggagactgcgatcgcataagaaggagagcttcaagagattgggcaggctaagaggtctgcgccaccgaggtcccgtcgccgggacggtgaagttggtgaagccggaatgtcagctgtagctgctggacctggtccacggactacgatggaaagatgggctcaccgcttcctctgacggtatgatgtggcagctcaagctgaccacggacagaagcaagtaaccagcgacaggacgaccggggcagcttgacacatggccccattacaga

SEQ ID NO: 9167 - DNA, 1727 bp, unidentified
  source 1..1727: mol_type = unassigned DNA; note = element_e5d9379
  misc_feature 1..2: note = core
  misc_feature 3..272: note = LE
  misc_feature 273..1583: note = CDS
  misc_feature 1584..1727: note = RE
  misc_feature 51..329: note = bridgeRNA
ctcgtataatattttttagatacataaatgtatcttagttaataagttaatatttgttcaataggcttagttaagcccatgatataattgtcgtagtgccaatcaggtaatagttcttttttctcctgttgaaccagtattggttgcttcataggaagtctgttcccctgacatggaagttagcttcaaaccggctggctgtttgcttaagttcatggacgaccatctagcagtatggtttcgcatcagtccatcttaagctggattcttatatgcgagggtgtcgatgctccatgatcatgggttttaccaagccgattgaacactcaaatcttattacgaaagaagttgattttatgaacccactttacgtcggaattgatgtaagtagcaaatccaatgtcgtttactttatgctccctaatggtgataagcacagtaatttctctgttgccaattcacatgatggttctacacaattggtaaaaagaatctgttctgttttatcttctgaatcccttgatacagtttccataggtcttgaagcaacatcagtctatggcgacaaccttgtatattttctcagggaagatgcttctcttgcatcctttaacagaaagattcatgtcctcaatcctaagcaggtcaataagttcaaggaatcttacaacgaccttccaaagaatgattgggttgactcttttgtcattgctgactgcctgcgttttggaagaatcaacaaagaggtatacataggggactatcactacaaagcactccagaacctcacacgagcacgttactttgccgtctgcaacctcaccaaggaaaaacaacggtttatgaatgtgctgttcaagaagtattcaaccatgacacaggaaaaggtattttccgatactttcagtaccaccgcccttgctgtctacgatgaatttgaatccgcagaagcactggcatatatggacttacaagaactgaccgcttttatcatcgaaaaaggaaaaaatcgctttcctgatccagatgcggtagccaaagccattcagaaagctgcccgaagttcttatcgcttacctaagacggtaaatgactctgtgaaccaggtgctctctatatccataacctcgatgaaggcattggaatcgcaaatcaaagagttcgataaggcaatcgctgctcaaatggaactcctgccaaacgttttgatatccattccaggtataggtcctgtctattcagccggaatcatggctgagattggagatatcaatcgttttgataatcaggcttcccttgcaaaatatgcaggtcttgcctggactcaacaccagtctggtaacttcgaagctcaaaatacaaggctcatccattctggtaaccgatttttaaagtattatctgtgtgaagctacattttctcttgtaagatgcgacaaagagtacaaagctttctatcaccaaaagtataaagaggtgaacagatatcaacacaaacgtgcactcgcattaactgctcgtaaatttgtgcggttagtctttacactgcttaaagacaatcgcctatatcgcccagcagaatagagaaatctgtctgctgatagtcgccctgctcatttttcaaaaacttggtcgacagggcttaggcaggtgttttgcgttttttgagaaatatgtcatatatataaggtttttatttcatttctcacttgacatcacaccgctgga

SEQ ID NO: 9168 - DNA, 1534 bp, unidentified
  source 1..1534: mol_type = unassigned DNA; note = element_e5df65e
  misc_feature 1..3: note = core
  misc_feature 4..241: note = LE
  misc_feature 242..1420: note = CDS
  misc_feature 1421..1534: note = RE
  misc_feature 8..221: note = bridgeRNA
tttcgtattatgaggtcagccagaaacttctggttggcctatttccttaggtgcattacgatggcggtagccgggagaacgtgggcttttttggggttcgaccccgtcaaaaaaactgttctcccactgcccccaatgaccatgtttgagctggttgaggctatgacctcgcatcacaagcgaagctatgggtttggaaccatcgtgggagtgccggcggactataattcaggaggatgaaatggaaccggttgtaggtttggatgtatcgaaagggacaagtatgatccaagcatttcttaagcgtaatgaggcctatggaaaatcggaatccataaggcacacagaattgggatttaggcgacttggggaagtgctgatcgagctcagagaacgtacgggagaagaaccggttgtcattctggaggcgacgggccattatcaccgtgtcgtggtggcgtatttgacaacaagcggaatcaaacatatcatcgtcaatccgcttctgtccaaacgtgcgaagagcgcacaacttcgaaaggtgaagacggatgcggcggacgcttggcacttggccgagatgtattaccgcggcgatgtgcacccgcatcgaagctggaacgagaattatacggaacttcagcatgtaacccgacagcacgaattcgtcacctcgctttatgttcaggcgaagctcaatatgcgggcgctgctggatcaggtgtttccttcctatgaggaagtgttctacgatctctactcagtcacggctctaaaggctctgcaggcttgcttgtctggtcagacgcaagaattggatgaactcatccgtcaggttgccgggaagtcgcattccgaatcctggataggtacgaaaacagagcggttgggtaagatcctgcaagtgtggtcaagggagaagaagagcgccgctcaaattcagatgctgtcgagtatggtttcgttacttctcaccatgcgggaacagctccaaacgattgaagaacagatggatcggctagcggaattactgccggaagtcgaactcataaagagtattccggggataggggataaactggcagcagccatagtgtcggaaatcggagacgcaagccaattcggagatgctaagcagcttgtagcatttgcggggctggatcctggtgtgtacagctccggacaatttacggcctctagcaaccgaataacaaagcggggctcaaaacgcttgcgtagagccttgtatatggcagctcaatgcggattaaggcgcggcacgaacccgaggctaaaggcttactatgataagaaaagactagagggcaagccctacaaggtgacggtgattgcttgcgccaacaagctattgcatcacatttacgccatcttgaataagagccagccctaccacgcataaaccatatttaaccaaaaacctccacgccaatggaggttatttggcatgctcagaaaattatatcagcaattcgattctaagccaagatctcagagcttgacaaacattagctgg

SEQ ID NO: 9169 - DNA, 1846 bp, unidentified
  source 1..1846: mol_type = unassigned DNA; note = element_e5e6d6a
  misc_feature 1..3: note = core
  misc_feature 4..250: note = LE
  misc_feature 251..1471: note = CDS
  misc_feature 1472..1846: note = RE
cttatacgttaatatagaaccaagccccctcgacacggggccggagtcaggggtagactgactcaaaggattgtcgaccctgccggggaaaggctcgttcctccacacggcttgaccgattatgaaagctcgtccttccttggcagcgtttctgaacaggactggtcatcagagagtcacgcttcgagcgacacagtataaggacacagcagttcagaaaggccgcgtattttggaaaaggagccagaccatgaagttttgcggcatcgattgggccaacgatcaccatgatgccttgagcattgacgaagacggccatcaactgggatcgatccgtgtggcccatagtccggagggactgagccaattggacagctacctcgagcgcatcgccggaccaggaggcaaagaccagctggcctgtatcgtggagacgacgcaggggctcttgattgcccatttgctggagcagggatgggccgtctatcccgtcaatccgcgcaccgttgagcggcgacgagcgccctcgggagccaagaccgatacgattgacgcctacctgttggccaaaacggggcgtgctgacttcgcggatctgcgccggctcaacccggacagcgaacagatccaggaactcaagaccctgacgcgcgaccaggatggcttgatccagatgcaaacgcgcctggtcaaccagctgacggcctgcctcaaagcctactatcccgtggccctggaggtgtttggcaagctgcagcaaccctcgacgctcgcctttttgcgcgcctatcccaccctgcaagccgctcgcgccgcctcggtggaggagctggctactctgctcaagcaggccagatatcctggcgcccggcagaaagcacagctgatcgtcacgcacctgcagcagcctgctttgcaagccacggaggtcaccacgcgcaccaaagcgcggctgatgctggccctgctcgaccagctggaaccgctgctcaagcaaattgctgagtacgataaggagatcgaacgcctttttttgagtcatgccgacagcgagctcttccaagccctgccaggggccggagcgcgtcttgctcctcgcctgttggccgaactgggcgacgatcgcagtcgctatgagagcgccagcagtctgcaagccctggccggcacctcgccggtccttttccagagcgggacgtatcagaaagcgcatcgtcggttgggctgcatcaagccctggcgcaatgccttgcaccaatttgcctggcaaagtacccaccaggaagcctgggccaaggagtattaccaacgcaagcgggccgagggcaagagccataccgttgcggtccgcgcgctggccaatgtgtgggcgcgcattctctacgccgtctggaagacgaaggagccctatcacaccgcgacctttgaagcggccagacgggcccatgcgctccgccaacccgcggcctgagtccatgccgctcttgcccatcctgctccgttgagcaggtgcagcgctgcgaggtccctcgccagtgccacacgcctctgctccaacggagtcgcccaaccggttcccgccgtgtcccccttgccgaccgtgagccgctcccagggccgctccaacgtctgccgcggcccgacaccgcgttcccgactcccggtgtgggttgctgaccagagaccacgccgagtcaaggccgcgcaggaggtggggcgctcgggggtgggcgcgctcgtcttggccttgaccggcgtggtacactagctcacccacacgggaggcagcttcacttcctctcacctggcctcctcctttcctgtcttgacccttgacatagagagt

SEQ ID NO: 9170 - DNA, 1574 bp, unidentified
  source 1..1574: mol_type = unassigned DNA; note = element_e5ead70
  misc_feature 1..3: note = core
  misc_feature 4..280: note = LE
  misc_feature 281..1456: note = CDS
  misc_feature 1457..1574: note = RE
cacgtataatccaatcatcgaggatgatggttggatttttccctttctcccgaattcttcgggtaattcaacttcatctctgatatattcatatcaggcactgtggatctgtacccattttttcacagcactgactggtaagtaggtgactcagaccacagcgttcgtctactactgttgatcagtttgttagcgcctgacgcttctatttacgtgattacacagccgaactctctgtgggagactgcagtgcctaaatccatcttaaggaggtgcctttatggctctttactttgtcgggatagatatctcgaagtacaagcacgactgctgcatcatttctgcagcagatcagcaagtcgttgccaaattcacatttcgtaacgaccgcgaaggattcgacactcttgtcgacactctccagtcctttgcagaacccatggacgtaagaatagggtttgaagccactgctcattacgcccttaacctggaactcttccttgaaaatgctctcctcactttcatggaagtaaacccggtcctgatcagtaagtatcacgaatctttgtctcttcgtaaaacgaagactgatccaatcgattgcgagatcatcgcccgctggctgatgacagtggattacaaaccccatccaaaaggattttaccactcttactctcttaagtcattaacccgcttgcgtgatcgtctggtcaggcaacgctcactttaccttgttaagctcacaaatgtccttgatcacacctttccggagttcaaacctttcttcggtgagcgtttcagcaagactgctctctacctgctccagaactacggtactgccgaaaagatgtcacacatgaattcggcatcatatgagaaccttcgctctatttcaagaggtaagttctctcctcagcagttcctgaagctcaaggagcttgccagggacactgttggtgtgagcaattccatctttaccacggaactgaacagccttcttgatctgtacagtaatatctctgaaaacatctctgatattgaagatcagatcattaagctcatcaacgatgtgcatcctcatttcatgaccattcccggcattggcccgctatcggcagctgtgatctatgctgagttcggagatatctccaacttcagctcaccagcaaagatgcttgcattcgcaggtctcgaaccgaagatcaatgattccggtacagagaatcatggcggcaggatggtcaaacgaggctctgcacagcttcgctatgtgatcatgaattgcacattgccactgatcatgcacgatatgacatttgctaagtactatgccaaaaagcgtaaagagggaaagccacatcgtgtcgcacttacacatctggcgaagaaacttgttcgtgtcatctttgctttggagagacaacagatcgactacgatccggctctgattcgctgacttttattacacctttctcttctagtcggctgagcaacgtactcaggcggcttgtttgctgtgcaatcacatatttttctaaatatatctattttcctcttgacttagcatagtttgt

SEQ ID NO: 9171 - DNA, 1533 bp, unidentified
  source 1..1533: mol_type = unassigned DNA; note = element_e5ee6bf
  misc_feature 1..2: note = core
  misc_feature 3..240: note = LE
  misc_feature 241..1416: note = CDS
  misc_feature 1417..1533: note = RE
  misc_feature 3..218: note = bridgeRNA
cttgtattataaagtagtagttattaaagcccctctccaagggcagtgctacactgtaagggatgctgtggattggtttgtcacgcctaccacaagatggtttcagaaaggttccaaccacagccctttgcaggtttgttaatcagttaaataccgccagacggtttatgtggaacaaggttacaagagcaaagtgccctgtggatgcagcatcacaatcttaccgctggaggttttgctatgatttctgttggaatcgacgtcgccaaggacaagcacgactgcttcatcgtcagctcggaaggaaaagttctcgcggatgtgtttaccattccaaacagcatcgatggcttttactgcctgctgcaaagaattcgggactgtactccgcctggggacaaaataaaagtaggacttgaggctaccgggcattacagctacaacattctcgggtttcttcttgacaacggtctcgccacctatgtcttaaaccccttgcacacgaatctttaccggaagagtctcagcctcagaaagacgaagaccgaccgtgtagatgcgcgaacgattgcggctatgcttttgtccgatgtgggcctcaagccctacacagacacagcatacctcaacgaggagttaaagtcactgacaagataccgttttgacaaggtgaaagagcgtggccggcttaagcagtcgattgctcgcttggtctgcatcctgttccctgaactggaaaagctggtgccgacacttcacatggtctccgtttacgccttgctagaggagtttcccggagctgagcagattgcagaagctcatctgacgcggctgaaaacacttttacatgatgcttccagaggtcgatatgggcgggacatggctttgaatatccgagaggcagccagaaaatccattggctcagtgatgcctgcaaagtcgttggagcttcgccacaccatccacctcgttcgggagttagacgcggagattgatgaaattgagaccgcaatccaaaacatcatgaacgagctacattctcccattaccactatccctggcatcggcacccggatgggagctatgatacttgccgaggttggcgacttttcccggttcgagtctcctaacaaactgttggcctacgccgggctatcgccctcgacttaccaatcagggcagctcaagaactgctatgcccacatggaaaagcgaggctccagatacctgcgctatgcgatctacaatgccaccaaatacgtttgcctttgggacccaacctttgccgcctatctctcgaagaaacgtgcggagggcaagcattacaatgtcgccatttctcatgctgccaaaaagctgatacggctcatctacgccttagaaaaatccagagaatcttatcgcatggcagcgtagctttcactcaatagcctgcatggggccctgacgagcctttgctttgctatacccattttgaaccatctgttttttgaccaccatcctcagtttcgcgcttgacttttaatagttaat

SEQ ID NO: 9172 - DNA, 1371 bp, unidentified
  source 1..1371: mol_type = unassigned DNA; note = element_e5f29a3
  misc_feature 1: note = core
  misc_feature 2..286: note = LE
  misc_feature 287..1282: note = CDS
  misc_feature 1283..1371: note = RE
  misc_feature 69..269: note = bridgeRNA
ctttaggtttgcaaaagaagagttaacatacatataaaaatatgtttatgttgcaaaatttcttttttgcttcttttttctttgttgaaaacattaattctgttaataagtataaagaaaaagaatggggtgaactttcctgccggctggaataatgatccattgcctgtattagtccccattcttttataaggttaccaaggaccaaatagaattttagatatttcctagtaaaggttttagtcaaagtaaccattttttaatcgttaaattaaaacacaaaattatgaaaattattgatgttgttgggattgacgtgagtaaattaactattgatgcgattgttcatcaaagtaagagttatcgtcaatttgaaaactcaaataaaggatttagtattctttgtaaatgggctttatctcaaagcaaagtagataaagataacctactgtttgtatttgaacacacaggtctttactcttaccagttagccacctatttggcaacaaaagaatttcattttgttatcgttcctggtttagagataaagcgctcattaggtattgcaagaggtaaagatgataaaatagatgcagctaaaatcgcccgctatgcgtatcgtttaagagatgagataaaacttacaattcttccatcagaggaaatacaacaccttaaaagcctcctaacactaagggataggatggtaaaacaaagagcaggttacaaagctagtctgaaagaaatgaaaagagtattaaaaataaaagataataaagtattgtttgacactcagaaaaaaatcatttcaagtttggataaacaaattacaaaaattgaagttcaaatgaatgaaataattatgagtaatgataagttaaaaaagttttacaaattaatggtaactataactgggattggcccacaaacagcactatatatgattgttctaacttctggttttaccaaatttaatagcagtcgtgcatttgcttcatatagtggaatagcaccattccctaatagttctggaacaagcattagagggaaaactaaaataagcaatttggctaataagaagatgaaaagcttgttagatatggcagcaaaaactgcaatacaatacaatcaagagatgaagctatattacaataaacgcattgaagaaggaaagccaaaaatgagtacaatcaacattattagaaacaaattggtggcaagaatttttgcagtaattaatcgtggaactccatatgttaatacaatgaaatatgcagcctaattctgttgataaaatatattcttaagaataatttatagttgtaattgttaatatcttttttgaaatagatttgttttaaccatagaata

SEQ ID NO: 9173 - DNA, 1464 bp, unidentified
  source 1..1464: mol_type = unassigned DNA; note = element_e5f5ecb
  misc_feature 1: note = core
  misc_feature 2..231: note = LE
  misc_feature 232..1449: note = CDS
  misc_feature 1450..1464: note = RE
  misc_feature 42..235: note = bridgeRNA
cgttactttcttcccggtgcctcggcgggcatgctgagggctgatggcctgccgggcccggcatgattgttgccccctgtcgcacgcatgatctggggggtgttgtcaccgggtccggtctggcggtgagtgatcgctgataggggctcggccagctttgcgaggtcgtccgtaacgtggatgccgggacttgccgtcggcgggccgtcgtgaccgatcgacgggaggaacatggcaacaggcatcgcacgctacgaggaagccggggtcttcatcggcctggacgtcggcaagggcgagcatcacgcggtcgccgtcgaccgctccgggaaccggctgttcgacaagccactgcccaacgacgagggcaagctgcgcgagatgctggtctcgctggccgagcacggtccggtgctgctggtcgtcgaccagccggcgacgatcggggcactgcccgtcgcggtcgcccaggcagtcggcgccctcgtcggctatctgccgggcctggcgatgcgccgcatcgcggacctgcatccgggcgaggcgaagaccgacgcgagggacgcgctgatcatcgccgagaccgcccgcaccctgccgcacacgctgcgatcgatccaggtcgccgacgcgcaggtcgcggagctcacgatgctctgcggtttcgacgacgagctggccgggcagatcacccaggtcagcaaccggctgcggggcctgctcacccagatccatcctgcgctcgagcgcacactcgggccgagactcgaccatccggcgatcctggacctgttgcgccgctatcggtcgccggaggccttgcggcaagccgggccgaagcggctggccgcccggctgctgcagcgcgcgccccgcaaaggcggcgactgggcagtcgagatcacccaggcgctgaccgagcagaccgtgatcgtcgcgggcaccagcgccgccgcccacgtgatcccgcggctggcggagcaactcaaagccctgcaccggcagcgcgacgagatcgccgacgaggtcgaggccatcgtcgagacccaccctcttcaccccgtcctgacgagcatgcccggagtcggcgtcaagacggccgcccgactcctgaccgaggtcgccagcaagcacttcccgaccgccggccacctcgccgcctacgccggcctcgccccggtcaccagacgctccggctcctcgattcgcggcgagcacgcctcacggcgcggcaacaagatcctgaaacgggccatgttcctctccgccttcgccgccctccgcgacccagccaaccgcgcctactacgaccgcaagatcgcccagggcaaacgccacaaccaagcactcatcgccctcgccaggcgccgctccgacgtcctcttcgcgatgctccgagacggaaccctctacgacccgccaagggaaatcacacccctcaccgcttgacaaaccatatagggg

SEQ ID NO: 9174 - DNA, 1500 bp, unidentified
  source 1..1500: mol_type = unassigned DNA; note = element_e600280
  misc_feature 1..2: note = core
  misc_feature 3..243: note = LE
  misc_feature 244..1479: note = CDS
  misc_feature 1480..1500: note = RE
ctaataggttccgtcagcctgctggtgcaggatggctccggtagcggctggcgggtcagcactgcactcttcggacccctttgaggtcttgcggcagaccgtgcgcccgttggtcgtgaggagacgggacggctgatgggatgacgtgccccgccctctgggcctggtgagcacttggctattagatcgccggcgtcttctccacgctgctgatacgggcgggtgtctgtgtgggaggcgaggatgatctgggtaggcgatgactgggccgaggaccaccacgacgtggagatccttggcgaggacgggcgccggcttgtccgggcgcggttgccggagggtcttgaaggtgtcggtcggttgcatgcgctgatcgctgagcacatgccggcgtcgtgggcggatctggatccggccgaggcggccgggcgggtgcggatcgggatcgagaccgaccgtggcacgtgggtgcaggcgctggtcgcggcggggtatcaggtgtatgcgatcaacccgatgtcggtggcgcggtaccgagagcggcattccacttctggtgcgaagtccgacgccggggatgcgcacgtgctggcggagatcgtgcgtctggatcatgcccatcaccggcaggtggctggtgacagctctcttgcggaagcggtgaagctggtggcgcgggcgcatcagagccttgtctgggaccgcacccggcaggtgctgcggctgcgctcggcgttgcgggagttctatcccgccgcgttagaggctttcgacgacctggccgccggtgaggcccttgagttgctggaccgggcaccggatccggagcggggtgctcgcctgccgcgggtcacgatcgtcgccgcgctgcggcgtgccggtcgtcgtgatctcgatggcaaagctaccgcgatccagcagacactgcgcgctgagcagctgcgtcagccgcagccggtgcagaacgcctacgcggcgatcgtgtccagtcaggtccagctgatcaacgttctcaacatcgagatcgccgaactcggtcaggtggtggcctcacattttggccggcaccgtgacgttgagcgttacttgagcctgcccggcctcggcccagttctcggtgcccggatcctcggcgagttcggcgacgacccgcaccgctacgtcgatgccaaggcccgccgcaactacgccggcacctcgccgatcactcgggcgtccggcagccgccgggtcgtactcgcccgctacgcccgcaaccgccgtctcgccgacgccgtgcaccagtgggcgttctgcgccatgcgcggctcacccggcgctcgcgcctactaccaggccctccgcgaccgcggcaccggtcaccaggccgccctgcgccagctcagcaatcgtctcgtcggcatcctccacggctgcctcaagaccggaaccacctacgacgaggccaccgcctgggcccatctccgatccagcacttgacatcgaagaaccatgggatgt

SEQ ID NO: 9175 - DNA, 1154 bp, unidentified
  source 1..1154: mol_type = unassigned DNA; note = element_e60a315
  misc_feature 1..2: note = core
  misc_feature 3..203: note = LE
  misc_feature 204..1142: note = CDS
  misc_feature 1143..1154: note = RE
  misc_feature 37..209: note = bridgeRNA
cttgtcttatgacttttcgtgccgtttgggagatattggcaccgccgccgagagtgcgagctcccggacggcggcgagggtcggatcgtcgtgacgcaggaggttttacgctccgcattggagtttgatcgccctcgtctttcccatcggcctgaacggatacaggggcttgaaggcccgcatgacaagcagaggcaggaaagatgattaagcttaccatcggtgttgacgtttcgaaagacacactcgacgtccaccttcacccggccggcgaccaccgccagttttcaaacgatcccaggggcttcaggtccatcgtgagatggattgcagcccggcccgtcgcccgcctcgtcttcgaggcgacgggtccttatcaccgcgccttcgaacgcgcgatgggcgaggcaggcctgccactgtgcaaggtcaatccgcgccaggccaagcgttttggcgaggcgctcggtcagctggcgaagacagaccgcatggacgcagggatgctcgcccgcttcggggccttgctcgaaccggatgtgcgcccggcgccttcgaagatcatcagtgatctcaaggacctgcatgtggctcgcacagccctcatcaaggatcggacggcggcaaagaatcgcgagaaaaacctgacctctccactcctcaggcgtcagatccgccaacgcctttcctccattgaaagccatctgaaggaggtcgagacagccatccgcgtcctgatcgatagagatgaaagcctccggcgcaagatcgcgatcctggtctcgatcccgggtattgccgaacgctcggcctccgccctcctgatcgacatgcccgaacttggtacgctggctgcgcaggaggctgctgccctgtcgggcacagcgcctctgacgcgtcagtcaggcaagtgggcgggaaaggccttcgtctccggcggccgggttaatgtccggaaggccctctatatgcctgcgctcgttgcagcccgcttcaaccccgatctgaaggaaaagtacatatgtctaactagccggggaaaaccacccaaagtcgcgctgaccgcagttatgcgaaaactgatcatcctggcaaacgcactgatccgagacgaccgagactggtcgccagaacgggcttgatcaagacggata

SEQ ID NO: 9176 - DNA, 1371 bp, unidentified
  source 1..1371: mol_type = unassigned DNA; note = element_e613b30
  misc_feature 1..2: note = core
  misc_feature 3..225: note = LE
  misc_feature 226..1197: note = CDS
  misc_feature 1198..1371: note = RE
  misc_feature 29..198: note = bridgeRNA
attgtaagttaaaaatgtgatataaaagagataagagggaaagatagccctactcactataggaataggactatcacgggcgtgtgcgaccgaaaaaaaagttggtattacaaccgtttccatcaaggtacactagccctatccctcgatacgtttgaatagttgtgtgggacatatatatgcacccgtttacaatcttaaattaataaaactatcgaggttataatggttagatcttatcaaaattttattggtattgacatcggaaaattcaagaatgttgttgcagttcacaagcagaagaatgctgttgaatttgacaataatacttctggttggcaacaattgtgtcaaaagttctcagatatcttacctaattctttagtgactttagaaaatacaggaaaatatgagcttggtttgtcacattttcttattgacaagaatatcaccgtacatcgagctaatacccgtaaagtaaaaagttttattttatctcacggaactttagcaaaatccgataaatcagatgcaagagctcttgctcaatatggatttgaacgccatagaactctctctctatttgtacctacttctgaaaaacaatcaaccttggttgcactttgtcaacgtcgtgatgacatcacgcaaatgagaactcaggaaaaatgtagactggaagcacctgaaaacgaccatataagagaaagttgtcaaaaaactattgaattttttaatagccaaatagatgaactaaataatactatacaaagaatcattgatgaaagtcatgagttacaagaacatcaaaaaatccttaaaacagttcctggaataggtaaaaagttatcacaagattttctgtgtttaataccggagcttggttacttaaacagaagggaagtagcaagtcttgctggagttgcacctcatcctagggaaagtggtaaagctgttggttatcgaaggattataggtggtagaagtaatgtccgtaaaaagctttttacagctgcgatgtctactgcaaggtccaaatctgtacttggtgccttttattctaagcttgttgaaagtggtaagaagaaaatggtagctataacagctctaatgcggaaaatcatagtaattgctaatgcaagacttaaagaagcaattaatttgcatactctcacaacggtggctgaaattggctaatgaatatgtgcgtctacacagacttaaagcacatattcattagctaaacagaaattattatggcagctgtttgatataaaattttatttctatgacacacgggtttttattgtccacatgattgaacaaagttacagaattacacaaataaaaaatttttaaaaaacatagttg

SEQ ID NO: 9177 - DNA, 1472 bp, unidentified
  source 1..1472: mol_type = unassigned DNA; note = element_e619e25
  misc_feature 1..4: note = core
  misc_feature 5..238: note = LE
  misc_feature 239..1462: note = CDS
  misc_feature 1463..1472: note = RE
gtcactggtccaccctcctgttgacgaggactggcatggtcttcgtcgtacgggatcggtgagagctggggtgacggcctgggtcggtcgcctctggagggccccgatgacactgccgcccccagctccccgagggcttgtgaccggcaacagagggacgcgccgcagagcgccagtcagtgaccgcccgggttgagccctcctcaccgacatgtcgctgccacccctgggaggggacatgttctgcgggatcgactgggcgtcggagcgccacgccgtgtgcgtgctggacgacgccggccgcaaggccaccgccttcgagatcgcccacaccggcgatggattggaccacctggtgaccaggctggggcggtttggcgacccggccgcgctgccggtggcgatcgagcggcccgacggccgcctggtcgaccggctgctggaagccggccacccggtcgtccccgtgcagcccaacgccatcaaggcgtggcgggacgccgagatcctctcgggcgccaaaagcgaccccggtgatgctgcgctgctcgccgagtacctgcgcctgcgccaccaccgcctgcgggtcctgcaaccgttctcggcccagactcgtgcgctgcgcgccgtggtgcgcacccgcgacgacctcgtggaccagcgggtggccgccaccaaccagctggccgcgtgcctggacgccttctggcccggcgccaaggccgtcttcgccgacgtcgaaagcccgatcgcgctggacttcctgacccgctatccaacccccgagtcggccgcccgcctgggcgagcagcgcatggccgcgttctgtgtcaagcacggctactgcggccgccgccccgccgccgagctcctggcccggctgcgcgccgccccggccggcctgaccggcaccgtggaggtcgaggcccgccgcgatgcggtcctggccatggtgggggtgctgcgcgccctcaaccaggcaatcaaggacctggaccgcgcggtcgtcgcccacctgggtgagcacccggacgccgagatcttcacgtcgctgccacgctcgggtcagatcagcgccgcccaggtgctcgccgagtggggcgactgccgccaagcctacgacggcccggacgccgtcgcctgcctggccggcgccgccccggtcaccaagcgctccggcaagcacaccgccgtgcacttccgctgggcctgcaacaagcgcttccgcaaggcgatcacgacgttggcggacaactcccgccacgccagcccgtgggcggccaaggtctacaccgacgcgatcgcgcgcggctgcgaccatccccacgcggtccgggtccttgccagagcgtggatccgggtcatctggcgctgctggatggacggcgtgccctacgacccggccaagcacggcgccatccgcaacctggccgaaatggctgctttggcgcccgaaggttgacacagagggt

SEQ ID NO: 9178 - DNA, 1154 bp, unidentified
  source 1..1154: mol_type = unassigned DNA; note = element_e61afa0
  misc_feature 1..2: note = core
  misc_feature 3..188: note = LE
  misc_feature 189..1139: note = CDS
  misc_feature 1140..1154: note = RE
  misc_feature 33..201: note = bridgeRNA
cttgtatgtttcgtattgctagacttggatatgttgttggttaattcagtcgtgcccggcacggcagctcgaccagtcctggggacaacaagcccgtgggagagcaaggagcgtcgtgccggtttttcagtgataacccgaacggttgcttgggccaataagcccgcattattgcaaggatgggtgccatgaacgaaacgatagtggagaaatttgtcggcattgatgtgtccaaatccacgctggacgtctgcatcgagccactgggacagacgttgcatgttgcttacgatgaggcgggagcacgccaagttgtcagccgtctgaaagaactcggcccggctttgatcgtgatggaagccacgggcgggctggaagtgcgtatcgcgactgagctgtccatcaaagggttgccggtcgctatcatcaaccctcgtcaagcccgtgattttgccaaggcgactggacagctggccaagacggatcgggtggatgctgcggtgctggcggcatttgccaaagccattcgtccgcaagtccgcccgctcaaggatgcggatacccgtgccctggatgacatggtgagcaggcggcgtcagttgattaacatgcgagttcaagaaaccctccggcttggcacagcggcttctaagccactggaaaaaagtctgaacaagcatattgcctggttggacaaacagattgccggaattgataccgatttgaccaagcgcttacgcaggtcggatgcgtggcggaccaaagatgatttgctacggggcattcctggcgtgggtgcggtgactaccctgaccatgttggcgaaatgcccggagcttgggacgctaaatcggcgcgaaatcgcggccttaaccggggttgccccgcttgcgaatgacagcggcaagcatcgcgggaagcgatttatctggggtggacgagctgatgcgcgtgcggtcttgtacatggcgacggtctcggcgatacgctgcaacgacacgatcagggcattcgctgaacgcctgaaaaatgcgggcaaaccaccgaaagtcgttatcgtcgcttgcatgagaaagttgttaattatcatgaattcaatgttgaaaaataatacgccgtggaaccccaaaatcgcttgacctggaacacggttg

SEQ ID NO: 9179 - DNA, 1350 bp, unidentified
  source 1..1350: mol_type = unassigned DNA; note = element_e620a9f
  misc_feature 1..2: note = core
  misc_feature 3..341: note = LE
  misc_feature 342..1310: note = CDS
  misc_feature 1311..1350: note = RE
  misc_feature 27..197: note = bridgeRNA
cttgtatgatgaaattaaataaaaatagtgaagcagatcaagtacgcttaaaccgttcaatgggaggccgtcccagcctgaggactggttgccaaaaccagagcctgccgcgtagattggcccccgccctattcacccataccgtggagtatccgaggcctggagcctgcatacacaaggcaggtaggtgcatgcgcagggtcgggaaccagcggacagtgtactttctttaaccctctgctttcaatttcttatgaaaaatagcccgcttaataaaaccgccccagtaaagccccccgctatttgcgggcattgatgtcggtgccgaggaatgggtcctggtggtccgcaaggacggcaaacccttcgacccgcagaagttcggcaacacgcactctgaccggggccgtttggtcaaaaaactggccaaactgcccaacctcacagtttgcctggaagcgacgggcgtctaccatttcgacctggccatcgccttgcatgatgcgggggtggcgctgatggtggtcaaccccaaagcctcgcataactttgccaaggtgttgatgaaaaacagcaaaaccgacgcggtggatgccaacaacctggccgagtacgccgcacggatggatttcgtaccgtggacgcgcccgtccggcgacaagatcgccttgcgcagtttcgaccgccgcacttgtgccccagagggtattgacgcgctgacccgccaaaaagcggcggccaaaaaccatttgcacgcgctttccaccacctcggaaacacccaaggccgtgctcaaggatgcccggttggccatcagccagttggagaaacgcattgtccgcctgtcagcggaggcgatggctctgatcggccagacccccggactcacccgggtgttcacgttgctgaccggcatcaaggggattgccgaaaccagcgccatcgccctgatgggcgagctgttgctgttgccgcccggcttgtcgcaccgcgaatgggtgaagcttgccgggcttgaccccaaggctttcgactctggcaaaagcgtccacaagaaggcacgcgtttccaaagccggcaaccggcacatccgctcggcactgtatatgcccgcgttgagcgccaagcaacacgacccgcacgtcaaggcctatttcgaacatctgccggccaacggcaagctgccgttgcaggccgtctgtgcggtgatgcgcaaactgctccatgctatccacggtatgctgaaaaatgacaagccttttgacaacagccgtttttatgtcattccggcagtgatgattccgccgtagccaaaaatgaatgaaattaggttgattttgaacagagtat

SEQ ID NO: 9180 - DNA, 1579 bp, unidentified
  source 1..1579: mol_type = unassigned DNA; note = element_e625e30
  misc_feature 1..5: note = core
  misc_feature 6..240: note = LE
  misc_feature 241..1491: note = CDS
  misc_feature 1492..1579: note = RE
  misc_feature 65..242: note = bridgeRNA
aggaaaaaacattaaactttgtttcacaagctataatgaaaatgattgttttttaatggcttcgcctataatcaatataaagcgagtaataaaccttgaatataatgtagtaatacgattcttacaaggaaactaggaatagtagctgataagaacaagatattgtgcaaatagcacgtgtaggaatttttttaggacagttactataaattcgctttataccttgttatggaggtaactatggatgcaatcgtagaaagatgtgctgggttagatgttcatttggatacagtggtagcatgtgttttatatggtaaattagatataaaacctaaaaaagaagtaaagacattttctacaactactaaaggattgttagaattattggatttcataaatcagaaagaatgtactcatgtagctatggaaagtacaggaatctattggaagcctgtatggaatatacttgaaagcggagcttttgacttaatagtagcaaatgctaaaaaaataaaaaatgtaccgggaagaaaaacagatgtcaaagatgcagaatggatagctagcttattaagatgcggtttaatagaaaaaagctttgtaccaccagagagaattcgagatttaagggatttaactaggttaagaaaagaattgctaggtgaagttaatagaaataaaaatagaatccataaggtgttacaagatgcaaatataaaaatatcaagtgtactttcagatgtatttggagaaactggaaaatctattttaaatcaaataataggtaatcaatgtatcacagaagaatttatttattcactgtatgaaggaagaggaaaatcaaagttaaaatctaccctaatggaaatgtatgaagcgcttaatggtaaaatcagagggcatcatgtgatattattgggaatgcacaatagtaatattgtatttttagaaaaacaaattaatgaattagaaaaagaaattgatatattacttcaaaaagaaagagatagtttagagttattagaaacaatacctggtattagtaaaatatctgcctcaagtataatagctgaaataggaactagtatggatgtatttaaaactgagaaacatataagttcctgggctggtttatgtccaaaaaacaatgagagtgcaggtaaaaagaaaagaagtggtataaagtcatggaacaattggctcaggtctatgttgtgtgagtgtgcatggtcagccaccaagaaaaaagatagcagatttaaaaataagtactggagcatggttccccgaatgggaaggaagaaagcactaatagcgatagctaatatgatgttaagactgatatatcacttattaaaaactaaaagtacatataaagagttagaaatccaatattttatagataaagataaaagaagagaagataggattataaaagaactaaaatccaaaggttatcttgtagaaaaagatagtttacaaatggcataaaatgtaaaaataacactaaattaagcctataaaagataggtttactttagtgttgcaaaaaatagcctacggctagaatcattttcgt

SEQ ID NO: 9181 - DNA, 1275 bp, unidentified
  source 1..1275: mol_type = unassigned DNA; note = element_e6295c9
  misc_feature 1: note = core
  misc_feature 2..67: note = LE
  misc_feature 68..1054: note = CDS
  misc_feature 1055..1275: note = RE
  misc_feature 1066..1261: note = bridgeRNA
taatgggatggactacctcctccctctgcggttaactgttcgaaatatgcgcaccaggagaatcaccatgagtatcgtatttctgggtattgatctggctaaaaatatctttcagctctgcggattaaaccaggccggtaagccggtttatacaaaacgcactggacgaaaagaattactccagactgtggcgaatattccggcatgtctgattggtgtcgaggcatccactggggcattttactggcaacgtgagtttgaaaaactgggacataaagtaaaagttattagtcctcagtatgtaaaaccttttgtccgcggccaaaaaaatgacggcaatgatgcgcaggcgatagctgtggctctgatgcaacctacgatgcagtttgttccaccgaaaagccctgaacagcaggatattcaggctctgcaccgcgcaagacagcgtattgtcaatcatcgtactgcgacagtctgccaaatccgaggactgctgcttgaccggggaataacaatcggcgcggcagtttcaagagtccgtcgtgccgttccgcttatccttgaagatgctgaaaatggtctcagcgtcagaatgcggaggacaattgcagaactctatgatctctttaacgatctgggtcgtcgtataaacttttttgataaagaaattgatgttgtgttcaggcaatcagaagcctgtcaacgcattgccaaagttaaaggcattggtcctaaaacagccacggctgttgttgccgcgattggcagaggaaccgaatttaaaaatggtcgtcactttgccgcatggcttggtctggttccacgacaacactcgagtggcgacaagcatttgcggacactttttattcatggtgcccgcgctgtcgtcagagttgccacgaataacaatgatggctgcctgtatcagtgggttaaccagttgaaggaacggcgcggatttaataaaacgaccgtggcggtcgctaacaagaacgcgagaataatttggtcgatgctgagaaatgataccgagtatcagtcagttggaagttagtacccagccaaaagagttgcagtgtactgaaaaatggtgacaggttgcacctgcacaatcggaacctgactattatattggcctcagaggccgtccagttgttgaggcgattgtgtgcggattacccatttgggcacaggttagtattcctgatgccggatagatgtaagcaacaacccaaaaccagattcagtacttgcaaaacggaggtagtccataga

SEQ ID NO: 9182 - DNA, 1389 bp, unidentified
  source 1..1389: mol_type = unassigned DNA; note = element_e63e1cc
  misc_feature 1: note = core
  misc_feature 2..89: note = LE
  misc_feature 90..1121: note = CDS
  misc_feature 1122..1389: note = RE
  misc_feature 1157..1381: note = bridgeRNA
caatgggatggactcctcctcacctacggcatctaggtgccagactgaaggtgcaaaccagacagtcaacggcgagaaggagtccacacatgaagcttaaacgcatcggggtcgacttggccaagaacgtgttccagatccacggcgtggatagccatgagaggccggtttggcggcaacgattgccgcgtgatcgctggctgcaagcagtgttggagaagatcgaaccgggttgcgagatcggcatggagagttgcggtggtgcgcaccattgggcaaggcagctacaggcacgcggctatcgggtcaaaatgatcgcgccacagttcgtgaagccctatgtgaagagcaacaagaacgacgctaatgatgcggaagcgatctgtgaggcgatgagccggccaagcatgcgctttgtcgcggtcaaatcgatcgagcagcaagatatccaggcgacgcatcgcatacgaagtggattgatcgaacagcgcacagccaaggccaatcagatccgcggtctggtatcggaatacggattggtggcgcccaaggaattactggcccttcgtcgcgcgataccgtgctggctggaagatggcgacaacggtctgacagtacgttttcgtcgcttgctcgacggcgtgtggaacgaccttcgcgcgctggatgcccgagtggacgagctggatcgcgagattgccgagatcgccaacaacgaaccggcggcagtgcgtctgcagcagttacgaggagtgggcccgatcacgtcgaccgcgttactcgccgctatcggtgatgccagtcagttcaccaacggccgccagcttgccgcctcgttgggactgacgccgcgacagcacagctctggtgggaaagatcgtttgctcggcatcagcaagcgcggtgacgcctatgtgcgctcgttgttggtgcatggtgcacgcgccatgatccgaaccgccaaggccaaggacgacggcttaagtcgatgggttatcgcgttggcggatcggtcgcatccgaacgtagcgtgcgtggcgctggccaacaagaccgcgcgcatggcatgggcgatgctacgaaacaacacggattaccaaccggagcgggcggcggcctgatctaccacgcgttatacaaggcaaaacgcagtaccctcagtcacgattgcgaagcaacctgagcgatggcaaaccggtcgaaccggcgtcggcaaaacccttaaatgtccaagtgcgaagagcacgacaaaacgattgggagctggcgcgcgaatagcccatcatggtccagcatcaagcgatgccgttgttagagaccggatatacgtgtgcagtcggcacggggcgccaaagcaatgggggcttgcaatggggaggagtccatata

SEQ ID NO: 9183 - DNA, 1167 bp, unidentified
  source 1..1167: mol_type = unassigned DNA; note = element_e64ae98
  misc_feature 1..2: note = core
  misc_feature 3..177: note = LE
  misc_feature 178..1146: note = CDS
  misc_feature 1147..1167: note = RE
  misc_feature 34..198: note = bridgeRNA
cttgtatcttgaaaacgatttacaatagctacgtttggatttggcaaggcgtatgcagcccgataccatctggggttttaagcccgtttttaagcaaacggcgcatacgctgagccgctcatttgaaacccgaacagttgtccgtactccataacgtatttgcaaggatgggtaatcatgagtcagccaaatccactctgtgtgggcattgatgtttccaaagctacgctggacattgctgccagctcttatattgaacagtttacggtcagtaataacgatgatggttttggtctcattactgccgaactgagaaagcatgccgtttcgctggttctgctggaggccaccggtggtcttgaagccgccgtggcctgctctcttcaggctgaaggttttgacgttgtagtgatcaatcccagacaggcccgcgattttgcccgtgcaatgggatacctggcaaagacagaccgcattgatgccagagtgcttgcgcagatggctgatgtcattaatcgccatccggagcgggggcgctttatccgggctctgccggatgcagagcgtcagactcttgcggcaatggtggtgcgccgccgccagctaattgctatgttggtggctgagcgtaaccgcttgcacccggctcatccgcagagtagggaaagcattaatatcatcatcaaagcactggtagatgagcttgcgagaatcgatgccggtatgaacagacatatcgagactcatttcagcgagcttgctgagcgactgagcagtattaaaggtgttggcaccatgaccaccgcagcattgctggcggaggttcccgagctgggcagcctctccaggcgtgagatcagtgcgcttgttggcgttgccccggtaaaccgggactctggtaccatgagggggcgacgaacgatctttggcggcagggctggtgtgcgaacagccctgtacatggctgcgcttgtcgcaacccgctttaacccggtggtaaaggcgttttacatgcggctgcttgaagcaggaaaacccaaaaaagtggcgctggttgcctgtatgcgcaaattgctgaccatcctgaacgcaatgctcagaaagaacgaagaatgggatgagtcgtaccatcacgttgcttcataatttttacgttcaagacagttg

SEQ ID NO: 9184 - DNA, 1312 bp, unidentified
  source 1..1312: mol_type = unassigned DNA; note = element_e64c3da
  misc_feature 1..2: note = core
  misc_feature 3..67: note = LE
  misc_feature 68..1102: note = CDS
  misc_feature 1103..1312: note = RE
  misc_feature 1088..1306: note = bridgeRNA
ttaattagatggtccgcctcacctctaagctagtcttagagttaggcaatcaaagaggcgaaccatcatgtctactattaaagttcttggtatcgatttaggcaaatcatgttttcacattattggtcgtgatttctctgacaaccaagtcatccgtaaaaagttatcccgttctgcattactcaattatcttcaccaattaacgccatgcataatcgcttttgaagcgtgcggtggtgcacattggttaggcaggcagtgtaagtcgatgggacatacagttaggcttattcctccacaatatgtaaagcctttcgttaaaagcaacaagaacgatttcatagatgcagaagcgatatgcgaagcgtcgacaagacccaatatgcgctttgtcagcgtaaagtcagaagaagcccaagtcatttctgctattcataaagcgaggcacggttacattaaagaccgaacagcgtgtatgtctcgcataggcgcgttacttctggagtttggggttgcgctgccaactggccatagcgtgatgaagcagctgtttaactggcttgcccaacaaaaacagtcaataccagggttacttgtgcaagagctgacggagcttcacgagtactacctgcttctcaatgaaaatatcgatagacaagataaaaagttgaagcaactggttgaaacaaatcctataggcgagcttcttaagacgattccggggattggagacatgacagcaagcctttgtattgccaacatcagtagcgccactgactttaaaagtggaagaaatatggcggcatggctggggctggttcctgcgcagtactcaactggcggtaaccccaaattgctgggcataagcaagcggggtaacaaagaacttcgaaccttgtttatccatgccgcgagggcggtaatgtccagaccggataagacaggaaagatatatggtgagtggttgattaatttacgtgccaccaagccatttaatgtagtgaccgtcgcattggctaataagcttgctcgaatagcatgggcggtcatgaagacgaaacaggcgtttaacagcaacgcactagcaccgagtttgcaatgataaaaatgatgacgaaaacggtagaaccactggattaaagcctgacataaaaaacagctcacagaagctttcggtttttttgaggataatccagcgcggatctcatcgtggagcgggttgcgagagcacctaatcggactccgaatacattagcgcacaaccaaccccgttattgaaatttattgttgcaataacgaggcggaccataca

SEQ ID NO: 9185 - DNA, 1626 bp, unidentified
  source 1..1626: mol_type = unassigned DNA; note = element_e64dfe0
  misc_feature 1..3: note = core
  misc_feature 4..255: note = LE
  misc_feature 256..1494: note = CDS
  misc_feature 1495..1626: note = RE
  misc_feature 8..225: note = bridgeRNA
gttcgtaatataaggttagccagatttttctggttgacctttttatatatggtcttattataacggtagtcggggtagaacgtcgcacccgtgggactcgatcccgtcagctaaactgttcaccccctacttgtataagcatgtttcaggctggttgggacaaagagatcccgtttaacaagcgaacctatgacattacaagaagccttaggggttaccgactaatattgtttttctagaggaggagattcaagtatgaatccagtcattggtctggatgtatctaaaggggaaagtcaggttcaagcattcttagataaaggtaaaccatacagaaagagctttagcattgaacataaccttgatgggctggggaatttattagagtttcttcaagaagtagagaaattagccgatggtaatcaaccttcggtagttttggagtcaactggacactaccatacacccgttattcaatttttggaggagcaaaattatgtttatattatagttaatcctcttatctcacaccgagccaaaagttcaagtttgagaaaggtaaaaacagatgcagttgatgcttatcatctttgtgagttgttctataaagaagagttagagccttataaaaaacgaggagtacaactcttaaaccttcgcaatctaacaagacaacaggaaagtattgcggaaatatcagcaaaaaccaagttacagctacactccttattggatcaggtttttccggagtatagaggtgtgtttggaagtttgtattctaaggtatcattgcttactctactaacatacccaacttcggaagcagtattgagtacgagtgaaagagaaattactgagaagatagcttcgctatgtataagtcgttctgagctatgggcaaaagaaaaggcaaagaagttacgagaagctgcccttcgtaacccatttcaaaagaacctgtatcagagtcatatctttaatcttgagatattagttaagattgttcttcaataccaagagcatctatccaagattgcgaatgaaatagatgccctcgctaaagaaattgaagaatatgagatcctccaatctatccctgggatcggagaaaaaatcgcggcaacgattatttctgaaattggagagatagatcggtttaatgatgccaaaaaactcgttgcattcgctggagtagatccaagcgtgtattcttctggtaagtttactgcatcggtaaaccgaattaccaaacggggttcttgtagacttcgacacgccttgtatatggctgttcaaagtggtattcgggatgcaagaaaaaagaaaacgactgatgagatcattccacgcaataaaagactaagagagttttacgacaaaaagcgagaagaaggaaaacccttcagagtagctgttattgcctgtgtaaataagctcttacactggatttacgccttactaaaaagcagaactactttccaagatatagtttaaaaactatatccaactaaatacaacagaaccttccaattagagtataacggaaggttatttggcatgaacatttttagtatatcatgaggttattaatctttttattgaaaaatgttgacaaactattagctg

SEQ ID NO: 9186 - DNA, 1395 bp, unidentified
  source 1..1395: mol_type = unassigned DNA; note = element_e64fb9b
  misc_feature 1..2: note = core
  misc_feature 3..77: note = LE
  misc_feature 78..1157: note = CDS
  misc_feature 1158..1395: note = RE
  misc_feature 1120..1382: note = bridgeRNA
tgatggtgtggacggccccctacggcatcgatgtgccagaatgaggtcggtgtagatctcagacaagggagccgtccgtggaccagcttatccgcattggagtggatacgtcgaagcatatttttcagctgcatggagtgaatgcagtggagcagccggtgttgcgcaagaagctgcggcgcagggaggttgcggggtattttgccaagcttgcgccgacggtggtggcgatcgaagccagcacgggagcgcacgattgggcgcgactgctgagcgcgatgggtcatcaggtaaggctgatcgcaccgcaatacgtcaagccctacgtcaagcgcggcaagaacgacgctgctgatgccgaagcgctgtgcgaagcgatgagccggccgacgatgcggtttgtgctggtaaagacggcggagcagcaggcggcgttgatgctggcgggcagccgcgaacgactgatcgcccggcgcacgcagttgggcaatgtgatccgcggctatgcggcggagtttggactggtgacggccaagggaaccgacaagatcgagccgttgttggcgcgccttgcggcggcgcagacggtgccgtcgctggcgcgcgagttgttcgcaatccacggcaaggaatataggcaactgcaggcagaactggaggtggtcgaggccaagctgatggcgtggcaccgcgacgacgcttgcagccgccgcttggcgcagattccaggcgttgggccgattggcgccacgatgctggtgatgaagactcccgatcctaccagcttcccctccggacggcactttgcagcttggttgggactgacgccgcgcgaccattccacggccggcaagacccggctcggcgtcattactcgcgccggggacgagacgttgcgcagcttgctcgtggttggcgccaccgcggtgatccagcaggcgcgccgtggcaggggacatccttcgccctggctggtgagcttgctgcagcgcaagccgcccaagctcgcggcagtggcgctggctaacaaaatcgcccgcacggcgtggaaactgatggtgaccggcgagagctacaacgccaggccggcgccgaccacgctgacgcgcgtggccgttacgagatcggccgaccagagcaccgcgatgatgccctgaccggctgagccggagctgcaagagacgagcagatggtgagatcaatcgctcccgagacgcgagacattccgtggaatccattggccggcaacggtcgcatgattgtttggaactcacgtcgcggaaaccatcttggccagcggtcattcagcggccgcatcaacaggccggacatatggatgcaagcgatccgatcagcccctgcaaaaactcttgtggcacgggggccgtccacata

SEQ ID NO: 9187 - DNA, 1380 bp, unidentified
  source 1..1380: mol_type = unassigned DNA; note = element_e6514a5
  misc_feature 1..3: note = core
  misc_feature 4..88: note = LE
  misc_feature 89..1111: note = CDS
  misc_feature 1112..1380: note = RE
  misc_feature 1112..1366: note = bridgeRNA
tgatggggtggatggcccctgtgtccggcgtctcagcgccatagggcggccgttgattgaagcgcccacctaacaggagtcatccaccatgaacgttaccacgatcgggattgatctcgccaagtctgtgtttcaggtccacggcgtcgacgccgctggccaggtgaccgtcacgaagaagctgcgccgcgccgaagtgatcaaaatcttccaggcgatcccggcatgtctggtcggcatggaagcctgcgccacggcacatttctcggcccgggagatctcagcgctgggccagcaggttcggctgatgccgccctcttacgcaaaggcctatctgcgccgacagaagaacgatgcggccgacgccgaggcgatctgcgaggcggtcacccggccgaccatgcggttcgtaccgatcaagagcgccgagcggcaaggcgtgctggttctgcaccggacccgcgagcttctggtgcggcagcgaaccatgctgatcaacgccatccgcggccattgcgcagagttcgggatcatcgcgccgcagggcgcgcgtcgggcagacgaactggtcaagcacatcaggcaggcggagccggccgagcttccagagctggcgcgatccgcccttctgagactggccgaacagctcgatacgctcgccgccgagattcatgggctcgaacgtcggctgctcgtctggcatcgccaggaccaggccagccagcgcctggcgaccataccgggcatcggcatcatcacggctacggcgctctcggccgcagtgaccgacccgggcctgttccgctccggccgggagttcgccgccttcctgggtcttgtcccgcgccagaactcctccggcggaaaggatcggctcggccgcatctccaagatgggcgacgcctttctgcgcaagttactggtcgtgggagcgacctcggtgatccgtcgtgcccggaccggcgcctcagcgtcggcatcatgggtcaacgccctgctcgagcgccgaccaacacgtgtggtgaccgtcgccatggccaacaagaacgcccgcatcgcatgggccgtgttgaagcgtggcgaggtctatcgtccgccggtcacagtctgatcaagatcgcgacgactcacggccgccgctccgaactgtaagggtgcacaagggatgatgatgacgatctgaacgcggcagcaggccgggaaaacccgaggtgctgacggagccgataagctcgataacctgatagggacttggccagcggactccatcagggccagcggacatcagagccgcgccaacaggccggacagatgaccgcaccccgacagatctcgacatcaaaccaaattcacacttgcagcgcaggggccatccacaga

SEQ ID NO: 9188 - DNA, 1564 bp, unidentified
  source 1..1564: mol_type = unassigned DNA; note = element_e658f5f
  misc_feature 1..2: note = core
  misc_feature 3..259: note = LE
  misc_feature 260..1228: note = CDS
  misc_feature 1229..1564: note = RE
  misc_feature 67..256: note = bridgeRNA
aacaatcatgactttacagttccacccatatatgaaaaggggggggactatttattttccaagctttccatactggttttatagatggatactttagtacatggctttttatggtggatttcccccgtaaaataaactgtaagaaataatttggtgcacacccctttattgacagattcattctgatcacgaacagaaaaatgttgaaattccaattatttcggttatccatctcatatctatttgggaggttcatacattggaaactttacattctcattgtgctggacttgatgtccatcagaaagaaattgttgtttgtatttatattggaaattctgagacagaacttacaaaggaaattcgtacatttcctactttcacaaaacatttatttgaaatgcttcaatggctcgaagagctacatattacccatcttgcgatggaaagcaccggtatctattggaaacccgttttcaacattttagaagattattttgatattacccttgcaaatgcacaaagaattaagaatataccagggcgtaagacagatgtagcggatgccgaatggattgccaagctccttcggtatggactgattgaaaaaagttttgtacctccggcagatattcgagaacttcgagatttaacacgtttacgtaagaaaatgattggcaatatgactactgaaaaaaatcgtattcaaaaaacattagagtgttccaaaattaaactaggttctattatctctgatgtattcggtgtatctggtcgtaaactactgactcgacttgtggaacaaggatatgttaactcacatgaagtagaagaaaatattcatggaagcatgatgccgaaggcatcccagattacagaatccttgtttggaactttaaatccacatcaaatttttcttattcgtcaatcttggaatcacatcttatttctcgaagaatccattcaacaaatagaagaaaaaattgatgaacttctttcaccttatccagagcaaattgaactccttttaacaattccaggagtgaaaaggcatgctgtcgcaagcattattgcagaaatcggtgtcgaaatgagacaatttccatcggcccagcaccttgcttcatgggcaggcttatcgcctggaaatcatgaaagtgcaggcaagaaaaaagcactcgaacaacaaaaggtaatccacaaattcaatccatgctttgtgaagtagtatgggccatctcgagaactcgtcatacatggttatcaggaaagtattggtcccttgctgcacggaaaggtaaaaaaagtacttatcgctattgcacataaagttattaaaattatctatcacatattagatcaacgctctggttttattgaatattcaaaagctctttcgtagctaacccggtcaagttcatatttctttcgctactgttaaaaaaatttaataacatgtggcttatttttctatgcccttttttaagtcatcatacacatactaagatttcttccctctacagtacatatgaagtttggaatgataactcgagtcttttcatag

SEQ ID NO: 9189 - DNA, 1592 bp, unidentified
  source 1..1592: mol_type = unassigned DNA; note = element_e65bc3c
  misc_feature 1..4: note = core
  misc_feature 5..358: note = LE
  misc_feature 359..1567: note = CDS
  misc_feature 1568..1592: note = RE
ctcactggactaccctccccgagagatgttcgaagagagtcctgttcgaggggatacgaaggtatggcccggtgggcgatcgtcgatcctgcgggcaatgcgcgatcgtatttcttgggcgcccctcgcgaaaccactcctcctggggaggaatggaattggacgggttcggggagagccaacgtcgcttgccgctcgacggccacgatgagacccgctcccccgaatcaaatgacgagaggcccagaccggccacagggtgtcgcgccaggggcacctgaagcccagagcgccgagcagtgagcgaccggcaggacctctcaccgcgcagtgtctcgccgaccccgggaggcgcgcaatgactttcttcgtggggctcgactgggcgagcccggagcatgccgtgtgcgtgatcgacgacaccggccgggtggactggcagggcagcgctgaacactcggcggcgggcctggccgagctgctgcggcgcctggcccgcttcgggccgccggcctcgctccccgtcgcgatcgagcgcccctcgggcctcgtcgtggacacgctgatggaggccggtcatcccgtcgtgcccatccaccccaacgccctcaaggccagccggccccggtactccgccgccggcagcaagagcgaccccggcgatgccttcatcctgggcgatctgctccgcaccgacggccatcgcttccgcccgctccagcccctgtccgacgccacgcgcgccctccgcgccttggtgcgcggccgtgacgacttggtcgctcagcgcgtcgcgctcaccaatcaattgcgcgcgctgctcgaccgcttctggccgggggccgcggccatcttcgccgacgtcgactcgcccatcgccctcgccttcctcagccgctaccccaccccccacagcgccgagcggctcggcgagaaacgcctcgcgcggttcctcacgcagcacgcgtactgcggccgccggccggtccccaacctcctcgcgcgcctgcgcacggcgcccctctcgcagacgggcgacctcgaggcggaagccagcggggaggtcgtccgcgcgctcgtcgcggtcctgctcccgctcatggcccagatccagcagctctcggcggccatcgccgccgccctgccgcagcaccctgacggccccctcctgcaatcgctgccgcgcagcggtcgcgtgaacgccgcccagatcctggccgagctcggtgacgaccgctcccggttcgccaccgacgagcacctggcggccgagggcggcgtcgcgcccgtcacccgcgaatccggcaagcaccgcggcgtcgcctttcgctgggcgtgcaacaagcgcctgcggcaggccctcaccaccttcgccgacaactcgcgccacggctcgccctgggcggcggcgatcgacgtcgccgcgcgccggcggggctgccgtcatccccatgcgatccgcatcctggctcgcgcgtggattcgtgccctgtggcgctgctggcaggaccgccgtccctacgacgtcacgcttcaccgtggcgcccagcgcctcgtcgccgcgtgacgacgtgaaggttgacacagggtgt

SEQ ID NO: 9190 - DNA, 1566 bp, unidentified
  source 1..1566: mol_type = unassigned DNA; note = element_e65cd97
  misc_feature 1..2: note = core
  misc_feature 3..270: note = LE
  misc_feature 271..1203: note = CDS
  misc_feature 1204..1566: note = RE
  misc_feature 3..247: note = bridgeRNA
cttgtataatgaactcatagggaaattcactacatattttcctttctcgattattttctatataatcagttgtagacgctgtggattagtaaaatcacctacggcagcttccctataagctgactgtttcctttggaggctctaaccacagctctatgtttatttgttaattagttagataacgcatgacgttttatatatagcaaggatacattcagcatagagtttgcggaaacacagcgtaaatttattacaaaggagtgattctttatgttatttgttggcattgatgtagccaaatctaaacatgactgctgtatcattgattctgatggtgttatcattacggattcccttcgtatttcaaatacaaaagaaggtttcgatacactttatacctcaatcatatctgcgcttgattcaagtgatttttcaaacgtaaaaataggacttgaatcgccaggtcattacagcacaaacattacaaactatctgtattccaaaggctttagtattaccgtactgaaccctttagtgacaaatgcttttcgtaaggctggaacccttagaaaaaccaaaacagataagtgtgacgcaaaagtcattgcaactatgctcttttctgatgaatcaaaatcctattcaccttcatcatatcaaatccaagagctaaagtcactaacaagacatcgttatcgtatgattggttatcgttccaagctcaagctatctgtcacacgactaatcgatatcattttccctgaactacctgattttgtatggtctatacaccaagcttcctgttatcagttattacttggattgccatctccagaagtaatcagcacgtgtcatttaacacatttaataaatgttctttcaaaagcttcacgtggaaaatatggtcgtgaaaaagcacttcaacttcgagagcttgctgctaattcaatcggatcatccaacagatctttaacatttgaattacaacaaacaattcgattgattcaagcggttcaatctgaaattgacacgttggataaacaaatcaaacttgtcgtagatgagttaaatactccgcttataaccattcctggtattggatataccattgctgccatcattcttgctgaaatcggtgatataaacaacttctcatcacctgcaaaacttttagcatttgcaggaatggaaccttctacttaacaatctggaaaatacaatgcatccaaaacacctatggttaagagaggctctacatatttgcgttgggcaataatgcaagctgcccgtttggtttctttgcgagattccacttttgccacttacatggccaagaagcgatctgaaggtaaacactttaatgtcgcacaaagtcacgtaggcaagaaattaatccgcgtaatctattcactattgaaaaataacacagcatttgtcccacaaatgtaaccaataaatatcctttttttgaaggcaactcacgttgccttatttgtcatacacttttttatctataagaaaaactataaaatgttatcaatttttacttgacttcatatagttagt

SEQ ID NO: 9191 - DNA, 1391 bp, unidentified
  source 1..1391: mol_type = unassigned DNA; note = element_e661598
  misc_feature 1..2: note = core
  misc_feature 3..78: note = LE
  misc_feature 79..1104: note = CDS
  misc_feature 1105..1391: note = RE
  misc_feature 1146..1388: note = bridgeRNA
ttaatgtgatggtcagcctgacttaccacagcccagcaggttacgcttgttgggctgttttttaatcaggagagcatcatgactactatcacactcttgggattggacatcgggaagcactcgtttcatctcgttgggcaagatgctcacggtaaacccgtcttcaaacgccagttcactcgcaccagcatcatgacctacctcgcccagcatcccgcttgccgtattgtgatggaggcctgttgcggcgctcactggctagcccgtcaactcgccggttttggccatcaagtacaactgattgccccccagtatgtgcgccctttcgtcaccggcaacaagaatgacttcctcgatgcccaagccatttgtgaggccgcctcccgtccctccatgcgctatgtcgggatcaaaacacctgagcagcaggccagctcggcgcagcatcgtctacgcgaagcgcggatcgctgaacgggtacaaaccagcaaccagatccatgctctgttgctcgaatttggcattgtgctgccgttgggtgcgcggggcatcaagcaagtcccagatattctgaccgatgctggcagtgacttgccaaccgtcgcacagcaggtcctctcggcccaatatgaccactatgtctatctggctgcgttgatcaccgagctggataagcagattggggcgcaagcaaaagaagagccgctgagcagcctattgatgacgatccccggcattggccctatcacggcaagccagtttgcagccgatgccggtaatgcgcagagctatggctcggcacgtcatttcgccgcgtccctcgggttagtgccgcgccagcattccacgggcggcaagaacaggctgctcgggatcagcaagcggggtgacaagtcgttacgacgactgctggtgcagtgcgcgcgggtgatcatgctaaacgcgcccaaatgggaatgcgccatggcgctgtggacgcagcaattgatggcgaggtgccactcgaatgtggtggcctgtgcgctggcgaacaaattggcgcggataatatgggccgtgctggtaaaaggagaggagtatcgcccacatccgaaggctgcttgaacagcagtaaagaagtgccgggttttcccggcgaaatagagaagtaacagacctgcttttgcgacgtcaagagagagtgatgacgacaactggcccaacggcctgaggaataacctggcaaagcgaatagtcttcgagactgcgggctttttaaggatcttcaggcgcggctcacatcatggatcgggcataactgcccatcaagaatccggatagattagagcaagcctgccttgtcagttttttcatcattaatctgaccttgcaaagttcaggctgaccataga

SEQ ID NO: 9192 - DNA, 1357 bp, unidentified
  source 1..1357: mol_type = unassigned DNA; note = element_e663e9d
  misc_feature 1: note = core
  misc_feature 2..73: note = LE
  misc_feature 74..1099: note = CDS
  misc_feature 1100..1357: note = RE
  misc_feature 1127..1354: note = bridgeRNA
taatgagatggtcacccccacaccctgcgagggctacgctctcgcagggtgttttatttcggaggccatcatcatgagcagcgtcgcactggttggtatcgatctcggcaagcacagctttcatttgcacgggcaggacaatgtcggtcgagaagtcttgcgcaggaaagcgacacgccagcagatgatgcgattgttgggcaacttaccaaggtgcacagtggcgatggaagcttgtgcgggatcacactttctggctcggcaactggtagcgttcgggcatgaagtgaagctgatttcgccgcagttcgtgcggcctttcgttaagggcaacaagaacgacttcatcgatgccgaggcgatctgtgaagccgcctcccggcctaccatgcgcttcgtgacaccgaagaccgaagcccagcaaaccttgtcggttttgcaccggatgcgcgaatccctggtgcgtgaccggacgaaaacggcgaaccaggcccatgggttcctgttggaattcggtatcagcctgcccaaggggttgtcgctggtcaggcggctgccgaccacgttgaacgagcacgagttgccaccgcacctggtcgggctgctgagtcgcttgcatgagcacttctgctacctggacgagcagatcaaatcgctggacaaggaaatgaccggccagcttgccgaggacgagctgggcagccgcctgctgagcatcccctgtgtggggccgatcacggccagcctactgtgcgccgagatgggcgatggcaaacagtatggcggcagtcgtgatttcgcggcatcggtgggtctggtgccacgccagtacagcacgggaggccgggccaatctgctgggaatcagcaagcgcggcgacaagaacttgcgccggctgctggtgcagtgcgccagggtctatctgcaacgcctggagtaccagcagggcgctttggccgactgggttcgctcgctgcgtgagcggcggcactcgaatgtggtggtgtgcgccctggccaacaagttcgcccgcatcgcctgggctatcgcagccaatcactcgcaattcaaagcgaggccaggcgctgctgtcgcctgaccccgccattacagctgtaccacgaaacaccctttcaggcgatttttgcgatgttgaacaaccgatgacatgaacggcccaccggcctggcgaagaacctgacacaaaaatcggctttagaagccgtcggccttttcaggatcgtcaggcgcgactctcatcgtggcgcggggcatgccccagatagacgccggatagatttaagcaagccaaacagccatcgttgatcagtattgcaaaaatgggggtgaccataga

SEQ ID NO: 9193 - DNA, 1389 bp, unidentified
  source 1..1389: mol_type = unassigned DNA; note = element_e67d7d9
  misc_feature 1: note = core
  misc_feature 2..326: note = LE
  misc_feature 327..1112: note = CDS
  misc_feature 1113..1389: note = RE
  misc_feature 1158..1380: note = bridgeRNA
taatgagatggtccgccgcttgattctcctgcgagagcaggaggatcgtagaggcagcttctgacaaggaggatcattggtatgcagatacattcagttggcatcgacctgggcaagacgacctttcaccttgtggcgctcggtgcagctggcaaggtgctcgtgaagaagaagttcacacagcgccagctgctgacttacaccgcgaacatgcagacttcgttgatcggcttagaagcttgttcaggagcgcattttctcggacgggcactgcggaagcaaggtcacgatgtcggctgatcgctgcccagttcgtaaaacccttcgtgaagtcgaacaagaacgacttcgtggatgcggaagctatcgctgaagcagtggaacgcaagaacatgcggttcgttccgatcaagacggatgaccagttggacctgcaggcgattcaccgagtacgcgaccggcttatctcgcggcgcacggcagtcatcaaccagttgagggcattcctgctcgaacgagggatggtgtttgcgcagacgccagcgaagctcaaggctgccatggctgacatcctcgagaacgcggaagcagatctgacaccccagatgcgcaacctcatcgacatgctgtggagtgagtggaagacggttgaacagcagatcgaagaactcaccacacagttggagcggatctccgctgcagacgcgggttgcacgcgcatccgtcagatcccaggcatcggaccgatcgtggcaacagccatcgtcgcggctatcggcaacggagctgctttccgtaaggggcgagacttcgctgcgtggctcggtgtcgtgccacggcagtattccaccggaggcaaggcaaagctgctcggcatcagcaaacggggcaacgtctatctgcgcaaggtcctgatccatggtgcacgagcagccgtgttgcggatcaagcgagatcgagcgcccatcggaccctggctggatcgtttggacgccagagctcccaagaacgtcgtcgtggttgccatggcgaacaagctggcacgcatcgcatgggccgtcctatcgagcggagaagactacaggccacaaccgagcgtctcagcagcttgaactggcaggcccagtatcggcacaacatcaacggatttaaagcttacccaccgaagtctgcacaggaacagcaaggacgaaagaacagtcacaacggcgtaccctcaacctgataccgagaatggtctccaacgaccgaccgacttgtaaggacaggcacgcagcggaactcatcatggccaggagagataatctccactcaaaggccgaatacattgccgcagacttgtcttctcgaccgaagctttttccttgcagtcctgcggcggaccataca

SEQ ID NO: 9194 - DNA, 1429 bp, unidentified
  source 1..1429: mol_type = unassigned DNA; note = element_e67e164
  misc_feature 1..2: note = core
  misc_feature 3..228: note = LE
  misc_feature 229..1413: note = CDS
  misc_feature 1414..1429: note = RE
ctgatatagctcgttgctggggtcaaactgtcggtggccctcgcggggagaccgaagtaaaggctatccggctcgaccgatgcgcctagagttcggccctcgcgctccgtccgggaacggtgatcgggaccctgtggcggccgatgaggtcgaccagtgatcggacatcagcgggcgtcggatggatgacgtgagctccccggggtcaaaaagaacggaggagctggcatggcgaccatcggcatcgacgtcggcaagcgtcagcacgtcgcggcgatccatcgcgacggcgagcgcgaggcacaccgggcggtgctgcgcttcggcgcggaccgagatggactggcggatctcaccgcctggctggcgcggcagggcgagatctcgcgcgcggtcctcgaatcgagcggtcactaccacctgaacctcgccgcggcactccagcggcgcggcattccggtcgcgatcgtcaacccactggagtccaagtacttcggcaagcggcgcctgcagcggaccaagagcgatcccgccgacgcgcgtaccctcgcgacactggccatggtcgatgagccacaggtccgcgacgtcctcgccggcgccgagctgcgcgaggccgcgcgctttgcgatgcatctggtcgatgagctcgggcgggtcgaccagcgcatctgccgcctggtcgagatcggcttccccgagctcgagcgggcctatgacgacccgacctgcgtgagcgctcttgcggtgctgcgcaccgcgcccaccgccgcagcggccgcgcgcaagcgcagcgcgacgctcgcccaggccagccggcccggtggcggtcggcggatcggcccgaagaaggccgagcagatctcggcgctcgccaaagacaccatcgccgcacccgagctggccgaccagatcggctttcagatgcgcctgctcattgcccagcacgacctgctcgagtcgcagatcgccgaggccgaggcgcacctggccacgctcatggacggcgagctggtgcggcggctgcgcaccatccccggcgccggcccggcgatcgtcgccacgctcgtcgccgagatcggcgacatcgcgcgcttcagtgagttcgacaagctcgtcgcctacatcggcgtgcaccctgcggagaagagcagcggggagaagggacggaaccccgagaccagctggcggatgtccaaggccggcaacgcgtacctgcgcaccgcgctgtaccgcatggcgattgtgggcatccagcacaacccggtcatccgcgcgcactacgcgcgcaagcgcgcgcaagggaagtcgaagatgaacgcggtcgggcactgcatgaagaaggcactcgcgatcgtctggggtgtctggcggagcggcacggacttcgccgctccgccgtcaaccccttgacaactccttatgggac

SEQ ID NO: 9195 - DNA, 1388 bp, unidentified
  source 1..1388: mol_type = unassigned DNA; note = element_e67e225
  misc_feature 1: note = core
  misc_feature 2..89: note = LE
  misc_feature 90..1115: note = CDS
  misc_feature 1116..1388: note = RE
  misc_feature 1158..1380: note = bridgeRNA
caatgggatggacgcccccacctaaacggcattgatgtgccagagtggaagtgcgttgttcaaccacccaacagatgagggcgtccgccatgaagattacgacagtcgggattgatttggccaaaagtgttttccaggtacacgggattgacgagcgcggcaaggcggttctcaggaagcagctcaaacgtgcgcagttcctgctgtttttcgccaatctgccaccctgtctgatcggcatggaagcctgcggcagcgcgcatcactgggcgcgcaagctgcaggggttcgggcatacggtgaaattgatcgcgccgcaatatgtgaagccctacgtgaagaccaacaaaagcgatgccgcggatgccgaaggcatctgcgaagccgtggggcggcccaacatgcgattcgtggcgatcaagacggtcgagcagcaggccgtgttatccgagcaccgggtgcgccagggcttggtccaggcccgtaccgcccaggccaaccagatccgtggactgctggccgagtttggcctggcgatccccaagggcatcgccaatgtgccccagcaggtgccgctgatcctgaacgatccggcctacgagttgccggggacgttccgggagctcatgggcgggctactggcccactttcatgcgctggaccgccaggtggacgaattgggcgcgcgcatcgcggcttggcaccggcagagcgcggccagccgcaagctggcgcagatccctggcattggcccgcttggggccagcgcgctggtgagcaccattggcgatgtgaaaaccttcaagaacggccggcagctggcggcctggctgggcctggtgccgcgacactgcggcaccggcggcaaacagaccctgctggggatcagcaagcgtggcgacgtttatctgcgcactttgctgatccacggcgcccgctcggccattttggcggcacagcggcgcccggacagcgacagctggctggccaagctggtgcaacggcgcaatccgaatgtcgccgccgtggcactggccaacaagaatgcccgcaccgtctgggcgctgctggctcacgaccgcgaatttcaaccgggttacgccaccatggcttaacccgccccgacacgatccaccacaccaggagcaaagcgattctctgattgcacaggcagtcacgtcgtgatggcaagacaggtaagaccgtggtcggcaaaacccacaacaggccaccgcaccttcaagtgcgatagggcgatcgggagccaaccagcgcattccatcagggacagcggcaatggccgcatctaaagtccgaatgtacggctgcaatctacgccttcaaaccatcaccaaatgaatgcttggcataccgggggcgtccatgta

SEQ ID NO: 9196 - DNA, 1358 bp, unidentified
  source 1..1358: mol_type = unassigned DNA; note = element_e67f2db
  misc_feature 1: note = core
  misc_feature 2..196: note = LE
  misc_feature 197..988: note = CDS
  misc_feature 989..1358: note = RE
  misc_feature 1127..1352: note = bridgeRNA
taatgggatggtccgccccgtcctcccgcagcatcatctgggcagtcacaacaaaggaggttgcaatgtccccacgcaatgcgccgcgccctgcggccgtctctggtggcgatatcggcaagaacatcttccacgtcgtgggcttggacagcgacggcgagccgtccagcgagttcgcttccgacgcgatacgttgatgaagttctttgagcgggcagcgccggcaatcgtcgggttggaatcgtgcgctggatcgcaatggatcgccaggagacttcaggcactgaggcacaagggtcgcctgatcccagcgcagttcgtgaagccatacgtcaagtcgaacaagagcgacatcatcgatgccgctgctatcgccgaagcagccacgcgaccgacgatgcgatttgccgcgatcaagagcgaggagcaatccgacctccaagctttgcatcgggtgcgcgaccagatgatcggcacgcgaacccgtctgatcaaccagatgcgagcattttgcctggaatacggcatcgcattgagacagggcgccggactgttcaagctcgacttgccactggttctcgatgacctttcgaatgacctctcgccggcaatgcgcaaactgctcgtggacctgttcgcagatctgcgccagttggagcagcgcatcaacgacgtgacgagggagatcgcagcgatcgcagaccgagaagatgtggcccgccggctcatgacgatccccggaatcggagcattgggagccaccgcgctactagcggccgtcggcaccggatgccagttccagaaggctcgcgagctggccgcatggctggggctggtccctcgagaatactcgaccggaggcaagcagaagctactcggtatcagcaacgcgcgggaaccgctacgttcgcaagctgctcgttcatggcgcgcgatcatgcttccgtcacctggatcgaacccaggatcgcctgggaagctggcttgacgggttgcagggccgtatgcacccgaacaaagctgttgtcgcacttgccgccaagatggcgcgcattgtctgggttgtcctgaccaagccgggagcgctctacgaacgcaggggccctgctttcgcctgacgctccggctcgattgcaaggctcgggaatagtgatgacgaaacaatggatcagcatgccgtaagccctgtgcaaaaaagtgggcttcgtgcccgaaccatttattgggaacggcgtgcgcggatctcatcatggcctggctgcaacagcagctcactcgcgagaggccggatacatttatgcaactggaatcgtcatcggcgatgtcgcgaacccttgcacggacgggcggaccgtaca

SEQ ID NO: 9197 - DNA, 1356 bp, unidentified
  source 1..1356: mol_type = unassigned DNA; note = element_e681f01
  misc_feature 1..2: note = core
  misc_feature 3..79: note = LE
  misc_feature 80..1099: note = CDS
  misc_feature 1100..1356: note = RE
  misc_feature 1093..1343: note = bridgeRNA
tgatggggtggatggcccccttacggcatcgctgtgccaaagttgggttgcaaagaactccaacggacgggagccatccatgggcgaggttacaacgatcgggttggatttggccaagaacgtgtttcaggtacacggcgtcgacgcggcggaggcggtcgcggtgcgccgtgcgctgcggcgcggtcaggttctgggctgcttcgccaagctgccgccctgcctggtcggcatggaggcgtgcgcgacagcgcattactggggccgtgagcttgcccggctggggcaccgggtacggctgataccgccggcctatgcgaaggcttatgtgcggtggaacaagaatgacgccgcggatgcggcagcgatctgcgaggcggtgagccggccgtcgatgcgtttcgtggcgctcaagacggccgagcagcaggcggcggccggtctgcacaaggtgcgcgagctgctggtcaagcagcgcaccatgctgatcaacgcgctgcgcgggctgctggcggagttcgggctggtcgcggcggcggggccgcagcatgtcgacgagctggtgcggatgctgaacgagccggccggcgcggtgatccctgaaccgctgcacggcgggctgatgcagctggtgcacagcctgcgcctggtgcagcgcgaggtcgagacgatcgagaaagagatcgtgcgctggggacgcgacaaccggacctgccgccatctcgacaccatccccggctacggcccaatcctggcgagcgcgatggcggcgatggtggtcgagccgggcgccttcaagagcggccggcacttcgccgcctcgctcggcctggtgccgcgccaggacggcaccggcggcaaggtcaagctcggcccgatatcgaagcgcggcaacggctatctgcgccggctcttggtcaatggcgcgatgtcggtgctgcgcggcaagcgcgcccggcacgatccgtggctggccaaattgctggccgagaagaagcgcatggtcgtcgcctgtgcgctggccaacaaaatggcgcgcatcggctgggcggtgatggtgcgtcaggaggagttccgcgccaggccggcggcgacctgagcggtcggcgcgggctcgagcgtgaggcttgcgagggtgaaacagcgtgatgacagcgtcggtcgaccgacggatcgaggcaaacctgtaccgggacatggggcaacgcgaccccgcgggcttgatcaggcctcgatccatggaacccatcagggcctgcggccaccggccgcgaacacaggccggacacatgaccgcaagcgacctgactgccgaaacgcccaaaaaatccttgcgagccgggggccatccacaca

SEQ ID NO: 9198 - DNA, 1370 bp, unidentified
  source 1..1370: mol_type = unassigned DNA; note = element_e682f6f
  misc_feature 1..2: note = core
  misc_feature 3..87: note = LE
  misc_feature 88..1134: note = CDS
  misc_feature 1135..1370: note = RE
  misc_feature 1137..1358: note = bridgeRNA
tgatgctgtggacggctcctccaccggcacgagagtgccaaggatgtgggcgcccgttaaggctcccacgattcggaggagctacctatgcagtcaatttcggctatcggtcttgatatcgccaagtcggtctttcaagtgcacggtgttgatgcgaccggccaagtggtgctgcgccggcagttgaagcggccgtttttccagaagctgccgctatgcctggtgggtatcgaggcgtgcgcctcatcgcactattggtcccgcgagctgcaggcgctggggcatacggtgcgattgatgccaccgacctatgtgaagccctacgtcaaacggcagaagaacgacaccacggacgcggaggcgatttgtgaagcggtcacgaggcccaacatgcggttcgtgccgaccaaaacggtcgagcaacagagctgtctgatgctccaccgggcgcgccatctgttcattcgccagcagactgcggtcatcaactcaatccgtgcctatctagccgagctcgggatcgtcgcccccgtcgggcgcagaggggtcgaacaactactggacgtcgtcgccgatacggccgacgaccgactcccggaggtagcgcgcgcgtgtcttgccgctctcggcagtcaattgcgagcactgaaggttcagatactggagttcgaccgccgcatcatcgcctggcatcgatcaagcgcgacgagcaagcggcttgatgcgatccctggtgtcggtccggcgttggcaacagctctggtcgccagcattgctgatcccaagactttccgatcgggacgggatttctcagcctgggttgggctcgtgccgaagcagaactcgagcgggggtaaggacaggcttggcagtatcagtaaacaaggcgatcgctatttgcgcagtttattcacggccggcgcgctcgccgtgatccgctatgccaagatccacggtaccgggcatcggccttggctcactggattgttggcgcggcgacccaccaagatcgccgcgatcgcgctcgccaacaaactcgccaggatggcctgggccatgatggccaggaacgaacgctataaggaactgccgctctcgcggcgtaaacgagatcacaccggacacccggcgtgacgtaacggttggaaaggcgaacagcacttgatgcagtgccggtcgatccggcgatcaggacaacccacatgggccatggcatcctcgaatgcgtgctattgaccgggacctgatccgcggagggcattatggccagcggtcatgagtaccgcgcaaacaggccgaacacatggctgctccgaccattgctgcaaagtgaagattattccccttgccaacccggagccgtccacaca

SEQ ID NO: 9199 - DNA, 1185 bp, unidentified
  source 1..1185: mol_type = unassigned DNA; note = element_e692c8f
  misc_feature 1..2: note = core
  misc_feature 3..216: note = LE
  misc_feature 217..1170: note = CDS
  misc_feature 1171..1185: note = RE
  misc_feature 29..196: note = bridgeRNA
cttgtatggtaaagcttaagagaatcggggaaactttgggggtcgggatggagggacgtcgacaagtatctgctaagacagacctcactgagaattcatcccatcgcgtcttccagagtcgatgaagaatctagcggttaaaccgccgatttgtgcacaagcttactcggcagacgcaccaccccgactctcttattttctacaggtggagaatgtatgacaagtgaaatattgtttggtattgatgtcgcgaaagatgaattagtcattgattcggagctgggctcgctaaccgtttccaatacagcagaagctattgatacttggttaaaaagtttacccaccgtgagttatctcggattggaagcgaccggcacctatcatcaacttttggcagaccgtgcggtttctatgggcaaaatcgtctatgtacttaacccacgtgacatgcgccattatgcgctaggcttgggcagacgcggcaagacagatcgcgttgatgctcaaatgattcggcgttttattactgctgaacggcagcatttacgaccctatcaacctgctacgatggtacaacaccaactggcactactgcagcgacgacgtgcaacggtggtcaaacatcgccaagcactgcaaaaagccttgcggagcgtgagcgagttggcagaaccgctacaagaaactttggttgctttagatgccttgctgacgcgtatcgaccatcaattgaatgatttattagaattagaacctgtacttaaagccgaagcgcgacgtctcgaaagcatccccggtattggtagacaaacctcaacacaactggctgtgttgtttgatcgagtagcgttaacccgtagcgatgctgccgttgcgtttgtcggacttgatcccagagcgagtgattctggtcaaaagcgaggccgtcggcaggtgtctaaacgtgggccgggtgagttgcgccgacttctgtacaattgcgctcaagcagcggctaaaaccgcagtttggaaaccgtattaccaatcgttacgtgccagagaattctccgctactcaggcactggtgattctagccagaaaattattacgcatcgcattttcgctttggcaacaagccgatgcaaaattcgatgcacaaaaaataggctgccttaaaaatgcagcttgaaaaaaaccatagaat

SEQ ID NO: 9200 - DNA, 1360 bp, unidentified
  source 1..1360: mol_type = unassigned DNA; note = element_e695362
  misc_feature 1..2: note = core
  misc_feature 3..72: note = LE
  misc_feature 73..1098: note = CDS
  misc_feature 1099..1360: note = RE
  misc_feature 1122..1357: note = bridgeRNA
ttaatgagatggtcaccctcaccctataagtcctaaacttatagggtgttttcatttctggagggcgccatcatggacagcgtaacgttgatcggtatcgaccttggcaaacacagtttccatgtccacggacaggaccgtcaaggcaaggcactgctgcgcaagaagttcagccgtaagcagctcatggagttcctcgccaatttccctccctgcactatcgtgatggaggcctgcgctggcgcacaccatatggcgcggcagctggccgcactggggcacgaaccgaagctgatctcgccgcagtttgtgcgtcccttcgttaagagtaacaagaatgacttcattgacgccgaagcaatttgcgaggcagcttgccgtccgacgatgcgtttcgtgacacccaaaaatgaggcacaacaaaccttagcggcattgcatcgggtgcgtgattcgttagtacgtgagcgcgtcaaggctagcaaccaaatccatggttttctgctggagtttggtatcagcctgccaattgggcatgcggcgatccgccgcctagccctcgtcctggcagagcaggagcttccgccaaagctggtgcaggtgctggaacgactgcatgctcatttcaaatatcttgaggcgcagatcgccgacattgaaaaagagctgacccgggaggtgaccgaggatgacctgggccagcggctgatgaccgtgccaggtattggaccgatcacagccagcgtgctcgccgcagaagtgggcgatggcaagcactaccgctgcgggcgggattttgcggcgtcggtcggattggtgccgcgccagtacagcacgggaggcaggagtaagctgctgggcatcagcaagcgcggagataaggatctacggcgcttgttggtacagtgcgcccgagcgtatatgcagcgcctagagcggcagcaggggcgcctggctcagtgggtcaggggcatgttgatgcgtcggcattccaacgtagtggcgtgtgccttggccaataagctggcacgaatcacttgggccatcgcggctcaccacgagcaatttaaaataaaagaggtcccgcttgcacaataagcggaacctcggactcacagttgaagtacacctaccggttttgcgactgctgatagattggatgacgtaaacggcacaccggcctgacggaaaccctgataaaaaaatcggctgcttgagaagccgagccgttttttaggaccgacaggcgcgactctcatcgtggcgcggagactatctccaaccagacgccggatagatttaagcgagcctacttacagcatacaaaaaatcagcttgcaaaaaagagggtgaccataga

SEQ ID NO: 9201 - DNA, 1192 bp, unidentified
  source 1..1192: mol_type = unassigned DNA; note = element_e6a1ff8
  misc_feature 1..2: note = core
  misc_feature 3..226: note = LE
  misc_feature 227..1177: note = CDS
  misc_feature 1178..1192: note = RE
  misc_feature 6..213: note = bridgeRNA
cttgtatgttcaggccagaccagcgcggtagagtccgatcaccgatgaggtgaccggaccggaccgtgcagcctgaacggccctagggttttgaagcccgtggctgagtgaattgcgcacggcctccgtgctggtcttcccgatgcccgaacggttagtcgagcggccactcgccggctcgcattcacaaggaagggttaagaaggccatgtctggatcatccgtgatggtggggatcgacgtcgcgagcctgcacgtcgatgtggcggcgatcggtgccgagctgccggcatcgcttgcccgattgagcaacgacgcagacggccacagcgcattggccgatgggctggtgcgcttggccccggggctggtgctgatagaggccaccggcggctacgaggcggcgttggcgtgcgcgctgcaggcggcgggcctgcgcgtggcggtgatcaacccgcgcatggcacgcgacttcgcacgcgccatgcagcggctggccaagaccgaccggatcgacgccgccacgctcgccgagctcgccggcgtgctggcgcgcaggcccgacgcggagcgtttcatccgtccggtcagcgagcccgagcagcaggatctggcggcgctggtgacgcgccggcgccagctggtggccatgcagctctccgagcgtcagcggctgcgcctggcacgccctgtggcccgccccagcatcgaggcgatgatcgaggcgatcaagcaccagctcgacgacgtcgaggccgagatggctcgccacgtcgagcagcatcacgcccagatggcggcactcctgcagggcgtggccggtatcggcaaggtcgccgccgccaccttgatcgctgaactgcccgagctcggacggctcaaccggcgccagatctgcgcgctggtgggcgtggcaccttacgccaacgattccggctcgagtcgaggtcgaaggcgaatcgccggcgggcgcttcgaggtgcgacgggcgttgtacatggccaccctcacggccgtgcgctacaacccgccgatccgagacttctacgaacgcctggtggccgcgggcaagctaaagaaagtggctctgatcgcctgcatgcgcaagctgatcacccacctcaatgccatcgcccgcgaccatctgaacgctcacgatcggctcgctatcgcttgacgtcgaacacggtta

SEQ ID NO: 9202 - DNA, 1199 bp, unidentified
  source 1..1199: mol_type = unassigned DNA; note = element_e6a2386
  misc_feature 1..2: note = core
  misc_feature 3..218: note = LE
  misc_feature 219..1157: note = CDS
  misc_feature 1158..1199: note = RE
  misc_feature 41..199: note = bridgeRNA
tcctttagattagcaagatgaaaaaaagagtaaattactgataaagagaaaagtgtttaattacactaagacaggctccgaggaaaactcatatgttgattaagaattaaacacttactctatcaaaaactcaaatagaaattcgggatttaaagcccattataaaggagttgagattctgatagatatctctttacttttaagttaaaatcaaagttatggaaaaagtttttattgggatagacattagtaaactaacattggatatttatgtgaagtcatattcatcagcccagcattatcagatagaaaataatacaaaggcgattgcaaagttttttaaatcatttaataatacatccaatatcattgttactatggagaatacaggtcgatacaacttttcattatatgctgttttaagtacaatgaatatcagtctctatgtccttaatccattacatttgaaaagaagtattggattattgagaggtaaaaatgataagcttgacagccaaaggatctgtggcttcattgaaaaatattatatggatctggagccttggaaatcttcttctttagccattcagaaattaagtgtattaagagctgagcgccgtcatcgtatcaaaataaaatcgggcttaatggctcagcaaaaagataaagaattattaaaagacattgtagataaagagatgataaaacttaacaaagcgatgattactcttattgataaacaaatcaaggttatagaagaaaaaatgatgagtatcataaatgctagtatagaactgaaagatcaatacaaacgcttacaaagtattcccggagtaggtaaagtattagccactttaatgattattaaaactaaaggatttacagaaataaaatcagccagaaaaatggcatgttactcaggtattgcaccatttgaacatcaatcaggatcttccatttattataagccaagagtttcaacgatggccgatatggaacttaagaaaatattacatttagctgcgatgagtgcgattagattaaaaaatgatctggctgtttattatcataggaaagtgcaggaaggcaaaaataaaatggccgtgctaaatgctgttagaaataaaatcatacacagaatctatgccattatataaaataattctgtgtatgaaaataatttgcttttgtcatagaaa

SEQ ID NO: 9203 - DNA, 1441 bp, unidentified
  source 1..1441: mol_type = unassigned DNA; note = element_e6a9778
  misc_feature 1..3: note = core
  misc_feature 4..149: note = LE
  misc_feature 150..1169: note = CDS
  misc_feature 1170..1441: note = RE
  misc_feature 1208..1441: note = bridgeRNA
aaatgtaatgaacgcatcccactcattaaacacggagccgaatgatggatgaaagaggtaaatcggaaagtgtggagcctcacagatttccggcatcatggtgcccaatacgggatgcataagctccctcagactggaggctccactacatgaaatatacaccggttggcgttgatatcgcaaaacatctgattcaggttcacttcatcgatgagcacacaggtgaagtgattgataagcagctgcgtcgtcaggattttctgacgttcttcagtaaccgggagcgctgcctgattggtatggaggcttgtggcggctcacagcattgggctcgtgaactgaaaaaactgggtcatgaagtacggttgttgcaggcccgcttcgttaaagcgttcgtcatgggcaacaagaatgacgtgatggatgcccgtgctatctggatggcggtacagcaccccggcaaagagatagcggttaaaacagaagaacaacagtcggtactggttctgcaccggacccgcaggcaactggtgaaattccggactgcgcagattaatgccctgcacggcacgttccttgagttcggggaaaccctccataaagggcgtgcatcgctgaacaaagagcttccggaagctctggaacggctgaaaatgcgtcttccgccgtatctcatcagcatcctggatgaccagtataacaggctgaacgagctggactcgcggatagacggtattgagaagctacttaacagcgtggcgcgacagagtgaaacctgtaagcggctgatggaaatccctggcgtgggaccgttaatcgccacggcggcagtcgctaccatggggtcggcatcagcgtttaaatccggacgggagttcgctgcttatgttggtctggtaccaaaacaaaccggctcaggaggaaaagttcgtctgctgggaataagtaagcgtggagacagttacctgcgaaccctgtttatccacggagcaagggcagcttcattagtagcgaaagaaccgggtccatggataacggagctgaaaaaacggcgtccgacaggtgtggtcatcgtggcgatggcaaacaaactggcgcggacagtgtgggcaatagcggctcatgacagtaagtacgataagaatttcatcagtatcaggccgtattaatcgctgataccgataaacattaactcttaacaaaagggtgaatgctgaaaggttgctctggcggccagcgtgatgacaaagacaggtaagaccgtgactcactaaacctgaatgtttttttgagattaaatctcgccggagaaataaggcgtgagtcagcgaattacataggggctcgcagctgtcaggctgcaataaagccggatataaagctacaacctatccgtcgatgtcagaaccatggatgccttgcaaacgggatgcgttcatat

SEQ ID NO: 9204 - DNA, 1289 bp, unidentified
  source 1..1289: mol_type = unassigned DNA; note = element_e6ab8bf
  misc_feature 1..2: note = core
  misc_feature 3..249: note = LE
  misc_feature 250..1275: note = CDS
  misc_feature 1276..1289: note = RE
  misc_feature 69..228: note = bridgeRNA
tccattagacttatagtgtaactttataactttgaacataattttataatacctatgttaaaatatccacacaccgagaaagagctgagtaagcctaaaaaacaagttaaagcataacttaaatcctgaattaggcccagttctttgtgtggctaaagctagataatattttcatccgtaccaagattattaacatggaaccagctcagccaccatttcggtttgtgataaaaccatagggagcgtcgtatgaaagatttctcgtttttcatcggtattgacatttcagctgattcctttaccgcccattgtatgaataaggatttcaacgtcatttttcctgctgagagtttcgagaatacgccagagggttttgaacaactctctgatcgtattcaggcgaattctatccccattaagcgacttctgctctgtttggaagccaccggtgtgtactctgagaccctttgttatgtgatgagttccaatagttattccattgctctggttgatcccagaaaagtcaaaggggctactcaggattctcccagaaagaatgattctcttgatgcaacccgaattactgagtacgccgcccgctttacagataaactcactatatggaaacccaataaccatattctggaacagataaaagttcttctttccacacgcgaacatctgactcaacagaaagtctccaatgaaaatgcactcaaaacattacaacgtaaatactaccagacaccctttgccaacaaagtctatgaggagaccataagtctttttaaaaaggatattgcggccattgaccgggaaatccgtcgcctcattgacaaagatgattcttttagacattacatctctttagcagtatcggttccgggtgttggactccttctgggtgccaatcttctggtgttaactcaggggtttaccgaacccatttcttacaaaaaactctctgctcactttggtatctgtccctttgaaaaggaaagtggttcatcagtgcgaaaaaagccgcgctcacgaggccacggaccagccaggatccgtaaactgctccatctggcttcccgttctgtaaaaacccatcgcccggaatttagaaagtacttctatcgcaagtctctggaaggaaaaccaaataagcttattctaaataatatttccaataaaatcttaaaaatcatttgtgcagtaataaattcaaagacagcctatgttgataattataaatcagtacacccaaatattttaaaaagtgcttgaaaaagtcataatat

SEQ ID NO: 9205 - DNA, 1346 bp, unidentified
  source 1..1346: mol_type = unassigned DNA; note = element_e6addf0
  misc_feature 1: note = core
  misc_feature 2..227: note = LE
  misc_feature 228..1331: note = CDS
  misc_feature 1332..1346: note = RE
  misc_feature 9..223: note = bridgeRNA
cgttaccgtcttcgtggcctcgcgatgaggctcccggccttcggccccggtatgacttgagcccccagtcgagatgatcgaaaaggtggtgtcgccggtgtcggaggcattggcagaccgctgatttgaggcacgagcgcccttgggcagtctcttcgtaacgtggatgccggcacgctgatgccgcaggtggggccggggagagcacgagcacgggagcaacaggcatggccgctgacgatggcatcgacgtctacctcggtctggacgtcggcaagggcgaacaccacgccactgccgtcaaccaggcggggaagaaggtgttcgacaagccgcttcccaacagcgagttaaggttgcgcgagctgttcgagaagctgcaggtcaagcacgggacggtgcggcggatcgccgatctgtatcccggcgaggcaaaaaccgacgcccgcgatgcgttcgtcatcgccgacgccgccagagcgatgcctcacaccctgcggaccatcgatcccgccgatgagacggtcgccgagctcgccatgatcaccgggttcgacgacgacctggcgggcgagtccacccgaatcgccaaccggctccgcggcctgctgacccagatccatccctcgctcgagagagtccttggcccgcgaatccagcacccggccgtgctcagactgctggaccagttcggctccccggcccagatccgcaaagccggaagacgacgtctcgtggccctgatacgtcccaaggcgccgcggatggccgagcggctggtcgaggacatcttcaccgcactcgatgagcagaccgtcatcgtcccgggcaccgacgcggccgcactgatcgtcccgagcctcgccggctcactccagtctgtccttgaccagcgcaaactccttgccgcgaggatcgaagaactcttggaggcccaccctctttcccaggtcctgacctcgatgcccggcatcgggatcaggaccgccgcccgcatcctcatcgacgtcggtgacggcagcggcttcgccacggccggccacctcgccgcctacgccggcctggcacccgtgacccgcaactccggcacgtccatccgcggtgaacacccttcccggcgaggcaacaaacagctcaagagagccttctacctcgccccgttcgcctcgctctcccagcccgaatcacgcgcctacgacgaccgcaaacgacgcgagggaaaacaccacatcgccgccctcgtcgcactcgcccgacgccgcatcgacgtcctcttcgccatgctccgagacggcaccttctaccagccgcccacaccggctacggcttgaccaaatccatagagg

SEQ ID NO: 9206 - DNA, 1421 bp, unidentified
  source 1..1421: mol_type = unassigned DNA; note = element_e6af5db
  misc_feature 1..2: note = core
  misc_feature 3..221: note = LE
  misc_feature 222..1406: note = CDS
  misc_feature 1407..1421: note = RE
  misc_feature 11..214: note = bridgeRNA
gccttaccttcttgaagcgtgttgcattgtcggccaagctttcgatgcgcaggtgccgcagctatggctttcattccggctgcccataatggttcaggtcgctttgccggctgtggtgccacatccgttcgaccgctgattacgcaatgcccttgatggctaagtaaggcgatgcaggcgagacggttcgcgttctggaaaccacaatcgaggaaagcacgatgcgttactttgcaggtattgacgtcgccaagacagtccactggatatgtgttatcgatgcgaatgccgaggttcttctcgaccgcgctgtcaccaacgcgcaagaagatatggacaggctggttggcgaattgcgtccctttgctcccgatctgaccatatgccttgatgtgatgggttcgatcgcaactttcgtggaagcggctctcattgaggccgggttccgggttgtccatgtaccaggcatcgccgtaaaccgggcgcgggatggctttgccaacagggaagctaaatccgatcccaaggatgcccgcgtcattgcggattacgcccgcacgagaccaactctgcgtccggtagaacacgatgacgagacgacaatcgccatcagattgatgattggacgtcgccgcaaccttgttgaggagcagaccaggaggattgcaagattgcgccgttatctcggcagcattcatccagaactggaaattgccttggacatcaatggattggggtctgcacacttgttgacccgttacgttacccccactgaaatacgtcgtgccggacccaagcgcattctggcccatttgcaacgcttgccacatctgcacaaacgcgaagaaatggcacataaagtgttcgaggtcgcgcaaagacagcacaccatcgttccgggagaggcaacctttgccagccttgtcagggaactggccgaggaaatcatcctcaccagagaaaaactggcgcgactggataagggactcgaaacattgcttgctcgccaccctgatgcggccctcattcgaacgctgccagggatgggggccatattgacggcaagctttattgccgcggcgggaagcattgcgcgtttcaaatccgctggcgcgatagctgcgacagcaggacttgcgcctgtcatgcgacagtccggatatagccgggtgtttcgacgaacctacggcggcgacaaagacctcaaacgcgtctttttccagagtgcattttgtgcttatgccaaaggtgatcctgtttgtagagctttttacaaccgcaaaagacgggaaggaaaacgccatacccaagcgatcattgcgctcgcaagacgacgcgtcaatgtgctttggaccatgctgaaatcgaggcagccttgtgatccagaacgcgctattacttcttgacttttgcattacgca

SEQ ID NO: 9207 - DNA, 1365 bp, unidentified
  source 1..1365: mol_type = unassigned DNA; note = element_e6b27a0
  misc_feature 1..2: note = core
  misc_feature 3..84: note = LE
  misc_feature 85..1107: note = CDS
  misc_feature 1108..1365: note = RE
  misc_feature 1081..1352: note = bridgeRNA
tgatggagtggatgcccccacccgacggcatcgcaatgtgccaaaatggtgatgctgaagtcatcacagaaggaggaggcatccatgggtgagattagcatcgttggcgtcgacctggcaaagcaggttctccaggttcatggggcaacggccgatggacaggtgctgttccgcaagaagctgtcacgggcgcagtttgcgaagttcatggcgtcgctgccgccttgtgtggtggcgatggaggcatgcgcaacggcgcactattggggtcgtgagctctcccgtctgggtcatgaagtgcggctgatcccgcccatttacgtgaagcccttcgtcaagcggcaaaaaaacgatgccgctgatgctgaggccgtggcggaagcagcacagcgtccgaccatgcgtaccgttgcggtgaagaccgcggaccaacaagcccgggcgatgctgttccgcacccgggacctgctggttggccagcgaacccgtctggtgaatgcactacgcgggcatcttgctgagcacggcatcatcatcggtcaaggcgttgggaatatcgctcgctttgctgcctgtctcgatcaggacacgcttccggacctggttcgcgatctcgggcggctttacctcgatcagattgctcagatcagcgacgagatcggcaagctggacaagcggatcacaactgcagccagggaaaacagcacagcacgccggctgcagaccatgccgggaatcggcccggtctgcgccatggcgattgcatcctttgcaccggagatgcgggaattccgccgtagtcgcgattttgcagcgtggcttggcctcgttccacgacagcactcctccggtggcaagcagaagcttggccgcacttccaagatgggtcagcgcgatattcgacgcctgctgatcatcggcgccatgtctgtcgtgcattggaggggccggcacggtggccgtccgggatcgtggttatcgcgcatgctcgcacgcaaaccacgcaaactggtcgccatcgcactggcgaacaaaatggcgcgtatgatctgggccatgctcgccggcgagactgattacagggatccgaccggcgcgatctgctgaacgcggctgtcggagcctcggggatgtgaggagggcaatgacctgaatgggcaaatgatcgatcagatccgggtcgggtaaaccagtggagtgcaacgagcctcgagctcgccctattgatttggtacctgatccgcgtatcaccatcccggcccgcggcgtgcgaaagccgcacttgtgaggcctgaaacatgaccgcacccgatcacgcgctcagacaggcaaaaaaatccttgcatcaaagggggcatccaaaca

SEQ ID NO: 9208 - DNA, 1403 bp, unidentified
  source 1..1403: mol_type = unassigned DNA; note = element_e6ba37f
  misc_feature 1..2: note = core
  misc_feature 3..89: note = LE
  misc_feature 90..1124: note = CDS
  misc_feature 1125..1403: note = RE
  misc_feature 1171..1389: note = bridgeRNA
gatgaggtggatggctcccgctcacggcatctaggtgccaaggtgtgaaggccatcaggcgttcacgagcaaaatgggagccacccgtcatggagattactacgattggcgtcgatttggccaagagcatttttcaggttcacggcgttgatgcgaccggtcaggtcgttatccgcaagtcgctgcgacgcgcgcagatgctgccattcttcgccaggttgccttcgtgcctagtcggcatggaagcgtgcggcacctcgcatcactgggcgcgcgagctgatcaagctcggccacgaggtgcgcctgataccgccggcttacgtcaagccgtatgtgaagcgcggtaagaccgacgctgccgatgcggaagcggtttgcgaagcggtgacacggccgacgatgcggttcgtgccggtgaagtcgcctgagcagcaggcggcgctgtcgatgcaccggacgcgcgatctgctggtcaagcagcgcacgcagctggtcaacatgatccgcggcctgctcgccgagtttggcatcaacatccccaagggtctcgaacgggcgctactgatggcgcgacagatcgtcgatggtgaagcaccagacgttccgattgaagctgtgaagatcgtcggcacgctgtcacagcaggcactcgatatccatgttcggcttcgccaaatcgatcgcgatctgctcgtttggcaacgtggcaacgctgtcgcgcgtcgtctcatgaccattcccggtatcgggccagtcggtgcgacggcacttgccgcatcggtcaccgacccgcatcagttccgctcagggcgacagttcgccgcctggttgggactgacgccacttcagaagtcgagtggtggcaaagagcgggtcggacgtatcaccaagatgggcgacaagtacctgcgcaagctactcattgtcggcatgacttcacttgttcgacgcgcaaagcacaatcctcggacaatcgatccacggctagccaatctgctcgcgcgaaagcccgtgcgggtcgcaaccgtcgcgatggcaaacaagacagcacggacaatctgggcaatcatgacacgtggcgagacctatcgtgccggctaccaaccggcactggccgcataaaagcgacgatacatcggcttagctgaagaagatggagatcagattcaccaggttgcgagagcgatgcgatgtgatggcaaaccggtcagaccgagaacagggacaacccaccgaatgtctgaggcgtcatagcctgataagcagaatgggaccttgttcgcggactccatcaaggccagcagtctcaactgactgcatcaacaggccggacagaagactgcactcgaccaacgccaccacgtcaaattatctcttgcaatgcgggagccatccacagaa

SEQ ID NO: 9209 - DNA, 1359 bp, unidentified
  source 1..1359: mol_type = unassigned DNA; note = element_e6c16e2
  misc_feature 1: note = core
  misc_feature 2..72: note = LE
  misc_feature 73..1107: note = CDS
  misc_feature 1108..1359: note = RE
  misc_feature 1110..1349: note = bridgeRNA
tatgggatggcccgcccttttcccaggcatctgatatgatgccggtgttagagaagggaaaggaacgggccgatgtctattgtgatccttggtgtcgacttgggcaagaattcttgcagcatagtcggggttgacggatcgggtgcggtagtcgcgcgccgaacgatgcgtcgacagacgttgatcgagtacgttggcaagctcccgcagtgcgtggttgcaatggaggcctgttgcggagcgcatcacctgggacggttgttcgctacgcacgggcacgaaatccgtctgatgtcgccggagtacgttcgtccttatgtcaaagcgcagaaaaacgacgatcgcgatgctgaggccattgccgaagccgcctcgcgtccgacaatgcgcttcatcgacctcaagagcagcgagcaacttgatttgcagacactgcatcgggtgcggtcgcggttggtggccgagcgaaccagcctgatcaaccaagcgcgagcaatcctccttgagcgtggagtgaccttcccggccgggcggcgcaagttcgaagtgggtcttgaagccttgctggccgatgacgctgatgctggcttgtctgcacgtatgcgccagctgattggcgagttaagggcagaatggaaggcgcttgatgtacgggtcgaagcgctcaacggtgagttcgtcgaaacggcgcggcaggatgagacaatgcgccggctgacatcgatacccggcgttggggtgttgaatgcaaccgcgctggtggcggcggtggggaacggaagcggctttgacaaggcgcgtgacctcggagcctggctgggccttgtcccccgccagcacagtaccggtggcaaagctcgcctgttcggtatcaccaagcggggaaacaaatacctgcgcaccttgctgatccacggcgcgcgggcagctttgccatcattgtcacaaagcgacacgccgatagggcgttggctcaaagcgatgatcgcgcgaggcgtacaccgcaatgcgatcatcgtcgcgctcgccaacaagctggcgcggattgcttgggcgatgctgcgcaaggacgtgcgctttgaacgcagctacccggtagcggcatgaaccagatcggctagacgcttgaacacgcatagccaaccgaagtttgcgggaaggatcgaaaagatggcctgacagtcaatcgacgtttggaaagcccggaactctgaatggtacttgataccgatctgattattgcggctccaggcgtgcggatgtccatcttggccatggggctacccatgagaccgtatacgttgacgcagactgttcagaacaccgtaaaattctcttgcaaacagggcgggccatacg

SEQ ID NO: 9210 - DNA, 1493 bp, unidentified
  source 1..1493: mol_type = unassigned DNA; note = element_e6c1e1f
  misc_feature 1..2: note = core
  misc_feature 3..249: note = LE
  misc_feature 250..1473: note = CDS
  misc_feature 1474..1493: note = RE
  misc_feature 13..245: note = bridgeRNA
ctaatgagttctgggagtgagccatccggcaaactcctggtgggtaggtagccgccggcgggtgagcacttgctgttcctggacgtcgagtcctgatgaaagatcgtgcccctgccggtcggtgaggagagttgatcgctgatgggatgtcgtgcccgcccggttgtggcgtgagcactgcttcattaggtcgctgatggttctcctgccggctactgaccgtgtttgcgatcggaggcgggagacgcggtgctgttcgtgggagatgactgggccgaagaccatcacgacgttgagttgatggatgcggctgggcgcaccctggccagggccaggttgcccgagggcgtcgcagggatcacgcgactgcacgcgatgatcggcgcgcagctcggcgaggacgccgacggcgccgggcaggtcacgattgggatcgagaccgaccgagggccgtgggtgcaggcgttgatcgcggcggggtacaccgtgttggcggtcaatccgttgcaggcggcccgttaccgtgaccgtctcggggtgtccggtgccaagagcgacgccgccgacgcgcacatgctggccgacatggtccgtaccgacggccaccaactgcgccgggtcgccggtgacagtgccggatccgaggcggtcaaggtggtcgcccggatgcacaagacactgatctgggaacgcacccgcgccagccagcggttgcggcacgcgttgcgggagtacttccctgccgcgttggccgcgtttgacgatctcgacgccgccgacacccttgagttgctggccagggccccggacccggccagcgccgcgaggctgagcatcagccagatcagcgcggccctcaaacgggcccgccgccgcgacatcccggccaaggccgcagcgattcaggccgtcctgcgcgccgagcacctcagccagcccgccgtggtcaccgccgcctacgccgcctcggtccgggcgctgatcgcggtcctgggcacgctcaacgagcaggtcaaggccctgcaagggcaggtcgaggcctattttggccagcacccggacgctgagatcatcctgtcccaaccgggactgggcacgatcctcggcgcccgggtgctcgccgagttcggcgacgcggccgaccgctacacctcggccaaggcccgcaagaactacgccggcaccagcccgatcacccgcgcctcgggtaagaaacgcaccgtcgctgcccggttcgtgcacaacgaccggctcatcgacgcgctgatgacccaagcgttcgcgtcgctgaacacctcgcccggcgcccgcgcctactacgaccggcaacgcgcccgcggcgccagctacaacgccgcgctgcggcaactcgccaaccggctcgtcggcatcctgcacggatgcctcaaaaccggcgcgctctacgacgaggcgaccgcctggtcgcatcacctcaacgaggccgctgcttgacattcaagctcctgggatgt

SEQ ID NO: 9211 - DNA, 1401 bp, unidentified
  source 1..1401: mol_type = unassigned DNA; note = element_e6c6c0f
  misc_feature 1..2: note = core
  misc_feature 3..32: note = LE
  misc_feature 33..1118: note = CDS
  misc_feature 1119..1401: note = RE
  misc_feature 1116..1388: note = bridgeRNA
tgttggtgtggacggcccccggcggcatcaaagtgtgccagaatgaggtcgttgctgatctcagacaaaggaagccgtccgtggaaaagattactcgaattgggatggacacgtcgaagctaatttttcagcttcatggagttgacgctgatgagaaggttgttttgcgaaagaaacttaggcggaaggatatggtggccttctttgagaagcttccgccaacggtcgtcgcgattgaggcatgcggtgcaagccaccattgggcaaggctactgcaatcgatgggacacatggttaagttgatcgccccccagctatcaaagccgtacgtcaagcgtggcaagaacgatgccgccgacgcggaagcgctctgcgaagcagcgagtagaccaacgatgcgcttcgtacctgtgaaaacagtcgaccagcaagctgccttaatgcttgttggactgcgtgaccgactgatccgtaatcgcacgcagctggtcaattcaatacggggttatgctgccgagttcggcttaaccgctgcgaagggtatcgctcatctgcacccactgcttcaaagcattcaggccgatgagagcctgccgagtttggcccgagaactgtttgccagtcagggcgaagagtactcggcgcttcaggcgcaaatctctgaggtagatgctaagatcatcgcgcggcatcggactgatgaatgtagccaacggcttgataagataccaggtgttgggccgatcggggcgaccctcttgatcatgaagactccagagcctgagcgatttcggtcgggaaggcagttcgctgcctggattggtctgacaccgagggatcattctaccgccggaaaagttaggcttggcggaataacacgggcgggcgatgagggtctgcgctgcgtactggtagtgggtgctaccgctgttgtccagcatgcacttcgaagcggaaaagcatcgccctggcttgccgagcttctcaagcgcaaaccgccgaagcttgtcgcaatcgccctggctaataaaatagctcgcatcgcctggaagatgatgcgtacaggtgagagttatattaataggtcagcacctggtagtttagcagtagcaatatagagttcagacagatacggggagcagcctaatgtaaccgtactgttctgatgccagaacttgcaagaaaatgagcaggtggtgtgatcaatcgatccatgacgtcagacactccgaaggggacagtggtcttctatgaggtcgctcgtctgtttggaactcacgtcgcgggaaccatcttggccagcgttcatgtgcgagcgcaccaacgggccggacatatggacgcaagcgatctgatcaaaacccagcaaaaaaatcttgcgaggagggggccgtccacata

SEQ ID NO: 9212 - DNA, 1343 bp, unidentified
  source 1..1343: mol_type = unassigned DNA; note = element_e6c79d1
  misc_feature 1: note = core
  misc_feature 2..233: note = LE
  misc_feature 234..1328: note = CDS
  misc_feature 1329..1343: note = RE
  misc_feature 4..231: note = bridgeRNA
cagtgatgatgtgtgtagtggttcttcgggcgggtctgactcacgggctgaccgtcgcggtggctgactagaagcggatttgtcggcccgctcgggggatcgctacgcacgcgaccggacgggcgtttgtgacctcataggagcttggttcagaagccccgccactgtcttgtccgcccgcctggccggcgcgtgctgccccaccgggatcaacgagaaaggcagcagtgaccatgatgtccgatcagcacgtgcatgtcatcgccggagtggatacgcatggccagacccatcacgcggcgatgatcgactccctcgggcggcatctggccgaccgagagttcccggccacgggttccgggtaccggcagctactttcatggctcggcggccacggcaccgtgcaggccgttggggtcgagggcaccggtgcctacggcgccgagctgtctcgggtgctggcccgggccggactatcggtggtcgaagtcgaccgacccgaccgcaagacccggcggatgaagggcaagtccgacccgatagacgcctatgccgctgctaccgcggtcgcctccgggcgtgccactggcgtgccgaagacccgcgacgggatcgtggaggccgtccgggccttgcgtgtgcctcggcgctccgcggtcaaggcccgtacccaagcgatcaaccaggccaggcagctggtgatcaccgctccggaggaattgcgagcccagttgcgtggcctgcccgcccgcgagctggccgcagtctgcgcccggttccgtcccagcgacctcgctagtcccctcggcgcgaccaaggcggcactacgcattctgagccgccggatcctggcactgagtgaggagatcgccgacctcgacgtcgagctgaaagccctgaccgcgcagacggctccgaccctgatgaaccgcatgggcgtgggacctgacgtcgccgggcagcttctggccaccgcgggcgacaacccagacaggctgcgctccgaagcggcgttcgcgcacctgtgcggcgtggccccgatccctgcctcttcaggacgacgagaccgacaccgactcaaccgcggtggcgaccgggccgcgaaccacgccctgcataccatcgcactgagccgcatgcgatgggacgaacgcacccgctcctacgttgaccgacgaaccgcgcaaggcctgtccaagaaagacatcatgcgctgcctcaaacgccacatcgcgcgcgagatctaccatgccctgatcaacgacctacaggctcgcgaccccgccaccaaagcaccgaccaccgccgacctcgccaaagccgcttgacatccataggagcat

SEQ ID NO: 9213 - DNA, 1469 bp, unidentified
  source 1..1469: mol_type = unassigned DNA; note = element_e6cc105
  misc_feature 1..2: note = core
  misc_feature 3..268: note = LE
  misc_feature 269..1339: note = CDS
  misc_feature 1340..1469: note = RE
  misc_feature 3..244: note = bridgeRNA
cttgtatgatgttattagaagcaaaaacaacatacttcctttctttttttgtttcgtggtttaatacattcagatactgtgacttttgatttttttctgtagctttgactactcaacaggagtgtattgccatctcttttatctgaattgtttattagctggatgttgccagagcgtttgctcagagtacttatttcaatcaagtctacgatgataattgttggtggataccacggtatcagactttatgaaagggaggtacaacctcatgatttacgtcggcattgatattgccaaacttaaccatttcgccgctgcgatttcttccgacggcgagatactcattgagccgttcaaattcacaaatgactatgatggcttctatctgctgctttctaaactggcaccacttgaccagaacagcatcatcataggtcttgagtcaacggcacactacggtgacaaccttgttcgttttcttatcagcaaggactttaaagtgtgtgttctaaacccgattcagacttcttctatgcgtaaaaataatgtacgcaagactaagactgataaagtcgacacgtttgttattgctaaaacccttatgatgcaggactccttacgattcatgaccatagatgatctggattatattgaactcaaagagctcggcagattccgtcagaaactggtgaagcagcgtacccgtttaaaaatacagctgacttcttatgtggatcaggttttccctgaactacagtatttcttcaaatctggcctgcatcagaattctgtctatgccctccttaaagaggctccgacaccaactgccattgcttctatgcatatgacccatcttgctcaccttctcgaagttgcttcccacggccatttcggtaaggagaaagccagagaattaagagttctcgcacagaagtctgtcggtgtcaatgacagttctttatctattcagataactcacaccattgaacagattgagttactggatagtcaattgtttcacacagagcttgaaatggcaaatcttgtcacctgcctgcactctgtgattatgaccattcccggaattggtttcatcaatggcgggatgatccttggtgagattggtgatatacaccatttctcagaaccaaagaaactgcttgcgttcgccggactggatccatcggttcatcagtctggtaatttccaggcacagagaaccagaatgtccaagcgaggttcaagggtattacgctatgcccttggacactgtgctggcaagcttgtcagagtcatctggaagatgctcactgacgaagtagaatttaacctcgaataagaggtctgcataccataatcgatagattttgaaaaagggcttttagggagctttgttaaagttaccctttttacccgaaacaaaaaaattgaatttctggctaatttatacttgacttttcatagctggt

SEQ ID NO: 9214 - DNA, 1550 bp, unidentified
  source 1..1550: mol_type = unassigned DNA; note = element_e6cd036
  misc_feature 1: note = core
  misc_feature 2..225: note = LE
  misc_feature 226..1527: note = CDS
  misc_feature 1528..1550: note = RE
  misc_feature 17..240: note = bridgeRNA
ctacttatgtcttccaagactgcctgggccggcgcaggctcgggtgaggtgcccggccggacgctcttctttgcggctgcccgtctcggtctcgagcgtggctctttcatgggttgcgttctggccgggtgccgcggcggggcgtggctcaagaagggtttgctcagctcgaagtagcgttgcccgtcctcgctgacagccaggagttaagtcaggaggtctggcatggaccgagtattcatcggtgtcgatccgcacaagaaatccgtcaccctcgaggcccgcgatagccgggagatcctgcgggctaccggctccttcccgactgacgccgccggctaccggctgctggtggagtacgcgcggcagtggtcagaccgggtctgggcggtggagggtgcgaacgggatcggacggccgctagcgcagcggctgctggccgccggggaacgggtgctggacgtgccggccaagctggccgccagggcgcgggtgttcgacacaggtcagggccgcaagaccgatgcgactgacgcgcacgcgatcgtcatggtcgcgctgcgcgaccggggcttacgcgaggtcagcaatgatccggagctgacgatgctgcggctgctgtgcgaccgccgtgatgaactgtccagggcccgggcgcaggcactgaaccggatgcaccggctgttcctggagctggtgcctggcggcgcgccggtaaagaagtccgccagccagtacaagacgctgctggccagcgtgcgcccgtccgacccggccgggaagatgcgtcgccggatggccgccgaggaactcgccgacatcgagcgcctggacgccaagctcaaggcaatgaaagccgagctcaaaaccgcggtactggccaccggatcacacctgatggacatccacggcatcggccctgcgggcgccgcccggatcctcgccgacgtcggcgatgtcacccggttccccaaccgcagccacttcgcgtcctggaccggcaccgcccctatcgacgcttccagcgggcagcacatccggcaccggctgtcccgcgccggcaaccgaaggatcaaccacgtcttgtatatggccggaatcgttcagctgcgcaacgacaccatcggccgccggtactaccggcgccggcgcgccgacggcaagaccagcatggaagcgatgcgctgcctgcggcgccgcttgtccgacgccgtctaccggcagctcgccgccgacaccatgacgccgcggcaggcaggcccgggagggcactccggggcgactctgtcatccagcgcggccgaccattccccggtcatcggctcttcggacaagccacttcccggacctgcgctgccgacgctactcccgcccacggctgccaccaagcctgccgacccgggaacaggcgcaacaccacggcggcgcgccggaggtgtcaacgtgcagcgccccgccggacgaacgacgttgacgccgacaagcgccgtcgcatcctcggaagcctcccggatccatgccccttgacaaccgccgccatagaagggagc

SEQ ID NO: 9215 - DNA, 1446 bp, unidentified
  source 1..1446: mol_type = unassigned DNA; note = element_e6d80d0
  misc_feature 1: note = core
  misc_feature 2..339: note = LE
  misc_feature 340..1257: note = CDS
  misc_feature 1258..1446: note = RE
  misc_feature 61..221: note = bridgeRNA
gctctagtcttgcacggtcgataaggagttgcttccttgtcgagtgatagatcactgaagagaactgagcctggccgtgggtgaaccaactccgcagatagggaacagccctatgagacctatcggtacccatggtcatctcaggtcttaggctcggatagaattgcaggcgtaagggcctattagagtcatggagcatcggacctgtcgctcagcctctccagcgatcgtttgtacaacccaaatgtaactgttgatggaacattggataggcattgacgtgagcagcgcgacactagacttcgcactgctggatggaaaggcacgcaccttgagagcgtgcaaatagagaacgaccgcaaggcggtgatgaagttgatgggtcagtggagtaagcgtcacggtgtggaggtgggcaagagtttgatccgcttggaagcaaccgggcactacacactgatgatgctgaacctgatcgttgggcagcagtggcatgcttggttggcgcaccccaacgacatccagcagagcatgggtatcaagcgcgtgaagaacgacaaggtggatgccctgcgcatcgcgcagtatgcacgcaccttccatgagaaagccagattgttcacagcacagaacctgaagctggaccggctcaagcatttgatcacacgtaggaaccacctagtgcgtagccgggccaggcataggacacacatcacggacctgaaccgctatatggaccgccagctaaggaccgagttcgatcgcatcgacaagcgacagatcaagctcgaggaccaactcgtggcccatgtggatgccttgatccttgctgagatcaaggctgatccacagaccgaacggcagtacgatctgttgcgcaccatacccggcgttggcccgcagctcgccgcatacctggtggcctgcaccgatggctttgcacgcttcaacacgccgcgccagctctcgtgccatgccggtgtcgcacccttcgagcgcagctcaggcagcagcgtgcgtggccgcacccaagtgtcgcatcaagctgataagtcgctcaagaccttgctgcacatgtccgcgctggtaagtgtgcgcgaacccggtgaactgcgccagtacttcgagcgcaagcgtgctgaaggcaagaagccgatcctggtggtcaatgcagtgcgcaacaagctcgtgcatcgcgtgtgcgctgtgatccggaacaacaggccctacgaacggcgaccgataacaacgacctgaaccactagttgcaactttgtgcatcgcgcccaaacggaagtaggctctgctggagagcaacctgccagggataggcgcgatgaacgacgggcatgaacatgtgtcgggggcacgtcgcccttggcacatgcctggagttcctcatgcctaaaataaactcatcgtaatgcttgcaaatgacatagaata

SEQ ID NO: 9216 - DNA, 1343 bp, unidentified
  source 1..1343: mol_type = unassigned DNA; note = element_e6da401
  misc_feature 1..2: note = core
  misc_feature 3..79: note = LE
  misc_feature 80..1102: note = CDS
  misc_feature 1103..1343: note = RE
  misc_feature 1098..1332: note = bridgeRNA
tgatgatgtggacgcccccgcaccgaccgacagttgctatgctgccggtcggtcaaccgagaggaagaggagcgtttgcatgacgatcacgacgattgggctcgatctggcgaagagcgtattccaggcacacggcatcgacgagagcggtgccacggtgctggtgaagaaactgcaccgcaagcagatgctgcctttcttctcgaagctgccgccttgcctgatcgcggtggaggcctgcggaaccgcgcatcactgggctcgcacgcttgcagcgatgggccacgaagtccgcctgataccgccatcgtacgtcaaggcttacgtgaagcggggcaagagcgatgcgctagacgccgaagcgatctgcgaagccgtgcagcggccgacaatgcggttcgtacccgtcaagacgatcgagcagcagggcattcttatgacccatcgcgcccgatcccttctcgtacggcaacggacgatgctcgccaacgctctgcgtgcgcatcttgccgagctgggccacgttgccaaccccggcattggcaacctcgccaagctggccgagcaggtgatggctgacaggaatgccttgccatcctacgcccgtacggcattggagatattgatccgacagatcatggccgtcagcgccgagattgcggaactggatcagcagcttgccgcttggcataccgagagcgaggccagtcgccgacttgccgcgatccccggcctcggcatcatcacggcaacagcaatagctgcaaccgttacggatgccgagcagttctcttcaggcaggcagttcgccgcctggctcggtctgacaccgcaacaacactcaaccgggggaaaaaccagacttggcggcatctccaaacagggcgaccgatacctgcgccgattgctcgtcgtcggagccaccgcagtcatgcgccacgtcaaggataagccaacgccgatggcggactggatcaggaagctctccgagaaaaagcccttccggctcgtctcggtggccctggctaacaaactcgctcggatcgcttgggtcgtgctgacccgcaaggaggcctatcacccttacgccaatttgacctgatcagcccaggtcacccgaaatggtaatggcagtcgatgatgagtaacgatcgagccaatggtgagaccaacccgtctgattcaatgcgcttcaacgcgcggcagcctgtttagggacctcaccggcggatttccatcagggccagcggcaacacgtatgccgcacaaacaggccggacatatgaaagcaaccgatcaaacccatcccgacaaaatgcccttgccaagggggcgtccacata

SEQ ID NO: 9217 - DNA, 1670 bp, unidentified
  source 1..1670: mol_type = unassigned DNA; note = element_e6e2f0a
  misc_feature 1..2: note = core
  misc_feature 3..286: note = LE
  misc_feature 287..1567: note = CDS
  misc_feature 1568..1670: note = RE
agaaatgcatgcgccacttcgtggctcgcccgtgggggatgaaactgggtccccttgcgtccggggctgggtgctggccggtgggtgggtggctggggtttcttgcggttccagcggacacccgagcgatggagggtgcagggtgagagctggcgcgccgcctgccgtcaccgtccagctttggtccgttcgaggccgcgtttgagaatggtgctggaaccccgtgccgggtacccccccgctgctgctatgtgcgcgtgtgtcagtctcctgaggtgggcaggctgtgaaggtgctgtatgagcgcgtcgccgggatcgacgtgcacaagaagatgatcaaggtggggatccgggtgccgggggacaagccctggacccggaaatcggaagtgctgcaataccggacgttttacggggtgctgcagcagatggccgccgagttgcgcaagcggggcatcacccatgtggtgatggaggccagcggggtttacaccgagccggtctgttacgcgctggccgagcgggacttcgagcaggtcgcggtgatcaacccagcgcacgccaaggcgctgaaggggcacaagaccgacgccagggactgcctgcggcttgcggaattgttcgaatgcgggctgctgcgcgggtcttatattcccgccccggagctgaaggaggtgcgggacctgacccggtgcaggatcaagacggtccaggcccgcacctccgagatccagcggctggctaaggcgctggagtcggccggtatcaagctcggctcggtagccagcgatattaccggcaaatctgccacggcgatgatcgaggcgctgaccggcggggaacgccgcggtgcggtgctggcggacctggcccgcgggcggatgcggactgccggcaagctggctgacctgtcccaggccctggccggccggttcaccgatcaccacgcgctgctgtgccggctgcacctggaccggatcgcaatcttcgacagcgcggtcgccggcttggaggacacgatcacgcgcaaggcagcccgctggcagcgggagcaggacctgctcaagacgatccccggctttggggatgccgtggcgcaggcgtggctggccgagatcggccccgctccgcacagctacttcgccggccatgacaagctggcctcgtgggtgaccttgtgcccgggcaaccacatgagcgccgggaaacgcaagcacggccggaccggtgacgccggcgcttacatcaagccaatgctggtcaacgccgcctgggcagcggtcaaggccccggggcggctgcaggcaaagtaccaccggctggtccgccgcttcggcgggcagaagaacccggccgcgaagaagaaggcgatcatcgcgatcgcccacaccctgctgaagatcgcctaccaggtgctccagagcggccagccataccaggacctgggcgccgacttctacacgcggcgggaatcacccgaacagcgccaggcctacctgctgcggcaactgcagcagctcaaccctggatgcaccatcaccatcacccccgcggaggccgcctgaccgtcggccaaagccgaccacctggcgccatcccagaccctcgccgacctcaccggccagggtttgctgccgcgcgccccgggcggggacccagtttcgtgtc

SEQ ID NO: 9218 - DNA, 1371 bp, unidentified
  source 1..1371: mol_type = unassigned DNA; note = element_e6e43c6
  misc_feature 1..4: note = core
  misc_feature 5..78: note = LE
  misc_feature 79..1113: note = CDS
  misc_feature 1114..1371: note = RE
  misc_feature 1086..1360: note = bridgeRNA
atgatggggtggacgccccgccgacggcgtcgatgtgccaaagtggagtgtttgagcaccacttaaggggaggcgtccgtgtcagaagttatcacagtcggtctcgatatcgctaaacatgttttccacgcacatggagtggacaaccgggggcgaacgatattcagcaagcggatcagccgaggaaagctgctggacttcttcgcagcgcagccgcgttgcactgtagcgctggaggcgtgtggtggagcgcatcattgggctcggcagctcgcccaacttggccatgaggttcggctgatcccgcccgcttatgtaaagccgttcgcgaagcgacaaaagaacgacgcgatcgacgccgaggcaatttgcgaagctgcgcagcggccgaacatgcgcttcgtgccgatgaagagcgagcagcaacaagcggcgggtctcgtctttcggacccgagacctgttggtgcggcagcgaacgcagctcatcaacgccgtccgaggacacctcactgaatatggttggatagcaccaaaagggccatcgcatgtggcagagcttgcccatctgatcgaagaagaaaggatggccagctcgcttccggcagcggctcgcgccatgttccgattgatgctggaccagctcgccagcctcaatcgaaggatcgcggttctcgacaaagagatcgcgcggcgtgctcgcgaagacgaagtatcgcgccggctgatgaccattcctggcatcggcccgatctccgccacggcgatcgctgctctagcacccccggccgagacctttgctaagggccgcgactttgccgcctggcttggtctcacgcccgttcaaagatcgacaggcggcaagcagaagcttggcgcaacctccaagatgggcgagcgcacgctcaggcgcctcctcatcatcggcagtagtgctgtcgtgcagcaggcgtgcaagcgcggcgcagccaaaggttcgtggctcgaacagatgttggctcgcaaaccgcgcatgttggtgacggttgcgctcgccaacaagatggcgcggattgtgtgggcgcttctcgtaaggcgcgaggtttacaaagctccggccgcggccagcgtatgatcttggcggacctgaggtcgtcagagatgtagtcggtcgaaggagggtatggcgcaacagtcggcgagacgaggttggacgagccaggtgtactcatcgtgcctagagcacgcttttatgatttggtctccgatctgcgaactcccatacgggccccgcagcttcatcgctgcatcatcagaggccggacagatggcagcatccgactacgtgccgatcttcttcaaaaaccgcttgcatctcgcggggcgtccacag

SEQ ID NO: 9219 - DNA, 1479 bp, unidentified
  source 1..1479: mol_type = unassigned DNA; note = element_e6e7f79
  misc_feature 1..2: note = core
  misc_feature 3..263: note = LE
  misc_feature 264..1436: note = CDS
  misc_feature 1437..1479: note = RE
  misc_feature 8..243: note = bridgeRNA
ctagtatatttaagttacagaagaaactaaatacttattgaactaaacctccgggtttgagatgattttctcgtcagagtggagtaggcctgttgcacccttgagactcgatctcgtcccgaagactggcacctccgctttacgagattttacgaatgagctggatgttggttggcttttagccttctcttcgtatatcgtgctaggttgtaacctcgtaaagagtggaggatactctgtaatcataccggaggtgtaataatatgataattgttgggattgatattgccaagcgtaaccatgaagccactgttattgacgaatccggtaaaacactaggtagacttagttttgctaactctaattccggtgccgagaaacttttaagtttcattgaacaaaacaactcagacaatgacatggttgtctttggtatggaagctaccggtcactactggttatccctttattcctttttgattgaaagagattttactgtttacgtcataaatcctattcaatcagatggtctcagaaacctgtatatccgcaagagcaaaaacgatctcaaggactccttcataattgcagagatcataagatttgggcgatttacagatactcaacttgctgatgagaataccctggctctaaagcaactctgcagatatcgttcttatctcgtggatcaggttgctgagctaaagttaaaatcaattgccatacttgatcagatatttcctgaatacgagaagcttttctcggatatttttggcaccagttctaaatcgttgttattagagtatacaacccctgaagagctactaactattagtaccgaacacctggctcaatttcttgccaagtgcagcaggggaagatttaatttagaaaaggctcagcagatacaagatgctgctaaaaacaccttcggtattaagattgcatgtgaagccttttcctttcagttaaaacagatcattgagcagattcagtttttagagaatcatattaaggaacttgaaaaccaaattgatgtttactttaagccattagattcgcatcttacatcaatcccaggcatcggcgttgtactggctgcgactattgaaagtgaaatcggtgatataaatagattctccagtcctgaaaaactggttgcatttgctggcttagacccaacggtaaaacagtcaggagaattcaatggtactagaaaccggatgtccaaaagaggttctccttatttacgccgcgctatttggcaggctgcaatatgcagccttcaatataatccagtgctaaaagagttctacgataaaaaacgtttagaaggcaaagcccatggtacagcggttggtgctgtagctcgtaaactaacttatgtcatctttgctatcatgcgtgataaaaccgactatgttgcaatggattgattacaacaaattttgatattgcccttgactttacatagctggt

SEQ ID NO: 9220 - DNA, 1396 bp, unidentified
  source 1..1396: mol_type = unassigned DNA; note = element_e6ea255
  misc_feature 1: note = core
  misc_feature 2..218: note = LE
  misc_feature 219..1385: note = CDS
  misc_feature 1386..1396: note = RE
  misc_feature 16..233: note = bridgeRNA
ctacttgtttagaactgacgtcgagatcgtgggcgggccagcctgtggtcttggtgtctggcgggtggttcgcgaaccggctgcccactgcttgcggtgtggctcgataatggagagctcctgccggacaccgctttgcgaggagtggttcgagaggggaatgccgagctcgaagtagcgctgccctcctcgtgtgtttcaacgaccgaggaggaacgatgagcaaggtggtgatcggtgttgatccgcacaagcggctcaacgcggtggcggtgttggacggcaaaggaaaagtgttggcgcgtcagcagttcgcgaacaccgccgatgggtttcgtgaactgaagacgttctggcggcagtggcggtcgcggacgtgggcgatcgagggctgcaacggcgtgggcaagtacttggcgcaacgcctcgttgtcgagggcgaaacggtgctggacgtgtcgacgcgacgcgccgcattggtgcgcgtgttcggtggcggcaacggccgcaagaccgacgacatcgacgcggagtcgatcgcgatggtcgggttgcgcagcaccgacctgcccgaggtgcgcgccgatgagatgacggtgacgttgcggttgttgtcgaaccgtcgcaacgaactcgtcgggctgcgtactcaggccgtgtgtcgcatccatcgtgacctggtggtgctgattccgggcggcgcttcgaggtcgctgacggcgaagaaggcgaaggagatcatcggccgtgtccgtccgcgcgacgaggttggccgcctgcgccggcggttgatcgttgagcagatcggcgaactcgaggccatcgacaagcggatcgccgctgtgaacaaagacatcaaggtcgcagtcgcggccgcgccgacacggctcaccaagctgttcggtgtcgggcctgtcaccaccgcacgcgtgatgggcgaagtcggcgacgtggcccgcttcacttcgcggcatcacttcgccagctacaacggcacagccccaaccgagcgcagctcaagtggcccgtgtccgccgcgggtcaacaccaaaggcaaccgcaagctgaaccacgccatccacatcgtcgccatcacgcagctccggtcgaagacgtccgaagggcacgcgttcttcacacgcaaacgtgctgaaggcaagacagagaaggaagcgttacgcgcgctcaaacggcggatctctgacgcgatctacaagcaactcgtcgaggacgacgccgcgttgcgggacccgggtgggcaattcgggacgactcttaaaaccagcgtgaccggtccttcacccacgaccggctcttcggttaagccacagcccgggccccaacgaaacgctacgccgcgacacctcacacgggcatctgcttgacagaggggtgc

SEQ ID NO: 9221 - DNA, 1514 bp, unidentified
  source 1..1514: mol_type = unassigned DNA; note = element_e6eba25
  misc_feature 1..4: note = core
  misc_feature 5..259: note = LE
  misc_feature 260..1504: note = CDS
  misc_feature 1505..1514: note = RE
ctcactggtgcaccatccttgtgtcggtgattctggatgggttgccgatgcacctgaggtggcgctgggttatcgccctgctcgctcgacagcagttatgtccagcatgagttctgcggaacccagcgttcgcccggggcacgccgaccgtcgacagggctgagcgcctgcgagcgccgaacagtgagcgaacgagcagtcgtgccccggtaccacacgaaggtgcctccccactgggactagcagcgaggaggctgtcttgaagtctgcccgaaataccttgccgacggaacccgccaacggcgtcaccggcggaatcgactgggcgcgtgatgatcacgcggtgtcgatcgtcgatgaccgcggccgcgaaatcgtgcgatccaccgtcgagcacaacgctgccggactgcgcgagttgctcgtcgtgcttgagcgcgccggcgtggccgaggtcgcgatcgaacgccccgacggcccggtcgtggacaccctgcttgacgccgggatcacggtcgtggtgatcagccccaaccaagtcaagaacctgcgcggacgctacggctcggcgggcaacaaagacgaccggttcgacgcgttcgtgctcgccgacaccctgcgcaccgaccgagcacggctggctccgctgttgcccgacaccccggccaccatcaccctgcgccagacctcccgcgcccgcaaagacctcgtcgcccaccgcgtcgcggtggccaaccagctgcgcgcgcacctgcagatcgtgttccccggcgcggtcggtttgttcgccgccctcgacagcccgatcagcctggcgtttctgactcgcttcgactgccaagaccgcgccgactggctctcgatcaaccggctggcggcctggctggccagcgtcggctacagcggccgcaccgaccctgcggtgctgcaccgacggctcactagtgcaccgcgcggcaccgcgggaaccgaccacaccgccaccaccgccgccttcgtggccgtactgtcggccctgaccgcccagatcaaggccctcgacgacgacatcgcccaacaactcgcccgccacgccgacagccagatcttcacctcgctgccgcgctcgggcaccgtgcgcgcggcgcgcctgctcagcgagatcggggactgccgcgcccgcttccccacccccgaatcgttggcctgcctggccggcgtcgcgccctccacccgccaatccggcaaagtcaaacacgtcggattccgttgggccgcagacaaacaactccgcgacgccgtcaccgacttcgccggcgacagccgacgcgccaacccctgggccgccgacatctacaaccgcgccatcgcccgcggacacgaccacccccacgccgtgcgcatcctcgcccgcgcctggctctacgtcatctggcactgctggcaagacgaagtcgcctacgaccccgccaaacaccgcgccctccaaacactgctcaaccaagaccaacccagggcggcttgacacagggcaa

SEQ ID NO: 9222 - DNA, 1494 bp, unidentified
  source 1..1494: mol_type = unassigned DNA; note = element_e6ee7dd
  misc_feature 1..2: note = core
  misc_feature 3..220: note = LE
  misc_feature 221..1474: note = CDS
  misc_feature 1475..1494: note = RE
  misc_feature 6..243: note = bridgeRNA
ctaatggggctcatcgggtcatgagtgagactcgatgagtggccgccagcaggtgagcactttcgtcgccggagccgttcgagctctggtgtcagaccgtgcccctgctggtcggccgggaggccggactgctgatgggatggcgtgcccgccgggttgtggggcgtgagcactggatccattagggcgcgagctgtgtcttccgcgggccacacgcgcggtgtacgtcgagaggttggagaagcgggtgctgttcgtcggcgacgactgggccgaagaccatcacgatgtcgaggtccaggacgactcgggccgaaggctctgggccgcccggctgccggaaggggtcgaaggcgtcgcgaagctgcacgccctgatcgcccggcacggcggcgaggacctggagccgggaggggtggtggtcgggatcgagaccgatcgcggcccgtgggtccaggccctgctcgcggccggttaccaggtctacgcggtcaacccccggcaagcggcccggttcaaggagcggtacggcacctccggtgccaagagcgacaagggcgacgcacacgcgctggccgacatggtccgcatcgaccgtgcccagttgcggccgatcgccggagacagcgagcaggcccagtccgtcaaggtcgtcgcccgtgcccaccagacgctgatctgggagcgcacccgcaccttccagcggctgcgcagcacgctgcgcgagtacttccccggcgcgctcgccgcctacgcgggactggagctgaccagcacggacgccctggaactgctgctcaaggcacctacgccggagcaggcggcgaagctgacgaagcaacagatcaccgcggtcctcgcccggcaccggcgccgcaaccgggagcagagagccgcctccatccaggccgccctgcgcgagccgcaactgaacgtcgcggctcctgtcgccgatgcctacgcagccgccgtgaccgcccacgcccggctgatgatcactctgaacgagcagatagacgccctggaggggcaggtgaagacgcattttctggcgcacccggacgctgagatctacctgtcgatgcccggcatcggcgagatcaccggcgctcgggtgctggccgagttcggagacgacccaacccgctacacgtccgcgaaggcccgcaagaactacgccggcaccagccccatcacccgggcctccggcaaaagccacagcgtccaggcccgcttcgtccgcaacaaccggctcgccgacgctctccagcgacaggcgttctgcgcgctgcagaactcgcccggagcccgccgctactacgacaaacagcgcgcccgcgacttggactacaaccctgccctgcggcagctgggcaaccgactcgtcggcatcctccacggatgcctcaagacccgcactcactacagcgaggccacagcatgggcccaccacgcgaacctcgccacaacttgacatccagcgtcatgggatgt

SEQ ID NO: 9223 - DNA, 1244 bp, unidentified
  source 1..1244: mol_type = unassigned DNA; note = element_e6f4430
  misc_feature 1..3: note = core
  misc_feature 4..211: note = LE
  misc_feature 212..1207: note = CDS
  misc_feature 1208..1244: note = RE
  misc_feature 8..193: note = bridgeRNA
tgccttaagtttgtattttcataaaactgtcataaatttccgataaggaagcgggtgaccttgttcgcagcttagaggtatcgctctttcagacgcattagtcccgctcctcttatcggtcttgcaagaactcattggaataataggcatggaggcctgattaaggtagtagttccgcaagatttttgtttaacagttcaaaatcaaaggtatgaaaaactatctgaattcagttggtgtggacatttcaaaaagtttttttgatgctgtcctgttcctttctggagaacatgaaaagttcacaaatgagaagaagggatttattcattttgaaaaatggcttaaaaagcacggtagcaattctaataacgtgcttgtgtgttttgaaaacaccggttatttttctaccaatctggcaatttatttgacagaaaagcactatgattacgtgcaggaacatcctttgcagataaagcgatctattggacttcgaaggggtaaaagtgacaaggcagatgccacagatatcgccaggtatgcatggttgaaccgggaaaatcttaggctatcaaaagcaccttccaaaacacttttgaccttacagcaaacaaaaacagcaagagatctattggtcaaacaagcggtagccattaagaatcaacttaagggactggaagtagtcggggaccgtcaaatttatggaatagcttgtaaatctctgaatcgagtgctttcgacaataaagaagcaaatactgaaactggagggtgaaatcagagaaaaaattaatcaggacgaagaactgtctgctaaatttaaactatgccgtagtgtaacaggcgtgggattgatactggcactggagatgatcattcatacacaaaattttactggatttagtgaatggaggaagtttgctgcatacagcggcacggttccttatccatatcaatccggaacaagcatcaaaggcagggcgcgcattcatccgtcaagtaatcaacgaatgaaaagtcttttaaccatggccgctattgctgcgattagggttgatccagaactgaggcaatattataaacgcagagtcgaagaaggcaagccaaagatgagtgtaataaacatgatccggaataaaatgctggcccgaatcttctcgactgtgcaaagggggacaccatttgtaacaatgtcaaaatttgcagcttagaaaaaagagtaaaaaatatttgtttttgaccttggaa

SEQ ID NO: 9224 - DNA, 1138 bp, unidentified
  source 1..1138: mol_type = unassigned DNA; note = element_e6fef17
  misc_feature 1..2: note = core
  misc_feature 3..166: note = LE
  misc_feature 167..1123: note = CDS
  misc_feature 1124..1138: note = RE
  misc_feature 9..181: note = bridgeRNA
cttgtatctttactgttcggaccggccatgcagcccgattccccctggggcctgatagagagcccgaccttgagcctggtgcgcatggtccggaccgtcctttcttgcaacccgaacggttgtaggaacctttagttcgcatagacaaggatgggagagaaaggacatgtccgaagcgacctatgtgggaatagacgtttccagcgaggtgttggagatagctgtcagtacgcagccgtcaacgtggcaggcgagcaacgactctggcgggatcgagcagctggccggccagctgcaggcgctgcgcccggcgctggtggtattggaggcaacgggcgggtatgagtttgaagcggcttgcgtattgcaggctcaggggctggccgtggcggtggtcaatgcgcgcatggcgcgcgactttgcccgggccatgggtgcgttgggcaagaccgatgcgctcgatgccaggatgctggccacgtttgcccgggtgcttgaccagcatccggatcgggcccgcttcgtcaagccgctggccgacgcgcagttgcagcgccttcaggcgctggtgctgcgtcggcgccagattgtgcagacgatgaccagcgagcgacatcgcttgcgcatctcgcacgaggcggcccggcccagcatcgaacggcatctggccttcctgcgccaggagctcgatgacagcgacgggcatattgccgagcacgtgcagcagcatcaggccgagttggcgcgggttctgagcagcgtgccgggtatcggcgcggccagcgtcgccctgttgctggccgaactgcccgaactgggtcgcttggaccggcgccgtatcgccgccttggtcggggtcgcgccggtgaatcgcgattccgggaaaatgcgcggtcagcgctctatctggggcgggcgagcgtcggtgcgctgcgccctgtatatggccagcctgagcgcggtgcggtacaacccggtgctgcgcgcgtattaccaacgactgctcggcacgggcaagaaaaagaaggtggcgctggttgccaccatgcgcaagctgctgaccatcctcaacgccatggtcagacacaacaaacaatgggagcccgcccttgattgcccttgactcccaagacggttg

SEQ ID NO: 9225 - DNA, 1416 bp, unidentified
  source 1..1416: mol_type = unassigned DNA; note = element_e6ffb15
  misc_feature 1: note = core
  misc_feature 2..90: note = LE
  misc_feature 91..1131: note = CDS
  misc_feature 1132..1416: note = RE
  misc_feature 1176..1411: note = bridgeRNA
taatggcatggacgcccctgcttttgacggcatcacttgtgccaaagtggaagtgtctagcgaccacttaaaccagcaggagcgtccaggatgaacattacgacgattggcattgatctggcaaagaatgtgtttcaagtgcacggcgttgacgagcgctgcaaggcgcagctgcgcaagcagctcaagcgcacgcagatgatgaacttcttcgtgaacctgccgccatgcctgattggaatggaggcctgcggcagcgctcatttctgggcacgcaagctggcggaactcgggcacactgtgaagttgatggcaccgcaatttgtaaagccgtacgtcaagagtaataagaacgacgcggccgatgccgaggcgatctgcgaggctgtggcacgaccgaacatgcgatttgtaccgatcaagaatgccgaacagcagtcgctgctgggactgcaccgggcgcggcaagggtttgtcgcggcgcgcactgcccaagccaatcagatccggggactgttgactgagtttggtatcgtcatgccgcagcgagttcgttacttgacgaggaaaatgcccgatatcctggaggatgccgagaacggcctgccgggtgcgagccgtgagctctttagccgattgttcgggcactttcgggaactcgatcgccaagtgagtgagctggagacccagatcaaaagctggcatcgcgaggacacgaagagtcggcgtctcgaggcaatacccgggatcgggccgctcacggcgagcgcgctggtagcgagcgtgggtgatgcgagcaccttcaagaacggtcgacagtttgcggcctggcttgggctcgtgccgcgtcaggattccagcggcggcaaagagcggttgctcgggatcagcaaacgcggtgatacgtacttacgtacgctgctgattcacggggctcgttcggttctgcggcatataaagccccaggctggcgaacctgacggttggcttgcgcgtttagcgatacggcgtaatccgaatattgcggcggtggccctggcgaataagaatgcgcgcatcgtctgggcgctgcttgcccatgcgcgagactatcaagccagttactggaagacatccgcaatagcgatctaagctcaaagcaagcaagcttcgataaaaatggcaacagtttttcaacacaccaccgattgcacaggcgttttttaaggtgatggcaaaccaggtaaaaccgggattgattcaacctgtgtgtctcaagggacatcgagagtccgctgacgtgatcaggcatcaatcagcttattccatcagggcccgcggctgcgtgtcgcaccaggaggccgaatgtatggctgcaatttctacctgcaaatcaaaatctaaaaaaatcgcttggcaaaaaggggcgtccatgta

SEQ ID NO: 9226 - DNA, 1399 bp, unidentified
  source 1..1399: mol_type = unassigned DNA; note = element_e7108f4
  misc_feature 1..2: note = core
  misc_feature 3..118: note = LE
  misc_feature 119..1150: note = CDS
  misc_feature 1151..1399: note = RE
  misc_feature 1162..1394: note = bridgeRNA
agatgccgtaatgggccgggcatcgcgagaatagccagagtgggtggctgtccctcagaatgatggtgtttgaagcggagtccgagctatcggctccaatcatcagcgaggaacagccatggaatattatgccggaatcgatgtgtctttgaaagagagcagcgtgtgcgtcgtggactcggcgggcaaggtcgtccgcgaggtcaaggtcgccagtgaaccggaggcgcttgttcggtatttcgacgagttgggattgcccgtcggtcgcattgggcttgaggctgggcctttatcgcaatggctgcatgccggccttattgccgccggacgcgaggtggttttgctggagacgcggcacgtgaaagcggcgctgtccgccatgacggtaaagaccgaccggaaagatgcgagggggatcgcgcagctgctgcgcatgggatggtatcgcccggtccacgcaaagtcggccccttgcaaggatatccgcgccctcctggttgggcgcaagcttttgcaaggcaagttgctcgatgtcgagctcagcatccgggggattctccgcggttatggcttgaaggtcggcgaagttagccggggacggtttgaagcgcgtattcgtgaactgacagccggacacgccatcttggaggcggtcattggggcgatgctggctgcacggatggcgttgtggaacgagttcacccggctccatcgcgagatgctcaagatcgcgcgtgccgacatggtttgccggagactgatgaccacaccgggcgtcggggccctggtcgcgctgacctatcgctcggcagtggacgatccgtcgcggtttggcaagtcggcagccacgggcgcctatttcggattgactccaaaaaaataccagtcgggcgaaaccgaccgggatggcggcgtcagcaaggtcggcgacggtatggtgcggactgcgctcttcgaagccgcccacatcatgctgacacgtgcgacccgcttttcgagtttgaaacgctgggcgctcggcgtcgcgcaacggcgcggtatgaagcgtgctaaagttgctctggcgcgtaagctgggagttgtccttcaccgcatgtgggtggataagaccgacttccgttggaccaatgctgttgcggccgcttaggagttaatcacagtttggaacgggtcaaagacgaccccttcttctgaggtcccgtcgccgggacgaaggcttggtaaggtcgtgagtagtgctgtgaatgctatggcaaatcacgcgtcctagattgatctaccagctttggatctgatggcatggtgtggcggccataagtgctgaccacggacagaagcatgatcctggcggcgagaagtcattcagagggcttgacgaaacacggcccattacaga

SEQ ID NO: 9227 - DNA, 1455 bp, unidentified
  source 1..1455: mol_type = unassigned DNA; note = element_e71744d
  misc_feature 1..3: note = core
  misc_feature 4..217: note = LE
  misc_feature 218..1441: note = CDS
  misc_feature 1442..1455: note = RE
  misc_feature 13..202: note = bridgeRNA
atccttacctttcttggagggtgatcggggcgtattgccttaggcttcgatttgcccagggacgtcgggtatggctttcatgtggttgctgtgttcgatggccgaaggagattggccgcccggcgttccgcgacgactcgaccgctaattgagagatgcgatgtgatcgctgtgtaaggacacgccggcgtggtcgtctgttgggttggtggcacctatgacgaggacggaggtggttgtggcgcaacaactgtgggccggtgtagatgctggcaagtctgatcaccactgtgtggtcattgatgctgagggaagtcgattgctctcccagcgggtcgccaatgacgaggccgcactgctggcgctgatcaaggcggttgcggcgttggccgatgggggtgagctcacctgggcgatcgacctcaacggcggcggggcggcattgttgatctgcttgttgatggccgctgaacagcggttgctctacatccccggcagaaccatttaccacgcctcggctagttaccgcggagatggcaagaccgacgccaaagacgccgcgattatcgccgatcaggcacggatgcgccgcgacctgcaaccgttgcgggccggtgatgacatcgcggtcgaactgcgcatcttgaccagtcgacgcgctgatttggtcgccgatcgcacgcgggcaatcaaccggctgcgtgcccagctgctggactacttccccgccctggaacgcgcatttgactacagcaacagcaaggcggcgctgctgctgctcagcagctaccagacccccgacgggctgcgccgtgcaggtgctgctcgcctggctgcatggttgcgcaaacggaaggctcgcaatgtcgatgccgtcgtagccacagcgctggcggcggccaacgcccagcacaccatcatgcccggacaacaattggccgccaccgtcgtagctcgcctggccaaggaggtgatggccctcgacatcgaaatcggcgacaccgacacgatgatcgaggagcgatttcgccgccaccgccacgccgaaatcctgctgagcatgcccggattcggcgtcaccctcgccgcagagttcctggccgccactggcggcgacatgagcgcattcgactccgtcgaccgcctcgccggcgtctccggcctggcaccggttccccgcgactccggacgcatcacaggcaacctcaaacgcccacgacgctacgaccgccgactcttgcgcagctgctacctgtcggcacaaatcgccatccgcaccgaccccgcctcgcgcacgtactacgaccgcaaacgcgccgaaggcaaaacccacacccaagccgtgctcgctctggcccgacgacgcctcaacgtcctgtgggcaatgctccgcgaccacacgccatatcaacccaccgcaactactgccgcggcggcttgacaacgtcattgaga

SEQ ID NO: 9228 - DNA, 1603 bp, unidentified
  source 1..1603: mol_type = unassigned DNA; note = element_e717801
  misc_feature 1..2: note = core
  misc_feature 3..267: note = LE
  misc_feature 268..1488: note = CDS
  misc_feature 1489..1603: note = RE
  misc_feature 33..287: note = bridgeRNA
ctgatacaatatatttgaccgagaaagtgcggtatttggattggcactttccaagttccgttacctaagctataatggaaaggtatttaaggtgtgacggttacctccttgtgcttgcacgcacgcaacaacagactgtcagccggctttccattatagcgttcggtttctgcaggttgggctccgcgtccgtgtaacaaatcagattgaataagtaatggggcttgtcggtcacctttttacaaatccaaatcagagaggtcacttatgaacgctgtcggcatcgatgtttccaaaggtaagtccaccgttgccatcctgcgccccggcggagaagttgtcgcttccccgttcgaggtttctcacaatccaagggaacttaatgagctcgtcactctcattaaaagcctggatggtgatacaaagatcgttatggaatacacaggcaactactaccttcccgttgccctgttcctccaaaagtccgggttgttcgtttccgtcgtcaatcctattcttgtaaaagactacagcaacaaatctttatctgttcgtaaaggcaaaacggataaaaaggattccataaagcttgccgcctttgccttagaccgttggaatgagctgcctctcttttcctctcaatccgacacgagaacattgctcaaatcctttaacaggcaatacaatcaatacaacaaactcaaagtcatgctcaaaaacaatctcatctctattctcgaccagacttttcccggggcgaatactctcttcaatactcccgcaagaaaagcagacggacacgaaaaatggatcgattttgtcctcaaattcccgcattgcgagtgcgtttcaaaaaaatctttctccaccttttccaagagctatctttcatggtgcaaaaaatgcggctacaatttctccgacgcaaaagcgaaggagatctatgcgtttgcctgtaactgcgctccgtctttagccgattcagaagccgctcatgcgcttgtgtctgccgcgatcttacaactgaatacgctcaatgaaactctcgcctctttacagagagaaatgaatctgttggcatgttctcttccggagtatgatactgtaaggggattatacggcgttggctctgttctcggggcgcaactgattgccgaaattggtgacgtgtcgcgcttttccaataaaaaagctctcgtgggatttgcaggcattgacgctccgccttttcagtccggtaacttcaatccgcaatcccgaaatatctccaaacgcggctccgccgctctgcgcaagactttgtttcaggtcatgtctgtcatcctccaaaaggcacctgcgaaagatcccgttttcctttttatggacaagaaacgctctgaaggaaaacatttctacgtctacatgatggctggcgccaacaagtttttgcgcatttactacgcccgcgtcatggaacatctgaactcgctgcaagaggctgcttgacctcactctcttttcctccgccgttcgcacgaacggctttttaaccttgcgcttttttgcttgcaaaatttcttagaaaaacttcctgctttttacttgacttttatttgcaggt

SEQ ID NO: 9229 - DNA, 1205 bp, unidentified
  source 1..1205: mol_type = unassigned DNA; note = element_e71aca7
  misc_feature 1..2: note = core
  misc_feature 3..172: note = LE
  misc_feature 173..1171: note = CDS
  misc_feature 1172..1205: note = RE
  misc_feature 18..204: note = bridgeRNA
cttgtatctctccaaaccatgatacattgcttagctggctttatatcatagtgcatgatcagagtttgtacccatccttagatgaaagtctgtgacgtagataaaacccatgcgctaatttttcttaaaactgaatggtatccaagtccgtccaacactggaatgaggctgaatgaacaaggcgagtatacaagaaatgaacacaataggtattgatgttagtaaagctaaaatagactgtgcatggcttagagaggaaggaaaactaaaatttaaagtatttcctaatactcttctaggttgtaatgacctcattaagtggtcgttaaaaaatacaggattagaaattaatcaactccattttattatggaagcaacaggcatttaccacgaacaacttgctatgcaactttataatgcagataccatggtgtctgtagccaaccctgcgcaagtgaaattttacgcacaagggctaggcgtaagaactaaaaatgataaaaaagatagtgctgttttagcacgttacggcttaaaggaaacgcctaaactttggcagccagaacccgtagaaataagaacgttaaaagctttaattgctcgtttagatggcatagagaaagacttgcaacgtgagaaaaatcgtgaagaaaaagcgattattagcaaagctcccgacgaagtccttaactcagtaaaacaaatgattggacttcttgaaacggaacaaaaaaggcttgataaactgattgaagaacatattaataaacataaaaatctcaaagaaaataaagcattacttaagagtatcccaggtgtaggcaaagtggttgccactcgaatgttaatgctaatgggaagtcgtgaatttaaaagtgctagccagtgcgcagcctatttgggactagtgccagtagagcgcctgtcgggaacgagtgtaaaggggcgatcacggctttctaaagcaggtaatcctgctattcgtgcaaagctgtatatggccgcagtcgtcgcaacacgctacaaccccgatattcaagcccagtacgagcgcttgactaagaaaggaaaaagtaaaatgtcagcattaggtgctgcgatgcggaaattagtccaaatttgttttggtgtcttaaaacaccaaaaaccctatcaaccacaagtgggttaattacccccttgcgtttgatttggagagatggtat

SEQ ID NO: 9230 - DNA, 1155 bp, unidentified
  source 1..1155: mol_type = unassigned DNA; note = element_e72051b
  misc_feature 1..2: note = core
  misc_feature 3..207: note = LE
  misc_feature 208..1143: note = CDS
  misc_feature 1144..1155: note = RE
  misc_feature 37..213: note = bridgeRNA
cttgtcttatgacatttgctgccgaacgggtcagaaaggaaccgccgggagagggtagccgccctccctcagcggcgagggtcggatcggtggaattgcggaccgtctgacgggtcgagctagagtcggatcgccctcgtctttccttgaggcctgaacggatacccggagatcggctccggatgacaagcacaggacaagcgaaagatgaccaacgataccatcggggtcgacatatcgaaagaccatctcgacgcccacaggctgagcgacggtgcgagccgccgctttgccaacgacaatcccggccacagggccttcgtgacgtggctgggagaacccgacgctcacattgtctacgagccgaccggcccgtatcaccgcgcccttgaaggcaggctggctgcggcaagcttcgcgcccgtcaaggtcaacccgcgccaggcccggcgcttcgccgaggccaccggcaggcgcgccaagaccgaccggctcgacgccgccatgctcgcccgcatgggtgcgctgctcgatctggaggcgcggcagccgcgcagtccgctcctcaacgatctcaaggacctgcacatggcgcgcgaggcgctggtgaagaaccggatagcggcgaggaacagggccaagacgctgacccttcccatcctcaagcgccacaatgcccagcagctcaggcagatcgaacgtcaaatggccgctgtcgaaaaggcgatcatggcgctcatccaggccgattccgatctctcccgccgcttcgccatcctcgtctcgatcccgggcgtctcggcaatcaccgccttcgcactgctcatcgacatgcccgaactcggtacgctcggccaggctcaggccgcttccctcgcaggtctcgctccgctcacccggcagtccgggcagtggaccggccgcgccttcatccgcggcgggcgggccaatgtccgacaggcactctacatgcccgccctcgtcgccctgcgcttcaatcccaatctcaagaccaagtacgatcagctcagagcagccggcaaagccgcaaaggtcgcaatcaccgcaatcatgagaaggctcatcctcctcgcaaacgctctgctcagggatggtcgaaactggaccccatcccttccttgaccaacacggata

SEQ ID NO: 9231 - DNA, 1525 bp, unidentified
  source 1..1525: mol_type = unassigned DNA; note = element_e720854
  misc_feature 1..2: note = core
  misc_feature 3..234: note = LE
  misc_feature 235..1503: note = CDS
  misc_feature 1504..1525: note = RE
ctgatggctctaccttcctttcgcacggtggatcccggcagggagcgcttcggtcgcttgtcccgtgaggactgatgtgagacggcgcccctgccgggccccggcgaaggcctgacgcccaggagggtgtggtcccgcgaggactggttcatcagcacgacgcagcgccttcccggtccgccgagcaccatggcagcagcggctgccgtggccgtgtaggcggagggagccggggtgctgggggtcggtatcgactgggcggaggagttccatgacgtcgccctcggaacggtagagacgggggtcgttgagcagttccggatcgagcacggcccggccggtgtggcgcggctggtcagccggtgccttgcgctggagccggacccggccgaggtgcgggtggtgctggagacccgccacgggctgctggtcgaggcgctgctggatgccgggttcacggtggtgccggtcaacccggacctggtcgcgcggcggcggggtccggcgcggaagaaggacgacgcggaggacgcgcggatctgctgcctgctggccctggaccggcacgccagcctcaagcgactcatcccgcatggtgaggccggtggcgagctgcgcgcgatcggccgcgacgacgagcgcgccgcccgcgaccagcggcggctgctcaaccggctgcgcgcggacctgcagaccacctaccccgctgccctggccgtggccggcgcagacctcggcgcggtcaccgtgctgcggctgctggaacgctggcccacccaggacgagctcgccgcggccagccgcgccgagctgaccgacttcgcccgcgccgggcgacacggctggcccgaccgcttcgccgacaaggtcaccaccgcgctcgcggccccgtcgctgccgacacgggactacctcgtgcgggccaaggccgccgggatccggctggccgcagtccaactgctggccctgcacgaggcccgccgcggctgggaacggcgcatgggcgagatcctgctcggcggcccacgcaccggccgcgaccacaccgccaaggaccccgacccggggaacgccttcccaggcggggcgatctacctgagcttccccggcctgggagaccgcctcgcagctcgggtcgccggcgagatcggcgaacaccacgaccagttcgacacccccaacgggctgcagtgctacgccgggcgcgccccggtcacccgtcgctcgggcaagagcgacttcgtcgtcgcccgccgcctggcccacaaccgctacctcggcgacgccgtccaccagtgggccttctgcagcctgacccgctcgggctgggcacgcgagttctacgactccaagatcgccgccggcaagagccaccacaacgccctgcgcgccctgggcaaccgctggctcgaaatcctctggcactgcctcaccaagaacacgctctacgacgaggccacacacgtcgccaaccgcaaccgagcccgcggacacgccgcctgagcccgaggttgacagagggtgt

SEQ ID NO: 9232 - DNA, 1535 bp, unidentified
  source 1..1535: mol_type = unassigned DNA; note = element_e7251e2
  misc_feature 1..3: note = core
  misc_feature 4..254: note = LE
  misc_feature 255..1421: note = CDS
  misc_feature 1422..1535: note = RE
  misc_feature 15..236: note = bridgeRNA
tcttgtatactcaatacatgattatagtatattgagcataatcttcctttcttcatatttttatattataatcttaataaggcactgtggatttgtttcatttttttgtagctagactaccaaaggagaatcttaccacagttcctattttttactatcaataagttatctagcgctagacgctctatcacaagaatatggaaataggaatctcgtgtcaaacatcagtgccaaataaaaggagaggtgataccatgtacttagtcggtattgatatcgctaaatacagtcaccaatgcttcatagctactgaagctggtgaggttatcaaagaattttctttcgataacaatttcgatggttttaatgtgctgctaaagtccctcaaatctttagatcaatttcaagatattaaaataggtcttgaatcaactgggcattatggaaacacattaaaacagttcatatgtgcaaaaggttatacttttgtggagtttaacccttaccttgccaaacagttttttaaatccaccacaattagaaaaactaaaacagacaaagttgatgcacggttactatctagtatgttagcctcagttgattacaagactctacatactaaatattatcacattaatgaattaaagtcattaactagagctagagattcattaatttgtgaacgttctaattacttagtacagataactaatgctttagatgtcgttttccctgaatataaatctttttttaacaataaattaagcaagactgcactttttttactgtataagtataatagtagggataagattgcgaagataactaaagagcaatataagaaaataagtaatatttctatggggaagtttagttatcctaaatttttaaatcttaaagaattagctagaaagtctattggagtagataatgaagcaagtttctttttaattaaaatttttataaatttaattaattcattaaatgagaaccttgagaaaattgaaaaagaaattgaagcattaatgagcatgattaacactaagttaactactattcctggagtatcaatattctccgcagcaaccatactaggtgaaatcggtgatatctctaagttttcatctcctgcaaagttaattgcctttactgggtttgatattgcaatctatcaatctggtgaaaaagagttttacggtaaattagtaaaacgaggatcaccattgcttagaaaaactatttggaatttagtcttaggatcaataagacttattcctcaaatcacagattattatcatcgtaagagagaacaaggtaaacatcataaagtagccttttctgcaatttcaagaaaactaattcgattaatatatcacatagaatcaaacaaaattgattttgatatagaacaatatagataaaatagtgtgtagctagctattaaatcttatatattttttaaattggcctattttgtaggttttttaactacgcatatttttttaaaatctatttacttgacttgtcaatagtta

SEQ ID NO: 9233 - DNA, 1495 bp, unidentified
  source 1..1495: mol_type = unassigned DNA; note = element_e726aab
  misc_feature 1..2: note = core
  misc_feature 3..232: note = LE
  misc_feature 233..1447: note = CDS
  misc_feature 1448..1495: note = RE
  misc_feature 13..195: note = bridgeRNA
tccatacctttcttcgtagggatgttcgggtcattcgtaagatcggagcacccaggggtgccgggtgtggctggcatggtgcagccgttgagatggctcaaggagattggccgccgggcacccgcgacgactcgaccgctaattgggatacgcgaacccatcgctcgtatggacacgtcggcgaggtcgtctgctggaagtggagacaggcacgtcgagtgaggagggcctggtgcccgaactgtgggccgggacggatgcgggcaaggccgagcaccactgcacggcgatcgacacgaacggaaagacagtgctttcccgccgggtcccgaacaatgagaccgagctgctggaactgctcggcgatgttttggacctggccgacggcgcccctgtcacatgggcggtagacctgaacgcgggcggagccgccttgtggatcgcgctcctggtcagccacgggcagaagctgatctacatcccaggccggaccgtgcaccatgcctcggccgcctaccggggcagcggaaagaccgacgcgaaggacgccttcgtcatcgccgacaccgcccgcatgcgccgcgacctgcaacctctgcaggagaccggagagatcgcggtggacctgcgcatcctcaccgcccgacgcatcgacctgtctgccgaccgcacccgggcgatcaacaggctccgagcccagatgctggagtacttccccgcactggagcgggccttcgactacagcgtctccaagagcgcgctggttttgctgaccggctaccagacgccggccgcgctgcggcgcatcggcagggccaggctggcaacctggctcaagaaccacggagtccgcaccgccaacacggcgaagagcacggcagacgcctcggtcaccgcggccgaggcccagttcaccgccgttcccggggagaagaccgccgcgaagatggttcacacccttgccagggaggtgatgtccctcgaccaggagatcgccgagctcgaagccctgatcgagggccggtttcgcgagcatcccgacgccggagtgatcaccagcatgcccggcattggcgacatgctcggcgctgagttcgtcgccgccaccggcggtgacatggccgtattcggcagccccgaccgcctcgccggcgtggccggcctcgcacccgtcccgcgggactcgggcaagatcagcggcaacctccgccgaccccgccgctacagccgaagactcctgcggatgttctacctctccgctcaggtcgctgccatgcgctgccctgtctccaaggcgttctaccggcgcaagcgcgtcgaggggaagtcccacaagcaggcgatcctggccctcgccagacgtcggctgaacgtgctctgggccctcatacgcgacggccggaccttcgacgcccgcctgcccggaccagctgccgctgcggcgtgaggaagctcccgcgagcctctcacgacagcttgacagcatcattgggaa

SEQ ID NO: 9234 - DNA, 1428 bp, unidentified
  source 1..1428: mol_type = unassigned DNA; note = element_e72fa8a
  misc_feature 1: note = core
  misc_feature 2..128: note = LE
  misc_feature 129..1148: note = CDS
  misc_feature 1149..1428: note = RE
  misc_feature 1187..1427: note = bridgeRNA
gaatgatatgaacgcctcccacccatgatcgtgggatgccagcgaaacacagagccttacaggccgactgcatcaatggccaaattggaagactatagaggcttacccaacaaaccggaggctccaaaatgccactgacgacggtaggtgtggacatcgcgaaaaacgtcattcagcttcattacattgacgctgaaaccggggagattatcaataagccgataaaacgagcggtgtttttggagcaatttgcgaaccgggcaccgtgcctaatcggcatggaagcctgtggtggttcgcaacattgggctcgtaagctcatggcaatgggtcatgaagtgaagctcatgccggcgaagttcgtaaaggcgtttgtgatgggtaacaagaatgacgcagcggacgcgcgggcaatctggatggccgttcagcagcccggaaagtcggtcgcggtgaaaacggaaacgcaacaggcggtgctcgcattacaccggatgcgtcagcaactcgtgaaatttcgcacaatgcaaatcaacagtttgcgaggactgctgactgaatacggcgaggtaatggccaaggggcgggctgcactcgacaaggcggtacctggggtgcttgagcgcctagtcgatcgtctgccggcgatcctgattgacacgctgcgcgaacagtggaccgggctgacggcgattgataaacagatcgttgtaattgagcggcgcctgcaggcgtggatgaaagaggacgaggcatgtagggcaattgcggcgataccgggtgttggactgctgacggcaacggcagcggtcgcaaccatgggaaatgcgaaggcattcaagtcaggccgtgaatttgcatcttggctcgggcttgtacctgctcaaaccggatcgggaggcaaaattcaacttcttgggatcagcaggcgtggcgacatctatctgcgcacgttgctgattcatggcgcgcgtagtgtgctctttcttacgaaggatcccggaccgtggcttgagcagatgcggaagcggcgtccattgaatgtaacggtcgtggctcaggcaaacaagatggcgcgcacgatctgggcaatccttgcgcatgaaaagcaatacaacaaaaaacacgtgagcgtgaagccgggttgaccggcaacagcgtctacagagtcaacgtttgaaggatgaaaacacgtcgaaaggttgcgctggcaatcgtatgtgatgacaaaacaggtcggaccggtactcgctaaacctggatctcgaacagagcctcgagctcgtcggaggaatgaggtgcgagtgagcggatttcatagtgggccgcagcgtacaaggctgcaacaagcccggatatagagctgcaacccatcctgtcgtagtctgaacacacgaaaaccgtcgcaaaacgggaggcgttcatata

SEQ ID NO: 9235 - DNA, 1353 bp, unidentified
  source 1..1353: mol_type = unassigned DNA; note = element_e738be4
  misc_feature 1..2: note = core
  misc_feature 3..30: note = LE
  misc_feature 31..1101: note = CDS
  misc_feature 1102..1353: note = RE
  misc_feature 1077..1341: note = bridgeRNA
tgatggggtggacgccccccgacggcatctatgtgccaaggtgacggtgtcgaactgccaccgaaggaggcgcccgtggagcaggttagcacgatcggtttggacatcgcgaagcacgtgttccagctgcatggagcagatggtgcggggcatgtgctctttcgcaagcgcatcacgcgcgcgaagcttctcagtttcctagcagcgcaaacccggtgcgtcgtggcgatggaagcctgtgccggtgcgcactactgggcgcgtgagatcgctaagttgggtcatcacgtgcgcttgatcgcgccgacctacgtcaagccgttcatcaagcggcagaagaacgatgccgccgatgcagaggccatctgtgaagcagcccagcggccgagcatgcgcttcgttccggtcaaggccgaagagcagcaggcgaacggcatcgtgttccgagcccgcgatctcctggtgcggcagcgcacccagtgcgtcaacgctcttcgcgggcacctctcagaatacggctacgtctttccgaagggcattacccatgttgaagcccttgtcgcggtggtcgaggatctgcagtcctcgctctccgacagtgtgcgtgccatcctaaagctgcttgtcgacaccttcaccgcgttggaagcgcagatcgcggttttggatgctgaaatcaaccagcgctcgaagtcagacccgacggcacgccggttgatgacgataccgggcgtcgggccaattaccgcgacggcaatcaccgcgctcgttccagcggccgaggggttcccggccgggcgcgatttcgcggcctggctcgggctgacgccgctgcagaaatcgaccggcggcaagccaaaactcggtgccgtttccaaacgcggtgaacggacgatccgccggctgttgatcatcggggcgagtgccgttgttcaacaggccagccggcgcggggcgcccaagggctcgtggcttgcgcagatgttggctcgcaagccgaaaatgctggtcaccgttgctctggccaacaagattgcccgcatcatctgggccctgctggtcaaaggcggcaactacaaaactccgaccgcggcagcgtaggctgacgacgatcgcgagaacgtgagggcgagcggaaggagagtatggcgcaacagtcggcgagacggggacaaccaggggtttccaccgtgcttcgagcacgctgtgggtgatttggacccggtccgcgaactcccatataggccggcggctgtctccctgccgcatccaaggccggacagatgacagcatccgaccacgcgcaacaacgaccccaacgttttcccttgcgtaaaggggggcgtccacaga

SEQ ID NO: 9236 - DNA, 1184 bp, unidentified
  source 1..1184: mol_type = unassigned DNA; note = element_e7462a3
  misc_feature 1..2: note = core
  misc_feature 3..203: note = LE
  misc_feature 204..1181: note = CDS
  misc_feature 1182..1184: note = RE
  misc_feature 27..181: note = bridgeRNA
tcctttagacttgtgctaactttagaattgagaaaaaggagaagggtaaactatgacaagctctgagcaaaactcatagcctgattaagaccgtctcccttttcatcaagaatcctcaaatagaaattcgggctcatgacccattatcaagaagttgagtgtctttatgcttttcccagttgttaaccattaaaaacaaatttatgaaaaagacttttattggaattgacgtcagcatggcaagtctggatgtgtttgtgaatgatgactcgggcaaaggctcttttgttatcgcaaacacgacaaaagccattagccgattttttaaacagtatgactgcgaaagtacctatgttgccatggagaataccggtcgctacaattggtcgatctatgaagcactagcctctttcaagggacatatctatgtagttcccccattgcacctaaaaaaatcaatggggcttattcgtggaaagaatgataagattgatgcggtgagtatcgcttcatccatcgaaaaaaaccatgctaacacccccgaatggaaacctcttccattggcaatcaaaaagatcaaaatcctattgtctgagagaactttgaggatatcacaaaagaaacaattagaccagcaactggccggctatcagctaatcaagagcacaggtcttgacaaggcgttgatcaaactcaaccagcagttggtacggggcttaaaatcacagattgatgctttggaaaaagaattacagggcataattcaatccgatgaaacactttctgcacaagcacggctcgtaggctccattcctggtgttggaaaggttctaacttggatgcttttgtctgccacagaaggatttcaaaaaataactgagccccgtaagtttggttgttactgcggagtagtcccttttgaacatcaatctggcacttccattcgtggcaaaacaagagtatctgtattcgctgacaaacgattaaagtccatccttcacatggcggccatgagggcgatacaacttaagaatgacctacaggagtattatcaacgaaaggttcgagaaggaaaaaacaaaatgttagttttgaatgctatacgtaacaaaatcatccatagggtatttgctgtcataacacagcaaataccctatcagttcaatttggttttgtcatagaaa

SEQ ID NO: 9237 - DNA, 1427 bp, unidentified
  source 1..1427: mol_type = unassigned DNA; note = element_e74793d
  misc_feature 1: note = core
  misc_feature 2..237: note = LE
  misc_feature 238..1416: note = CDS
  misc_feature 1417..1427: note = RE
  misc_feature 16..240: note = bridgeRNA
ctacttatagagaattgatgtacgaccgctgcccggccaggcttggtcgaggtgatcggtagggatgctcaggcctcggctgcccactcatatagcggagtgtggctctctcccggcatggaccctgccgatcaccgtggcgcggagtggcttaagaggggtttgaccagctacaagtagcgctgccctcccgtcggcacgtcatcgccggacaatacgggaaggacagatatcttcatggctcggatggttatcggcctcgatccccacaaacggtcagcgacgatcgagatcatcaacaaccaagaacgcgtcctgcaccagggcagataccgcaccgacagtggcggctaccaggcaatgctcgcggccggccggcgccatctcgagcgggtctgggcagtcgagggctgcaacggtataggccggcacgtcgcccagcgactggtcgccgacggcgagaccgtctgggacgtacccgccaaactagccgcgaaagcacggatcttcgacaccggccacggccgcaaaaccgacccgcacgacgcccaccacatcgccgtgacagccctgcgcaccccgaacctgcgacaggtcagcgccgacgacaccaccgttgcgttacgactgctggccgaccgccgtgaccaactcggcgtcgcccgcactgagaccgtcagccggctgcaccagctgctgctcgagctgatccccggcggcgcgaagaagaacctgaccaccgctcaggcacgcaccctgctcgacgccatgaccgtcaccaccgcggacatcgtcacgatcacccgccaccagctggccggcgacctgatcgacgagctcatcaccctggacgccaagaagaaaaccgccacccaacagctggacaccctgctggccactaccggcaccggactgaccagcctcaacggcatcgctacctccggcgccgcccgcctgctcggcgacatcggcgacatccgccggttcccgtcccgcggacacttcgcgacctggaacggcaccgcccccatcgacgtgtcgtccggtgacaacgaacaccatcggctcaaccgggccggaaaccggcgcatcaaccgcaccctgcacatcatggccatcgcccagctccgctacgacacccccggacgcgcctactaccagcgcaaacgcgccgagggtaaatccgcgatggaagccatgcgcgccctgaaacgacgcctgtccgacaccgtctaccggcagatggtcaccgacgacagagccgcacggcagacagcgacgggtccgggaggacacacgggggcgactacgaactccagcgcggccgacccaaaccccaagatcgacacttcggacaagtcacttcccgaacccgccaaccaccacactaaaacatcaacccccgacaccccttgacagaggggtgc

SEQ ID NO: 9238 - DNA, 1363 bp, unidentified
  source 1..1363: mol_type = unassigned DNA; note = element_e747bad
  misc_feature 1..3: note = core
  misc_feature 4..66: note = LE
  misc_feature 67..1098: note = CDS
  misc_feature 1099..1363: note = RE
  misc_feature 1112..1354: note = bridgeRNA
gttatgggatggcccgcccctcctacccaagtcaacgaaggcttccggaaagaggaggagggtacaatggaaatcgcagttgttggcatagacctagggaagaacaagtgcagtgtcgtcgggctcgatgccgcaggaaaagtagtgacacggcggcgcatgcagcgcgagagcgtgctcaagttcacggcgagcttgccgccctgcgtcgtcgcaatggaagcgtgctgtggcgcccatcatattggacgaattgttctcagccaaggtcaccaagttcgcctgatgtcgccggaatacgttaaaccctatgtcaaggcgcaaaagaacgatgaccgtgacgccgaggggactgccgaggcggccacgcgcccgacgatgcgcttcgtcgagttgaaaagccaggcgcagctcgacatgcagacactgcatcgagcacgggatcgactggtgggtgaacgcacggcgctgatcaaccagcttcgcgccattcttcttgagcgcggcatcgttgttgccaagggacgaagaaaactcgaagtggcactcgacgctatgctgactgagccagatggcttgcagctgacgccgagaatgctcgagctggtccaagacatgcgggcccagtggcggaccctcgatcaacggatcgaggcctttggtgacgagttcgccgcgcgagcacggagtgacgagccggcgcgtcttctatcgaccattcccggcatcggcgtcatcaatgcaaccgcgcttgtcgcggcgatcgggcgaggcgaggcattcgaccgcgcccgagaccttccggcttggctcggcatcgtggctcggcaagacaccactggcggcaaaccgcgtctcctcggcatcaccaagcgagggaaccgataccttcgcaaattgctcattcacggggcgcgggcggcgctgccgtcgctctcgcaaagcaacacgccactcggcgcttggttgcgaggtttgctggcccgtcgacaccataacgtcgccgttgtggcgctggcgaacaagcttgcaaggattgcctgggcggtcctccgcaccggtcgcccttatcacaccaacgccgtcgtttcagcgtaacccgagctgacccaaacacattagaggtgagcctggatcagccggcaaagtctgcgggaggtgtttcacgagatggcctgacagtcgaccggcgtttccggaaccctgatagacccaatggtgcatttgacaccgcgactgttatgaggaccggggcgcgcggatctccatcttggccaggaccagatcctgagaccggataggttggcgcagactgctcagatcggaccgtgcgaaattccccttgcagcggggcgggccatag

SEQ ID NO: 9239 - DNA, 1395 bp, unidentified
  source 1..1395: mol_type = unassigned DNA; note = element_e74ca01
  misc_feature 1: note = core
  misc_feature 2..96: note = LE
  misc_feature 97..1122: note = CDS
  misc_feature 1123..1395: note = RE
  misc_feature 1161..1393: note = bridgeRNA
taatggtatggaccctctccactccacttacggcttcaaatgagccaatatagggttgattaaaacttctatatacagaaaaagagagagggtcacatgagtactataacaatcggattagatatcgccaaatcagtttttcatttagtttggatgaacgcggcaggaaaagtattaaaaagaaaacagctttcacgcaaaaaagttgctgaatattttgctaatttagaagcctgtactgtcgtgatggaggcttgtggtagcacgcattattggtcacgcgtaataactcgttgtggtcatgaagtcaaagccattgcgccacaatttattaccgcttatcgcaaaggaaataaaaatgactacaacgatgctgaagcgatagccgaagcttcacaacgtcaaaatatgcgttttgtgccgctcaaatcactagcgcagcaagatattcaaatgctgcatagaatacgagaaaggttagtcaaaaatagaaccgcattgagtaatcaaattcgagggttgttagccgagtatggtttggttatgcccaaaggagtgaaccatcttaaagcgcaactacctggatttttagaagatgctacgaacgagttaagtacctctgctcgtcgttattttcaaggattaagcgaagaacttgatgacttatccgttcaaataaaatcagttgatagtgaagtcttgggtataaacaaacaaaatgaagtttgtcagcgcttgagtaccatgacaggtatcgggccaattgttgcaaccgctttttatgcgggtattggtgatggaaaagcatttactagcgggcgacatgtttcggcatggttagggttggtacccaagcaacattctacgggtggaaagccaacgttattggggatttcacaacgtggtaatacctatttaagaacacagttgattaatggcgcccgagctgcattgaggcactgtgaaaataaaaccgaccaagtgagtgtttgggcaaggcagttaaaagagcgaagtaactataataatgcgacagtcgctttagcgaacaaaatggcacgaatggcttgggcgatgctacatcaccaagaagattacaaatttaaagccgtaaagaattaatagaaaaatagttttagaaaacgaacaccgtataacaaccttgtaacattgctagataatagagattgatgggatacagttcagcactgccctataggaaaccttataataccaagggctataataagccgcggaattgatgaggtcataggagcggaaatccatcagggctagaggcatcaaatgatacctcatgcgaaagccgaatatatggctgcaatgcactctatttcaacgatttaaattgtcttgcaatcggagagggtccatata

SEQ ID NO: 9240 - DNA, 1175 bp, unidentified
  source 1..1175: mol_type = unassigned DNA; note = element_e753e87
  misc_feature 1..2: note = core
  misc_feature 3..204: note = LE
  misc_feature 205..1152: note = CDS
  misc_feature 1153..1175: note = RE
  misc_feature 3..180: note = bridgeRNA
cttgtatggtaggacttgaagggaggaggagggacaaagccggattctgactgttcgcgcagtacagaccgtgggagatttcacccctcctcctttcacccaagcgccgataaagaatgcttcaggctagaccgacgataggaacaagcctgcgcctctgggtgaccccttcaagtacccaaaccttatcccggaggatgcttaatggcaatgctggttcccgtctcaaaaccgatagtgggcgtagatgtcgccaagaatgagctggtgatctaccaggctgaacgcgatctgctggagaccattgccaacaccaaggcggccatcaagaagtggctaaaggcgttgcctggaactgtcaccatcgccattgaagccacgaacatctatcacgtgctttttgccgatttggcctatgaagccgggtgtgacatttacatgatcggtggctatgaactgagccactatcgaaaaggcgtgaatgtacgcgccaagaccgatgccctcgatgcccgcctattagctcggtacctgaaaaatgaggccgaggagttacatccatggacgccgccgtcccctctttatcgccagttgttgagcctgttccgtcggcgtgctgcattggtccaggcccgtaccagcctggttcaaagctgggccaatgagccgcttctgaaaacctcattcgccgctcaggtccgctcgatgcaaagactcgaagcgctcgtcgaaaaaatgatcaaggacctgctggaaaaagctggcttgatgggtcaactgaaacgctgcatgaaggttgaaggtattggttttttaacggctgcccggttgctggctacttttcagcgtggtgagttcaggggatgcgatgcatttatcgcctttcttgggatggacctgagggtgtccaaatcggggcaaaaggacggacgtcgcagcctgaccaaacgaggtgactcagaggctcgtcgactgctgcataacgccgccatgtctgccagccgtacagcgacctggaaaccgctctacgaagagctaagggcccgtggcttcagcacgactcaggcgttggtcatccttgcccgtaaattggcgcgggtggtgttcgccctgttaaaaaaccagagcgagtaccaatctaaagttgcttaagggcttccccgcaaccatagaat

SEQ ID NO: 9241 - DNA, 1372 bp, unidentified
  source 1..1372: mol_type = unassigned DNA; note = element_e7604b3
  misc_feature 1..3: note = core
  misc_feature 4..81: note = LE
  misc_feature 82..1110: note = CDS
  misc_feature 1111..1372: note = RE
  misc_feature 1084..1359: note = bridgeRNA
tgatggcgtggatgccccctcccgtcagcgcatcgacatgccaatgtcgggccctataggagccaagagaggagaacttccatgtctgacgttgccatcatcggccttgatctggccaagcgggtgttccaactgcacggatcgaaggccgacggctcagttgcattccgcctcaaattgccgagggcgcgcgttttggacttcctcgcatctcaaccgcggtgccttgtcgcgatggaggcttgtgccagcgcccacggctggggacgggagatcgccaagcttggccattcagttcggctcatccctccgatctatgtgaagccgttcgtgaagcgacagaagaacgatgccaccgatgcggaggcaatcgccgaagcggcatcgcggccaaccatgcggtttgtcgccgtgaagtcccaggagcagcaagcgcgtgccatgctcttccgcacccgagacctgctcgtgcgccaacgaacccaactgatcaacgcgctgcgcggccatctcgccgaacatggtgtcgttgcgccaacgggagcggcgtatctcaatcgcctggccgcagcgatcagcgacgacaaggccgccctgccggaacccgttcgtgaacttggcactctctaccttgaacagatcgagacgctgagcgcccgtgtggccggcctcgatcggcagatgcgaaagaccgctgccgaagcggacagcacccgcaggttacagactatgccaggggtcgggccgatcacggcgatggcgatcgagaccttcgcgccgccaatgaccgtcttctgcaggtcccgcgactttgccgcatggctcggtctcgtcccgcggcagcactcgacaggcggcaagcagcggctgggagcaacatcgaagatgggccagcgcgacatacgtcgactgctcatcacaggagcgatggcggtcgtgcaacatgcaagccgcaagggagcgccggacggcagctggctcggccgaatgctggcccggaagccgcgcatgctggtggctatcgcgctcgccaacaagatggcgcgcggcctttgggccatgatcacgacaagcaaggacttcaagaatccggcgatggccgcagcttaagggcaggtcgtgtcggacacgcgggggtgtgaggaggtcgacggactgtaagggcaatcgatcggcaaggtcgggagcagacaaagcagggtgattcagtggaccccgaagcccgagagtttgatgtgcctctgctccgcgcatagccataccggccagcggccatgatcagcgccgcatcttcaggcctgacacatgaaagcaaccgatcacatgctcaagctgtccgaaaacaccttgcaccaacgggggcatccacaca

SEQ ID NO: 9242 - DNA, 1451 bp, unidentified
  source 1..1451: mol_type = unassigned DNA; note = element_e76917e
  misc_feature 1..2: note = core
  misc_feature 3..171: note = LE
  misc_feature 172..1200: note = CDS
  misc_feature 1201..1451: note = RE
  misc_feature 1236..1424: note = bridgeRNA
agatggggtaacgggcccggtccgccttccaagcaagccgcgcttgctacggcgctgttgggtggcgcgcttcgcgcggcttgcttggaaggctggcggtcgtccctcacattgatggtgtaacggagtcagagggatgaacctcgctccaagcatcaaggagagacgaccatggagcattatgcaggaatcgacgtgtcattggaatactcgagcgtgtgcgttgtggatgggaacggcaagattattcgggaaggcaaggtaacgagcgaaccgggagcaatgatcggctggctgaggtctcagggccacaagctgggccggatcgggctggaagccgggcccttgtcgcaatggctgtttgcggcgatgcgggaagcggggctggcggtcgaactgttggagacccggcacgtgcggaaggcgttcgaggcgatgccggtcaagtcggatcgcaacgatgcgcgcgggattgcgcaactgatgcggctgggctggttccggccggtgcattgcaagtcgctcagcgcgcaggagacgcgatcactattgaccgcccgcaagctggtgcaatcgaagcttcacgatgttgagaacagcctgcgcgggatcctgcgcggttttggcctgaaggttggcaagacgaccgagcggaagttcgcgggacggatcgaggaactcgtggcgggccatccgcatctggagatgatcgccaaggcgctgctggcggtacgagcggtgctgcggaccgagttcgcagctttcgagaagcagacccgcaggatggtgcaatccgacatgcaggcgcggctgctgacgtcagtcccggcggtcggcccgatcgtggcgctgacctatgccagcgcgatcgatgatccaacccggttcaaatcgtcgaagcaggcaggagcccatttcggattgaccccgaagaagcatcaatccggcgagaccgattacaccggccggatcagcaaactcggtgacgcctcggtgcgcacggcactctacgaggccgcccacatcatgctgaccaagccggtcaaaggctgttcacagctgaagagctgggccatgcggatcgccaggcgcgccggcatgagcaaagccaaggtggcgctggcgcgtcggctcgcggtgatcatgcatcgcatgctcgccaacggaacaccctttaacgccgctgctgcggcagcctaacaggaaaggcgaaatagttttcgggcgggtcacgacaccaggccttctcgaagcgaagtcccttcgccgggacgatggatcaggtcaggccgttgcccaccaggtcgccctcgtgagcacgcgaacgtagattggtcgacctatcctcttccaaccccatcaggtggcggccccgcgccgaccccgtacagaagcgagaccccggcgagcggacaacgcaaagggattgactaatcgaagcccgttacaga

SEQ ID NO: 9243 - DNA, 1505 bp, unidentified
  source 1..1505: mol_type = unassigned DNA; note = element_e773139
  misc_feature 1: note = core
  misc_feature 2..228: note = LE
  misc_feature 229..1485: note = CDS
  misc_feature 1486..1505: note = RE
  misc_feature 11..240: note = bridgeRNA
ctaattgaagtcatgggcgctgcggtctgccgtagggttcgggaggcccagcgggctggctcccgaaccgcctgccggtcacgctggtggcctggcttgatatcgaggtgccagcctgccgggccgtgccgtggcgtggttcgaaagaggcgcgagcgccagcactgtaattaggcatgcccgccgcggcctcccttcggttcggtacgagtggccgggagtgtgctgatggcggaagtgatgatcgggatcgacccgcacaagagctcgcatacggcggtggcgatcggcacgggtgaggaggcgctgggcgagttgcaggtgcatgcctgcccgtcccaggcggagcagctgctggcgtgggcggcggcgtggccggagcgggcctgggcggtggagggcgcggctgggctggggtgcctgctggcccagcagctggtcggcgccggggagcaggtgctggacgtgccgcccaagctggccgcccgggtgcggctgctgcaggccggggacaccaacaagaacgaccccaatgacgccttgtcggtggcggtcgcggcgctgcggtccccggccccgcgtccggtgctcgccgaggatcatgcggtggtgctgaaagtgtgggccaagcggcaccgggacctggcccgagcccgtaaccaggccgcctgccggctgcacgcggtgttgtgcgacctggtcccgggcggcgtccgtaaggagatcagcgcaggccaggctgcccgcgtgctcgaacgggtcaccccagcgggcgctgctgcccgggcccgctgcgagctggccgccgagttcctcaccgacattcgccgcctcgatgcacagctgcgcgacactaacaagaagctggccgcagcggtcaaagcctccggcaccagcctgaccggcctgttcggcgttggcccggtcatcgccggcaccgtgatcggtgacgtgcgccaggtgttccggttcggaagccgggatcacttcgccgcctacaacggcacagccccggtcgaggtgtcctccggcggccggaaggtctaccggctgtcgctgcgcggcaaccggcggctcaaccatgcgatccacatggccgcggtcacccagctccggtacaagcacagccagggccgcgcctactacgagaagaaactggccgagggcaagacgcacaaggaggcgctgcgggcgctcaaacgccggatcagcgacgccatttacgcggcgctggtggccgacgcccggcgcgccgcggacaccagcccccagggcccgggagggcaaccggggaacggctctgactccagcgtggccggctcacaccccgagcaccggctcttcggacaagccactcccgggcctgccaccaccatacggcccagcgccacggcaggtaccgcgccgacgcagccgaccggagcacttcaccgccaggccgggcgctccccggccgcttcgaagaaatccccgacaactgcttgacaccaacagcaaagaggact

SEQ ID NO: 9244 - DNA, 1224 bp, unidentified
  source 1..1224: mol_type = unassigned DNA; note = element_e777e8b
  misc_feature 1..2: note = core
  misc_feature 3..237: note = LE
  misc_feature 238..1209: note = CDS
  misc_feature 1210..1224: note = RE
  misc_feature 6..212: note = bridgeRNA
cttgtatctcgactcctcctcgaaagaggagatagtctccgactgatcatcgggggagggtttggaagccgggcacacccttaggccgttgagcctgctttgtagatggtgctccagccctccacactcactcgaaaagtccgaacggtatctaaggccacgcttcatgcgggagccagtattcacaaggtaggaccgagtgcagtgatgatctatccagcgagatgaggagagattatgagcagcatcatcggcgtcgacattgccaaagacagcttcgacatcgccactttgcaagccaatggtaagtatcggaccaaggccaagttagccaataaattggccggttttgaggttcttgagagttggctggaacaacatagcgaaccaggagcctggatcgtgatggaggctacgggcatttatcacgaagcgctggccgagtatttgtatggtttggggttcaaggtctgcgtaatgaaccccgcgcagatttcgagttatgccaagagccaactgcagcgggtcaagaccgataaagtcgatgcaaagctgattgccgattacggcttgcgccatgttgatcagttacgagcttggcagccggagcctaaggcaacaaagcagttacgtgctctgcttcggcgcctaaaagacctgcaagagttccagcaaatggagcgcaaccgcttggaagtagcgtctagcaatgtgcgcccctcgattgaagccatgcttgaacacacggctgctcaaatcgccgaaaccgagaaacagatccgcgaccacattgacgacgaccctgatctacggggcaagctcgatttgctaacgaccattgatggcatcggcaagcttacggccgctcaattgttggctgagttaggagatccgctgagatttgccaacgcgcgcgctataaccgcattcgcaggcttaaacccgcggctccaggaatcaggtaaccagcgaggtcacgtacggatttcccgcgtaggctcgtcgcgtttgcgcgcgtgtttgtacatgcctggggttgtatcactgagctgcaatgcggcggtccaggccatggctcaacgcctgcgggagcggggcaaagccggcaagcagatcatttgcgcggcgatgcgcaagctgttgcacatcgcctacggggttctcaaatcgggacagcccttcgatgcgcaaaaggcgcttgcccactgatgggcaagacggtat

SEQ ID NO: 9245 - DNA, 1096 bp, unidentified
  source 1..1096: mol_type = unassigned DNA; note = element_e77d8e8
  misc_feature 1..2: note = core
  misc_feature 3..220: note = LE
  misc_feature 221..1075: note = CDS
  misc_feature 1076..1096: note = RE
  misc_feature 63..231: note = bridgeRNA
cttatatctttcagatcattcaaacttcagtggtcaaggcgtggttgccagccttgattgctgaactggttgactcaccaccgtgcagcctgtgtctcctgcgagcccgagctcgaatctcagcccagggcgcacggtggtggtctgtttgttctgccgcatcccgaatggttgaccgaacacatttcgtattcataaggctgggagccacaggacttgtatgagtgaacccgtttatgtaggtatcgacgtggccaagcgcaccttcgaggtggccaccactggtcaagcacagaccttcagtcttggcaacgatgaggccgggcatgcccagctgtgccaactgctggcgccgctgtcgccgcgcctggtgctgctggaggccactggcggctacgagcaggacctggcgcttgccttgtccgcagcaggcttgcgtgtgtcggtgatcaatccgcgccaggcgcgcgactttgcccgttgcatgggcaaactggccaagaccgatcgcatcgatacgcaggcgctgcgcggctttgcagccttgctggacgcccagggtcacgagccgcgcatgctggccgacgagcagcagcgcgagttgaccgccctggtggtgcgccgccgccaactcgtagccatgctggtggccgaacgccagcgactggccctggcacaccacgccgatctggcggccttgctgacctcggtcaagggcgtgggtcccaccacggccagcacgctgctggcgcaactgcccgagttgggccagctcaatcgcaagcagatcacctcgctggtgggcttggcccccatcaatcgggactcgggcacgctgcgtgggcagcgccacatcttcggtggtcgcgccgacgtgcgccgcgtgctgttcgtggccgccttggtaggcacgcgcttcaatcgcgtgctcaaagccttctatgcaaggctgctggccgccggcaagcccaaaaaggtcgctctgctcgcctgcatgcacaagttgttggtcatcttgaacgccatcgctcgcaccaagtcgccttggcgcaacgaacttgctgaagcggtttgactttgtcattcaagatggttg

SEQ ID NO: 9246 - DNA, 1493 bp, unidentified
  source 1..1493: mol_type = unassigned DNA; note = element_e78529a
  misc_feature 1..2: note = core
  misc_feature 3..246: note = LE
  misc_feature 247..1473: note = CDS
  misc_feature 1474..1493: note = RE
  misc_feature 13..242: note = bridgeRNA
ctaatgagatttgggagtgagccatccggcagactcctggtggataggcagccgccggcgggtgagcactcgttgctcctggacgttgagtcctgacgaaagatcgtgcccctgccggtcggttgggagagttgatcgctgatgggatgtcgtgcccgcctggttgcggcgtgagcactgcttcattaggtcgctgatggttctcccgctggctgctgaggatcggcgtcgaggacgggagatgcggtgctgtttgttggggatgactgggcagaggaccatcacgacgttgagctgatggacgccagtgggcgcacgctggccaaggctcgcctgccagagggtgtcgcgggcatcgcgcggttgcacgcgatgatcggtgagcggcttggtgagggcgccgaggacaccgccgggctggtcaagattgggattgagaccgatcggggcccgtgggtccaggcgttgatcgccgctgggtatacggtgtttgcggtcaacccgttgcaggcggcccggtatcgggaacgcctgggcgtgtcgggcgccaagagcgacgcggccgacgcgcacatgctggccgacatggtgcgtaccgatgcccaccagctgcgtccggtcgcgggtgacaccgccggggccgaggcggtcaaggtggtgacgcgtgcgcacaagacgctgatctgggaacggacccgggctggacagcggctgcggcacgcgttgcgggagtattttcccgcagcgttggaggcgttcgaggaccttgacgccgccgacgccctggaactgctggccaaggcccctgacccggcgagcgcggccaggctgagcaccgcgcagatcagcgcggccctcaaacgcgcccgccgccgcgacatcgccgtgaagaccgcgaagatccaggcggtgctgcgcggcgagcatctcgggcagcctgccgtggtcgcctcggcctacgccgtctcggttcgtgcgctggtcgcggtcctgggcacgctgaacgagcaggtcaagatcctgcaggagcaggtcgaggcccattttgggcggcacccggacgctgagatcatcctgtcccagcccgggctgggtgcgatcctcggtgcccgggtgctcgcggagttcggcgacgagcacgaccggtacgcctcggccaaggcccgcaagaactacgccggcaccagcccgatcacccgcgcctccggcaagaagaaggtcgtcgccgcccggttcgtgcacaacgatcggctcatcgacgcgctcatgacccaggcgttcgcctcgctgcgggtctctccgggcgccagggcttactacgatcgacaacgcgcccgtggcgccgacgacaacgccgcgttgcgccagctcgccaaccggctcgtcggcatcctgcacggatgcctcaaaaccgacacaccctacagtgaggcgaccgcctggtcgcatcacctcacagagtctgctgcttgacattcaagctcctgggatgt

SEQ ID NO: 9247 - DNA, 1407 bp, unidentified
  source 1..1407: mol_type = unassigned DNA; note = element_e78d960
  misc_feature 1: note = core
  misc_feature 2..90: note = LE
  misc_feature 91..1128: note = CDS
  misc_feature 1129..1407: note = RE
  misc_feature 1176..1402: note = bridgeRNA
taatggaatggacgcccccgtccgaaacggcatcgatgtgccaaagtggtaagtgcgtcgaagcacaacctcatcgaagggggcgtcatcatgaacgttactacagttgggatcgatctagccaagaacgtgttacaggtgcacggcgtgaatgagcacggtaagccagtattgaagaggcagctcaagcggcaccaggtggcaatgttctttgccaacctgccatgttgcctgatcggcatggaggcgtgcggcagcgcccacttctgggcccgtaagctgcaaggcttcgggcatacggtacggttgatggcaccgcaattcgtcaagccctatgtgaagacgaacaagaatgacgttgcagatgctgaagccatctgcgaagcggtggcacgcccaaacatgcggtttgttcccgtcaaaactgtcgaacaacaggctgtactggcattgcatcgcgctcgccaaggcttcgtgcgtgcgcgcactgcgcaggctaaccagatccgcgggttgctcggtgagtttggtcttgtgatcccacaggggattaccaacatcgcccaatgcgtaccggcactaatcgaagatgccagcaatgaattgcctggatcattccggctgttgatacagcgtctgacggatcacctcaaggaactcgatcgacaagttgacgagcttgaaacgctgattaaggtgtggcaccgcgctaatgatgccagtcggaagcttgcggagatccctggcatcgggccaatcacggcgagcgccttagtggcctccgtaggggatgccaagtgcttcaccaatggtcgccaattagcggcctggctaggtctggttccgcgacaacattcgagcggaggcaagtcgacgttgttgggcattagcaagcgcggtgatagctatttgcgcacgctgatggtacacggggcgcgggctgtggttcgctattcggcaaacaaaaaggatccatcctccgcctggcttcaaagcctgcaggcgcgccggcacaagaatgtggctgtggtggccctggccaacaggaatgcccggattgtttgggcattgctgactcaaggacgtacgttccgaccagattaccccccggctgtcgccggcgcgtagtctggtcggtttggctagcaacatagggaaacgttatagaggttcctccagcgattgcttaggcagtcatgacgtgatggcaagataggtcggaccgggatcggaatactctgtcctctcacaggcgcttcgagcgcgaggtggtgaaaagagcccgatcagcagattccatcagggacagagggcaattacctcgcaaaagtccggatgtatggccgcaatctcaaccctgtctacccgtcatgcgtgaaggcttggcaaatcgggggcgtccatgta

SEQ ID NO: 9248 - DNA, 1363 bp, unidentified
  source 1..1363: mol_type = unassigned DNA; note = element_e796191
  misc_feature 1..2: note = core
  misc_feature 3..74: note = LE
  misc_feature 75..1103: note = CDS
  misc_feature 1104..1363: note = RE
  misc_feature 1079..1351: note = bridgeRNA
tgatgatgtgaccgccccccgacggcatcgatgtgccaaggtgggtctgcgaggatccacataggaggacggtcatgtttgagattaccacggtcgggctcgaccttgcgaagaatgtgtttcaggcgcatggcgctgatgtttcggggcgggtagttctgcgcaagaagctgagacgggatcaggttctggccttcttcagtcagctgcgaccctgcgtcgttgccatggaagcatgtgggggcgcccacttctggggccgcgagatcgggaagctcgggcatgaggtgcggttgatcccgcccgcctatgtcaagccgttcgtcaagcggcagaagaacgacgcagccgatgccgaggcgatctgcgaggctgcccagcgtcccacgatgcggttcgtgcctgtgaagagtgaagagacacagggggctgcgatggtcttccggatccgcgagctgctgatccggcagcgcacgcagatgatcaacgcgctgcgcagccatatgggcgagttcgggcagaccgtgccgcaaggcgcagccaacaccgcgcggctgatctccatcgtggaggacctggaaagcggattgcccgccgatgccaccgcgaccttgaaggttctggtcggtgccctcacccatgtggagacggagatcagcaagcttgatgccgagatcgcccggcgtgccaaagagaacgaaattgcgcgccggttgatgacggtgcccggcatcggtcccttgatcgccacggccatcgccgtcttggctccgccgccggagacattccgcaaggcgcgcgacttcgccgcgtggctcggcctgacgccgagacagcattccaccggcggcaagcagaggctcggggctacgacgaagatgggtgagcgatccctcagacggctgctgatcattggagccaacagcgtcatcatcgaacggcatgtccatgccgcggcccagcccggcacttggctgggagagatgctcaagcgcaagccaccgattctggttcgagtggccctcgcgaacaagatggcgcggatcgtctgggccttgatggccaagggcggcgtctaccggtctccggccgcggcggcataagccggtcgtcggtcgcgaggacgtcggagcgaaagagggcaaggacaagtttggcgcaacggtcgtgagacgggatcgggaaacccagggtgcaacagagtgccttcgagcacgcggctttgatctggacccgacctgcaaacaccatacgggcccgcggcatatacatggccgcaacagaggccggacacatgtcagcacccaatgacgcgccagaaccagctccgaaaaacccctcttgcgcatggggcggttacaca

SEQ ID NO: 9249 - DNA, 1190 bp, unidentified
  source 1..1190: mol_type = unassigned DNA; note = element_e79a0d1
  misc_feature 1: note = core
  misc_feature 2..322: note = LE
  misc_feature 323..1180: note = CDS
  misc_feature 1181..1190: note = RE
  misc_feature 33..197: note = bridgeRNA
ttgtctctcaaatttatggtttactgttggggaagctgggcgcgagcccggaatggccattccggggctggcgcggcaaggcgcccgtacaggaataggtttcaacgaccgacctcatgaagggactttgccgctccagcttcgcatcgcttgctgacttgaatgggctatccgttggacacgcccgcagacaattcgaagcatggaacccgattatgacggcagaacacaccgaaatccagttcgtcctcggcctggacgtttcctgcaacaccgtcaccctgtatgacgacctgcaccctgaccgtcgccaacgacgccgatgcactgcgcacagcactgcaaccgtaccaggggcaccgccacgctcgcggtgtgcgaagcgaccggcggccatgaggacaccctgctcggcgcgctgctggaactggctattcccgcccatcgcgcggatcccgccaaggtcaaggcttatatcggatccttcggcaagcgcgccaagaccgatccgatcgatgcccgctggctgtcccattatggccgagacggtgccgcagtcctgccgcgctggcagccggccgatccctgccagcagcaatttgcgctcttcgtcgcccgccgtctcgacctcgtcgccatgcgagtgcaggagaaaaaccgaatgaaagccccgcgcagccgcctgatcgccgacaatatctcggcccgtctcgccgaaccggaccgccctatagaaactctcaatgcacagatcggcaccctgatcgccgaaagccataacctggcgctgcgagccaaggcgttgcgctcggtgcccggcatcggaccggtgctggtgtcgctgctcttggccgtcatgcccgaactcggcagcctcaaccgcaggcaggccgcaagccttgccggctgcgccccccatcccaaggacagcggcaaggccagttggcaccgcagtaccaccggcggacgccgccagatcagaccggcactctttatcgccgctctcgccgcctgccgtggcgacaatcatctcgccatcgcctacaacgcactgcttaacaccgcaaaaccgaaacgcgtcgcgcttaccgccatcatgcgtaagatcatcaccatcgcaaacgcccgcatcagggacgctttaaatcagcaaaacgaaacaacagaaattcacgcttaaactgacttgg

SEQ ID NO: 9250 - DNA, 1415 bp, unidentified
  source 1..1415: mol_type = unassigned DNA; note = element_e79a2a0
  misc_feature 1..2: note = core
  misc_feature 3..210: note = LE
  misc_feature 211..1164: note = CDS
  misc_feature 1165..1415: note = RE
  misc_feature 41..216: note = bridgeRNA
cttgtatcagcgagctcggttatagtggcttcgttccgtaaggaatgggcccggcctggacggctacccaaaccgggccccccgatcgtcggatcgtaacccatcgaagcagatgagctgtagttcgtagcaagatcgcgatcgggtcttcatcgagtcccgtatggttgaaggaaccaagggttcgcattcaagggaggttcgaggaagatgaagaagcatagcatgatttgcgccggcatcgatactggcaagcgtaagctcgatgtcgcgctcaatggccaggcggagcgcctgcaggtcgccaacgcggatgccggttaccgggagctgatcgcctggttgcggcggcatcgggtgaagcgcgtcggcatcgaggcgagcggcggctatgagcaggccgtcgtcaaccggctgcgtcgtgatggcttcctggtgatcgtgttccagccgatgcaggtgcgtgcctatgcgcggtttcacctgcagcgggccaagaacgacaggatcgacgcggccttgatcgcgggctgcgcggcggaggccaaaaagatccatgctccgccggatccgcgcctggcggccctggccgcccagcagacgctgatcgaccagatcgtcgaccagatggcgcggttcaagaactatcgcgaggcctgccgcgatgcgccgttgcggcagttctggaatgacgagatcaagcgattccgcgggcttttcaagcgggagctcaaacaactggtcacggccatccgccggcaccctgatctcgccgagcggcttgagctgatcgccagcgtcgatggcatcgccttgcgcaccgcgaccgccatcctggtgcgtctgcccgagatcggctcagtcagtcgcgagcaggcggcagcgctggcgggagttgctccctacgatgacgagagcagcgaccggatcggcgagcgtcacatcgcgggaggccgtgagcgcctgcgcaagaacatctatggcgccgcgctggcggcatcgttccattggaatgccgagctcatcgagctctaccaacgtctgaccgcggccggaaaggaccacaaggtcgcgctcatcgcctgctcccgaaagctcctggtcttcgccaatgcggtggtcgcccgcggcacgccctggcaaccacgcaccgctgtccattgacgccatcgggtgcgaggcgcggataaatcgctccgccgcttcggtcagtttctttgttcgacccgggaccgtttcttcgtcccgacctgccatgtcgtgacgacggcgcgcgcagacgccgtcaaggctggccgtcaccgcgctggtgccacacgcgccggctccgacaggccacgccttgacgccggcgagcacgccgtcatcctgcacatggtcgggaccttagtaccaagaccccgatctaatggttg

SEQ ID NO: 9251 - DNA, 1500 bp, unidentified
  source 1..1500: mol_type = unassigned DNA; note = element_e79c17a
  misc_feature 1..2: note = core
  misc_feature 3..256: note = LE
  misc_feature 257..1480: note = CDS
  misc_feature 1481..1500: note = RE
  misc_feature 6..253: note = bridgeRNA
ctaatgggagataccaggtccagccgatccggcagacttggtaactggtagccgccggtgggtgaacactctcgccgaccggaccgttgtcgagccctagggtcagatcgtgtcctcgccggcgtgccaggaggtctgcatcgctgatgggatgtcgtgcccgaccagaagatcgtgagcacttgaccattagtccgcgaaccgacgtcctgcaggctgccccgaccgatgctcgacgttcgacggaggtggcacggtgttgttcatcggagacgactgggcagaagaccaccatgacgtggaggtccaggacgatcagggccgggtgctgcgacgcgaacgattaccggaagggatcgcagggatcgaggggttcggggaactcgtcggccggttcgccgaggaggacaccgatgtcaccgacgtgctggtgtgcatcgaaaccgaccgcggaccgtgggtgcaggccctgctggccgccggctaccgggtattcggcgtcgacccgaaacaggctgcccggcatcgggagatcctcggcagttccggcgccaagagcgacaagggcgacgcacacgccctcgccgacatggtccgcacccgccggcatcaactgcgtcaggtcgctgccgattccgaggtcgcggaggcggtcaaggtcgtcgcccgcgcccaccagacgttgatctgggaacgtacccgacacatgctgcgtctgcgggtggcgctgcgggactacttccctgccgcacttgaggcctacacgccgttcgggctcacctccacacccgtgttgaccctgttggcccaggccccgaccccggaggccgcagccaagctcaccctccggcagatcgccgccgcgttgaagggacgccgcggcatcgacgccaaagcggcggcgatccagcaggtactgcgcgccgagcacctcggccaacctgccgcggtggccacggcatatgcggcgacggtccggtcgctcgttgcgatcctgacgacgttgaacaccgagatcgcgaacctcgagaaagatgtgacggcgcattttggccagcacccggacgctgagatcctgctcagccagcccggtctcggcgtcgttctcggtgcccgggtgctcgccgagttcggtgacgcgcccgggcgctacgccagcgcgaaggcacgcaagaactacgccggtaccagcccgatcaccagagcatccggcaagacccgtgtcgtctccgcccggcatgtgcacaacaaccggctcctcgatgccctgcacatgcaggctgcgtgcgcgatcctgcacgacaaacaggtgcggctctactacgaccagttacgtgcccgcgatgtcggccacaacgccgcactacgacaggtcggcaaccggctcgtcggcatccttcacggctgcctgaaaacccacactccttacgaccaggcgatcgggtgggcacaccgcgaggctgccgccgtcgctgcttgacgtcaaaggttcagggatgt

SEQ ID NO: 9252 - DNA, 1339 bp, unidentified
  source 1..1339: mol_type = unassigned DNA; note = element_e7a052a
  misc_feature 1..3: note = core
  misc_feature 4..224: note = LE
  misc_feature 225..1190: note = CDS
  misc_feature 1191..1339: note = RE
  misc_feature 39..200: note = bridgeRNA
cattgtatattcatattttattattacctttgcactcgttaacaacatcgaggaagtggaataaggccgatgcttcattcgtcataagacagtgcgatatgttctgcccccactccttaacatccgaatccggacagttcattgggctttgaccccgcattttgcaatgatggatccaagatgttttgatgttgaatgtttaattttaatattaatttataattatgacttacattggtattgacatcagcaaggacactttcgttgtagcttattctccaaacaagaacagcaagacgaagactttcaaaaacaccactaaggggattcatgagttcatcaagaccatctccaaggaagagcaccattgcgtcatggaggcgactggcaattacagtgccctgcttgtgtatctgctatcagaagcaggtatcactacaagcctggagaatccgcttaaagtgaagaactttgcacgtgctatgctatccactgtcaagacggatgagatagacgcccgtctgattgctctttacggagagaaaatgaaccctgcgccatacaagatgcgcagtgacgccatactcacactcaagcagaagagaacagtcattcgccaactcaagaaacagctcattgccacaaggaacctcaaaggctccatggaggcactgccgttctttgatgccaagtgcaagaggtctgtcgagaagacaattgcattccttgagaagcagattaaagacctcgaagaggaccttgcaaaccttgcatgttccgagtacaagaagcagatggacctactcacctcaataaaggggattggtgtcactcttgcagctgcactcataataactactggcggcttcacatactttgataatgccaaacaactcacccgttatctgggattgtcaccaacatatcagcagtccggcacttctgtcaatttcaaaggccacatcaaccgcaacggagactcttatttaagaggtcagctctacgtagcagcgttctcttccatactatataacgctgaatgtaaggcctgttatgaacgtttgcggtctaaaggcaagcatgggaaagtcgccctaattgcagcggcaaacaaacttatccggcaggcttttgctgttatcactcaagataaaccatatatcgatggttatgtatcttcaaagaattagttcctgaacaacctcagagtctctcaggatagaaaatctaatacctgaaaacaccgaggggtttgggggcgagtagcccccatctgaacctacgaaccaataattagtgttaataattattaaaatatatcagttttctaattacagtt

SEQ ID NO: 9253 - DNA, 1305 bp, unidentified
  source 1..1305: mol_type = unassigned DNA; note = element_e7aab40
  misc_feature 1: note = core
  misc_feature 2..265: note = LE
  misc_feature 266..1258: note = CDS
  misc_feature 1259..1305: note = RE
  misc_feature 53..254: note = bridgeRNA
cctttggtctaacaaaaagagttttagtaaatactgttgttgttaggatggggggtctggggggtgttaaaaactaaaaactttgtgaataacgttaacataaaagacaggggtgaacttgaccaccctctagttttcgagaactttacagagtataagtcccctgccttttatgattgcccaaggcccagctagaatactttctttgcttcaacaaaggtaattggcaaaaggcaatttattagatactttaaaaagtaaacgtatgaaaagctttaatgttattttaggtgtcgatgtgtcaaaattaacgcttgacatctgctgtgctgaacgtaatctgcatgttaaaattgacaattgctccaaagggttttgcgtattaaaaaaatggtgtaaaacaagtagtatcaatctagaggaaaccttaatcgtgctggaattcactggtgggtatgaataccggttcctccaattctgtgagtcattatcaatctcctactgccgggtaccggggctgcagatcaaaaaatcacttggcatgatcagggggaagagcgaccaggctgatgcattccgcatcggggagtacggtgaagaaaaaatcaaaaaattaacgccatcaaaccctgtggataagaacatcttagaacttaaacagttactctcgttccgaaaaagactggtacgcgaaaaggccgggctggaaagcacggtcaaggaacggaaacatatgtacccccaaaagaaagctgataagattacccacattgcccgggcaaaaataaaatcagatgagcaacatatcaggcagatagaacaacagatcatagaagtaattaaaagcaatgaggacatgtggttaaactaccggataataaccagcattaaaggaatcgggaagataaatgcatggatgacgatagcctataccgagaacttcaccagcttcacagatccgcgaaaatatggcgtatatgttggtgttatcccgtttggtcacacctccgggaccagtattaaaaagcgggacaaggtaagccacctggccaataaagcgttaaaatcagaactaaaccaggcagccagggcagctatcgcgcacgaccctgagatagcggcgtacgcggaaagaaaacttaaaaacaaagaatatcgcctggtactaaacaatgttaaattcaaattgatcctaagaatgttctcactggtaaaaaggggtaaaatgtatgtggagaactatcaaagagcagcatagaaagccttttttgaaaatagatttggaaatatgataaacctagaata

SEQ ID NO: 9254 - DNA, 1166 bp, unidentified
  source 1..1166: mol_type = unassigned DNA; note = element_e7ae38a
  misc_feature 1..2: note = core
  misc_feature 3..200: note = LE
  misc_feature 201..1151: note = CDS
  misc_feature 1152..1166: note = RE
  misc_feature 23..184: note = bridgeRNA
cttgtatcttgaaaccgcttcggtgagagccgaggcaagcgttgtgggacgtgatagaccgatatggcctgggtccgcgagaccgtgcattagccctggtcgtcacgtcctgcccgccacaacccgaacagttgccggggccgcagagcccgcatcagcaaggctgggtcaaggcggggtactccatctgaggagaggtgatgcccaaaccgctggtctttgtcggcattgatgtggcccaggccacgctcgaggtagccgtccggccaactggcgaggcctggcaggttgccaacgacgaaaccgcattcagtgatctgatcgaacgactgcgagagatcaaacccgtcctcattgtgttggaggcgaccgggggaatccatctgccggtcgtggctgctctggccgcagccaagctgccggtcgtggcagtcaatcccaggcaagcgcgtgatttcgccaaagccacgggcaaattggcgaagacggaccgtatcgacgctcaggtcctggcgcattttgctgaggcagtgcgtcccgaagtacggcctctgcccgatgtagcgacgcaggagctggcagtcctggttgctcgccgccgccagctgatggagatgcgcgtggctgagcagaaccgctcccgcggtacaccagcccgcatccgtgcacagatccgcgaacacgtcgagtggctcaatcgtcagatcaatgaactggatcatgagatcggccagcgcatacgctcgagcccggcctggcgggagcgagacgatctgtaccgctcaacacccggcgttgggccggtgctcagcgcgaccctgttagcggacctcccggagctcggcagcgtctctcacaagcagatcgccgcccttgtcggactggcgccgttcaatcaggacagcggcaagaagcgcggacaacgcgtgatctggggcggccgcgcgagtgtgcgagccgcactgtacatggccaccctggtagccaccaggcgcaatcctgtgatccgcaccttctaccagcgccttctcgccatgcataaacccaagaagctcgcgctcaccgcctgcatgcacaagctgctcacgatcctcagtgccatggtccgacatcacacctcgtggtctgcgcctgtatcagccagtgcttgacaaccaagacagttg

SEQ ID NO: 9255 - DNA, 1361 bp, unidentified
  source 1..1361: mol_type = unassigned DNA; note = element_e7af965
  misc_feature 1: note = core
  misc_feature 2..69: note = LE
  misc_feature 70..1101: note = CDS
  misc_feature 1102..1361: note = RE
  misc_feature 1115..1351: note = bridgeRNA
tatggaatggctcgcccctccttcctggcgcattgttgctcaggatccatcaagcataggagtagagcaatgcagatcgcaattctgggtatcgaccttgggaagaatagctgcagcatggcaggtctcgacgaagcggggcgcgttctcctgcgccgtcgcgtgcggcgtgagagcgtaatcaaattcgtttcgggcctaccggcctgtgtggttgcaatggaggcttgtggtggggctcatcacctcggacgcctgtttcagaaacaggggcatgaggtacggctaatgccaccggaatatgtccgtccttacgtcaaagcgcagaagaacgacgatcgtgacgcggaagcgatcgccgaggccgccagccggccagcgatgcgtttcgttgaactgaaaagcgaagaacaactcgacatgcagatattacatcgcgcgcgtgatcgccttgttgcagagcgaacagcgctcattaatcaattgcgggccatcttgctggagcgtgggatcatcatgtctcgaggccgcagaaagttggaaactagcctcgcgatgttgatggatgcagatattgcttctgtcagcccaagaatccggaccctcatcgaggacatgcaaggtcaatggcacgatctggatcgtcgcatcgcggcgtttgatgaggagttcaaggcttatgcccgctcggacaaagcatgcaggcttctggtgacgatcccgggtgtgggtcctttgaacgcaacagctttcgtggcggcgatcgacaatgcgcaggcatttggccatggtcgggatcttgctgcctggcttggccttgtgccccgtcagatgacgaccggcggacggcctaaactcttggggatcagcaagagaggaaatggttacttgcgcaagatgctgatccacggtgccagagcagcgttgccgacgctgtcaaaaggtcagacaatccttggaagctggctgcggagtttgttggcaagagcgcatatcaacaaggtcgtcgtcgcgctggctgccaagatggcgcggattatctggtgtgtgctgcggaacggtaccgctttcgaggcagtggcggtgagagagcctgcataatcacaaccggtcgaggaccgttcaacatatatgacgtccaagaccttcgaatgtctgtgggtggtagtgtgaagatggccgacagtcgaacggcatttcgaaaacctgattaaaaaaatggcgataatcgccgtcatgcttatgaggatcggaatgcgcggagctccatcttggccaggatacgttcctgagaccggatacgttggtgcagattgatcagccaaattaacaaaacacttgcagacggggcgagccatacg

SEQ ID NO: 9256 - DNA, 1533 bp, unidentified
  source 1..1533: mol_type = unassigned DNA; note = element_e7b5323
  misc_feature 1..2: note = core
  misc_feature 3..240: note = LE
  misc_feature 241..1416: note = CDS
  misc_feature 1417..1533: note = RE
  misc_feature 3..218: note = bridgeRNA
cttgcattataaagtagtagttattagagcccctctccaagggctgtgctacactgtaaaggatgctgaggattggtgagaaccccctaccaccagatggtttttaaaaggttccagccacagccctttgcagttttgttaatcagttaaataccgctagacggtttatgtggaacaaggttacaagagcaaagtgccctgtggatgcagcatcacaatcttaccgctggaggttttgctatgatttctgttggaatcgacgtcgccaaggacaagcacgactgcttcatcgtcagttcggaaggagaagttctcgcggatgtgtttaccatttcaaacagcatcgatggctttcactgcctgctgcaaaaaattggggactgtacctcgcctcaggacaaaataaaagtaggacttgaggctaccgggcattacagctacaacattctcgggtttcttcttgacaacggtcttcccgcctatgtcttaaaccccttgcacacgaatctttaccggaagagtctcagcctgagaaagacgaagaccgaccgtgtcgatgcgcgaacgattgcggatatgcttttgtccgatgtgggcctcaagccctacacagacacagcctaccacgacgaggagttacagtcactgacgagataccgttttgacaaggtgaaagagcgcggccagctcaagcagtcgattgctcgcctggtctgcatcctgttccctgaactggaaaaactgatgccgacgcttcacatagtttccgtttatgccttgctggaggaattccccggagctagacagattgcccaggcacatctgacgcggctgaaaacgcttttacatgacgcttccaaaggtcgctatgggcgggacgtggccgtgaatatccgcgaaacagccagaatttctgttggctccgtgatgccggctaaatccttggaactcaggcataccattcatcttatccgggagctggacgctgagagcgatgaaattgaggcagagattcagaagatcatggataaactgcactctcggataacgacgatcccaggcattgggcaccgtatgggagcaatgattctggccgaggtaggcgacttctcacgttttgagtctccggacaaactgttggcctacgctgggctctctccttctacatatcaatccgggcaactcaaaaactgctatgcctgtatggaaaaacgaggttccagatacctgcgttacgccatattcaatgccgcaaaatatgtttgcctatgggacccgatattctctgcctaccttgcaaagaaacgggcggaaggcaagcattacaatgtcgctatatcccctgccgccaagaagctggtgcggctgatctatgcaatggagaaatccagagagccctaccgcttggcagcgtaactttcacttaatagcccgcctggcgtctcagcagacgcctgctttgctataccctttttgaaccatccgccttttgaccaccatcctcagtttcagggttgacttttattagttaat

SEQ ID NO: 9257 - DNA, 1405 bp, unidentified
  source 1..1405: mol_type = unassigned DNA; note = element_e7b8092
  misc_feature 1..3: note = core
  misc_feature 4..96: note = LE
  misc_feature 97..1131: note = CDS
  misc_feature 1132..1405: note = RE
  misc_feature 1145..1392: note = bridgeRNA
tgatggtgtggacggcgcccacaccggcatcatcctcgtttgaggcgtgccaagatggcgatcgtcgaagcatcgtcatctgaaggagcgccgtccatgggcaagatcatcaccgatttttcatctgtcacgaccgttgggcttgatctggcgaagcatgtttttcaagttcatgcggttgacgcttacggccgcgtaattgtgacgaaggcgcttgagcgcaaggacgtgttttcgttctttgcgggcctgccgcactgcctcattgggctcgaggcctgcggctcggcgcatcactgggcgcgcgagctgatcaggcttgggcatgacgcgcggctgatgccaccggcttatgtaaagccctatctgcgccgccagaagaatgacgcagccgatgctgcggcgatctgcgaagcagtgacgcggccttcgatgcgctttgtcgctgtgcgtgggctggagaaccaggcggcgctcatgcatcacaaggcgcgcgaattactggtggcgcaacgcacacaactgctcaacgcattgcgcggacatctggcagagatcgggattatcgcggcgcaagggcccaacaatgcccgtgcgctggcggcgctggtcacgaatagcaaggaagcgatcccgggttgcgtacgtgaggcgttggtgccgctggtgcgtcaactgcacgcacttgatcacgagatcggcggcagcgatcaaaccattaaagctatggcgaatgccgatgcgactgcgcgccgattgatgagcatccctggcctcggaccggttactgcttcggcactggccgccagcgtgccggatgtgtccgccttctccggcccgcgcgagtttgccgcctttctcgggctcacaccaagacaacactcgtcaggcggcaaggagcgattagggcgcatctcgaagttgggcaatcgctatctgcgcaagctgctcgtcgtcggtgcgcatgcgggcctgtatcatcgcaagcgtcatacggacgcgctcagaacatggacgaaccggcttctcgaaacaaagcccctcaagcttgttgccgttgcgctcgccaataagcttgcgcgcatcgtcttcggcattatgcgcggcaagacaacctacaatgcagcctaagcgtgacacacgtgcttttatccaggtagccaaacgctgcatatcggaatcgagggtgacaaagaggcgatgcgaaccaacgcgaattgatcctcgagcccggtgcactgtcagcgcagcaacagcgcgatacggtgattggggccacggatcagcggacaacatcagggcaagcggatcacgttctccgcatcaacaggccgaagacatgaccgcacccacgactatcgcaacaccgcaatttaacccttgatccgcgggcgccgtccagaca

SEQ ID NO: 9258 - DNA, 1440 bp, unidentified
  source 1..1440: mol_type = unassigned DNA; note = element_e7b8861
  misc_feature 1..4: note = core
  misc_feature 5..223: note = LE
  misc_feature 224..1426: note = CDS
  misc_feature 1427..1440: note = RE
  misc_feature 22..175: note = bridgeRNA
ttccgtaagactgacgccggccccagggggaccgggagtggctgaggtcgccttgcgattcgatcgctcactgggaatgtccgcccggtcttcttggggcgccctggctgctgattgagatgtgcgcttggtcgctggttacggatgggtcagcggggtgctccaccgggggccgcgctcggtgcgaccgcaccgaggaactcgaggagcggaagacaccaccatgggaactgcagccaccgtctgggccgggatcgacgtcggcaagacccaccactggatcgaggccgtcgaccctgacggaaagacgctgctgtcgcggcgggtcttgaacgaccagggcgagatcgaggctgtgatcgccgcagtcaccgcgttgggtggtcaggtgcaatgggctgtcgatatcgtcggggcaccgtcggcgttgctgctggccttgctcacccaggcccaccagcacgtgctttacgcctcggggcgggtggtatcggtaatgagctcggcgttcaccggcgagggcaagaccgacgccaaggacgcccacgtcatcgccgaaaccgtccggctacgacgcgacctcaccgtcgtcgacaagtccaccgacctggcccgcaacctggccgtgctcaccgcccaccgcgccgacctgatcgccgaccgggtccgcggcatcaaccggcttcgcgacctgctgaccagcgtcttccccgcactggaacgcgagttcgactacgcctcctgcaagggcgccttggtgctgttgtcgggctacgccaccccggcccggctgcgtcgggtcggtcggacccggctcgcggcctggctccgcgcacgccacgtccgcggctacgcccagctcgccgagcgcgccgtcaacgcagcggccacccagcaggtggtcctgtccggccaggacatcgccgccggcgtcgtctcagatctcgcgagcagcgtcctcgccctcgacgaacgcatcaaggacgtcgacgcccggatcggcgccacgttcgagctgcacccgcaagcggccaccatcacctcgatgcccggctttggaccgttcctcggcgccgctctgctcgctgcggccggcgacctccgggccttccccaccgccggccacctcgctgccgcggccggcctggtccccgtgcccaacgactccggacgacgctcgggcaacctgcaccggccccaccgctacagccgaccgctacgacacgtgttctacctctccgcccagaccgcgatgatgcggccaggtccgaaccgcgactactacctgaaaaagcgcgagcacggacgaactcacactcaagccgtcatcgccctcgcccgccgacgcgtcgacgtcctctgggccctgctccgcgacgaccggctgttctccgaacagccgcccgccctcgcgcgagcggcttgacaacaccattgaga

SEQ ID NO: 9259 - DNA, 1398 bp, unidentified
  source 1..1398: mol_type = unassigned DNA; note = element_e7bba2f
  misc_feature 1..2: note = core
  misc_feature 3..117: note = LE
  misc_feature 118..1128: note = CDS
  misc_feature 1129..1398: note = RE
  misc_feature 1162..1393: note = bridgeRNA
agatgccgtaatgggccggcgtctcacgagtagccagtttcgtggctgtccctcagaatgatgatgtttggaacgaggtccgagcgatcggcctcaagcatcatgcgaggaacagccatggggtattatgcaggcatcgacgtctcgctgaaagagagcagcgtgtgtgtggtcgacgcgacgggcaagctggttcgggaggtcaaggtaggcagcgagccagaatgcctggtcgggtattttgatcaactgggctttcccgtagagcgcatcggccttgaagcggggcctttgtcccaatggctgtatgcggctctcgttgctgcggggcatgatgtggttttgctggaaacgcggcatgtgaaggcggcgctttcggcgatgacggtgaagactgaccgcaaggatgcacgagggatcgcgcaactgctccgcatgggatggtatcgcccggttcacgccaaatcgtcgccggcccaggacactccggctctattggtcggccgcaagcttctgcaatccaagctactcgacgtcgagctcagtattcggggcatcctgcgtggctatgggttaaaggtcggcgaggtcagccgcgggcgtttcgaggcgcgcatccgcgaactgattgaagggcattcgacattgtcgacggtgattgacgcgatgctgacggcgcgagtagcgctgtggagcgaatttacgaagctgcaccgcgagatgctcaggatcgcccgcgccgacaaagtttgcaaaaggctgatgagcgcaccaggcgtcggtgccctgattgcgctgacctatcgctccgcggttgatgatcctgcccggttcgaaaagtccaggacggtgggtgcctacttcggtctgacgccgaagaaatatcaatccggcgaaaccgatcgggatggcggagtcagtaaggtcggcgacgctatggtgcaaacggcattgttcgagaccgcccacataatgctgacgcgggcgacgcgcttttccagtctaaaacgttgggcgctcgatgtggccaggcgtcgcgggatgaagcgtgcgaaggtcgcccttgcccgcaaactcggtgtcgttcttcaccgcatgtgggtggatgcaactttcgctggagcgtaagccctgtcgcggcatgaggagagatatgtgattgatgcaggcaagcacaaggtctgcatctgataaggtcccgtcgctgggacgcaggcttggcaaggtcgtgtgtagtgctgtgaccgcttcggcgaagcacgctccctagattgacctgtcggcttgttgatctgatggcatagtgtggcagtcttcgtgctgaccacggacagaagcatgaccccagcgacgagataatcattccgagggacttgacggacaaaggcccattacaga

SEQ ID NO: 9260 - DNA, 1348 bp, unidentified
  source 1..1348: mol_type = unassigned DNA; note = element_e7bfec1
  misc_feature 1: note = core
  misc_feature 2..79: note = LE
  misc_feature 80..1093: note = CDS
  misc_feature 1094..1348: note = RE
  misc_feature 1093..1335: note = bridgeRNA
tgatggtgtggacggcctcgttccaaccgggttcgctggatgatgtcgtcgatagggacgtcacgtctaggagctggtcatggaagctgcagcagtcattgggttagatctggcgaagaacgtgtttcaggtccacggcgtcgccgccgacggtggtgtcgtcatcaaacgtcagctccggcgcgcgcaaatgctgccattcttcgcgtccctaccgccctgcctggtcgggatggaagcgtgcgcatctgcgcatcattgggcgcgtgagcagatggcgcttggccatgaagtgcgcttgatggcgccggcatatgtgaaagcctacgtgaagcgcggcaagaccgacgcggctgacgccgaagcgatcgcggaggcggtcacccgaccgacaatgcgctttgtggcggtgaagacgaaggcccaacaggccgcgctgatgcttcacaagactcgcgacctgctcgttcggcagcgaacaatgctgattaacgccctgcgtggccatctcggcgaatttgggatcgtggcgccacaaggcgccgccggcgtacgcgcaacgctgaaagctcttcacctcgagcaagatcaattgccagggctcgcacgcgccgcgcttcatggtctcgcctcgcaacttgaagcgctcggtgccgaaatcgatcggctcgaaacgcggatcatcgcctggcatagggacgacgaaacgagccggcgcctcgcgacgatcccgggcataggtccgatcacagcaagtgcgatcgcagcaagcgcgccagatcccagtctctttcgcaccggccgacaattcgcggcttggctcggcctgacgccgcgcgcgaacagtagcggcggcaaggagcgccaagttggcatcagcaagatgggcgatggctatttgcggcgcctgcttgtgattggcgcgacggcggtgctgcgcatgaggcgtcaacgcggcggcgatccctggctctctggattgattgcacgcaagaagccaaaggtcgccgcggtcgcgctcgccaacaaaacggcgcggatcgcatgggcgctgatggcgcggaaccaaagctacgtgccggcgacggtgtaagagatcggcctccgcaaactgcggggccgtagacgcgagagtgatgagacgtgatgacaaaccggccgcagccggggatcggcaaaacccagggggtcagagcgccttgagcgcgttgacgtgattagggagccggtccgcggacttcatcaaggccagcagcgtcctgctgcatcagtaggccgaacacatgactgcactcgaccgagcgcttccgtttcattacagccttgcgttttagaggccgtccacaca

SEQ ID NO: 9261 - DNA, 1455 bp, unidentified
  source 1..1455: mol_type = unassigned DNA; note = element_e7c75f1
  misc_feature 1..3: note = core
  misc_feature 4..79: note = LE
  misc_feature 80..1180: note = CDS
  misc_feature 1181..1455: note = RE
  misc_feature 1186..1443: note = bridgeRNA
tgatggggtggacggcgccccgagcggcatcgatgtgccatgatggtcgttgtcactatccatcagagggaagccgtccatgggcaagtctatcaagaatctgtcgtctgtcacgaccgtcgggctcgatatcgccaagaatgtttttcaggttcatggcgtcgacgcgaaaggcgcggcgattgtcgcgcgttcggttcgacgcggtcagttgctgaaattcttcgcttcgctgccgccatgcctggtgggaatcgaagcgtgcagttcgtcgcaccattgggcgcgttcgctgatcgaactcggtcatcaggtgaagctgatcccgcccgcttacgtgaagccctacgttcggcgcaacaagaacgacgccgtcgacgcggcggcgatctctaggcgaatgcgcagcattcgtccgggcgaggcggtcgggcggccgagcatgcgcttcgtgccggttcgcagcgtcgacaaccaggccgagctgatgcgccaccgcgtgcgcgaacttctggcgggcaaccgcacgcggatgctcaacgcgctgcgcggtcatctggcggaggtcgggatcgtggcggcgcagggggcgcaacacgcctatgcgctcaagcgcctgctcgccgacggcttcgaccagaacggcgaaatcgtcgtcgccgattgcgtgcgccgagccctggcgccgctggttcatcagatcgacgcgatcgacgccgagatcgcggccatcgacgaagagatcgagacgctcgtaaaggccgacgagaccgcgcgccggctgatgaccatccccggcgtcgggccgatcacagcctcggctatcgtcgccaccgtgcgggagacgagcgcttttgcttccggcagagagttcgcggccttcctcggcttgacgccgcgccagagctcgagcggcggcaaggaacggctcgggcgcatcaccaagatgggcgaccgctacttgcgcaagctgctggtggtgggggcctgcgccacgctcagccatcgcaagggccacaacgacgccttgcgggtttgggcctcttcgctgctggcgcgcaaggccgtcaaatacaagttcaagctgacggcggtggcgctggccaacaaggtcgcgcgcatcgtcttcgcgattctgacgcgaggcggcgaatatgacgagcggccggtcgccgcttgaaagacggctgtcgataaaggagtttcgccgcgaggcgacacgggatcgagggtgaccacggggtgatgtgaaccaacggataaggctcggaagcctgttgtactgtctgcgccatcacaagcgcgatacggtgattgaggcaaagagctcagcggacgaaccatcagggccagcgggtctcaacccccccgcgagaaacaggccgaagacatgaccgcacccgagacgttcgcaaaaccgcaaagaaacccttgacaaggggcgccgtccagaca

SEQ ID NO: 9262 - DNA, 1454 bp, unidentified
  source 1..1454: mol_type = unassigned DNA; note = element_e7e61b0
  misc_feature 1..5: note = core
  misc_feature 6..232: note = LE
  misc_feature 233..1438: note = CDS
  misc_feature 1439..1454: note = RE
  misc_feature 1..236: note = bridgeRNA
cccccgttacctttttcgtggctcctggtcagggagctgtggtcgccgggtccggcatgactgatgcccccagtcgtaggcatgatccggggggtggtgtcaccgggcccggggcattgtcggaccgctgatagggacatggccgcccgctgggtaggtctcgtcgtaacgtgggtgccggccggtgatgcccgaccggcggccatgatcgacgaaccgaaaggcagagtcgatgaccagcggatatggggtgtttctcgggctggatgtgggcaagggcgaacaccacgccgtgggcttgggcgccaccgggcggcggctgcacgacgcgccgctgcccaacagtgaggcgaagctgcgggcggtgttcgacaagctcgcccagcatggtcggctgctggtggtggtggatcagcccgcggcgatcggcgcgctgccggtcgcggtggcccgcgcctgcgggcaccaggttgcctgcctgcccggcttggccatgcgtcgtatcgccgacctctacccgggcagcgccaagactgatgcccgtgatgcgttcatcatcgccgacgccgcacgcactctgccgcacacgttgcggcaggtcgatgtcggcgacgacgccttggccgagcttgaggtgctggtgggtttcgatgacgacctggcaggtgaggccacccgcagtggcaaccgcattcgcggcctgctaaccggaatccaccctgcactggagcgagccatcggagcacggatcgcccaccccgcggtgctggagatcctctctcgctgcggcggaccagcgggcatccgagcagccggtcgccgcaagcttgtctcgatcgccaccgctcacgcgccccggatgggcgagaagctggccaccgcgatctgggccgcgctggaggagcagaccgtcaccgttcccggcaccgccgcagccgacatcgtgctcccccggctcgccgacagcctgaaaaccgttctccagcaacgaaacgccgtcgccgcccaggtcgaggggatactcgatgcgcaccctcttgcccaggtcctgacctcgatgccgggcatcggagtcaggactgccgcccgcattctgctggaaatcggtgacgcctcggcgttcaagtcctccggccacctggccgcctacgccgggatcgccccggtcacccacagctccgggtcctcgatcaagggcgagtatcccgcccgcaccggcaaccgcaaactcaaacgcgcgttcttcctggccgccttcgccgccctgcacgatccgaccagccgcgcctactacgaccgcaaacgaggcgagggcaagaaacacaacgccgccctgatctgcctggcccgccgccgctgcgacgtgctctacgcgatgctgcgcgaccacacccgctaccaacacccccaccccggagctgctcctgccgcggcttgacaaccacatagggaca

SEQ ID NO: 9263 - DNA, 1414 bp, unidentified
  source 1..1414: mol_type = unassigned DNA; note = element_e7f4fb0
  misc_feature 1..3: note = core
  misc_feature 4..81: note = LE
  misc_feature 82..1131: note = CDS
  misc_feature 1132..1414: note = RE
  misc_feature 1134..1401: note = bridgeRNA
tgatgtcgtggatggcgccctccaccagcgtcagacatgccagaataggcatgttggagaaccggagaggagccactcatcatgtctgagattgccacgatcggccttgatatcgcaaagaacgtctttcagctccacggtgtggacaggactggaaagatcgtcctgcgcaggacgctgcgccgcagtcaggtgccaggtttcttcagcacacttccctcttgcctgatcgggctggaggcgtgcgcgaccgctcaccactgggcccgtacgctcatagcctttggccatgaggtccgtctgatcccgccggcctatgtcaaaccctacctacgccgacagaagaatgatgctgcggatgcggcggccatctgtgaggccgtcacacggccgtcgatgcggttcgttccggtcaagaccccgcaacaacagagtaccttgatgctgcacggggcccgcgatctcctgatcgggcagcggaccgccctgatcaatgcgctgcgcggtcatttcgcagagctgggcatcgtggtggcgcaaggcgctcgcaacacgcgccagctgatcgctttcctccacgaggaggctaatccagactttcccgctgcagctcgaactgcgctccagcctttggccgcgatgctgctcgggatcgaggcgcagattgccaagctcgataaggccattctggcggctcatcgcagcgatccggtgagcctcaggcttgccaccattcccggcatcggcccgatcgtggcctcctgtctctcggccagtatctcggacgccagtctgttccagggcagtcgggagtttgccgcctatcttggcctcgtgccgcggcagaactcaacgggcggcaagccgaggctcgggtccatctccaagatgggcaaccggcacctgcgcaagctgctggtcgtcggcgcgcacgcggcgctctacagcatgaagtccggcaagaccaggacggtcttggcggactgggcccggtctctgctggtcaagaagccgttcaaggtggtcgccgtcgccttggccaacaagatcgcccggatcgcctgggcggtgatggccaagagcacggcttatgagcccggcagcactggagctgccgcgtcagcggcatagacaaccagttcagacgattcgcccctcagggcaactcagttggcacggtgatgatgagatgatgtgaagccacagcggacatggaccgccggaactggcaaacccgtggtgttgtcttgcgtcagtcaagcgcgataacgtgagagggaccagtttccagcgtaaaacatcagggcctgcggtcatgaagcaccgcgcttacaggccggagacatgactgcacccgccccgctaggccaagcgtcttcaacaatcacgttgccaaacgggcgccatccagaca

SEQ ID NO: 9264 - DNA, 1453 bp, unidentified
  source 1..1453: mol_type = unassigned DNA; note = element_e7f5875
  misc_feature 1: note = core
  misc_feature 2..227: note = LE
  misc_feature 228..1439: note = CDS
  misc_feature 1440..1453: note = RE
  misc_feature 13..238: note = bridgeRNA
ctactagagactcgctgcaggaccggtgtctggccagactcggtctaggtgcccggcgggtttgctctcttttgggctgcccacccggcctccgggtgtggctcacttccggtctgcggcccgtcgggcaccgtgacgaggcgtggctcaagaagggattgccctgctcgtagtagcactgcccacctcgccgtccctatcggtacgagcacaggcgggagcagcacatgcagcagatcatcatcggggtcgacccgcacaagctgtcggcgacgatcgaggtcgtcgacaaacacgagcagcggctcggctcggggcggttcacgaccgaccgggccggctacgccgcgatgcggacctacgcgaagtcatggccggagcggatgtgggcggtcgagggcgccaacggggctgggcgtcccctggcccagcggctgctcgaggctggcgagcaggtcgtcgacgtcccggcgaaactcgccgccagggttcgactcttcgacaccggtcacaaccgcaagaccgacgctctcgacgcgcactcgatcgccatcgtcgcggtgcgaaccacgaccttgcgggtcctgcaggtcgatggggagctcgaggcgctgcggatgctcaccgaccgccgcgaagcgctgacccggcgccgggtccagaccgtcaaccggctccaagccttgctcgccgagctgctgcccggtcaggcgaagaaggacatcaccccgctgcaggccaaggggatgctcgccagcgtccgtccccgcgacgtcgcaggcaagacccggcgcagcatcgccgccgaggagctggctgagctggtcgcggtcgacacgaagatcaagaaggccaccgccgaactcaaatcaatcgtcctcgcccgcggctcacacttgatggacctccacggcgtcgggccggtcgtggccgcccgagtcctggccgacgtcggtgacatatccaggttcgctgaccgcaaccgcttcgcgtcatggaccggcacggcaccactggacgcgtcctccggtgagcagaaccgacaccggctctcccgagcggggaaccgacggatgaaccacatgatccatatcgccgcggttacccagctccgtctcgataccgagggtcgggcctactaccgacgcaagcgcgctgagggcaagaagccgatggaggcgatgcggtgtctcaagcgcaggatctccgacagcatctatcgccagctgatcgccgaccaacagcgtcctggtgctgcgaagcgtggagcgggtccgggagggcactgcggggcgtctcaagaatccagcgcggtcgacctacccccgcacatcgacacttcggatcagccacttcccggacccgcaacaacgacgctacgcccggcatcggcgcctcggaagaccaaccgcagaaggaacctccaaacgaccggttgacaacagaagggagc

SEQ ID NO: 9265 - DNA, 1200 bp, unidentified
  source 1..1200: mol_type = unassigned DNA; note = element_e804e99
  misc_feature 1..2: note = core
  misc_feature 3..187: note = LE
  misc_feature 188..1168: note = CDS
  misc_feature 1169..1200: note = RE
  misc_feature 12..197: note = bridgeRNA
cttgtatctctctgcgacaagtgattagctatcacttgtcactcggaaccaggtgagtgtgagcccaccctaaactgtaagaagttgagacgtagatgacgcccctggttccatcatcttgaaattgtatggtatccaagtgcccacacattgtggtgacactgcatgtacaaggggaataggaaagatgcaagcatttgttggaattgatgtgagtaaagacaaactcgattgtctttggctgcgtgacccggaattactgaaggtaaaaaccaaggtgcttaaaaacacaccgtccggtattgaatcactggcacactggctggttaagactacccaacaacctgccgagaatattatcgtggttatggaagcgacgggtatttatcatgagaatttggcgtatcgtctatacgagcaggattttagcgtcgtggttgccaacccggctcaaattaagtcctacgcaaaaagccttggttcgacacacaagactgataagtgcgacagcctagtgatcgcccgttatggaaaaagtcataacccgatgctctggaagcctgagcctccggaaatacgggaactcaaggcgctaatcgctcgcttggaggccatagaaaaggattaccaacgagaatataaccgccgagagaaggcggaaattacaacggtatccgagattgtcatgtcatccattgagcagacaatggaataccttaaacaagaaaaggcgcgattggagtcacaaatcgacgatcatatcgatcgtcacccgcacttgaaaaaagaccgagaattattacaaaccattcctgccgtgggttctacgctatcgcgtctaatgctgtgtgtgattcgaagtagacgctttaaaactgcagctcaactcgccgcctatttggggctcatacctaagttggttgaatctggtgtattcaaaggccgaagctcgctaacaaaatctgggccggcttcagtgcgggcgaaattgtatatggcagcggtctgtgcgggacaacataacccggatatagcgcgccagaaaaagcgattattggctaacggaaagaacaaaatgcaagcgctgggcgcagcaatgagaaagctggtgcagatttgttttggggtcttaaaaaaccaaaaagaatacatgccgcaagtgtgttaataatacttgcggctgtatcggagagatggtat

SEQ ID NO: 9266 - DNA, 1380 bp, unidentified
  source 1..1380: mol_type = unassigned DNA; note = element_e805e40
  misc_feature 1..2: note = core
  misc_feature 3..79: note = LE
  misc_feature 80..1120: note = CDS
  misc_feature 1121..1380: note = RE
  misc_feature 1120..1367: note = bridgeRNA
tgatggggtggacggcccccgacggcatcgcattgtgccagattgaggttgttgcaaacttcaaacgagggagccgtccgtgaacgagattatccgcattgggatggatacgtcgaagcatttctttcagctgcacggggtcggcgccgacgagcgcgtggtactgcgcaagaagctgcggcgcagtcagatgctggcgtttttcgcaggtttgccgccaacagcgatcgggatcgaggcctgcggtgcatcgcatcatctggcgcggaccctcagcgggctcggccatacggtgaagctactcgcgccgcaacacgtcaaaccctacgtcagccgtaacaagaacgatgggcgcgatgctgagggcctgtgcgaggcgatgagccggccgcggatggagtttgtgccggtgaagaccgccgaacagcaggccggattgatgctgctcggcgtgcgccaacagttgatcgcgcggcgcacccagctgagcaacgcgatccgcggctacgcggcggagttcgggctgatcgcgccgtgcgggcttcacaagatcgaaccgttgctggcgcggatcgcgcaggacgagacggtgcccgagctggcgcgcgagctgttcgccgcgcaggggcaagactacgcgcggctgcaggatgagttgacgacgatcgaagccaagctgctggcctggcatcgcgccgacaccgcgagccggcggctggcgcaaatcccaggcgttggaccggttggtgccagcgctctggtgctgaagacgccggcgccgcaggcgttcagatcgggacgcgacttcgcggcctggctcggcctgacgccgaaggatcactccaccggcggcaagctccggctcggacggatcacccgcgcgggcgacgagatgctgcgcagcgtgctgatctccggcgccatggcggtgatccagcaggcgcggcatgggcgcggccgcgcctcggtgtggctggtcgcgctgctggcgcgcaagccgatcaagctggcggcggtggcgctcgccaacaagatcgccaggatcgcctggaagatgatgatcacgcaacagacttacgacggggcgcggatgccgagcgcatcgccgcgcgccgactgagagatcgaacgtcgggcaattagtccgacgctcgagccggagctgcaacgggagacagatggaacgatcgatcgaaccgagaggcgagacaatccgtggaatccatcggcacacaaaggccggtagggtgattggagctcgcgtcgcggaagccatcttggccagcggtccatcgcgaccgcaccgacaggccgcacatatggatgcaagcgatccgatcagtcctcagaatcccttgtggctcgggggccgtccacata

SEQ ID NO: 9267 - DNA, 1563 bp, unidentified
  source 1..1563: mol_type = unassigned DNA; note = element_e81c0c5
  misc_feature 1..2: note = core
  misc_feature 3..268: note = LE
  misc_feature 269..1447: note = CDS
  misc_feature 1448..1563: note = RE
  misc_feature 3..247: note = bridgeRNA
cttgtataatgaagtcataaggaaatcattatacattttcctttctagattatttctatataatcttaatgagcgctgtggattagtattatcacctacagctcctgtttataaaacagttgactgttctctttgaggctctaaccacagctctatgtttatttgttaattagttagataacgcatgacgttttatatatagcaaggatacatttaacatagagaccgtggatacatagcgcattataattacaaaggagtttttactatgctttttattggtattgatgttgccaaatctaaacacgactgttgcattattgattcaagtggagttgttcatacagactcgttaagtatcaataactctaaagagggatttgacactctctattctattattctttctatccttgattctgatgatttaagcaatataaaaataggacttgaatcaacaggtcattacagcactaacattacacattatctgcattccaaagggtttcacgtccatatcatgaatcctttagctactaatcttttccgtaaggctcatactcttaggaaaactaagacagataaaactgacgccaaagtcattgcaacgatgctctttactgatgaatcaaaatcctattctcctttatcatatcagattcaggagctaaagtcactaacaagacatcgttatcgtatgattgggtatcgttctaaacttaagctttcagttacccgtttaattgatattattttccctgaattacctagctttgtttggtctatacaccaagtttccagctataccttattgcttcaattgcctacccctagtgctatttcttcttgtcatcttacaaaacttactaatcttatctcaaaagcatcaagaggacagtacggtaaagaaaaagccattgcgttaaaagaactagctaccaattctatcggttcttctaatcgctctattgcatttgaactacaacaaactattcgacttattcaatctgttcaacaagagattgatgccttagatagacaaatacaactagtggttgatgagctagatacacctcttatcacaataccaggtattggctatactctagctgctattatactagctgagattggtgatattcaccgtttttcaacgccttcaaaacttcttgcttttgctggaatggaaccgtccacttatcagtctggaaactataaagcttttaagacacctatggtaaaacgtggatctacatatcttagatgggcagtcatgcaagcttcaagattagttgctatgcgtgatactacttttaaagcttatatggcaaaaaaaagttctgaaggtaaacacttctgtgttgctcaaagccatgtaggtaagaaattaatacgcgtgatattttatcttttgaaaaacaacatagcattcgttccacaaatgtaaaatatccaacataattttatgagagtaacttggttactctatttgtcatgctcttttttactattctaaatatcaaagtaaaaaagcgaaatagtacttgacttcatatagttagt

SEQ ID NO: 9268 - DNA, 1595 bp, unidentified
  source 1..1595: mol_type = unassigned DNA; note = element_e822ec3
  misc_feature 1..2: note = core
  misc_feature 3..276: note = LE
  misc_feature 277..1458: note = CDS
  misc_feature 1459..1595: note = RE
cacgtataatgtagatatgtaaattattgaacttgcaaatcattaatttacaattataatagttttaatcatttttataaaaatgattaaaacagcgattgagtttaggcagattataacaagggtcatcgtatccatttttgtgacggcctagctcttttctttttattatcctagttttagaatgtgaggattatttattaatcttatataacaagcgtgatgaggagtatgaggaacaaagagttcaatcgtagataagaaaggaagatacttatgcaaaatgttttagctattgatgtagctaaatctaaaagtatggttactttaattagttctagtggtgaagttctaattgatccatatgaaattaatcattctattaatgattttactaatttacttaatagaattaataaacttaaattagaaaacatttctgtaataatggaatctactggagtctatcatagaccgattgaaagatattttttagaacaaaatttcaaagtatttgttattaatccaatttatggaaagatgcataaaagaaatattagaaaaactaaaacagataaagaagattgttttaatttagctaatttattttttacaaatacatttaaggaatatattaaaccggaacaattatatttagacctaaatgctttatctaggcaatattttgcattagatgagttatgtgtaaatcttaaaaacagatataggaatttggtttatttatgttttccagaatatgaattaatatttaaaaataatactatttattcaagtattgctttagattttatagaaaaatatccacatgcaaatattatttcaaatacaagaatagattgtttgcaaaacttctttaagaaacataattttaaatattggaaatcaaaaccaataagaataaaagaatatgctattaattcttatccatcagttgatatgaatgatgagctagtatctaatttatctcaaattgctagactggttaatgaataccaaaaagcaatagatgtaataaaatataaaattactttcttagctaagaagagtaaatattttgagtctattaattctatttatggaattggagaatttactacttcaattattattgcagaacttggcgatattaatagatttaataacattaaagaattaactgcttattgtggactagatccgtctataaaacaatctggtaaatcagttgatatacatggccctatttctaaagctggtaacaaatatatgagaaaaatactttatattgcttgttccaatattattagattaacagcaatctctaaacaagaaaatgatatagaaatttattacagaaaaaaacgtaatgaaggaaaacatcattacgcatcaatcgttgcttgcacaactaaactacttagaaaaattttagcattgtgcaagcaattagacaagtagttatcaccacataactacatataacattatacactaatcagacggattattactaatttttaaaaaaatagtactttttcgtcttttcgtagttatataataacataaaaattaagtattgacaaaacttagaatgt

SEQ ID NO: 9269 - DNA, 1416 bp, unidentified
  source 1..1416: mol_type = unassigned DNA; note = element_e823fec
  misc_feature 1: note = core
  misc_feature 2..224: note = LE
  misc_feature 225..1403: note = CDS
  misc_feature 1404..1416: note = RE
  misc_feature 14..239: note = bridgeRNA
ctacttgttccattgacgtcacggccggcgtctgacgaggctcggtcgaggtgtccgaggctgtcgctctcatcgcggctgcccacggatcgcgtgtggctctcacatggcctgcgcagcctgggacaccgccccgagcgggagaggctcaagaaggggtgggtctgctcgaagtagcggtgccctccggctcgacactcatcggttgagcctgaggaggcaacgtgagccaggaattcccgcgggtcgtcatcggtatggacccacacaagcgatcggtgaccatcgaggtgatggacggtgacgagcacgtcctcggtggaggcaggttcgccaccggcaccgccggctatcgctcgatgctcgacagcgttggtgcctggccgaacaggatctgggcgatcgagggctgcaacggcatcggccgccacatcgctcaccggctgatcgcggaccgggagcaggtcgtcgacgtcccgccgaagctgtccgcgcgggcacgtgtgttcgctaccggccagggccgcaagaccgacgccaccgacgcgcactccgtggcattggtcggaacccgcatgacggggctgcgtccggtggtcgccgatgagcagctcgaggtactccggctgctggtcgaccgccgccgcgccctgggtgaggagcacacccggaaggtctcccagctgcacgcgcttctgctggaactcatccctggcggggcgaaggtgttcttgtccgctgcacaggcccgcaagctgctggcatcggtgcgtccgcgcgacgtggtcggcaagacccgcaaacgggtcgcaaccgagctcgtgatcgacctggagaagatctacgcccgaaccaaggccgccgacaaggaactcaccgagctggtcaaggccaccggcaccggccttctggacctgcacggcatcggcccctccggtgctgctcgactgctggtcgaggtcggtgacatcacccggttccccgaccgcgctcacttcgcctcctggaccggcaccgcacccatcgacgcctcctccggagaccacgtccggcaccgcctctcccgcggcggcaaccggcagatcaaccgggtgctgcacgtcatggccgtcgttcagctacgcaacccgaccgaaggacgcgcctacttcgaccgcaagaagaccaccggcaagacctccatggaagccatgcgctgcctcaaacgacggctctccgacctgatctacaagaccatgctcgacgacctcgtcgccgcgcagaagacgggcccgggaggacaaccaggcaacgactctgtctccagcgcgaccggctcacagcccagcaccggctcttcggacaagtcacatcccgaacccgccaagaccaagcctaaccgcacccttccagccgcgtcttgacacagaagggagc

SEQ ID NO: 9270 - DNA, 1374 bp, unidentified
  source 1..1374: mol_type = unassigned DNA; note = element_e825b2e
  misc_feature 1: note = core
  misc_feature 2..78: note = LE
  misc_feature 79..1104: note = CDS
  misc_feature 1105..1374: note = RE
  misc_feature 1134..1366: note = bridgeRNA
taatggaatggtcgcctcccatctcttgtgccacagtgggacgataaatcgtcactcattgaacggagcgctgctatcatgaacgttaaaactattggaatcgatttggcaaaaaacgttttccagatccatggggttgacgagcacggaaaacggttgttcaacaaacaactcagacgggcacaaatggcctccttttttgccaacatcccaccctgtttgatcggcatggaggcctgtgcatctgctcatttctgggccaataaactgatatcgatgggccataatgtcaaactgatggcccctcagttcgtcaaaccctatgttaaaaccaataagcatgatgctgcagacgctgaagctatttgtgaagccgtcactcgacctaacatgcggttcgtgccggtcaaaaccgctgagcagcaagccgtattggcacttcaccggagtcgtcagagcttcatcaaacagcgaaccgcacaagccaatcaaatcagggggttattggccgaatttggcattgtcgtcccccgaggtatccagcagctacagcgacgattacctgagctcgtggaagatgcgcataacccgttacccgtcctgtttcgtacacagctgagtctactacagcaccacatggcgtacctgttcgatgtcatcgctacactcgacaagcagattgagcagtgctatcggcaaaatgctctctgccagcgtatcggcaagatccctggtattggccctgttaccgccagcgcgctgattgcgaccattggtaaagccaacaatttcgagaatggccgacaactggctgcctggctcggattggttccacgtcagcactccagtgggggtaaacaagtcctgctcgggataagcaagcgaggtgatacctatttgaggaccttgcttatccatggtgccagggcggtattgcagtcggccaaacataaacaggatgccgtatcgagctgggctaaccagctaatggcgcgccggaataacaacattgcctcggtagcattggctaacaagaatgcgcggactgtgtgggcgctcctggtcaaagagcgggagtattgtgcaccaataataagcgcttaagttgcttaatcagtaagacagaaacaacaccaccgattgcccaggcaagcatgaagtgatggcaagacaggtcagaccgcgatggggaaaacccggtttattcaaggctcctgaaagagcgctttgttgatagaggcctccatcagcgtattccatcagggacagaggtattttacatcacctcggcaaagtccggatctatggctgcaatcgatgaccagtaaagccaccacaacatatttagcttggcaaacaggaggcgaccatcta

SEQ ID NO: 9271 - DNA, 1376 bp, unidentified
  source 1..1376: mol_type = unassigned DNA; note = element_e82c7f4
  misc_feature 1: note = core
  misc_feature 2..90: note = LE
  misc_feature 91..1122: note = CDS
  misc_feature 1123..1376: note = RE
  misc_feature 1144..1368: note = bridgeRNA
caatggtatggactcctcctcccctctacggcatctgggtgccagactggagtagtagctctcagtcacaaggtagagaaggagtccgttatgaagcttattcgagttggcgttgatttggcaaagaacgtgtttcagttacatggtgttgatcgtcatggccaagtggtgtggcggcgccggctgacccgcagaaaatggctggcagcgttgatggcgcaagcaggtcctggttgtgaggttggcatggaggcttgtgccggcgcccatcactgggcacgcgaactgcagtcccgcggctttaccgtccgcttgattccaccgcagtttgtgaagccctacgtgaagagcaacaagaacgatgccaacgatgcggaagcgatttgtgaagccatgagccgaccgaacatgcggtttgtggcggtcaaaagtatcgcgcaacaggacctccaggccacgcatcgcatccgtgctgaactgatgaggcagcgtaccgccaaagcgaatcagattcgcggcctggtggccgagtacggtctggttgctccccagacgatgcgtgccttacgcatggccattcccacttggctggaggatgccgagaatgggctgaccgattactttcgttcgttactgaatggcctgtggtccgacctggtcttgctggatgatcggctactcgaactggatcgagagattgagcgacttgccaacagcaatgaagtgacccgacgattgcagcgactgcgcggtgtcggcccgatggtcgccacggcactggtggctacggtcggtaacgccgagcaataccccaacggccggcacatggcggccgcattggggctgacaccacggcaatgcagttccggcgggaaagatcgtttgctgggtatcagtaagcgcggtgatgcctacttacgaatgctgttgatccacggcgcccgatcggtggtgtggcaagccaagcacaaagaggaccggctcagtcagtgggtcacccgcatcgcccaacggcgccaccccaacgtggctgctgtggcattggctaacaaaacggcgcgcatggcctgggccttgctgcgccatggaacagattacgatcccgacttcgcgctgagctaagactggatcaaccgggagaacttcaacaacgattgcttagcaagctggatgatggcaaacaggtcgaaccggcgtcagtcaaacccgtttagttctgtgtaaccaaagtacgtgaaagcgattgggaactgacgcgcggataatccattatggcccggcatcaatgtatgccacctcaagaggccggatatacgtttgcagtcgcgccatgtctgccttcaacgggttgcttgcaatgaggaggagttcatata

SEQ ID NO: 9272 - DNA, 1412 bp, unidentified
  source 1..1412: mol_type = unassigned DNA; note = element_e82ce17
  misc_feature 1: note = core
  misc_feature 2..437: note = LE
  misc_feature 438..1313: note = CDS
  misc_feature 1314..1412: note = RE
  misc_feature 78..236: note = bridgeRNA
ctttatctttgcagtgaaagaaaaagagtagaaattctctttaagctcgattaatttttacctttgttgttgtaaggaaaaattgaccgccagagggataaactaaagcccctctaaaccttgagtttaaactcggtcgtagtccctctggattgaagctgcaaaatgtaagtaggaagttaggcatatagcctatataaagtgacacactacacaacttctcggtcaatgtattccataaaaataatatgcaaagatatgaaaaagatttgtattggaatagatgtttccaaaagaaacattggatgtgacagtaattcacattgagagctatgaattggtggagaagctggggtatagtaagtttgacaacagaccatcaggcttttaggagtatgacagcctgggtaaggaaagtcattaagagccgtggtcagatggatgaagctctgttttgcatggagacgacgggcagttacgatttacctctgtgtcattggctccacaaaaatggactgaatgtgtggcgggaaagtgcattgcaaatacactgttccaagggcttccaacgaggtaagagtgataaggaagactctgaagtaatagcacagtatgcagccagacatcagagtcggtatacggcttttgtcccagacgcagaagctatcgcagacttaaaggaactcatttgctatcgtgacagcctggttgaacggagaaaggagtgcaaggttaggttagcgaataagaaagagacacttgtgaataggaacagtaaggcctggaaatgtatagaacgactgtcaaaggcagaaatcaagaggcttgacaaggttatcggagaatgtgacgaggagattagaaaccttatgaaagaagatgaggagatggaaaagaactaccagcatcttacttccattgttggtatcggtctgattaatggtgcagctcttatcgcttacacagggaattttaagaagattaccacacctaacaagatgtcatgctactgcggatgcttcactttttatgaagactctgggacatcggtacacaggaagagtccgtatagaaacgcctgttgcaagatgctcaagggatacttaagaatggctgcaaaaagcgccatgcttgccaatacggaactcaggaagtatagtgaaaggctcagggagaagggtaagccatacgctgtgatccttaataatgtagcaaacaaactgctgcacatcatgttctctttggtaaagcatgactatgattatgagtataatcacgagatggtcagaagaatggagagagaaatagcataaacaatatggcagggaaatgtaaataaaaagacattaacttagaaattacagtggaatataaacttttcttggaaaatctttggattttaccttaggaag

SEQ ID NO: 9273 - DNA, 1361 bp, unidentified
  source 1..1361: mol_type = unassigned DNA; note = element_e831723
  misc_feature 1..2: note = core
  misc_feature 3..75: note = LE
  misc_feature 76..1098: note = CDS
  misc_feature 1099..1361: note = RE
  misc_feature 1077..1348: note = bridgeRNA
cgttggggtggacgccccctgacggcatcgatgtgccaaagtggaggtgttgaaacaccactgcaggaggcgtccgtgggcgaggttagcacagtcggcatcgatctggccaagtcggtttttcaggttcacggtgcggatgcgagcggcggggtcgtgttccgcaagaagctccggcgggaccaggtgctgccgttcttctcgaccctgccgcggtgcgttgtggcgatggaggcgtgtgccagcgctcattattgggcgcgcgagctcgccgcagttgggcacgacacgaagctgatctcgccggcatacgtgaagccgttcgtgaagcgacaaaagaacgacatggctgacgcggaggcgatctgtgaagcggcgcaacgcccgacgatgcggtttgtgcagggcaagagcgctcaggcgcaggcctcggcggtcgtattccgaacgcgcgacctgttggtgcggcagcgaacgcagctgatcaacgcccttcgcgggcacctcaacgagttcggctacatcgtccggcagggcgtcgggcacgtcagcaagctcgtcgagattgtcgctgacccgacttccgacgtgccggccgaggcgcgaccggtgctaaccgtcatcgcgcagggcctgcaggcgctacaggagcagatcgcgcttctcgaccgtgagatcgcgagccgggcgaaggcggacccggtggcgaagcggctaatgacggtccccggcgtcggcccggtgaccgcgaccgcgctggtggcgctggcgccggccgccagcaccttccggcgcggtcgcgacttcgccgcttggctcggcctggtgccccggcagcactcgagcggcggcaaggaacggctcgggcgaacgaccaggatgggcgagcggagcttgcggcgactgctgatccttggtgcgagctcggcgacgaaggtcgccgcgcgcgatccagacaaggccggcgcatggctggcgggcatgctcgcgcgcaagccgcgcatgctggtcacggtcgcgtttgcgaacaagatggctaggatcgtctgggcgctgatggcccatggcggatcctacagagctccggccgcggcgtgaccgccaaggcttgaggcgtcagggacgcgagggaaggtcagcagagaggaatggcgcaacggtcagaagacggggtcgggaaaaccagtgaaatgtccaggcgcctcaagcgcgcaaaagcggtatggacccgatccgcgatctccattcaggccagcagccgtgatgaaggctgcatcaacaggccggacacacggaagcacctgaacctgcgcgcaagaatctctccaacacccccttgtatccgaaggggcgtccacaca

SEQ ID NO: 9274 - DNA, 1489 bp, unidentified
  source 1..1489: mol_type = unassigned DNA; note = element_e832431
  misc_feature 1: note = core
  misc_feature 2..619: note = LE
  misc_feature 620..1468: note = CDS
  misc_feature 1469..1489: note = RE
  misc_feature 43..222: note = bridgeRNA
cgttgctttgttcgtagcccagcatccgggaggatgaggggcaaggcagccagccgggcccggcatgattattgccccctgtccaaggaacgatttgggggggtgtcaccaggccccgcctggcggtgagtgatcgctgatagtggcaagaccggaacacgcttgatcgcgtggggccgttcgtaacgtggatgccgatgcccaccgccacctgactgtcgaaccagccaggaacggaggaacacccgtgggtcagatcgaacatcacgacgaagtgcaggttctcatcggcttggatgtcggcaaaagcgagtatcatgctgtcgcactcacccgcgacggcacgaagctctacgacaaaccgctcccgaataccgaggccgggatcatccaggcactcaaccggctccccgagcacgggccagcactcgtagtcgtccatcagccagccacgatcggcacgctccccgtcgccttcgcacaggcatccggtgtgctcatcggctacctccctgggctcaccatgcgtcgcgtcgcggacctccaccccggtgaggcgaagaccgacgacgcgagggacgcgttcatcatcgcggagaccgcacgcacgatgccgtgaatgcttcgctcgatcagagtcgctgaccagcagatcgcggaactatcgatactcttcggtttcgatgacgatcttgctgcgcagatcacgcaggtctccaaccgggtacgtggtctcctcacccagatccaccccatgctggagaaggtgctcgggccgcgtctggatcatcccgcgatcctcgatctcctgcaacgttacccatcaccggatgacctgcgccaggccgggcagaagcgcgtcgcggccaggctcctcaagcgtgccccgcgtaagggctgggtctgggcggcggacatcttcgacgcgctcgatcagcagacagtgacggtcgctggcacgaacgccgcgagtatcgtgctaccacggctagtgacacaactcatcgagctccgccagcaacgtactgacatcgcgtccgaggtcgagaagatcgtggtggcgcatcctcttcacccggtcctgacgagtatgccgagagtcggcgtcaggaccgcagccaggctcctcaccgagatcgtcgggaaacacttccccacagcagggcacctcgccgcatacgccggtctcgcacccgtcaccagacgctcaggcacctcgatccggggcgaatcgccttcacagcgcgggaacaaggtcttgaagcgggcgatgttcctctccgtgtttgcggcgctccgggatcccgaaccccgggcctactacggccggatgatcgcgcagggcaaacgccataaccaagccctcatcgcacttgcgcgaaggcgttgcgacgtcctcaacgcaatgctcagaaccgagagtctctaccagccacgtgcccagcatcacaccgctctcgcggcttgacaaaagtaatagggccactcc

SEQ ID NO: 9275 - DNA, 1165 bp, unidentified
  source 1..1165: mol_type = unassigned DNA; note = element_e838732
  misc_feature 1..2: note = core
  misc_feature 3..189: note = LE
  misc_feature 190..1119: note = CDS
  misc_feature 1120..1165: note = RE
  misc_feature 3..172: note = bridgeRNA
cttgtatattcgaggtggaacccagcacggtagatcgattgtttcgtggtcctggaagaccgcgggagagcgtgggtcgccgtgctggttcctccagtggagcccgaatggttgatcgagcccgagctcggatccgcaaggtagggcggtgctggagggtgttccacagcagccaggggaggtgatgccgtgtttgttggtgtcgacatctccaaagcccgctttgatgtcgcggtccgcccaactggcgagctcttctcacagccgaactcgccggcaggcatcacagagatggttcagcatctgcaggggcttgggcccaccctcgtcgtcgtggaagccactggcggcctggagcagctgctggtgatcgccttagccgagtgcggtctgcctgtggtggtagtcaatgcgcgccaggtgcgcgacttcgcccgggccacgggccggctggccaagacggacaagctcgatgcgatggtcctggcgctgtttgccgaggccgtgcgtccgcaactccgcccccttcctgacgccgcgcagcgcgccctgggcgccttagtcgcccggcgcgcgcagttggtggagatgacggtggccgaacgtaaccgcctgcacgccagccacgacccagcggtccgggaagatatccagtcgcatctcgccttcctggaggggcggctctcccaaatggaccgcgagctgctcgaggcgatcgtcgccaacagcgccctgaagacccgcttcgatctgatggtcagtgcacccggggtgggcaaagtgctggcgttcaccctgctgagcgatttgcccgagttggggaggctgaaccgtcggcagatcgcagcactagtgggggtggcgcccctgaatcgggacagcggccaactacgagggcatcggggaatctggggcggtcgggcgagtgtcagacgcgcgctgtatatggccgccgtcgcggccctgcgctggaatcctgtcgtgagccgattgtaccggcgattggtggcggccgggaagccggcgaaagtcgccttggtggcgtgcatgcggaagctcttggtcatcttgaatgcgatgctccggtcaggaactcgctggatgccagagccgcggtagcctgacagacgctacggccaccgcgtcttgacaatgaagatggttg

SEQ ID NO: 9276 - DNA, 1401 bp, unidentified
  source 1..1401: mol_type = unassigned DNA; note = element_e839f16
  misc_feature 1..2: note = core
  misc_feature 3..79: note = LE
  misc_feature 80..1150: note = CDS
  misc_feature 1151..1401: note = RE
  misc_feature 1117..1388: note = bridgeRNA
tgttggagtggacggcccccgaacggcatcaaaatgtgccagagtgagtcgttatgatctcaaacaaagggagccgcccgtggacaggattattcgcattggtatggatacgtcaaagcatgtttttcagttgcatggcgtgaacgctgccgagaagccggtcttgcgcaagaagatgcgccgcaaggagatgatcgatttcttcacgacctgtccgccaaccgtgatcgccatcgaagcctgtggcgcttcccatcactgggcacggctgctgacttcgttcgggcatgaggtgaaaatgatcgcgccgcaactggcgaagccctatatcaagcgaagcaagaacgacgctgccgacgctgagggattatgcgaggcaatgagccgcccgacgatgcggttcgtgccggtcaagacggccgatgagcaagcagcgcttatgctggtaggcgttcgtgcccgactgatcgccaaccgcacccaactcgccaacgccatccgggggtacgccagcgaatttggcatttccgcggccaaggggttagctcatgtttctttgctgcttgaaaggatacaggctgatgggaccgtgccggagttggccaaggaattatttgccagccaggcggaggaatacgctcaactggaagagaagattgccgatgcggatgcgaagctcaaggcatggcagcgtaacgatgaacgcagcaagcgtcttaacaccattccaggcatcggcccaattggcgcggcgctcttgatcatgaaaacacccgctccggagctattccgatccggtcgccagtttgcagcctggatcgggctgacaccaaaggatcactcgactggcggaaagctgcggctcggttgtattacgcgagcaggcgatgaggcattgcgggcggttctggtggcaggagcaacggctgtcgttcaacacgcacggcgttccggtaaagcctcttcgtggctggcagaactgctcaagcgcaagccccctaaactcgcagctgttgcgctggccaacaagattgccaggattgcctggaagatgatgataaccggcgagacttacaaaagcagccctgcgcaatcggctttgagcggcgcggcgcgaggaaatcagttggcgatggtgaacaggatatagatgttaccgcgccgaactgatgcgtgaacttgcaagaaacgagcagatggtgtgatcgatcgatccgagacgcgggaaattccgtaaaatcgtatggcccaatgtggtcgacaagctgtttggaacccacgtcgcggaatccatcttggccagcgttcatgtgcgagcgcgacaacaggccgaacatatgcacgcaagcgatccgctcagcaccatcaaagagttcttgcaaccagggggccgtccacata

SEQ ID NO: 9277 - DNA, 1736 bp, unidentified
  source 1..1736: mol_type = unassigned DNA; note = element_e849268
  misc_feature 1: note = core
  misc_feature 2..347: note = LE
  misc_feature 348..1577: note = CDS
  misc_feature 1578..1736: note = RE
  misc_feature 52..326: note = bridgeRNA
tcgtataataagatttgcagacagtttaaagtgtatctgcttagttcacttttaacgatcagcaggctttgggatacccgtgatacaatggctgtaggacagcagggtcaagttctatcacttccagttgaaccgcaaggctgcttcaaggaaagtccgttcccctgaaccggaagttagctgcaaactcattggctgtttgccggagcaagaccgccctttcagcagtgagggctatcgcattggtcttctctggaatgattctgatacgcgaggttgcggatgctccggttatcatgggtatctcaaagcctgctggcctgaaatttccatgcggggaggtgaaaatgatgaacccactttttgtaggcattgatgtgggcagcaggaacaatgtggcctacctgatgaagccggacggcagcaagcactccagcttttccgtgcagaataatctcggcggtgctaaactgttatcagagaggatcgtgtcggcactcggttccatgcagctcagcgatgtgataatcggcctggaggccacctccatctacggagacagccttgtctacgctctccgagaagatggcagccttggccgctttcagagaaagatccatgtcctcaatcccaagcaggtacggaaattcaaggatgcttatcccgacctgccgaagaacgattgggtggacgcctttgtgattgccgaccatctccgttttggcaggatcgccaaggaggtctatatggacgactatcgctaccaggcgcttagaacgcttaccagagccagatttgacgtgattcaaaacctaacccgtgagaaacagcggtttgccaactacttattcctcaaatgctccggcatggcccaggacaaggatattcagaataccagcgccactacgatcgcccttatggaacggtttgaaactgtggatgacctggcgaatgctgatttggaggaactgactgccttcgtcactgaaacgggccgcggcaggtttgcagatccagcggccacagcgaaagcggtacaggcggcagccagaggctcctaccgtctccctaagacagtgaacgatactgtaaaccaggcgatgtccgtttcgattgcttccatgcgtgccttgaaagaacaaattaaggttttagaaaaggccattgaacagcagtttgagattatccccaataccctgacctctattcccggcattgggaaggtctactccgccggtatcatcgctgagattggcgatatccaccgtttcaactctcaagcctctgtcgccaagtttgccggtcttgtctggcacaagaaccagtccggtgaatttgaagccgaacactcccaaatgattaaatccggcaaccgctatcttcggtactacctgctggaagccgccaactccgtgagaagatgcgactccgagttccggcgctactatgacctcaaataccatgaggtcaacaagtaccagcataaacgcgcactcgctttaactgccagaaaactggtccggttggtctttcggctgctgaaggacaaccgcctgtatatcccgccggagagctgagtacaccactcgcagctctggcgctcccgccctgtttcaaaaaatcttagggggcagggcttaggttggtgttgccttttttctgcttacgcaactgttttcctgcatttattctcgatttttcctgccatcaccctcttgacttcataccattagact

SEQ ID NO: 9278 - DNA, 1027 bp, unidentified
  source 1..1027: mol_type = unassigned DNA; note = element_e84aab2
  misc_feature 1..2: note = core
  misc_feature 3..200: note = LE
  misc_feature 201..1019: note = CDS
  misc_feature 1020..1027: note = RE
  misc_feature 19..215: note = bridgeRNA
cttgtctgttgattggctgttatattggctttgtcttccgggacgtccacctggcgttggcgctccaggtggacagccggcggagggaccgtgcgcacacctaagccctagaggctgtgggggagctgggtcgccgccagcgtttcactgacccggatggttgcagggacttttaggtccgaagccacaaggatgggtcgatggaacagaggaagactaacacgaagattgccggcgtcgatgtctccaagcgtacgctggacgttgcggtccacggtctggaggcgatgttgcaggtcgccaacacaccggtggggttcgaggcgttggaccgatggcttgcgggtcatcaggttgggcgggtcgggcttgaggcgaccggcggctacgagcagccgctggtgatatggctacaggtcaaggggtatgaggtggtgatccatccgccggcggcggtgcgtcagttcgctcgctttaaacggctgaaggccaagaatgataagattgacgcccggctgatcgccctggcgaccacccagaccgagacggtgaaggcggcgaacgatccgcgtttggcggaccttgcccagaggatgacggcctatgagcaggccgccgatcatctggcgcggatgaagaccgaagccgagcacatccgactgccggacgtgcgcaagctgttcgccgcgaccatcgtcatccgcatgcccgagttgggatcgctcaagcacggtcaggccgccgcccttatcggcgtcgcacccttcgatcgcgatagtggcctgcatagaggccagcggttcatctggggcggccgagaacggccaaggcggatgctctacgtcgccgccgtcgtcgccaagcgcttcgacccggccctcaaggcctttgcggcaaacctcgcccagcgcggaaagccgcccaaaataatcaccgtcgctgtcgtgcgaaagctgatcgaggccgccaacctcgtcctcggacgcggtcaaccctggaccaaagcaaccgccgcctaacatggttg

SEQ ID NO: 9279 - DNA, 1315 bp, unidentified
  source 1..1315: mol_type = unassigned DNA; note = element_e850189
  misc_feature 1: note = core
  misc_feature 2..226: note = LE
  misc_feature 227..1300: note = CDS
  misc_feature 1301..1315: note = RE
  misc_feature 4..225: note = bridgeRNA
cagagatgatgttcatgagcacctcccgccagggtctgacccaacgactgactgacttcgggtcctcaacgggatttgtcggccctggtcgggaggcgctcgtgcactcactggacgtggcgttgtgacttcataggagcctggctagaggccccatctctgtcttgtccgcgttgcccggctggtgcgtgccgccctgcccccagtcacgaacgacaggacgacgatgcctcctattacacctgacgtcgcctcgatcatcgaggtcaccggtggagtcgacacccatctggacacccacaccgctgcggtgctcgacccgatcggacgagtgctgggcacccagcagttccctgccacggcagccggctacgccgccctgctggcctggatgcgagggttcggccgactgcaacgggccgggatcgagggcaccggcgcctacggaacaggactcgcccgccgactccgcgacgaacgcgtcgcggtgatcgaggtcgaccgccccgaccgcaagacccgccgcttccagggcaagtccgacccgattgacgccatccaggccgctaagaccgctctggcacacgaacgcaccagcatccccaagcagcgcgacggcagcgtcgaggccctccgcaacctgcgggtggctcgccgcagcgccgtcgaccagcgcgccgacgcccagcgccagatcaagactctgatcgtcaccgcccccgacgatctgcgcgcccagctacgcggccttgccgtcaagcagctgatcagcacctgcgcgaacctacgacccgaccgcaccgacgccgccaccccgggcaccgccgccaagatcgccctacggtctctggcccgccgccaccagcagctcgccgtcgagatcgccgacctcgacgaactcctcgaacccctcgtcgccgccatcaaccccaccctcgtcgctgtcaacggcgtcggtgccgacaccgccggccagttactggtcacggccggcgagaaccacggccggctcacctcagaggcagcgttcgccatgctctgcggtgtcgctccgatccccgcctcgtccggcaagaccaaccgccaccgcctcaaccgcggcggcgaccggcaagccaacaaagcgctctaccgcgtcgtactctgccgcccgcgctgggacccgcgcacccgcgcctacatggaacgacgcaccaaagacggcctgtccaagaaagaaatcatccggtgcctcaagcgctacgtcgcccgcgagatctaccaactcatcacaacaaacgatcttgaacttgccgcttgacatccataggagcat

SEQ ID NO: 9280 - DNA, 1628 bp, unidentified
  source 1..1628: mol_type = unassigned DNA; note = element_e85c0c4
  misc_feature 1..2: note = core
  misc_feature 3..275: note = LE
  misc_feature 276..1499: note = CDS
  misc_feature 1500..1628: note = RE
  misc_feature 13..295: note = bridgeRNA
ctcctacaataaagttacggtttaaggcgcggcagccagctgcgtctttttccatctcaaagccgaagctgttagaatgagagagtaaatggtctggcaccaacattcctgggctaacacgcccgtaatggagtccgtcagccgcctctctcattcgcagcattcgatttgcgcaggttgtgccaccggttttcggtgcgttcgtgtcacccaggagattgaacaggcaatgagtaaaaggcggaaagccatatccaatcagaaggaggagcaaaatgaacgcagttggaagtgatgtttccaaagggaaaagcatggtggctgccctgcggccaatgggtgaagtggcattcctgccacgggaatttctccacaccgatgtggggctggagcagatggcttacgccatccttgcgcttggggaagatacccgcgtcatcatggaagccaccggtcgctaccatgaaccggtagctgcggccctgtatgagtacgggatctatgtctgtgtcctgaatccgctgtttatcaagcaaagcgggggtggttccatccgaaaggtcaagaccgacaaggctgacgccataaaaattgccaagtacggccttgacaactgggtggatctgcgggaatatactcccatggacactgtaagacaacaactgaagctgtgcagccgccagtacgacctctacatgaaaacggtgatatcgctgcaaaacaatcttatttcgttgaccgacaagaccttccccggcgtgaatgaactgttctccagtccggagcgtgcggacggtcaccagaaatgggtggattttgtcatgaccttctggcattgtgactgcatctgccgcatcagcgaaaaggcattcactgagcgttaccagaagtggtgcaaacgcaagggctaccatttcagcgtcgaaaaagcactggaggtctatgccggaagctgcggccatttcaccacgttaccgaagaatgacaacaccaagctgctcattatctcagccgcccagcagcttcttgcaggcaagatgacactggccgctctgcgagctgagatgacacggcttgcccggcaattgccggaatatgacacggtgcgagccatgtacggtgttggcgataagactgcgcctgcactcatggctgagatcggcgatgtgcgccgttttccacgccgcagctccatcgttggatttgcgggcatcgatcccggtgtggatgagtctggcaaacacagtgccaagagcgttcccaccacgaaacggggttcagcacatctgcgcaaaacactctaccagatcgtctgcacttacctgaaaaaatccccggcagatgagccagtctaccagttcctcgataagaaacgcagcgagggcaaaccctatttcgtctacatgaccgctgctcaaaacaagttcctgcgtatctactacgcccgcgtaaaggagtgccttgaggcatttgatgcgcaaactaccgagcgaaagtgatttttaacaaccaaattttacctcggccggtgaggtactttctctccggtctgatttgttgcaccttttttcggtctcgcaaattttgcgggactttttcattttgatgcttgacttttatttgcagga

SEQ ID NO: 9281 - DNA, 1429 bp, unidentified
  source 1..1429: mol_type = unassigned DNA; note = element_e85c89a
  misc_feature 1..2: note = core
  misc_feature 3..80: note = LE
  misc_feature 81..1151: note = CDS
  misc_feature 1152..1429: note = RE
  misc_feature 1205..1416: note = bridgeRNA
tgatggggtgggcggcgccccaatcggcatcgacgtgccaagatggtcgttgtcacaagcgcatctgagggaagccgtccatgggaaagtctatcaagactctgtcgtctgtcacgctcgttgggctggatatcgccaaaaatgtcttccaggttcacgcgattgacgccgagggggctgtcgttgtggccagagcggttcggcggggccagttgctgtctttcttcgcctcgttgcctcgctgtctcgtggggatcgaagcctgcggttcggcgcatcattgggctcgctcgctgagcgcgcttggccatcaggtgaagttgataccgcccgcctatgtgaagccctatgtcttgcgcggcaagaacgacgcggttgacgcggcggcgatctgcgaggcgatgctgcgcccgcgaatacggtttgtgccggtgcgcagcgtagagaaccaggggcaactgatgcgtcatcgtgtgcgcgaacttctgatcggagatcgcacgcgaatgctgaacgcgctgcgcgggcatctcgcggaggtcggggtcattgcgccgcaggggacggcgcacgcctatgcgctcaagcgtctgatcgttgacggcttcgacgagaatggcgaagtcgttgccgattgcgtgcgcgcggcgctggcgccgctggcgcgccagattgagacgatcgacgccgagatcggggcgatcgacgaagagatcaaagctttggcgaaggccgacgagaaggcgcgccggttgatgaccattcccggcgtcggccctatcaccgcctctgcgctcgtcgccaccgtgcaggatatcggcgcttttgccagcggcagagagttcgccgcctatctcgggctgacgccgcgccagaactcgagtgggggcaaggagcggctcgggcgcatcaccaagatgggcgatcgctacttgcgcaagctgttggtggtgggctcctgcgcgacgctgatccatagcaatgggcacaacgacgccttgcgcgcttgggccagtcagatgctggcccgcaagacggtcgcatacaagttcaagctgaccgccgtggcgctcgccaacaaggtggcgcgcatcgtcttcgcgttgctcacgagcggcggcgactatatcgaacggccgatggcggcctgaaaccgcaaaagaagctcggcaatgaagaaacaccgccgcaaggcgacgagcaatcgagggtgaccaagaggtgatgtgaactgaaggaaaaggttcggaagcccgaaaaaggacacgcgccaatacgagcgcgctgccatgatggggcaaagagccaagcggacgactcatcagggccagcgggcctcaatcccgcgtaaacaggccggagacatgaccgcacccgagatgttcgcagagcctcaaccaaacccttgacaaggggcgccgtccagaca

SEQ ID NO: 9282 - DNA, 1322 bp, unidentified
  source 1..1322: mol_type = unassigned DNA; note = element_e864836
  misc_feature 1: note = core
  misc_feature 2..67: note = LE
  misc_feature 68..1093: note = CDS
  misc_feature 1094..1322: note = RE
  misc_feature 1090..1312: note = bridgeRNA
tatggaatggctcgcccacccagcctcctgcacaatggcgcaggatcaatcgagaaagggacgggtcatgcagatcgcattattgggaatcgacctcggtaagaatagctgcagcgtggcggggattgatgcggccggtcaggtccttctgcgccggcgacttcaccgtgacagcattgtgaaactggccgcaaagtttcccgggtgtatcgtcgcgatggaagcgtgctgcggcgctcatcatctcggccgcgtgctgcgaaagcaaggtcatgtcgttcgtctcatgtcgccggaatacgtgcgcccctacgtgaaggcgcagaagaatgacgaccgtgacgctgaggcaattgctgaagcggcgacccgaccaacaatgcggttcgtcgaactcaagaccgaggaacaactcgacctgcagagccttcatcgcgccagagatcgtttggtcggtgagcggaccgccctcatcaatcaactgcgtgcaattcttctagagcgcggcatcactgttcctcaggggcgcaagaagcttgagagcgtcctgccgcaggtgatcgaaagcagcggcgatttgttgaccgatcggatccgccgtttgctcaaagagatgtggcaggatcttcgcgatctctccgagcgcatctcatcatttgatgatgagttcactgccttttcccgcgatgatgcctcgtgtcagagactggaatcgatccccggcataggatcattgaacgcaaccgcctttgttgctgcgatcgaccaggcacaagcctttgctcgcggccgagatcttgcggcctggttgggactggtaccgcgacagatgacgaccggaggcagacccaagctcttgggcatcaccaaacgtggaaatggttaccttcgccgaatgctgattcatggtgccagagctgctatgccgcacttggcgcgaacccagactgcaacgggatcgtggttgcgccgactgatcgcgcgcgcccatccgaatgtcgttgtcgtcgcattggcggcaaagatggcccggatcatttgggcggtcttgcagaaacgtgtgacgttcgaacacacagccgccgccttgtaatcgaggcgctgctgcctcgcgagtatctgcgggcggaatgaggaagatggcctgacagttagacgacgccttgaaaacccgatcaaaaagatggcggatctcgccgaagcgtttatgaggatcagggcgtgcggagctccatcttggccaaggcgtgccttgagaccggatacgttggtgcagattgatcaggcgctttcagaccacttgcagacgggcgagccatacg

SEQ ID NO: 9283 - DNA, 1445 bp, unidentified
  source 1..1445: mol_type = unassigned DNA; note = element_e86a0af
  misc_feature 1..2: note = core
  misc_feature 3..82: note = LE
  misc_feature 83..1198: note = CDS
  misc_feature 1199..1445: note = RE
  misc_feature 1267..1384: note = bridgeRNA
taatcgatggactcgccctcgccgaggcgtcgaagcgccacggtggcatccttgagaagccaacgacagcgagggcgagcccatgaacaagcatacgacaaagcacaactcccggaatcggaccgatgtcggcgatatttcggcctgcacgacagtggcggtggatctggccaagcgcgtattccaggtggccggcgaggatgcccgcggccaagtggtgtacgaacagcggatccgctcacgcgaggccttccagggctggctgcacaagctcgcgccgcaggtcaccgtgctgatcgagaccggtccgggcgcacaggcgtgggcccggcagttgcaggcgcagggcaatccggtgcggatcttgccggcccagcgggtggccgagcaccgcagcggggcgaagaacgaccgcaacgacgtgctggcgatcctgcgggcgggccgcgacgtcaacatcacggcagtgccggtcaagaccgtggccgcactggccatgcaggcgctgcatcgagttcggcggggttacctgcggcgccgcacggctctgggcaaccagatgcgtggcctgttgctggagcacggcatcgtcttgccccagggggatgcggccctgcgtgaccgggtgagcctgatcctgggcgatgccagccagccgctcccggccctgctgcgtgatctgatggccgagctgcaggccgaatggacgcatctgggcgagcgcatcgacaggctgaccggacaactcgacgtcagcgcgcgcgcggatgcgaccgcccgacggctgatgacggtgcgcggcatcggtccgatcatcgccacggccgtgctggccaagcagaccacgcccgaacgctttaccagtggccgtcaattcgccgcctacttcggcgcagtgcccgaccagcacagcagcgggccgaaagtgcgactgggcagaatgagcaagcgcggcgacgcctacatccgcagcctcctgatccagggcgcgcatgcggtgctcaagcaggtgcgggccgactcggtgcacgccgacgatcgtcgcctgttgcgctggcggcaacgccacggccagaaaggcgcggcaatccggctggccaaccgcaacctgcgcatcgtctgggtgctgctgcagaccgatcaggtttatcgccggccaccgaccgacccggtcgaggaggtcacgatggcgcactgatcccaggttcctgccaccggggcgccgaaccgctccaaccgctgctgaagaacatcgaccccaggtcagaccgtcgcagcctcatgcctatgctcctaccggcccgtgaggcctccctgtaatcggcatgctgcgagcttattcgatggtggccagaagcagatgcttcctagaacaggccttatacatagatgcaaccggatggcggtgttcaaaagcgggttgacggtgggggcgagtccataca

SEQ ID NO: 9284 - DNA, 1383 bp, unidentified
  source 1..1383: mol_type = unassigned DNA; note = element_e86c3c2
  misc_feature 1..2: note = core
  misc_feature 3..91: note = LE
  misc_feature 92..1108: note = CDS
  misc_feature 1109..1383: note = RE
  misc_feature 1148..1381: note = bridgeRNA
cgatgagatggtctcctcccccctttaatcggcgtcacaatgcgccatgatggagttgttatcaaccatcaaacaaggtgaggagaagaccatggacaagattacgacgattggactggatttggcaaaaaatgtgtttcatgcggtgtgctgcgacgaacggggcaaagtcatcaagaagaagatgctgaggcgatcagggctattagcctggtttgctactctgccgccaagcctggtgggtatggaggcctgtgccagtgcgcactattgggcgcgcgagttgaaggccctgggccaccaggtaaaattgattccaccccagtacgttaagcccttcgtgcggggtaacaagaacgactacaatgatgcgttggctatcgcggaggccgtgacacggcctgagatgcgctttgtatcgatcaagacgccagaacaacaggatattcaggccttgcaccggctacgggaacggcgtttgcgggatcgcacggcgctgtgtaatcagttgcgaggattgttgggtgagtatgggcttgttttctcccgcggtgtcaatacgctgcgccagcgcattccggagatcctggaggacagtgagaacggactgagtgattttttccgcggattgctgtcgcagggctatcagcagttgacggaacttgatgcacacattgatgcgtatacccagacactggaagcgcatagcaaacgcaatgacgcctgccagcggttaagaacgattcccgggtatgggcccattgtatcgagtgcattttatagcgtggttggcaacggcgaggcctaccggcgtggtcgggatgtatcggcgtcactggggattgtgccaaaacagcacagcagcggtggcaaggaggtcttgctgggcatcagcaagcgcggggaccggtatttacgcagcctgttgattcacggcgcccgagcggtagtgatccaggcgatcaacaaggaggatgcgctgagccgctggattaacaagactcgagctgcccgggggtttaacaaggccgttgtggcgctggccaacaagctggcgaggattggctgggccattttggcgaacaatacggtctatcaggccagataaccctttattgaaataaccgagtacgatttaacagaggaacctgccaacgattgcgaagattatgtagcccatgatgacatcacaggtcagaccggcgtattgaaaacctgcaaaattcgaaggcccattgaggccgaagggtcgattaggacaatacgcgcgcatttcatcgaggccaggggcataacaccccatcaacaggccggatatacgaaagcaaccctgtccctgctattaacgctacagagtcttgcaaaacgggaggagaccatata

SEQ ID NO: 9285 - DNA, 1583 bp, unidentified
  source 1..1583: mol_type = unassigned DNA; note = element_e86d371
  misc_feature 1..4: note = core
  misc_feature 5..310: note = LE
  misc_feature 311..1573: note = CDS
  misc_feature 1574..1583: note = RE
ctcactggtccaccattctcgtgtcggcgttctccgatggagcgctgatgcaccccgggtgccaccaggtcactgccctgctcgcttgacgccgaggacgtccagcatgagatctgcaggatctggtggtggcccgggacgtgtggaccgtcgatagggctgtgcgccaacgccacctgtggctgcgagcgccgatcagtgagcgaaccggcagacacgtcccggcaccaacggcgtccgaaccatcaactgaacatgatccagaagatgagggtgcctccccactgggcttagcagcgaggaggctgacgtgaagtctgccagcacaaccccgaacaacacactgcccgagttcccccccaacgatgtgaccgccgggatcgattgggcccgcgacgatcacgccgcgtgcatcgtcgatggccgtggccgcaaagtcgccaccatcacggtcgaacacaccagcactggtctggccgacctggtcggcttcctgcgccgacatggcatcaacgaggtcgcgatcgagcgccccgacggcccggtcatcgacgccctgctcgccgccgaactgaccgtcgtcgtgatctccccgaaccaggtcaagaacctccgcggccgctacggttcggccggcaacaaagacgaccggttcgacgcctacgtcctggccgacaccctgcgcaccgaccgcgcccggcttcgaccactggtccccgaccgcgaggacaccatcgccctgcgccgcgcctgccgcgcccgcaaagacctggtcaaacaccgcatcgccgccgcaaaccagctccgcgcgcacctgcgcaacgtgctccccgccgtggtcggcctcttcgcagatctcgactccgcgatcagcctggccttcctgacccgcttcaacacccaagacaaactcgactggctcacacccaaacggctcggggactggctgtccaagcagggctactcgggcaaggtcgaccccgccgtgctgcaccaacggatcctccaagcacccaggggagcgcacggcccgcacagcaactcccaggccaccatcaccgccagctacgtcgcactgctgggcaccctcacccagcagatcaagaccctcgcggcccagatcgaccgccaactcgaccaccaccccgacgcgcccatcttcaccagcctgccccgatccggccgcatccgagccgcccgcctcctggccgagatcggcgattgccgggcccgcttccccacccccgaatcgctgaccggactggccggcgcagcaccctcgacccgccaatccggcaagctgcgcaccgtcggattccgctgggcctgcgacaaacaactgcgcgacgctgtcaccgacttcgccgccgacacccgcctggcaaacccctgggccgcagacctctacgaccgagcacgcgcccgcgggcacgaccacccccacgcagtccgcatcctcgcccgcgcctggctccacatcatctggcactgctggcaagaccaccagacctacgaccccgcccagcaccgcgcactccagcgcgtcctggccacccaaacccaggcggcttgacatagggctt

SEQ ID NO: 9286 - DNA, 1571 bp, unidentified
  source 1..1571: mol_type = unassigned DNA; note = element_e87016f
  misc_feature 1..2: note = core
  misc_feature 3..275: note = LE
  misc_feature 276..1454: note = CDS
  misc_feature 1455..1571: note = RE
  misc_feature 3..244: note = bridgeRNA
cttgtatattgaactcatagggaagttctcaacattttcctttcttagaatttctctgtataattctgtgtagacgctgtggattagttctatcacctacagcagcgccctattgctgactgttttctctgaggctctaaccacagctctatgtctaagtgttaatgagttagataacgcatgacgttttatatacagcaaggatacattcggcatagagttctgcggatacacagcgttaaaagttatttccataccaccaaaggaggtctcctatgctctatatcggtatcgacgttgccaaatccaagcacgattgcttcatcattgattctgaaggtgttgtctatacggataatctcaggatcaccaatgatcggaacggttttaacacccttcttgaaacgatccttaatacccttaacggcgaacctgtcacaaatgcaaaagtaggactcgaacacaccgggcattacagcatcaacatcaaacggtttcttgaatctaaaggctttgtcgttacctgcttcaaccctttggaaacaagcgccttccgtaaagcatccactcttcgtaaaacgaagacagataaatgtgatgccaagaccatcgctacaatgcttttctccgatgaatcgattcctacttctcctccatcatatcagattcagaagctgaagtcactaacaagacatcgtttcaggctcattggctatcgcggaaagctgagggtctcttttgcccgcatcattgatattgttttccctgaacttcctgacttcgtctggtctgtcaatcagaaatccagtcagcagttacttcttgcgcttcctacaccggatgctattgcaaaatgtcacctgacccggcttaccaacctgatccgtaaaaattcacacggcaggtatggtcgtgacaaagctgtctctctgcgtaatcttgctgcttcatctattggtctttctgatgaagctcttgcttttgagctgcagcaaaccatccgcatgatacaaaacgtgcagacagaaatcgattctctcgacaggaaaatcaaatctattgtccaagagcttcatactcctctgcttaccatccccggtatcagttacacccttgctgccattatcctagcggaaatcggagatatcaataacttctccaatccctcaaagctacaggcatttgcaggacttgatccatcaacataccaatcgggcaaatacactgcctcttatgcttctatggtaaaacgtggctccacatacctcagatgggccttgcttcaggctgcccgcctcgtagctatgagagacaagacctttgcggattacctggcgaagaagcgttccgaaggaaagcatttcaatgttgctatcagtcacgtcagcaaaaagcttttgcgaacgattttttatatgctgaagcataacgaggtatttgttccgcaaagttgattcctatactctgtcttttcaaggcaagcttcgcttgtctgttttgtcatgtcgctattcaattttcaacgttcactgcaatttttttgaaaaatcgcttgacttcacatagttagt

SEQ ID NO: 9287 - DNA, 1380 bp, unidentified
  source 1..1380: mol_type = unassigned DNA; note = element_e87c27a
  misc_feature 1..2: note = core
  misc_feature 3..86: note = LE
  misc_feature 87..1118: note = CDS
  misc_feature 1119..1380: note = RE
  misc_feature 1148..1368: note = bridgeRNA
tgatgctgtggacggctcctccaccggcacgtgagtgccatgaaagtgggtgctgttgaggcccccacgattcagaggagccaatcatgcaagcagttaagacaatcggtctcgatattgcgaagtcgatttttcaagtgcatggcgttgatgctgatggccaggtggtcattcgccgcaaactgaaacggcgctatgtgctggctttctttgcgaaggtgccgtcgtgccttatcggtatggaggcctgcgcgacatcgcatcattggtcacgggaactgcaggcgcttgggcatcgggtccgcctgatgccgccggcctacgtcaggccctatgtcaagcgacagaagaatgatgccgctgatgccgaggcgatctgcgaggctgtcaccagagccaacatgcggtttgtcgagaccaagacgacggagcagcagagctgcctggtccttcatcgtacgcggcacctgttcatccgtcagcagacctcggtgatcaacgcgatccgcgcccaccttgccgagtttggcatcgtggcgccggtcggccgcaaaggcctcgaacagctcctcgatgtcctcgccaattcggaagacaaacgaatcccgcaagtggcacgtgcctgtgtcgcagctctgggtgcccaactgcatgcgctgaaagcgcagatactggagttcgatcgccagatcatgctctggcatcgctcgcacgagacgagcaaacggctcgatgagatcccgggtgtcggtccggcgctggccacggccctggttgccagtatcgctgatccgaaagcattccggtcaggacgcgacttctcagcctggattggtttggtaccgaagcagcattccagcggaggcaaagaaaagctcggcagtatcagcaagccaggtgatcgctatttgcgcagcctgttcaccgccggcgcgcttgccgtgatccgctatgccaagatctacggcaccaagcatcggccttggctcgcggcattgttggcccgccggcccaccaaggtcgccgccatcgcgcttgccaacaaactcgcgcggatggtgtgggcgatgatgaccaggggtgagcgctacaaggaaccggtcgcacttgcggcctgaacaagatcgcgtcggttacggcgtgatgcgacggttgggaagggcaaacagcacgtaatgcagactcagtcgatccagcgatcaggacaacccactagggccagagcatcgatcgaatgcgagctattgaccgggacctgatccgcgaagggcattatggccagcggtcatgagcaccgcgctaaaaggccgaacacatggccgcaccgaccaacgctgtaaacgtgaaaaaagttcttgccaacccggagccgtccacaca

SEQ ID NO: 9288 - DNA, 1394 bp, unidentified
  source 1..1394: mol_type = unassigned DNA; note = element_e87d6f1
  misc_feature 1: note = core
  misc_feature 2..89: note = LE
  misc_feature 90..1118: note = CDS
  misc_feature 1119..1394: note = RE
  misc_feature 1165..1386: note = bridgeRNA
caatgggatggacgcccctacccgcaccggcatcctatgtgccaaagtgggcgtatcaccaaccacttgaaccgagcgaggcgtccatcatgaagattacgacactaggtatcgatctggcaaagcaagtctttcaactgcacggcgtcgatgaacaaggcaaaaccgtgttaagaaaacagctcaaacgcgaccagatggccacgttcttcgccaccttaccggtctgcctgattggcatggaagcatgtggaagtgcgcatcattgggcccgtaaattagaatcgttcgggcataccgtacgcttgattgcccctcagtttgttaaaccctacgttaaaaccaacaagaacgatgctgctgatgccgaagccatctgcgaggcagtggctcggcctaacatgcggtttgtaccgatcaaaaatatcgaacaacagtccgtcttggccttgcaccgggctcgacaagggttcgtacgggcacggaccgcacaggccaatcagatccgcggattactggctgagttcgggctgatcgtcccacagggaatctctcacctgcatacacgtgtccctgcgctactcgagcaggcgaatcaggagctgacgggctcatttcgattactcatactccggctcctggatcacttaaaagagctggataaacaggtccatgagttggagcggcagattaaagcctggcataaggccaatgaagcgagctgccgacttgagaaagttgcgggcattggcccgatcaccgccagtgccttggttgccacgatcggcgatgccaaaaacttcaccaatggccgacagttagcggcgtggctaggcttagtgcccaagcagcactccagtggtggcaagtccgtgctcctgggaatcagcaaacgaggagatcaatatctacgtaccttgttaattcatggcgctcgagcggtgatctatcgtgcacggcaagccgcagagcccaccggttggctacaacgactcttgcagcgatctcacgctaacgtagcggctgttgcattagccaacaaaaatgcccgtatcgtctgggcgttactggccaatcaacgaaccttccagcctgactacacgcctgacggctcatagtcaggctggactgagcttccccttaaaagccactattaacccttctcccgattgctcaggcaaacacgacatgatggcaagataggtcagaccgtggttggttaaacccgatgtcccccaggcactaagcagtgcgcttgtccgattgaggcaccaaccagcagaacccatcagggaccgccgctgacgcggcaatcaagtccggatgtacgggtgcaatctcgacccactgtccaacatgaagtgagtgcttggcaaaacaggggcgtccatgta

SEQ ID NO: 9289 - DNA, 1348 bp, unidentified
  source 1..1348: mol_type = unassigned DNA; note = element_e886430
  misc_feature 1..2: note = core
  misc_feature 3..83: note = LE
  misc_feature 84..1112: note = CDS
  misc_feature 1113..1348: note = RE
  misc_feature 1129..1342: note = bridgeRNA
ttaataatatggtccgcccaacctcactcccaagcaacatctatgactatgcttgagagtaaccctgacaactgaggtgtaccatgatgagtaatatacatattctcggcatcgatctaggcaaacgcacattccattgtgtcggacatgaccgacatggacatgaagtgcttcgtaaaaaattaaatcgtgcaaaattgctgctatttttatctgatttaccgacaacaacaattgcatttgaatcctgtggtggcgctcactggttggctcgaaaatgtaaaagctatgggcatgaagtaaaactcatcccgcctcagtatgtaaaaccctatatcaaatcaaataaaaatgattacattgatgcatcggcgattgctgaagcggcctcccgtccctcaatgcgttttgtcgcaataaaatcggaaaatgctcaggtgataagtgtcattctccgagccagagatgcttacctcaaagagcgtacagcgacgatgctcaggataggcgcgattcttgttgaatttggactcagtcttcctaaaggtcacgcaactatgaaaaagttatttcaatggctggctgagcaacatgaatccctccctcatttattgattcttgaactgaaagagcttcatgaacattacctgtatttgagtgagcgtattcaaaggcaagagacaaagttaattcagatgacggctgaaaatgaagttggcgagttactgatgaccataccgggaattgctcatatcacagcaagcacttgtctggcggcgatagcctctccgagtcattttaagtgtggtcgggatatggcagcgtggataggacttgttccgcgacaatattcaactggtgggaaaaacacgctcttagggattagtaaacgagggaacaaacggctcagaacactgtttattcattgtgcccgctcaattttgtccaaaccggaaacgacggggaaatgctttgaatcatggctcacgaaactgagagcgaccaaaccttttaatgttgtgatagtcgcactggcaaacaaactggcgaggatcgcgtgggcggtgatgaatacacatcaagcgttcaacgccaggatgcttgtttcttaatcaactcaataacgaaccaaatttgcaatgataatgatgacgacaacggtcaatcggccagatagaaaacctgacgatgtcaatagcacttagcatgcttatccttttgtaaggattatctggcgcagatatcatcgtggagctggaatgcgggagcatccaagagagactccgaatacattagcgcaaaccatccccgttaaaattatagttgcaaaaacggggcggaccataca

SEQ ID NO: 9290 - DNA, 1386 bp, unidentified
  source 1..1386: mol_type = unassigned DNA; note = element_e88b4d7
  misc_feature 1..3: note = core
  misc_feature 4..87: note = LE
  misc_feature 88..1119: note = CDS
  misc_feature 1120..1386: note = RE
  misc_feature 1158..1384: note = bridgeRNA
tgatgagatggtcccctccctcttacggcatcgcaatgtgccaatatagaggttcaagcttctatagaaacagagtggagaggaccaatggctattgtaaacagaattgcactggatttggcaaaggattttattcaggttttggcgctggatgaaaatgagcaggaagtgtttaataaaaagctacgcagcaacaaggtgttagcgaagctggcgacgctgagccgtacggatgactgtgaagtagcggttgagtcctgcggcatgagtcattactggcgccgcgaatgtgaaaagctgggttatcaaacggtggcgttgccaccgcgttttgtcaaagcgtacctgcagggtgagaagaacgatgcgaatgacgcccgggcgatagccgaggcggcatcacggcctaatcgtcagacggtcaggctgaaaagcattgagcagcaggatttagcgctgatggtgaatcagcgggaaggcttcgtgcagacaagaacgcagttctcgaaccggctaagaggtcagttggctgagtacggcattattttacccaagcgggtgagtaccatactgcagagagtgccggagatactggaagacgacagcaatgcgctgacgcttcagtcccgggacttaatcaaccgcctgtatcaaatgcttcgcacggtggacgaagaggttaaagcactggataagcgcttagcggcacaggctgataacaacgaagacagccgcaggctgatgacgataccgggcatcggcccgataacagcaacatcgttgttggctctgataggcgatgtgaatgaatttaagcgcggccgtaacctgtcggaatatctggggctggtaccacggcaaaacagcagcggcggcaaagaccgtttaggtggtattaccaaaaaaggcaataccaagctcaggacactgctggtgcacggagcgcgctcagcgctgcgggtggcgcaacaacgtgatgaccgactgagcctctgggcacaggatgttgccaaacgccggggcaacaatgttgccacagtggcactggccaataagcacgcccggataatctgggcgatgttaaagaataaagaagattaccgaatgactgctgcttaacagcaacagcgttcagtaaaagagcaaagcgaaggttcattccttccgggagttgcaaacgtaagcaggatggtaaaatagggtaaaccgacggcaactgagactggatagcctcagtacactcagtacgttagcctgataagccagttgccgtgcggagttcatccaggccaggtgcgcaaagcgcaccataaacaggccgtatatatgcgagcgccccgacatttaccacaggctcacgttgcaaaaacgggaggggaccatata

SEQ ID NO: 9291 - DNA, 1616 bp, unidentified
  source 1..1616: mol_type = unassigned DNA; note = element_e88d15a
  misc_feature 1..3: note = core
  misc_feature 4..272: note = LE
  misc_feature 273..1451: note = CDS
  misc_feature 1452..1616: note = RE
  misc_feature 21..246: note = bridgeRNA
cttgtatattgatgttcgtcaaggtcgtggtaccttgacggcattttctgttcatcccataagccacgtgggataatagatccgtgcagttgagggcgccgcctgccctccttgggattgagtctcgtgaggaagactggcgcctcagctttacgggcaggattcgaatgagctggatgggaattgcgtcccgcatctctaacaaggtagaattcccgtaaagtctcgtggataacctcgctgcaaatactttgaataaggtggtgcgccacatgtactacatcggtatcgatattgccaaaagggctcacgaggtctgttttacagacgaagcaggcaatgttcttgacgggaattctttcaatgtcccgaatacggtatccggaatcgacaagttacagaaaaaactcgacaagtttgaaatcacagcggataacgccatcgttggcatggaagcaaccggtcactactggctggttctgtattcttacctggtcgagcaaggctttgaggtgaaggtcatcaatcctttggtgaccgatgcttaccgtaacatgctcatccgtaaggtcaagaacgatcgcattgatgcgcaagtagtcgctgccgttctgaggcttggtgaataccaggaaacatctatcgcagacgatgaaacgcttgccttgcgtcaactctgccgattcaggctctggcaagtggattcctgcagcgatttaaagcgcaaagtcatcgccctgcttgatcagatattcccggagtacgaacagcttttcagcgatgtcttcggcatgagttcgagagaactgctgaagacatataccacgccggaagagattgctgctattcacacaaccaagttagccaacagtctcaacaaggcgtcaaaaggacactttggcaaagagaaggcgctggaggttaaggcagtggctaagaggtcgcttggcattaccataggcgtcgacgcctttgcttttcaactccgacaaattatcgagcaaatcgagtttgttgaagagcagatcgcaaagcttgaccgcgaaatcgaggggtacatggattcactccagtctcctgttacgacccttcccggcgtgggccctatttacggcgccatcatcctgtctgaaatcggcgacattagtcgtttcccaagtggcaagcagattgtctcctatgccggtcttgatgcaaccgttaacgaatcaggagaattccaaggacaacgttcttctatctccaagcgaggttccccttatttgcgacgggcgctttggggtgcggcattcgtcgcttcctggtcagacccggagcttaaggaatactaccaacggcttcgagccagaggaaaacatcatggcgttgctattggcgcagttgcacgaaaactatgctacctgctctttgctgttttatccgagaacagaccctatgaagtaaggggctaattcagcggaagtcctcttatacacagagcctttttccataggctctgtttcagcgtgcacacatcctattcatttttcaaggttcagtgtcttccaacgtctacgttgcttcttgtttctcagctattatttgtccgaattaacgcttgactttttatagctggt

SEQ ID NO: 9292 - DNA, 1380 bp, unidentified
  source 1..1380: mol_type = unassigned DNA; note = element_e89513e
  misc_feature 1..2: note = core
  misc_feature 3..246: note = LE
  misc_feature 247..1284: note = CDS
  misc_feature 1285..1380: note = RE
  misc_feature 23..224: note = bridgeRNA
ctcctatgtttgaaatcaaatataaagggaataaattagaatacttaagtgaagaagagtgagagccgattcgtgtccaaacaacctataaggtatgttctcacaaagatattgcctcactctttttcgccttttagagtctgaacagaatgtaaggaatacagcaggcctgtatagccagaatatccaaccaggagacaagacggagaaaggtattcacttgagttaatttaacttaatagaatgatgacaaacattgtaaaacaagtggtgggcattgatatagctcaaactgaattagtagtgtcacttggtcgaatgaaccatgatacaggtatagacattttcgcatttaaaacatttgctaataacgcaataggctttaaggatcttttggcttgggtaaacaaattggcggcaaaagaaatcagggtaagatatgtgatggaagctacaggtgtataccatgaaaaactagcttattatctttcagatcaagggcaagaggtaagcattgtgttgccaaacaaaatcagtaattacttcaggacattggatgtcaaaaccattactgacaagactgcctcacaagccatatgcaggtttggtttggaaagaaaactggaaatatggcaaaagccaaagaaaatattcaaagaccttaaacaactaacccgtgaaagggatcagctgattgctgacagagtggttttgaaaaaccagttgcatgcagaaaaggcagaggcatttccaaatgaaagcagtatcaaaagggtaactaaacgtatccaactgattgacaagcaggaacttgaaatcagagcagagttagctgcaattgtaaaacaggacactgaattggttaaaaagatagataccattaccacaattcctggcgtaggcaagctaacggcagttattgtattggcggagacaaatggatttgaactgattaaaagtaaaaaacagttagttagttacagcggcatggatatcagactgaaagactcaggcacatcggtaaagggaaaacccaggatatctaaaaagggaaacagacacctgcgaaaagctatgtatatgccagctttagcagcgatgcgatttaatgagcatcataaaacagtatttgtccggctggtatcaaagcatggaataaaaatgaaagcggctgtagctgtgcaaagaaaaatattagaactgatttacgtaatttacaaaacggacaaagcctttgataaagactacgtaaaaaagcaaacagcagaagtacaaaatagttagagcagccattacgaaaatgcactgccctaatgaggctggcttaaagccgccttgaataaaacaaaattaaaaaatatttggaattcaacacagaat

SEQ ID NO: 9293 - DNA, 1384 bp, unidentified
  source 1..1384: mol_type = unassigned DNA; note = element_e8963f2
  misc_feature 1..2: note = core
  misc_feature 3..262: note = LE
  misc_feature 263..1300: note = CDS
  misc_feature 1301..1384: note = RE
  misc_feature 35..239: note = bridgeRNA
ctcctatgtttgcaaaagagaaaatagtagtagctacaagatttaaatttgtaaaattaaagtgaaagagaatgagagaacatttgcgcctaaatagtttaaagagacatattctcgcaaagatatatcctcattcttttttatcttttagagtctgaacagaatgtaaggaattgagcaatgcttaatatccagaatatccaatcaggagaaaagacgaaggaggattcatcactttatgtattaatttaaaaaagtaaagatgaaaagagtattaaaacaagttgctggtattgatgttgcccaaaaagagttagtagttacattaggacgtatgtttgatgattttacaattgaactatttagtcacagagtttttaaaaaccatgattctggaattaaatcattagttgattgggtaaataaattagccgattatgaaattcctgttcgatatgtgatggaagcaactggagtatatcatcaaaagtttgcttatcacttagtgaataatggatatgaagtaagtattgtattgcctaataaaataagtaattatatacgaacaatagaattaaaaaccataaccgataaaagctgctctcaggccattgcacaatttggactagaacgaaaattagacaaatggttaaaacctaaaagtatttacagagagttacaacaactcacgcgtgagagagatcaaatagttcaagaaaggagcataattaaaaaccaattacatgctgaaaatgttgaagccaatccaaatcaaagaagcttggatagaatgagttcaagaatactatttttgaattctcaagaaaaagaaataaaagaggatattgctactttagtgaaaatgaatccagacatcaaaagtacaatagaaagaataaaaacaatacctggagttggtgaactaacagcggtaattgttttagccgagaccaatggatttgaattaattagaaataaatcacaattatctagttatgcaggacttgatgttaaagaaaaacaatctggaacttctgtaaaaggtaaggcaagaatatcaaaaaaaggaaatcgaaatctaaggaaagcagtacacttgcctgcattaacagcagtgaaatgggatgacaattttcggaatgtttatgctagattagtttcaaaacacggaataaaaatgaaagttttagtagctgttcagagaaaaatacttgagctaatttatatcctattcaaaaatgaaactgtttatgataaacaatatataacaaaaaatagcgtgcaaacacaaatggtttaaacacgctatagagactagtttgaaactgtcttgaaaaacaaaattaataaaaattaagattttagttggaaatcaacacagaat

SEQ ID NO: 9294 - DNA, 1398 bp, unidentified
  source 1..1398: mol_type = unassigned DNA; note = element_e897c9d
  misc_feature 1..2: note = core
  misc_feature 3..82: note = LE
  misc_feature 83..1162: note = CDS
  misc_feature 1163..1398: note = RE
aggccctatgtttgtaaaaatggcataagcctggttatttattagttttaaagtggaagctataaaccaataaaccagtcttatgccaacactaagtaacaaaattgattttaatggacagcatatttatgtcggatttgatgttcatctgaagagctggaaggttaccatcatgaccgaaaaactgctacacaagaccttttcccaaccaccgaaacctgaggttctccaccaatacctggtcaggaactttcccggtggcatttaccactcagcttacgaagccggattctgtggttattggatccacaacaagctcaagtatttaggaatagactccatcgtggtgaacccagccgatatccccaccaccggaaaggaaaagatccagaaggatgatgttcgggacagtaataaaattgcccgatctttacgaaacggagatttagtcccgatacacgtgccaacatcatttacgctggaagatcgtggcttggttcgttcccgtgcgaatctggttcaggacctgacccggtgcaagaaccggatcaagtctttcctctattttcggggactcgagatacccgagtcatttcgaagccctaactcacactggtcaaatcggtttgtccaatggctggaaggaatcgaattgccggagtccagcagcaaagccacgttgaatgtatatttgtcgcaaagcaggcaactgcgaagtgcaattctcgagactacccgaatcattcgggaactctccagaacagaacgatacaaaagtagacaggagttgcttcgtaccatccccgggatcggttatataaccgccatgattctcttaacagaactggaaacaatcgagcgctttgcaacttttgatcacttatgtggttttgtcggattggtaccttctaccaagagcagcggtgaaaacgaatcgatcggggaccttaccccaagaggacacagcgttcttcgaacagccctcattgaaagtgcctgggtggccgcccggattgatcctgcattgaataaaagctaccatgaatactgccgtcgcatggaaccaaacaaggccattatccgaattgcaaggaaactgctcagccgcatccgatttgttctgaagaacaatcttccgtatgagtattcggttgttaagtaattgattttaaattagtaactctataaaaaccaaatcagaggtgagactactttcggccccctgcagcctgattgccagtgtccgcttatgggagaggctgtagctcactttctatagaaaataaacgaggcgctgcagcccggacaaatccggttctgttaatagaaggttgtttttatagaaaattatgcttaaggttataaaaacatgaccagacccttgctttacaacataga

SEQ ID NO: 9295 - DNA, 1521 bp, unidentified
  source 1..1521: mol_type = unassigned DNA; note = element_e89c3cb
  misc_feature 1..2: note = core
  misc_feature 3..245: note = LE
  misc_feature 246..1412: note = CDS
  misc_feature 1413..1521: note = RE
  misc_feature 17..225: note = bridgeRNA
cttgtatactcaaaactgtaataatagttagagtataacttcctttctttctattgttataattaaattaagcactgtggatttgtgtcatttatatatagctttgactattggaggagactcttaccacagttcttatttttaatgtcaatcagtaagttagcgcttgacgcttcatcacaagactacataaataagaaatctgtgacttacccagtgctaaaacttatattggaggtgtttttatgtacttaatcggaattgatatctctaagtacaaacacgactgcttcatagctactgaagcaggtattcaaatcaaagcattcagctttgataacaatcgtttaggtttcgatttatttcttgaggtcttaaaatctttagatcagtcaaaagaaataagaataggtcttgagtcaacaggacactatggatcaaaccttaaacagtttatcacggcatctggttatacttatctggaatttaacccttacttaacgcacatgttttccaaggcattatcgttacgtaagacaaagacagataaagttgacgccaaaacgatttcaagtatgctaggttctgttgactacaagaccttacatactaaattttaccacatcaacgaattaaaacaactggtaaggtatcgtcatgttcaaatggtcaatcgttctaaaacactcattgaactgacaaacatccttgatcgtatctttcctgagtttaaacctttttttaacgaaagactctctagtagtgcgatgttcatccttaaaaagttcaaatccagagcaagaatttcgaaactttctaacaatgactatgaatccattagaagtcactctaaaggcagattatcttatgttagagttcaaaaacttaaatctttagctaaatcatcagttggatatgaaactcagtctgatctgttacttcttaaacactccataaaacactatgagacgttaactgaaatcattgaatctgttgaacatgaaatcatccatctcatggaaaatatcaatcaaacactgacaaccattccaggtctcaacatcatctctgcagcaattatcatcgccgaacttggtgattttaaaaactttacaaatccagctcaaattgtttcatttgctggactggatacatctgtcaatcaatcaggaacaatagaaaccagaggacatatcgtcaaacgtggatccggattacttagaatgactttttggcaaatcacttttgcgggcttaagattgaatcctaaactctatgattattaccttaagaaacgtgctgaaggtaaacatcataaagtcgccatggttcactctgttagaaaactaatacgcacgatatactatttaggtgtcaaccaactgacatttgatcattcacatttcaaataatcaaatgagggtgtagctacctcttatttgttcataaaacttatataggcttccatgtgaggtcttttactattttttatcatttattgcttgacttattatagtaagt

SEQ ID NO: 9296 - DNA, 1550 bp, unidentified
  source 1..1550: mol_type = unassigned DNA; note = element_e8a0253
  misc_feature 1: note = core
  misc_feature 2..278: note = LE
  misc_feature 279..1544: note = CDS
  misc_feature 1545..1550: note = RE
  misc_feature 32..273: note = bridgeRNA
cgttgataatggttatgccggtttagctgaccggcgataatgaaggatgatggacggtgcggtgaccccgggcggaactgacgattccttggaacctgtcctgtttttgatttgtcccgcgccgcccaccgacccgatggccatggaacatgacctcataggagcgtggttgctccatcggttcccagcaagaccatggtagcgtgccccgtcaacgttctgtctgtgccggaagccatcggcaacggcatcgcgacaaacgcatgaaaggaccgacgatgaagtcgactataccaacgatcctcgccggagtggatacgcattcaacaacccacacactggccctgctcgacgaacacgggcgggtgaccgacaccgagaccttcaatgcggacccgaagggctacgaacggctgatcgccatgataggtgacccggccctgtgcctgggcgtgggcgtcgagggcaccaactcgtacggtgccgcgctctcgcgcaggctcgccgcagccggctacaccgtgcacgaggtgctgcggccgaaacgcagcgtgcgccgcagcgacggcaagtccgatcccatcgacgccatagccgccgccagaagcgtgctcgccggcgatgggatcagcacgcccaaggcatccgacggttggtgcgaggcgttgcgccacctgatcgctgcacgcgagcagctcgtcacctccatgacggccatatcgaactgtcttgccgagttgctcaccaccgctccggaaggaatcagggagaggtaccggtcgctgccgtccaagagacggatcggcaagctcgcggcctgccgtccctccggtggcatcgtcgagcggaacgtgctctcatcgctgaagacgctggcgtcgtcatggcgcgaactgcacgacagggccgatgtgctggagtgccgcatgcgccagattctggaagagaacgcgcgtcccctgctcgacgtgtactgcatgggcaccatgtcggcggcccaactggccgtcatcggcggcgacaacccggaacgaatccgctccgaggcggcgttcgccaagctctgcggcgcctgcccgctgcctgcatccagcggcaagaccaaccggcaccggttgaacagatccggtaaccgtcggggcaaccgggccctgtataacgtcgccctggtgcgcatgagccaccaccaacccaccaaggactacgtggtaaggaaaaccaaggagggaaagggcaaactcgagatcatgcggtgtctcaagcgctacatcgcccgcgaggtctaccgggcgctcatcgcgatccgcaacggcgaagccggacgcgaacccgccgtcgaacgcggggccaggctgagggaagtgcgcgtctcgctcggcaaaacccagcaacaggtcggcgacgcgttgggcgtgccgtccagccgcgtcagcgagatcgaacgtggggttcgggatctgcccgaactcgaacgacaaatcatcgagtggatggactcaatcctcgggcaaagccaacactccaacacacttgacaatgtataggagcat

SEQ ID NO: 9297 - DNA, 1199 bp, unidentified
  source 1..1199: mol_type = unassigned DNA; note = element_e8a6d51
  misc_feature 1..2: note = core
  misc_feature 3..206: note = LE
  misc_feature 207..1187: note = CDS
  misc_feature 1188..1199: note = RE
  misc_feature 37..212: note = bridgeRNA
cttgtcttatgcattgggtgtcgctgcgtgcgacaaaggactgatttttccggggtggccaccccggaaaaatcgggaagggaacgggtcggaaagtcgcggaccatcatgggtcgcttaagagtatgaccgtcccttcttttccttgtgccctgaacggatacccgaggtctggcctcggatgacaagcataggacatggaaaagatgacgcatccgacggcagcttccaagcccgaggcgacgacggtgtcgatcacgatcgggatcgacgtctccaaagaccatctcgatgccgcccgccaccccggcggggataccgtccgtgtcgccaacacccgcaagggccagaccgcgctcttgcgctggatcggcgacatcaaagccgtggcgcgggtggtgttcgagccaaccggtccctatcaccggacgctggaagagcgcctggcgtccgttgccctgccaatgatcaaggttaatcctcgacagacacggcgctttgccgaagcgaccggcaggctcgccaaaaccgatcgtgtcgatgcgttgatgttggcccgctacggcgcgctgctggagccgatcgcacgcccggtccgctcggagatgcagaaccggctggccgaactggtcgcggcccgccgcagcctgatgcgagaccgcaccgcaacgctcaatcgcctcaagaccctgacgatcgacttgttgaagcgccacgcgcgtcatcgcttgcggcagatcgaggcgcagatcacatccctcgatgcggcgattgacgcgctcgtggtggaagatgtgcatctgtcccggcgccgggacgtgctggccagtattccgggactggggacggtcacggctcatacgcttttggccgacatgcccgaactcggcacgatggaagaaggtcaggcagcctcccttgcaggcctcgcgcccatcacccgccaatctggcacatggcgaggtcgcagcttcatccagggcggacgagccaccctgcggcaagcgctctacatgcctgccatcgtcgccatgcggttcaacccagatctcaaacgtgtttacgaccggctcatcgccagggggaaacatgccaaaatcgccatcaccgcgatcatgcgaaagctcgtggtccttgccaacgcgctgctccgcaaagatcgcctctggacgtcgaaacccgcttgatcacaacggata

SEQ ID NO: 9298 - DNA, 1489 bp, unidentified
  source 1..1489: mol_type = unassigned DNA; note = element_e8aad63
  misc_feature 1..2: note = core
  misc_feature 3..238: note = LE
  misc_feature 239..1468: note = CDS
  misc_feature 1469..1489: note = RE
  misc_feature 7..224: note = bridgeRNA
ctaatgggagtgcaccgggtggttttgccagtctggtgtctgagccgctggccggtgagcacttacgcgccctggtcttgtgtttgagacctatggctagatcgtgccccgtgctggtggtcggggagcggtagggctggtgggatgtcgtgccggtgagcactggtccattaggtcgcctgggtctcctcgcaggctcgtgtggtgttgtcgaggagggtgtagggaggcctggctggtgttgttcgtgggtgatgactgggcggagtcccatcacgacatcgagatcgtggatgagggtgggcgaaggttggtgcggcggcgggtgccggaaggggtggccgggatcgccgtgttgcacgggctggtcgctgatcatctacccgatcagggtgagccggtagatgtggtggtggggatcgagactgatcggggcccgtgggtgcaggcgttgatcgcggccggctacaccgtctatgcggtcaacccgttgcaggccgcccgctaccgggaacgacacgcagtctccggcgccaagagcgatgccggggatgcgcatgtgctggccgagctggtccggctggaccgtgcccaccatcgccccgtggccggggactccgcgctggccgagcacgtcaaggtggtggcccgggcgcaccagtcgctggtgtggtctcggcagcggcagaccaacacgctgcgctccacgttgcgcgagttctaccccggcgctctggccgccttcgacgacctggcgagccgtgacgcactcgccgtgctcaccctcgcgccgacccccgccaagggggcccggttgacccagaagcgggtggagcaggtgctggcccgggccgggcgcaaacgtaacctgcccggcaccgcggagacgatcgtgaccgcgctggccgcccaacagctacccgcccgggagggtgtcgtcgacgcctacgcggccagcgtggccgccctggtcgcggtgatcagcgaactgtcccgccagatccagaccctggagggtgaggtggaggcgggttttggtcggcacccggacgctgagatctacctgagccagccagggctcggcatgacgcttggtgcccgggtgctcgccgagttcggagacgacccgcaccgctacaccgacgcccgcgcccgcaagaactactccggcatggcgccggttaccaaagcctccggcaagaaacgcgtcgtcttggcccgacacgcccgcaaccgccgactcgctgatgcgctctaccagcaagccttcgccgccttgggcgcctcgccaggagcacgcgcctactacgacacccaccgagcccgcggcgccacccaccaccaagccctacgcacactcgccaaccgactcgtcggcatcctccacggctgcctacgccaccacaccccctacaacgaaacgaccgcctggccccccaccaaccaaaccgatcaccaagccgcttgacaccttacgaacgtgggatgt

SEQ ID NO: 9299 - DNA, 1591 bp, unidentified
  source 1..1591: mol_type = unassigned DNA; note = element_e8ab40d
  misc_feature 1: note = core
  misc_feature 2..78: note = LE
  misc_feature 79..1149: note = CDS
  misc_feature 1150..1591: note = RE
  misc_feature 1355..1582: note = bridgeRNA
taatggaatggtccggccgtgctccagccctgccagcgtaggatgttggcaaggggcaccaaagacaaggagcacgccatgttacagaagctcaatagtgaaatcgccgtgatcggtatcgatatcggcaagaactcgttccacatcgttggccaggatcagcgcggcgctatcgtgctgcgacagaagtggtcgcgtggtcaggttgaatcccgacttgccaacctactgccgtgcctgatcgggatggaagcctgtgttggcgcgcatcacctcagtcgcaagctaacggcgcttggccacgacgcccggctgatgccgggaaaatacgtccgcccgtactccaaaggtcaaaagaacgactatcgcgatgcggaagcgatcgccgaggcagtgcaacgcccaaccatgaagttcgtcgcgaccaagaccgccgagcaactcgacctgcaggcgatgcaccgcgtgcgcgagcgattggtcggtcagcgcaccggcgtcatcaatcagatccgcgcctttctgctggagcgcggcatcgcggtacggcaggggctgcgtttcctgcgggccgagttgccgggcatcctggcgacgcgcaccgatgtgctctcgccgcgcattttgcgcatcgtagaggacctgatgggagactggcaccgactggatgagcgcatcgagggtctgtccggcgaaatcgaaacgctggcccggcaagaccagggctgtgcgcggttgatgagcgtgcctggcatcgggccgatcatctcgagcgcgatggtggccgcgatcggcagcggagatgcgttctcgaaaggccgcgacttcggagcttggctcggactggtgccgaagcagatgtcaaccggcgaccgcacaatcctcggcagcatatcaaagcgcggcaatcgctatctgcgcgctctattcgttcaggcggcctgggtcgtgttggtcaagctcgggccaaagcagtgggaccgctatgggctcaagtcctggatcgaggcggcgaaaaagcggctgcaccacaacgtgctggcgattgcgcttgccaacaaactcgcccgcatcgcctgggcggttctccacaacgggcgtgccttcgagtgcgtcaggaccaatgagacggcgtcccagcctgcttgatcctcgcgctgtgctcgggcccgtcaaggcgtggcctggcagcgtggcagcaaggcgcaagcacaagcgcgacggccagccttgacggccccttcgcgcggcgcgcctgtgcatccgcaggccgggacgaaggaacagccgcaaggcgcaaacaaaggaacagcataaagcaagggagctatcaaatgatgtagccaacacctttacccgccgaggtctgcgagaggctgagacgacgatggaggatcggtcttcccggcgcatgcgaacactggtgaccccaatagcccgttcgaggcctatccggtaatgagatcgcatgcgcgctgatatccatgatggcgcggagcagatgctccaatcagagaccgtatacattgatgcaagaccgcgtcagccaggatcggcgaaaacctcttgcaacgcacggccggaccataca

SEQ ID NO: 9300 - DNA, 1344 bp, unidentified
  source 1..1344: mol_type = unassigned DNA; note = element_e8b099c
  misc_feature 1..2: note = core
  misc_feature 3..67: note = LE
  misc_feature 68..1099: note = CDS
  misc_feature 1100..1344: note = RE
  misc_feature 1127..1334: note = bridgeRNA
ttatgggatggcccgcccctcaacgaccggcgttatcatgacggcggattggaagaggagaagaccaatggcgaacccgaaaattgatgtactgggcgtagacttgggcaaaaacagttgcagcgttgctgggctcgatgattccggcgcagtcgttttgcgtcgacggatgacgagacagggtttgatcaagttcgcatcgaaattgccgggatgcgtggtggcgatggaggcttgctgcggcgcgcattttctggcccggatattccagtctcatgggcatttggtcaggttgatgtcaccggagtatgttcagccctacgtcaaggcacagaagaccgatgatcgcgacgccgaggccatcgcagaagccgcgacccgacccacgatgcgtttggtgacaccgaaaagcgaagcgcagctcgatttgcaaatcctgcatcgcgcgcgtgcgaggctggtcgcggaacgaacgcgcctaaccaaccaattacgcgcgatgttgctggagcgggggatcattctgccaaagcgccgcggacccctgatcaagcggctcgataaaatcatggccgataatccgccaatcagcgccaggatgctttgcctgcttcacgatctgcgtgaagaatgggcagaacttgatcgcaggatcggtgcatatgatgacgagctggttacgatgacacgcgaggacgatctggcgcggcgtctggtcacggttcccggcataggagtggtcaatgccacggcgctggtcgccgcagtgggcgatgccagtgcttttgccaaggggcgtgatctggccgcatggctcggcctgacgccgcgacaacactcgaccggcggcaaaaccaaaatgctgggaatcagcaaacgcggcaatcgatatctgcgaacccagctcattcatggggcacgggcagcgatgcggcactttgccgagcaacgaacggcgatgggaaaatggctgcgcaatctgctggcccgtgcccatcccaatgtcgtggtcgttgcactggcagccaaactggcgcggattgcttgggccgttctccggcgcggtgatgtgtaccaatcgcaggaagccacaatctgacgaaattgcgatcagcagtggctggccgctcgaaatgtctgtggaggtgagatagatggcataacggtcgaaccggcggacgggaaagcctggttaaaaatgtggtgtttgtcaccgatggctttatgaggcccccgccgcgcggaacccatcttggccaggtcagcagacctgagaccggatacgttgatgcagacccacaacgccatccaattttatccttgcagacggggcgggccatacgt

SEQ ID NO: 9301 - DNA, 1407 bp, unidentified
  source 1..1407: mol_type = unassigned DNA; note = element_e8b35c7
  misc_feature 1: note = core
  misc_feature 2..88: note = LE
  misc_feature 89..1141: note = CDS
  misc_feature 1142..1407: note = RE
  misc_feature 1199..1401: note = bridgeRNA
caatgggatggacgccccacctctaaccggcatcaatgtgccaaagtggatatctcaacaaccacttcaacgagaaggagcgtccgacatgaaggttacaacaattggcatcgacttggcaaaaaacgtgtttcaggtgcacggcgtggatgagcatgcaaagacagtgatcaagaagcaactcaagcgcgagcagatggctgcattcttcgtcaacatgcctgcatgcttgatcggcatggaagcctgtagcggcgcccatcactgggcgcgaaagttaacggcgatggggcacacggtgcgcctgatggcaccccaatacgtcaagccttacgtcaagagccagaagaacgacgcagccgatgccgaagcgatctgcgaggcagtgggtcgcccgaacatgcgttttgtcgccatcaagaccgtagcgcagcaaagcgtattagcgctgcacacagtgcgcgccgggtttgtcagtgagcgcaccgcgctgtcgaaccggatgcgcggactgctggctgaatttggtgtggtgattccccagggattgagcaaactgagcagccgactgcccgaggaactcgaagatgccagcaatgagctcacgggcgtggttcgcctgttgatgcaggacttgctggagcaactcaaaacgctggatgcgcttgtgaaaaagattgagaagcagatcaaggtgtggagccgacaagacgagcaggcgtgcctgatcgaacaagttcccgggattggcccgatcacagccagtgctatggtggccagcctgggcgacgtgaagaactttgaagacggccgacaggtctctgcctggttggggttggtgccccggcagcactccagtggcggcaagacggtgctgttgggaattaccaagcggggtgacagctacctgcgcactttgctcattcacggtgctcgctcggccatactggcggcgcagaagagaaaggatggcccgccgccatggctggcgagcctgctcgggcgcaagcaccccaacgttgcagcggttgcgctggccagtcgcaatgcccgaacggtgtgggctttgctggcgcacaaacgagattacgatccaaaacatggtttggacaaacgcatcagtgcagccttggctgcctgagtgaaatagttagacccaagaagtcaaagcagttcaaggagaacccaccagcgttgcgcagactacaacagcaattgaaggcaaatcaggtcagaccgggggttggaaaaacccgatcattgcggcgcacttcgagtgcatcaccccgctagaggatccaacccgctaaacccatcagggaccatttaagtccgaatgtacggttgcaatctctccgactcgccaacatttgcaatgtggcttgcaaaacaaggggcgtccatgta

SEQ ID NO: 9302 - DNA, 1385 bp, unidentified
  source 1..1385: mol_type = unassigned DNA; note = element_e8c0cb5
  misc_feature 1..2: note = core
  misc_feature 3..89: note = LE
  misc_feature 90..1121: note = CDS
  misc_feature 1122..1385: note = RE
  misc_feature 1095..1372: note = bridgeRNA
agatgggatggttgccgccctccccaaccggcatcgcaatgtgcgagcgttagaagcacagacctccacggaacggaaaggacggtaagatgaatgatatgatagtcggcgtcgatctggccaaaagtgtgttccagcttcacggtgccacagccgatggaaggccagctttccgcaagaaagtgccccgccagcagtttctgcgttttttggctgcatatcctggggcgatcatcgccatggaagcttgcggcagcgctcatttttgggcgcgggagttgatcagccgcaaccatcaggttctgatggtccctccgcagtatgtgcgcccattcgttaagcgccagaaaaatgacgccaccgatgccgaggcaattgtcactgcggcccgccagcccgggatgcgctttgtgcctccgaaaactgaccaacagcaggcccgtgctgtgctgttccgagccagagagcgccttgttcaccaaagaaccgagctcgtaaatgcgctgcgtgctgttctttatgagttcggctacgtcctcccggcaggcctcaggcagatcggtcgcgtgcaggctattctcgactcagatgaaggagctatccctcggctcgtgcgcgaggaatgcagggacctgctggaacagatcgcagagcaaacggctcgtatcgacgagagaactcggaaggcacaccagctggcggatggcgccgaaacggcgaggcgcctgcagaccttgccgggggtcggcccaatcacagcactggcatttgacgctttcgcaccagacatgaaaaccttcaggcggggtcgcgacttcgccgcctggctgggacttgttccgcgtcagcactcttccggagggaaggagcgattgggacggatcacaaaagcaggtcaggcggatatcaggcgtctcctaatcatcggtgcgatgtcgcggcttaactggctgggacgatcacgtatcccggaaggttcctggctggagcgaatgctggcaagaaagccgcgcatgctggtagcgatcgctctggctaacaaaatggcgcgcgccatctgggccatgatgacaaaacaacaggattacaggatccccgtgcctgctgccgctacggtctgaacgtagcgcacgcattccgcacagggcgaagaggtgtaagaagccgacgaccccatgggcaaaagatcgaaatgatccggatcgggaaaaccagatagcaactgcgagcaatcgagctcgagacacagatgtggacccgcttcgctgatcaccatcccggccagcggcttctgaaaattgccgcacatacaggcctgacagaagaccgcactcgatcaccagccccaggagaagaggccttgcacaacgggcggcaaccacaga

SEQ ID NO: 9303 - DNA, 1111 bp, unidentified
  source 1..1111: mol_type = unassigned DNA; note = element_e8c63b4
  misc_feature 1..2: note = core
  misc_feature 3..163: note = LE
  misc_feature 164..1105: note = CDS
  misc_feature 1106..1111: note = RE
  misc_feature 1..165: note = bridgeRNA
ccctgtgtgtggaaagtctgtcatgatggcggtgggcgggaagccgttgggtccttggcgcttgacgccgtgatccggcccggtctcccgcccgttccatctatcaacctgaacagttgcacgaggctgcgccaacagacctcgcatcacagggacaggcaccgtgatcataccccttcgctgcgtcggaatcgacgtctccaaacatcatctcgatattttcgatgaggccatcggtgcatcggaacgcatcgacaacgcgacacaggccatcacacagctggtggcgcgttggcgatgcgatacgctggtcgtctttgaggccacgggggtctacgacctcgagcttcgcgaggcgctgcgtcaggccggggttcgctttgcccggatcaatccggcccgcgcccgcgactttgcccgcgccagcggccagctcgccaagaccgacccaatcgacgcgcggatgctggcagcctttgctcgagccatgacgcccgcaactgagcaggtcgccacaccggcccgcaacgctttggcaaggctggcaaaacgacgcgatcagctggtcagcatgcgagctcaggagaaaaaccgccgcagtgaggccgaggaccgcgccatggccgaacggatcggccgcctcatcgccgtgctcgacgacgagatcgcggagatcgaggccgagatcagtgcgctcatcaaagcagagcaggagatcgccgaagatgcgcagttgatgcgctcactgcccggcatcggcccggtggcctgcatgcagctcctcgcgcagatgcccgaactcgggcgtgtcggtccgaagcaggttgcggcactggccggcctggctcccttcaacgtcgacagcggtacctatcgtggaaagcgcaagatcggcggcggccgcaagcgtatccgcgacgccctctatatggccgctctcaacgcggttcgccgcgccgatccattcaaggcattctacgaacgcctgcgaaaggccggcaaaccagccaaactcgccctcattgccgtcgccaggaagcttctaaccgtgctcaacgcaatgatgcgcgaccgaaaaccttatatgatcgccccatcgacataacagttg

SEQ ID NO: 9304 - DNA, 1634 bp, unidentified
  source 1..1634: mol_type = unassigned DNA; note = element_e8c72c4
  misc_feature 1: note = core
  misc_feature 2..205: note = LE
  misc_feature 206..1474: note = CDS
  misc_feature 1475..1634: note = RE
cctcgtatattctttctgccacttcttacgctgtggccgcgttctttactcatggcatcgaatatgagatgaaggacgcgcaatcggcggagggcgcagtgcttcgctcctgggttcggtcccgttcgaaaggcttgcgcctccgacctgcaacttgacgcgaattaggctggatagacgatgagggtctgcatatctaacgaggttgcgtgctgcggcgttcggcaggaaaacctccgcttcgagcacggacgagaaggaggccgtcttgcatttcatcggaatcgacatcgcgaagaaagagcacttcgcggggattcgcgccgaggacggcgccccgctgagcagggcatggcgcttcgccaacgacgaaggaggcttccgctccctgctggagcgcctgcgctccctcggcgtcgaggcggagggctccctggtggccatggaggcgaccgggcactactggatggcgcttttcgcccacctgtccgcgcacggcttcaggatcgccgtggtgaacccctcgctcgtgaacgcgtttcgcaaggctgacacgatgcgcaggaccaagaccgacgccgtcgactgcttcctcatcgccgagcacgcccgattcaagcgccttgcgccatccgagctcgacccggaagacgccgagggcttgaagctgctgacgcgctaccgcgcccatctggtggacgagcgcacgagcctcaagaacagggccacctcggtggtggaccgggtgttcccggagctttccgacctgttcgacgacctctgctcggcgacccccaaggccctgatcagaaagtacccgacgcccgcatcggtcgcgtcgtgcgacgtccgcacgctcgccaagctcgtcaaggaggcgagccgggggcatttcgggcgggagaaggccgaggaggtgaaggccgctgcgagaagatccgtcggcatcacgttcgccctcgactccttctccttcgagctcaagcacgtcatcgacctgatcgaccacatcgacgagcagatcggcgccctggagaagacgatctcggaagtgctcgggcgcacctcgggcaagtggctcgccaccgtgcccggcatcggcgacacgctggccgccgccataaccgccgagatcggggacccggagaggttcgaaggccccaagcagctcgtcgccttcgccggcatggatgcgaccaaggcggagtccggcagcttcgtcggcaccggggagaagatgtccaaacgcggctcgcatcacctgaggttcgccctcatgacggccgccgacaaggcgcggatgtacgacccttacttcggggactactacgattccatgatcgcccgcggcaagcaccactacgtggcgctgtccggggtcgcgagaaagctctgcggagtcatcctcgtcctcatgaaggagcagcgggcctacgagcgaagaccctccgtccagtcggagaagaagctttaagctcgccttgcaggcaaccgaccttcctaagcggtggatttgacacggcttggatccccctgtccgaaaacaggtccctgcatgccctgtatcccgtattcgattgtcaaagttcctatcgagggtctcagaaattaccccttgacatcagatagctggt

SEQ ID NO: 9305 - DNA, 1375 bp, unidentified
  source 1..1375: mol_type = unassigned DNA; note = element_e8ca18e
  misc_feature 1..2: note = core
  misc_feature 3..81: note = LE
  misc_feature 82..1098: note = CDS
  misc_feature 1099..1375: note = RE
  misc_feature 1122..1343: note = bridgeRNA
tgatgatatggactcctctctccctgttgacggtgtcataatgcaccactgagacaaacaacggccgaagaggagtccgagatgaatactaacgcagtcggcttagacatagcaaaaaacatcttccatttatacagccttggtacagatggaaaagccacgaagaagaaattaaaaagagccgacttgctgcggttttttgccaactatccagtgagtctgatagggatagaagcctgtggcggagcgcattactgggcaagggaactgaccaaactgggtcatgaggtcgtgttattgaatgcccgctatgtgaaaggttttgtggtgggtaacaagaacgactttaacgatgctcaggcgatacatgaggcggtgttgcgtcctaacaagcgcgtggtgaaggtcaagaccgaagaacagcaggatatgcagttgctgcacaacatccgacaagatctggtcgataaacgcaccgcgctggtcaatcaactgcgcggtctgttaatggaaagaggtattgtgattcccaaaggcatcaaccatgtcagaaaagaactgccgttcatattggaagatgccgaaaacggcttgacgcacttaagtcgggaactgtttgccgaacattaccaacaattaaaggaactggatcaggcgattaaaagccacgaccagcgcataggtcgcctgtgccaacaaaaccggctcagtaaacgctttttagatgtgccgggggttggtatcatcaccgccagcatcattgccgccgacatcggcgatggcaaagcctacgccagtggacgagactatgccgcgagtttaggcgtggtacccaaacagcacagcagcggcgacaagcaagtttatttaggggtgagcaagcgcggtaaccgttacattcgcaaaatgctgatccacggcgcacgctcggtactgaaaacctgtagcggcaagaccgataaattgagtgtgtggctgcaagcattaatcgagcgtcgcggttttaacaaagccaccgttgcccttgccaacaaaaatgcccgtattttatgggcaatggcgagtcaggataagggctatgaagtacgcgccgcctaactaaacacatcgttaaactaacaaaaccagattgcgagggcaagtgaacccataatgatgacaagcacaggtcagaccgatactttttaaatccgttcggcacagtgattctttagaaatcgataggatggtagcgataaaagtaggcggatagattcatcaggagtcctgaggtaacaagacctcttcatgagaccgaatatatggctgcaatcttgatctctgtgaatgacattattatgaaactaatacttgcaataattgaggagtccatata

SEQ ID NO: 9306 - DNA, 1383 bp, unidentified
  source 1..1383: mol_type = unassigned DNA; note = element_e8cb9b8
  misc_feature 1..2: note = core
  misc_feature 3..129: note = LE
  misc_feature 130..1155: note = CDS
  misc_feature 1156..1383: note = RE
  misc_feature 1168..1348: note = bridgeRNA
acatggggtaatcgcgggaagcgagtcgccctggtcagctagacatggatcggggtggctgttccccgataagatggaagtacgggctcacgacggaagccgggcccaggcatctgaaggagaacagccatgggtgaatatataggactcgacgtttccatgaaagacacgtcgatatcggttcgccgggaaggcaagcggatatggcgaggcaaatgcacgtcagatccggagacgattgcacggatgatccgcaagcacgcgccaagccctgagcgggtcatcttcgagaccgggcctttatcggtttggttttaccatgccctccaggctgaagctctgtcggccatttgtgtcgatgctcgtcacgccaaggcagcgttagatatggccaccaacaagaccgatgcgaacgacgccgacggactggcgcatctggccgaggtcgggttttaccgagaggtccgggtcaagagcttcgacagcatgctgacacgtacgctggtggctgcacggacaaagctggtcaggataaagaccgaaatctcaaatcagatccgcggcctgatgaagacgttcggcctcgtcatccctgcaggcaaggggagcacgttcgaagccaatgtgcgtgtaagactcagcgagaactccgagttggccgccatcatcatgccgctgcttgaagcttggcgcagcatccgattgcgcgctgccgaattgacccggcgcttgatcggcgatgcccgccagagtgaaagctgccagctgctcatgtccatcccgggcgtcggcgtcgtcaccgcatcagcctttgctacggccgtggaagatccggccaacttccgaacgtcgcggtcagtcggcgcctggctcggactgacgacaaggagatatcaatccggccaggtcgactataacggccatatctcgaggagaggcgatcatcaggtgcgcagcctgttgtacgaagcagcatctgtcattctgactcgcagctcggcacagagtgccctacgcgactggggcctcaagctgcgggagcggatcggcttcaaacgggccgccgtcgccattgcccgcaaactggccgttattatgcacgcaatgctgaaatctggagaactgttcgacaggtcggccggagccccggcgtaagcacgcgccggcgagagactgcttagcggttccgtccctgccgggacgtgggctgaaccattccgtctgatgggatgcactggttcttcgccaagtgcgccgtccacataggaaggttccgtcctcgaagacccaacatgcggcggctcatgccgaccgcgaagacgaccctgaacccggcatacggttaatgcagaatctgcttgcatccaacggcgcgattagacg

SEQ ID NO: 9307 - DNA, 1390 bp, unidentified
  source 1..1390: mol_type = unassigned DNA; note = element_e8de034
  misc_feature 1..2: note = core
  misc_feature 3..88: note = LE
  misc_feature 89..1120: note = CDS
  misc_feature 1121..1390: note = RE
  misc_feature 1091..1377: note = bridgeRNA
agatggggtggttgccgccctcccagacggcatcgcgatgtgccagaaaagtggagtttgaggccactgagcagaaaggacggcaaccgtgacaaacgatacgatgatcggggtggatttggcaaagtccgttttccaggtgcacggcgcctcgatgacgggcgagctcagatttcgcaaaaagctatcgcgacagaacttccccaagttcatggccgaccaacccccggcagtggtcgtgatggaggcgtgtggcagcgcgcatcactgggccagggagatggtccggcttggtcatgaggtcaggctgatcgcgccgcattacgtgaagccgttcgtcaaacgtcagaagaatgacgaggccgacgcggaagcgatcgtgattgccgcgcagcggccggaaatgcgctttgttcaacccaggaccgccgatcagcagagcagtgccatcctgtaccgctcacggcagcgtctcgtccgccagcgtaccgaactcgtgaacgcgctcagggccagtctttacgaatatggccacgtcgttccgttgggcatccagcatatcaagcgcattcgcgagatagtggaggccccgaacagtgatctgcccgcgctgatgcgggaggaatgcgtggagatgctcgatcagatcagcgaacagacggaccggatcgcgggccggaccgcaaagatcaaggcgttggcggccgcaacggatagtgctcgacgcctgcagaccgttccgggcgttgggccactaacggcgatggcggtggaagcctttgcgccaccaatggagagctttcgcaagggccgggattttgcggcttggctcggcctggtccctcgccagttttcctcgggcggcaaggaaaggcttggtcgcatcaccaaggcgggacaggccgatatccgacagatgctgatcatcggagcaatgtcgcggctgaactggatggggcgaaaatcgatcccggaaggttcgtggctcgctggcatgctgggtcgcaagcccagaatgctcgtggcgatcgccctggccaacaagatggctcggcaaatctgggccatgctgaccagaaatgagaattatcgagatccggcgctggctatgactgcttgatatcagagtagtccatgccacgcggatgaagggagtgtgagaaggcgacgacccgaatgggcaaaatgatcgaacagatctagatcaggaaaaccagttagcggctccgagcttcaagctctcttgcgagatttggacctgatctgcggatcaccataccggccagcggtctttcgaaaatgccgcgcatacaggccttacagaagaccgcgctcgatcactcgcacattggtgtaaaaaccctcttgcatcacgggcggcaaccacaga

SEQ ID NO: 9308 - DNA, 1424 bp, unidentified
  source 1..1424: mol_type = unassigned DNA; note = element_e8e2af5
  misc_feature 1..2: note = core
  misc_feature 3..127: note = LE
  misc_feature 128..1165: note = CDS
  misc_feature 1166..1424: note = RE
  misc_feature 1179..1376: note = bridgeRNA
agatggggtattccgcttgagccccacctttaacgattgcggattgtagaagggtgctgcgcttctgttgatggtaaaacgaggtcatgttttgcaatagcctcaagcatcggaaaggaagcgcagcatgaaacattatactggacttgacgtatcggtaaaagagaccgccgtttgcattatcgatgaagccggtaagatttgccgtgaggtaaaagtatcgtcacatcctgatgacctgattgtagttctgaaagatcctaggtggcatattgaacgtgtcggacttgaagcgggccccttatcgcaatggctgtttgagactctggcaaaagcaggcgtgccaacgatttgcatcgagattcgtcacaccaaggcgtttctgaaggcacagccgaacaaaactgatcgtaacgatgctcgcggcattgcccagatgatgcgcgtaaatctgtacaagcctgtacatgtgaagacattgacgagccagaagcgtcgcgccttgctcacggcacgtcaattgcttcaacaaaaagccattgccatagagaatgacattcgaggcctactgcggaattttggtttaaaggttggcctggccggtaagatcacgtttgaagaacgggtctgcgaactggtcactggctttccagagcttgcggaaatcatggacgttctgctgtcagcccggaccaaactacgcgatgaacttaaaaagctgcagaagaaagtgcttgatttgacctcccgggatgaaatctgccgactgttgatgactgttcccggcgttggccctgttgtctcttttgcctttgtgagcacgattgatattccgcaacgatttaaaaactctaaggcagttgggccaatcctcggattaacgccaaagctgaatgaatcgggtgagagtaaacgaattggtcggatctcctgctgtggtgatgcaatgatgcgttccttattatacgaagcggctcagaccctcctgacgcttgtcaagaaatggtcgtggttaaaggcttgggcaatgaagattgccaaacgagcaggaaagcaaaaggcaattgtcgcacttgccaggcgactggctgtcataatgcaccgcatgtggagcgacggaaccgagttttgctggactaggaatggcttacccgctgctgcgtgaacagtagctgtataaagatccacatcgccgtggagagatgtcctttgcaggacgatgaatgaggtaagttcgtagaggtggcagtgctggtcgtatatggcgatcaggacgataccgagattggatacctcattcgtctaaccccatagtggaagggccaacgcgccgattccggagagaggcaagaacctgcgaaagactttgaaatgcggagattgtgaaatatcgaagcgcttgactttagctcgccgaatagaga

SEQ ID NO: 9309 - DNA, 1184 bp, unidentified
  source 1..1184: mol_type = unassigned DNA; note = element_e8e3af6
  misc_feature 1..2: note = core
  misc_feature 3..218: note = LE
  misc_feature 219..1169: note = CDS
  misc_feature 1170..1184: note = RE
  misc_feature 26..193: note = bridgeRNA
cttgtatgttctctcccggtaggtcagaaagggacttgccggggtggagggaccaaagctgcatctggccaatggcacagactgtaggagacttcgtcccgcccctcaccactagcgccaataaggagtctatcggcctttgggaccgacgatttgtgacaagccagcgcaggtgagctcccggcaagcaattcgtacactatctgggagaacagaacatggcaatgcaggtagaagcgacgttgatcggtgcggatgtcgccaaggttgaactggttatccgtacatccgattcagcaaatctcctgaagttacccaatgaacgcaaggcgatcgatgcgtacctgaagtcgctgcacggtccggtttgcctggttgtggaagccaccaacatctttcatgtcaccctggtcgaacgggcgcacgcgctgggtcatacggtttacgtcatcgacggcctacgcttgaagcgttaccgcgaaagcatcggcgtgcgtgccaagactgacgccaacgatgcggccctgctgttgcgttatctacgtcatgaacgcgaggagctgcgtgcgtggagtccgccgccacaaggctataccgccatacaaaagctgttgcgtcgccgcgcagtgctggtccaggcacgcacgcagctacgccagagtctgcaaggattgtctgaactgcaatcctcgatgcacgccctgctgaaaaaaatgactgctctggtgcacctgatcaacaagcgtctacgcaaccacttgctgcgctgcggctggatgaccgatgctcgacgctgtcagggcatcgaaggcgtcggcccgatcaccggcgcggcactgaccttgatcttccatcgcggtgcgtttaccagcgctgacgccttcattgccttcatcggcatggatgtgcgggtgtgtgaatcgggtcaatacagtggacgacgaagactcaccaagaagggcgacagcgaggtgcggcgcctcctgtacatggccgccatgaccgcttcccggtccgcgacatggaaacccttctacgaacgcgcattggcgcgtgggttgtcccgtatccaggccctcgttgcactcggacgaaagctcgcacgcattgccttcgcgcttatgagcaatcagtcggactatcagccaaggcagcccgcgatggcttgattcgcaacatagaat

SEQ ID NO: 9310 - DNA, 1176 bp, unidentified
  source 1..1176: mol_type = unassigned DNA; note = element_e8e6de8
  misc_feature 1..4: note = core
  misc_feature 5..215: note = LE
  misc_feature 216..1169: note = CDS
  misc_feature 1170..1176: note = RE
  misc_feature 48..210: note = bridgeRNA
gcttatacattgcgaggccggtgcatcagttatgatgcaccggcctcgtttgtcattggggtgcttgcaacaccttggtgacgatgcgcaaagcggttggtccttgccgggcctgaactttcgttcgtaaaaaagcagaaccctttgtgcatttcgaggcttcgtcgaaccgttgagagagcttcgcgctcgcgtataagggagactatagcctcatgacctatactaaccgctttgtcggcatcgacatatcgaaatcgtcgttcgacatctgtgtgcttcccgacaagcactcggccagcttctccaacgatgctggcggcattacccggttcatcgcctttgtcgcgcggctggatggcgtcgagcgcctggttctggagcctactggcggttacgagcgcgacgtcgtgaatgcgctgctggccgctcatctgccggtcgccaaggtcaatgccaaacagatcaggcagttcgcgcgtgcctgcggccagctttccaagaccgatgggatcgatgcattcgtcctggccgactatgccagacgcatggaaaccaaggttctcgcgccatcctcgccggcacaggcgaggctgatcgatctagtgtcgcgctataggcagctatcgcacatgatcgtgcaggagaagaaccggcgcgagaagctcggtgctcagaccgatgccagggcaaaggcgtggatcgaggagacacttgcattcttgatgcagcagcgccagtcggtggtcgatgcaatggaagcctgcctcaagtcggacaaagaccttgccggcaaggcgcgcgttctcatgtccttcaagggcatcggactgcgaaccgcatgcttcctgatcgccgggcttcccgaactcggcctgatgaacaaggggcaaatcgccaagctggtcggcgtcgcgccgatcaaccgcgacagcggcctgatgcgcggcaaacgcatgatcgccggcggaagaaagccggttcgagacgccctttatatcgccgccttaccagccatccgattcgatccccgcatgaaggcagtcttcgaagccctgaaggctaagggcaaacccggaaaggtcgctctcatcgctgtcatgcgcaggatcatcatcattctcaacgctagaatgcgccaccataacgcaacgatgcttgacgcataacaccgtt

SEQ ID NO: 9311 - DNA, 1562 bp, unidentified
  source 1..1562: mol_type = unassigned DNA; note = element_e8f3121
  misc_feature 1..2: note = core
  misc_feature 3..288: note = LE
  misc_feature 289..1503: note = CDS
  misc_feature 1504..1562: note = RE
ctggtattatcttcacccgatatacgagtaaaagaattaatgttaaactgagaacaattttctgtagggagacagcttgactacctccttatggcgacataagtcgaccattgaacatagattgttgcttcctgcgtatctaactgggaatattcattaaggatgctatggggttcagttgacactgaattaccattcatatcccaggatatattgagttagatatggcagtaatactctccctacataaaaaagaacaataaccgcattaccgacgaaaggacgcccatgaattatcttggtatcgacgtttcaaaagccacctctcgctttgtttttctagataacgacggcgagaaactcacaaaatcattcacgctcaacaacggtcacgatgactttaataaacttcttgatcggctcaaagaattaaatctgttaccagacaatatccttattggaattgaagccaccgggatctggtgggaaaatctttacagcctgttgaccgaacataaatttaaagtcatcgtgcttaatccccatcagactaataaattccgcgaagccctgcgcattaaggccaagaccgacgacattgatgcttacgtcatcgccggattgttacgttcccaggaatacgcttcaagttatattcccgaagaatcaatccagtctcttcgtgaaatcactaaacttcgattccaattagtcaaagatcgccaaaactacgagcgtcaggtcaatgcgttactcggtcttttattccccgagcacgctcaaacggccatcaagaacccttttgccgtctcatccatggccattttaaaagcttatcctacggccaagcatctggctgaagctaaaccaaagaacattgaaaaaatcgttcgttccatccagggcaataacttcaacatcaaagaaattcaattccttatcgaatgtgctcaaaaatctatttactcgggccgcgccaaacatgaccgcggcttaaacctgatcattcttctaacacaagtcgagtctttgcaaaatgccatcgttcaactcgatgaacggacgaataacatcttatcgccatcggatgacaccatgaacttccccggctcaaacctgttaaccatcccgggtgtcggacctaaaacattggctgcgattctctctgccgtcggttctaacggccaggcattccctgacggcaaacatctcatcggccatatcggattcttccctaaaatttatgagtccggtgaaactagacacgataacacgatctcgaagcgtggacctaaatatttacgcgccgctctttacatggctgccgtcgcctgtttaaagcataacccggaatttaaagccctttacaaccgtaaggtctctcaaggcaagacggccaaacaatccttggtttatgtcgccaaaaaattagcccatctttgtttaagcatgcttaaatccggcgaggcctataatccctcacgtgtctttatgcctgtttgagaaagatcgtttactgctctttgataatctgttttttatcttgaccctttataggatgt

SEQ ID NO: 9312 - DNA, 1430 bp, unidentified
  source 1..1430: mol_type = unassigned DNA; note = element_e8f7625
  misc_feature 1..2: note = core
  misc_feature 3..217: note = LE
  misc_feature 218..1420: note = CDS
  misc_feature 1421..1430: note = RE
ctcctaccatcaattcaggtatagggtatataattaacaactgaatatggaaaggcaggaggactcagttcttcctgggttaaagaaccctcataacagtctgtcccctgcctcctaagccataataggttgatgggatcggagaatccttgtcaagatggaggattggtcgggaggcagatcctgcttttgccatgtacgaattggaggtgcggatatggatgaaagaaagggttttagatggtttctcggcatcgatatttccaaggagacattcgatgcgtgttgtatcagcggtcaaggggaaaagcgtttcagtatctcggcgtccatggataggaaaggatttgaggagctgattaaacagctttcttcgctatcagttcctcaagagtctgtcttagtcggtatggagtcgacggcctgctaccatgtgaatctatattcttttcttatctcgttagggtataccgtgatcgtgattaatcccctgcttatttctaattttgttaaactccaattgaggaaaaccaagacggataagaaagatgcctatgtgattgcgcagtttcttcttttgaaccgtgattcccttggtcgaaccgttggatcctctgatttctctgatatcagggatctctccaggcaacgggaaagcctagtggatcagatgacttctatcaagattgaaatcaagcgattattgaccatgactttccctgagttggaacacattgcctgtatatttaccaaatccatgcttcgtttgctctgtcaatatccttcagctgtttcgataaggcaggcaaagcgttccaaaatagccaggatactgataccgggatcatatggtaaacaaacggatgcatcggttgagcggattgtcaaggcagccgagacgtccataggaacagcaagttctgccaaagagatcatcctcaaacagaaagtctccttgctgatgcaactggagcagcatcttcaggaactgacggatatactcaccgaacagtgtcaagggaagatgaggagggatatggacatccttacctctatgagaggcataggaaaaaagacggccatgaatttcctgattgaggtaggacgggatgtcaaggagtttgagagtcacaaaaaggtaatagctatggcaggtctcgatcctgccctatatcagtcagggaagatagatcgaaagggaaagatcaccaaacgaggcaacaggcacctcaggcgggtgatctggttgatgacaacaagggtcatccagtttaacgcaagattcaagcagtattacctgaagcgaatccaggacgggctgccctacaaaatggctgtgttggcgactgctcataagctcattaggatcatgtttgctatgttgactaatgaaactcaatttaatgaaagcatgaattgatgatagttga

SEQ ID NO: 9313 - DNA, 1232 bp, unidentified
  source 1..1232: mol_type = unassigned DNA; note = element_e8f98ea
  misc_feature 1..3: note = core
  misc_feature 4..220: note = LE
  misc_feature 221..1210: note = CDS
  misc_feature 1211..1232: note = RE
  misc_feature 7..199: note = bridgeRNA
gctattagatttgtaaaagagatttatattaaatttatatatctgaaaacctgaagaattgaggtgaactagttcggctcgtaagttcatgacttatcgtgagcattagtcctcaattcttcttgggttttggtgccatttagaatgctaagttttaagacttattaatagcgatagcattaaccctgaggtttccagactcttacctaattgtaaaattatgaaaaagttatttatcggcatcgatatatcaaaagatgtttttgacttctacggtatatctgaaacaggtgaaacagtgatcccatcaggtatccttttcaatagcaagaaagggatcaagtccttcctgaccatggtaaagaagtataccggctacgagccgcatatgtgcatggaacatacgggtctctatggttatttgcttatgacggaatttagttctgcatcgatgagattctcagtcatcaatcctcttgagatgaaactttccagtggattggcacgtggtaaaaacgatgctgttgatgctttacggattgccaagtatgcactggccaataggtttgacctaaagcccttcaccctggccagccgtgaaatccgcagacttaaaatccttatggccatgcgggatggccaagtcaagattatggtacagcaaaaaaacagcctgaaggcatttaagttggtggcagctgatacttccctggcaaaggaactcaaagagcatcaaaaactgatcgatgcacatcaaaaggtaattgctaagcttgaaaagcagatgctggagatcatccggggaaatgtccaactcagtgaatcttatcgcaagatcacaaaggtaattggtgtgggaccacttactgcgatcaaatgtctcgtggagaccgagaacttcagcaagtttgatgaccccagaaaatttgcctgccacagcggtcttgccccgtttgaataccaatccggaagcagcgtaagaaaaagggccaggaccagtcccatcagcgacaaaaacatgaaggcaatcctgttcaaggcagcttcatcggcgctacaacatgacccacagctcaaaaattattataaaaggaaaacggaagaaggaaaacataaactatctgtaatcaacgctattgcaaacaaacttatattgagaatattcgcagtggtaaaaagagatgaaccatttgtgaaattatcagtataattatttgcttttatcttagaat

SEQ ID NO: 9314 - DNA, 1628 bp, unidentified
  source 1..1628: mol_type = unassigned DNA; note = element_e9013d5
  misc_feature 1..2: note = core
  misc_feature 3..287: note = LE
  misc_feature 288..1499: note = CDS
  misc_feature 1500..1628: note = RE
  misc_feature 35..307: note = bridgeRNA
ctactacaataatattaggctacggtataaggataaattagccgatatccctataccatcttgttgccataactgctaaacagtaagaagcaatgggccagacacttaggttcttggactttgcgtccgtattgtagtcagtcgaccagcttcttacttgcagcgttcgatttatgcaggttgaactattcttccaatacgttcgtgtcacaccacagtagattgaatggcaataagtaaagctattttccacattgcttagtctattattgttgaggtgattctttatgaacgcagttggtattgatgtttccaaaggtaaaagcatggttaccattcttcgtccctttggcgaaattgtcatcaaaccttttgaagtgaaacacacttcttctgaaatgaatgctttaatctctcgtatcaaaaatatccaaggcgaatcccgaatcgtcatggaagccacaggccattattatgagcctattgcccatgcactcactcaggccgggttctacgtcgctcttgtcaatcctaagttaatcaaggacttcagcaacaattctcttcgcaaagtcaaatctgacaaggcggattcctctaaaattgcccgctatacccttaacaactggaataatttggaccaatatacttatatggaccatcttcgtgctcaattaaaacttctgaaccggcagttccatttctatatcaaagaaaagactgcctccaaaaacaacttaatatctctacttgacgaaacctttcccggttgcaataagttctttgatagtccgacccgtgatgacggacatcaaaaatgggtggactttgctgaaacctattggcatgtggattgtgttagaaccatgtctctttccgccttcatcgagcattaccagaaatggtgtaaatgtaaaggatataattttagttccaataaagcgaaagaaatctacgctgcgtcgaaagagataattgcagttcttccaaaggacaaccttacgaaattgcttgtaaagcaagccattgaacagcttaatgccacttctaaagtggtggaagatattcgcatccagatgaatgaaactgcttcacagctcccggaatatccggttgttatggcaatgaaagggattggctcttctttaggacctcaaattatggctgaaattggcgacattactcgctttacgcatcgaggcgctttgaccgcttttgccggtgttgatcctggtgtaaacgagtctggtgaatatacccaaagaagcgttccaacctctaagcatggttctccgtatttgcgcaaagcactatttcaagtcatggatgttctcattaagactacaccttctgatgatgctgtttatgcttttctggataaaaagcgtgctgaaggaaagccgtattatgtgtacatgacagccggcgccaataaattcttgcgtatttattacggtcgagtaaaagaatatttgcgttctcttcctgatacggagtagcgtcaatatcctatattttccaggccagcgtttttcggtggtctatttttgttgttcaaatttcctacataaattccacgctttttcctgcaaatttactcatttttctattgactttttatttgcagg

SEQ ID NO: 9315 - DNA, 1608 bp, unidentified
  source 1..1608: mol_type = unassigned DNA; note = element_e90f9fe
  misc_feature 1..3: note = core
  misc_feature 4..264: note = LE
  misc_feature 265..1473: note = CDS
  misc_feature 1474..1608: note = RE
  misc_feature 12..284: note = bridgeRNA
tctattacaataaaattggttggaaccctgggcagccagcctggggtttcatccgtctcgtgccaaagctacaataagaggagcaactggctgacctctcctttcttgggcagtaaagtccgtcaaaaagactgtcagccgtcctcttgttgcagcgttcggtttaagcaggttgagccttgagttcgtgtcacccaatagattgaatcggcaacgagaaaaagatggattccggttgcagatttttgtattggaggaatgacaatgaactgcgcaggcatcgatgtttccaaaggaaaaagcacggtatgtgtcatgcgtccctctggagaagtcctcgtcccgccctacgaggtacgtcatacagagactgaactgaacgaactgaaacaaatgctcagaagcctcgagggcgagacgagggtcgtcatggaggcaaccggcaactaccacttaccgatcgcccagtatcttcacgacgccggattctttgtcagtgccgtcaatgcgatcctcgtacacggctatgataacaacagtctccgacgcgctaagaccgacaaaaaggattcgatcaagctggctcggtatggccttgcaacatggaccgaactgccacggtatatccccgcagaagatgtccgtatgctgctcaagaccgctcatcgccagtatcagcattgtgccaagctgcgcaccatgctcaagaacaatctgatctctttactggacactgtattcccggacgcaaaccgcctgttctccagcccgccgagagccgatggcagcgaaaaatgggtcgactttgtgtctaccttctggcactgtgagtgtgtttgcggtctgtccgaagaagcgtttactgccaagtatcagaaatggtgcaaaaaacatcgttaccatttcagcgatatgaaggccattgacatctacacctgctcctgcggccattggggcgttttacctaaatgcaatactacaaagctgctggtacagcaggcaatctcacagttgtccgctgcttcctctgcgatggcggctctccaagccgaaatgctttccctcgccgcgtctctgcctgaatatcccgtcgtaatgcagatgttcggtgtcggccctgtcctcggcccgcagctcatggctgagatcggcgatgtccgccgcttttactctaagaaagcccttgttgctttcgccggaatcgacgccccgccataccaatccggtcaaatggatcttcgcagccgcagcatttccaaacgcggctctgcttctctgcgcaggactcttttcctcgtgatgtccgtgatcctgcaaaatgctcctgctgatgaacccgtcttccaatttatggacaaaaagcgctccgaaggaaagccataccgtgtttacatgatggcttccgccaacaagttcctgcgcatctactacgcctctgtcaaagcccatttggacagcttggaaaatctctaacggctgttcttcactctgtcatttcgctgccgcttcttttttgaggtcgtttgcggcctgctttgctattcccttttttatccagcaaaaaatttttcgttttcctcattttggggcttgacttttcttagcagg

SEQ ID NO: 9316 - DNA, 1215 bp, unidentified
  source 1..1215: mol_type = unassigned DNA; note = element_e91a5d1
  misc_feature 1: note = core
  misc_feature 2..212: note = LE
  misc_feature 213..1184: note = CDS
  misc_feature 1185..1215: note = RE
  misc_feature 35..201: note = bridgeRNA
tcttaagtttacaatctcttatatttaataaataatcagaaagaacgaaagagaggattaaggttatgatacacgtagagacttagatctcgtcaacattgaaaatcccctctcttttctactcttatttcgtacagttctgtgagactctagatctcgattttaagtagttgaaacaaaagtagattgtcctttcctaaactaattttcttatgaataaagatagaatttattttggaattgatatttcaaaagatgtatttgatgtaatggattcaaacggtaattattttcaatttgagaataatcacataggttttaaaaattttgcaaaactattgagtcaaaatagtcattgtgtaatggaagccacaggctattatcattataagctggcttattatctattagaaaataacattatggtatctgttgaaaaccccttatctgtaaaacgatatatacagatgcgtttatcaaaaattaaaacagataagagtgatgcaaaaatgatttgtttgtatgctcaacatgtagatttaaaatcttgggaaggtcaaaccaaaagtcagatagaatgtttacaaataaccaggttattgagtttatactttaaacaaactactgcattaaagaacaagatacacggtgaggatgtattaggcaacccaagttcatttgtcgttaggtctttaaaaaggagtttaaaacataaacaaaaagaaataaaatctttggaacaaaggctaactgaaattgtaaaacaagatcatcaagaattattaaccaggttagaaagtatacctggattaggaagaaaaacatctcttatgttgattgttttaactgatggctttgaaaggtttaaaagtgcatcagagttgtgctcatattctggattaactcccataattaggcaatctggaaccagtgtaaagggtcgttctcgaataagtaaaatgggaaacagaaaattaagaaacctgttgtttatgtgtagttttacagcttgtaaaaacaacaaagcttgtaaagcactttatgatagaatagtggctaaagggaaaagcaaaaaattggctttaattgctgtatgtaataaattgttaaaacaagcttttgctattgcaaaatcaggattaatttatgatgaaacttatagaagtactttagttaaaaattaatgaaatttcatttgttttttaccacagttct

SEQ ID NO: 9317 - DNA, 1346 bp, unidentified
  source 1..1346: mol_type = unassigned DNA; note = element_e91dbdc
  misc_feature 1..3: note = core
  misc_feature 4..82: note = LE
  misc_feature 83..1120: note = CDS
  misc_feature 1121..1346: note = RE
  misc_feature 1117..1330: note = bridgeRNA
agatgtatggactccctccccctaggggggataacgtaataagcgagttagcagcttgcttttacacataaggagtccatacatgattgagtctaatgtaatcgcgatagacctcgcaaaaaatgtttttcaggtgtgcaagttgtcctccagaggacaggtcatttggaataagcaagttaaccgctcaaagctgatagcgctattagtcaacgaacctgtctcgctagtagcgatggagtcctgcggtggaacccattactgggcacgtttcgccaagacatgcgggcacagcattaaagcgatgtctgcacgacgggtaaaagcgtttttgcaaggccataaaacagatgccaatgatgcgatagcgattggcctggccgccttgcaaccggcagtcaaatcgagccgaaccatcacactggaagagcaatgtcagcaaggtatcacgatgatgcgcgacttggcggttcggcaaaaagttgccctggccaagcaattgcgcgatcagttactggagctaggccatccgatcaataaaggcgatgccgcgttgctacgacgtgtgcctgaaatagtagaagacgccgaaaatggattgccggatttttaccgtgaagcgctttaccaccaataccagcaactgagagcgtttttcgcccatgttgatgccttagagaaacgtttcaaagaagcggtcaggcaagatccggtgtgccgtcgtttaagcgctttagaaggcgtcggtccggttggcgccatgctgttgaaactggcactgagccagccggggcattttaacaatgcccgacaggcggccgcctgcgtgggggtcaccccagtacagcacagctctggaggaaaggaaaagctcggctctattagcaagttggcgggtgataaaaagctgcgtagtgtcctatttgaaggggcattagcggttatccgaagcttggacaagcgagaagcaaaaaccatcaaagagcaatggttaaagcaattaatccaccgccgaggtaagaaggtcacggcgatagccttggctaacaagaccgtcagaacggcttatgccatgctgaaaaagaataccgactaccagccagctttgctggctggatagaaagtccaggatatgttggtcaattaaggcgttagtgaacgggtaagaccgaccttcaagagactgttttgtgtcaaggcaatacatgccgccacagagatgagtcatgaaggggcgaatacatgatagggccgagttcgctactcaatcagagcccgtatataagctcgcatctattctcgtttaatcgcgtaacttaattgacaacattgagggagtccatata

SEQ ID NO: 9318 - DNA, 1415 bp, unidentified
  source 1..1415: mol_type = unassigned DNA; note = element_e92a11e
  misc_feature 1: note = core
  misc_feature 2..62: note = LE
  misc_feature 63..1118: note = CDS
  misc_feature 1119..1415: note = RE
  misc_feature 1191..1409: note = bridgeRNA
taatgggatggtccgccgcctttaagcgagattcggtataagggtgagcgaggaggattcccatgaacctgcacagcatcggcatcgatcttggcaagactgtctttcacctcgtagggcttaacgccgcaggagaggttgtggtgcggaagaagttctcccgtattcagcttcttcgcttcacggtcaacgtgcaagttggtctgattgggatggaagcctgtccaggctctcatttcctgggcaaggctcttcgcgaacaggggcacgaggtgcgcttgatgccggcacagtatgtaaagccgtttgtgaagaccaacaagaacgacttcatcgatgcagaagcgatcgccgaagcggtgagccgccccacgatgcgttttgtcccgatcaagaccgacgaacagttggatatgcagtcgctgcaccgggtgcgagaacgctggattatgcgacgtacggcagtggtcaaccagatccgaggactgttgctggagcgcggtgtcacggtgcggacaggaaggtgtcatctgaatgaggcgttgcccaggatactggaggacgcatcgatcgatctgtctggagcactccgtttcctgcttctcgagctgaagcgggaactggaacagttggctagccacatcgagcaagccgagacgctgatacagagagccgcgcagcagagcgaagcctgtcagcgactggacgcgatcccgggcatcggaccgcttacggcgactgccctgattgccgccatcggcaacggtggagcctttcgtaaaggtcgcgagtttgcggcgtgggttggattggttccacgcgaacactcaaccggaggcaagcagaagctgttcggcatcagcaagcgcggcaactgttatctgcgcaagttgttcgttcagggcgcacgcgcagtgttgcagttcagagacaagcagtgcagcggcttgaggcactggctggcagagctgtcatcacgtcaccattacaacgtagttggtgtggcactggccaataagctggcacgcatcgcatgggccgtgctggcaagaggcgaagcttaccggccaccggttctggccgacgccgcgactggcctgcagatggcgcccggttaacaccgggcttggaaatcgctccgcgattcccacatccgcacaccagcgacgactgcgagaattaagttcctgccaggtctgctggcgaatcatgagatggcacaacggtcgaacccggcgctccccaaacccgaaaccggcagaagtcctctgagactgtgtgactaaaggggaacggaacggagcgcagcgcattccatcctggcccggagtataactccaacaaaggccgaatacatttgcgcagaccaacctgtcacttcatttttcgcttgcggcaaggcggcggaccataca

SEQ ID NO: 9319 - DNA, 1402 bp, unidentified
  source 1..1402: mol_type = unassigned DNA; note = element_e92e3dd
  misc_feature 1: note = core
  misc_feature 2..89: note = LE
  misc_feature 90..1124: note = CDS
  misc_feature 1125..1402: note = RE
  misc_feature 1172..1394: note = bridgeRNA
caatgggatggacgcccccacccgataacggcatcaatgtgccagagtggaagtgtcactgaccactcaaacaagaaggggcgtccgctatgaagattacgacagtaggtgtcgatctggccaagaacatcttccaggtccacggtgtaaacgaacagggaaaggcagtgttgcgcaagcagctgcgccgcgagcacctcgtggcgttcttcgcaaacctaccgtcttgtctgatcggcatggaggcctgcggcggcgcacatcactgggcccgtaagctgcagtcgtgtggtcatacggtacgtctgatggcaccacaattcgtaaagccgtacgtcaaaggtaacaagaccgacgctgccgacgcggaggcgatctgcgaggctgtcagccgcccctccatgagattcgtacccctcaaaaacgtcgagcagcaagccaccttggccttgcatcgcgtacgacagagttttgtgaaggcgagaacggcccaggccaaccagatccgcggactgttatccgagtttggttttgtagtcccgcgcgggatcgcttttgtcctagacagagtgccgggtgtactcgaagacccagagaacgcactgccagatagtttccgagccttggtcgcacggctgctcgagcatttcaagcggctcgctgaacaggtcgaagagaccgaggaaagtattaaggcttggcatcgatcgagcgacatgagcaggcggctcgagaaagtccccgggatcggtccactgacggccagcgcgctggctgcaactataggaaacgcgaggaacttcgataacggcagacagcttgctgcatggctcggcctcgttcccaggcaacattccagcggaggcaagtcgacgttgctcgggatgagcaagcgtggtgacgcgtatcttcgaacattgctgattcacggggccaggtccgtgatctatcgtgctcgacagagtggcaatcgagagagctggctggccaagctcgtcgatcgccggaatgcaaacgtagccgcagtcgccctcgcgaacaagaacgcgagaatcgtgtgggcattgcttgcacgtgacttggagttccgccccgggtacgcacacgttcgtactgctgcgtaatcgcacgtaattcacgatccaactgcaaggtaaaacaccgaaacaccacagattgctcaggcgatcacttagtgatggcaaaacaggtcagaccgtggttgggatagccctcggcgggacgaggcacctcgagtgcgtgtaagcgattgaggcaccgaccagcaaaacccatcagggacagcgagctcgtctcgcacctaaagtccgaatgtacgggtgcaatcttgatcctggagtccgtcacgaatgatcgcttggcaaccgggggcgtccatgta

SEQ ID NO: 9320 - DNA, 1475 bp, unidentified
  source 1..1475: mol_type = unassigned DNA; note = element_e932fb6
  misc_feature 1..2: note = core
  misc_feature 3..238: note = LE
  misc_feature 239..1261: note = CDS
  misc_feature 1262..1475: note = RE
  misc_feature 10..184: note = bridgeRNA
cttgtatcttgcgatttgaggcgtaacgttggtttacgtttcggcggagaggccgtacaaacctgaggccagtgcgagctgagcctgctccaagatcggcccccgtccctctctttgtgacgccgtggagaatcggaggccttgtgagcctgcatgttcaaggtcggcgggaagagcaagtccgtttgatgcggacgcgggacggtgccgaagctcagagtaacgccggaggagagcaatgagcaaggaatctgtttcgagtcatgtaactgtgtatgcaggaatcgatgtaagtgcggcgacgctggccgtggcagttcaacgagaggatcggacgggcttcgagcagcggcagcttgccaactcggctatggggcacaaacaactgatcggttggttgctgaagtgcggcgggatagtcagggtgtcgctggaggctaccgggatctactcgctggacgtggcgttggctctggatttggcggagaacatagaagtcgcggttctgaatcccaagatagccaaccgattcgctcagacgctacgccgatcgaagaccgacccggccgatgcggtggcgctggctgagtacagtcggcggatgccgtttgtcgcatggcagcggcctggcaggatcgaactggagttgcgcgcgatcagccggcacatcgtcacgctcaccgatgagcacacgcgattgagcaaccggctgcacgcagccgaggcttcagacacgaccccacgctgtgttcgtcaggacctgaaacattcgatcgatgcgctgaagaaacgtatcgtgaggctgcgcaaggcagctttggcgttagtcgaacagaatgagacgctggcgatgaagttcaagcagttaatcgagatccctgggatcgccgaggcgagcgcgctgcaattgctcggtgagcttgcgccgctggaccctcagatgaccgcacgccagtgggtcgcacatagcgggctcgatccggcccatcaggtttctggcagttccgtgcacaaaccgtcacgcatcagccgacacggcaaccgctatctcagacgcgcactctatatgcccgctctggttggcgtacgcttcgatcctcatatgaaagccttttacctacaactgcaggtgcggcataagaccaagcttcaggccttgatggcggtagcgaggaagctgctgcacgccatccacggcatcttcaaaagccgcacgcactacgatgggcggaaactgttcccgcagttgggcgtcgcataaacgctaaaattgactcgccaggtgaaacggaagcaggctctgctgggaagcaaccatgccgagggataacctggcgggctcatcccgacgatgaaccaacggccgggtggggacggcctcgcccggcaggaaactggcatcggaaggatagacccgccatgccttgaaaatccaatgcgtcgtcagcaacaatgcttgactttcaagagagaat

SEQ ID NO: 9321 - DNA, 1387 bp, unidentified
  source 1..1387: mol_type = unassigned DNA; note = element_e934ec8
  misc_feature 1: note = core
  misc_feature 2..327: note = LE
  misc_feature 328..1119: note = CDS
  misc_feature 1120..1387: note = RE
  misc_feature 1162..1382: note = bridgeRNA
caatgggatggactccccctcaccttggcacctcgagtgccagactgaaggtgcgaaccgcagtcattgatgagaaggagtccagacatgaagcttatgcgcattggggtcgacctggccaagagcgtgttccagatccatggcgtcgactgtcaggagaggcctgtctggcggtagcggttatctcgcgaacgctggcgtcaagcgatcctggagaaggccggaccggattgtgagattggcttggagagttgcggtggtgcccatcattgggctcgtcaacttgaggcgtgtggattccgggtcaaattaattgccccccaattcgtgaagccctacgtgaagagcaacaagaacgacgccaatgatgctgaagcaatctgcgaggcaatgagccgtcccagcatgcgtttcgtggcgatcaaaacggttgaacagcaggacattcaggccgcacatcgcattcgagcagggctgattgaacaacgcactgccaaggccaaccaggttcgtggcttggtcgcagagtacggcctgattgcaccgaaagaattgtgttcactgcgacgtgccatcccctgctggctggaagatgcagacaacggtttaacgctgcgctttcggcatttgctggatgggttatggcgcgacttgcgcatgctggatgaacgggtaaaggagctggatagtgagatatccgggatcgcggcaaatgagccaaacgctcagagcttgcagcaactgcgcggcgtcggcccgataattgccaccgcactcgtcgcggccatcggtgacgcccgccagtttgccaatggtcgacagtttgctgcctcgctggggttgacgccgaggcagcacagctccggtggcaaagatcgactgctgggcatcagcaaacgtggcgatgtctacctacgaacactgatgattcatggcgctcgatccgtgctgcgcacagccccatccaaggatgactggctgagccaatgggtcatccgtttggctgaacgatcgcacaccaacgtggccgccatcgcgctggccaacaagaccgcgcgcatggcctgggcgatgctgcgcaatggcactgactaccagcctgaacgggccgcggcctgacccactaatcagtcaatacgccacgagagagtggccgtcacccacaattgcgaagcaacctgaacgatggcaaaccggtcgaaccggcgcgagcaaacccctcaaatgtccatgtgcgcagagcacgtagaagcgattgggagcccgcgcgcgaatagcccatcatggcccagcatcagacgatgccgaaatcagaggccggatatacgtgtgcagtcggcacgggcgccaaagcgaagggagcttgcaatgagggggagtccatata

SEQ ID NO: 9322 - DNA, 1363 bp, unidentified
  source 1..1363: mol_type = unassigned DNA; note = element_e937ef8
  misc_feature 1..2: note = core
  misc_feature 3..216: note = LE
  misc_feature 217..1164: note = CDS
  misc_feature 1165..1363: note = RE
  misc_feature 29..187: note = bridgeRNA
attgtaagttaaaaacgtgatataaaagagataagagagaaagataaccctgctcactaggaatagcgggcgtgcgcgaccgaaaggaaattggtattacaaccgttggtatcaaggtacgctagccctatctctcgatacgtttgaatagttgcttgggacatatatatgcacccgtttacaatcttaaattaactaaaactatcgaggtttattatggttacatcttatcaaaattttattggcattgacatcggaaaatttaaaaatgtcgttgcaattcacaaacagaagaatgctgtcgaatttgataataatgcttctggttggcaacaattatttcaagagttttcagatattctacctaatgctttagtgactttagaaaatacagggaaatatgagcttggcttatcacattttcttaccgacaaaaatattgccgtgcatcgagctaatactcgtaaagtaaaaagctttattttatctcacggagctttagcaaagtctgatagatcagatgcaagagctcttgctcaatatggatttgaacgccatagaactatctctctatttgtacctacctctacagaacaatcaactttggctgcactttgtcaacgtcgtgatgatattacgcaaatgagaactcaagaaaaatgcagacttgaagcaccggaaaatgatcatataaaagaaagctgtcaaaagaccattgagtttttcgatagtcaaataaacgaactcaatgatactatacaaaagattattgatgaaagccgcgaattacaacaacgccaaaaaattcttaaaacagttcctggaataggtaaaaagttatcacaagattttttgtgtttaatgccagagcttggttacttaaacagaaaagaagtagcaagtcttgccggagttgcaccgcatccaaaagaaagtggtaaagctgttggttaccgaaggattacaggtggtataagtaacgttcgttcaaagctctttacagccgctatggctgctacaaggtcaaaatctatacttggcgccttttattctaagcttgttgaaagtggtaagaagaagatggtggctataacagccctaatgcgtaaaattatagtaattgctaatacaagacttaaagaagcaattaatttgcatacttaaaaatcttcacaacggtaactaaaattggctaatgaatatgtgcgtccacacagacttaaagcacatattcattagcttaagcagaaattgctgtggtagctgtttgatataaaattctatttctatgacaaacgggtttttattgcccatataatttgcaaaattacacaaataaaaaaaattttaaaaaacatagttg

SEQ ID NO: 9323 - DNA, 1594 bp, unidentified
  source 1..1594: mol_type = unassigned DNA; note = element_e93c3af
  misc_feature 1..2: note = core
  misc_feature 3..260: note = LE
  misc_feature 261..1457: note = CDS
  misc_feature 1458..1594: note = RE
  misc_feature 22..280: note = bridgeRNA
ttggtacgttataagtgtagccaataatcttgtaaaagattaaagctagcacttatttttttacactataatataaaagagtaattggtttacgtgggtcttttaggaattttacttccgtaataaaaactgttaaccattctcttattataggcattcgattaagcaggttgaaacttaagctttcgtgtaactaaccaaaatgaatagtaataagtgtgatgggtacaattattaatttatgaatggagagaatgaaaatgataagtgtaggaatagacgtatcaaaaggaaaaagtacagtgtgtattatgaaaccatatggagaagttattaaaacaccatatgaaataaaacatactgaaaaagatttgtccgacctagcagagctaatccttagttttgaagaagaatgtagagttgtacttgaagctactggagcatatcatttgccagttttaaattacttaaagcaaaaaggttctttcgttgcggtaattaatcctctaatgatgaaaaagtattcaagtcttactattagaaaggggaaaacagataagattgactcaataaagatttcgaactatggaatagataattggtttcatctcatggattattgtgcatctgacacactatatgccgaattagatgccctttgtagacaatataatcaatatgttagtatgaaaattaaatgtaaagttaatttatcaaatctattagataaaacaatgcctggaattactaatttattaagaaatcatgattatgttggaaaatacaaattaaattcatttgtaaaagaatattggcattatgacaatataactaaaaaaagtgaaacacaatttatagaaagttacttgaaatgggctaaaaaagaaggatatcatgcaaatgaaagtaaagcaaaaagtatatataagttagcaagtgaaagcgtaacgactcttagttcaaaaatgaaatctacaaaaatgttggttgttgaagcaacaagagtttttaaagaagtagaaaaaactttaagaatgatattactacaaatgcaagaactagcaaagaaattagctgaatataatgtagttagagaaatgtcaggcgtaggagacgtgttagcgccaagactaatagcttgtattggcgatgtaagaagattccataatgcaaaggcattaatagcctatgctggtatagatgctcctgcatatgaatcaggaaattttaaaggtacgcagaggagaatatctaagagaggatcggcttatttaagaaaaacaggctatgaagtaatggcatcaataaaagctataaagccgatacaggattcagctgtatatgattatattttaaagaaagaactagagggaaaggctaaaaaagtagctaaaatagctggattaaataaatttttaagaatttattatgcaagagtaaaggaagtttataagtaaatttaaaaaacaaaaataatttgtataacagaccaatgtaaatttaaaaaatatgattggtctatttgttatgcaaatttttattaatacaaaaaagcaaaaaacttgttaaaaaggtattgactttgcttagcagg

SEQ ID NO: 9324 - DNA, 1536 bp, unidentified
  source 1..1536: mol_type = unassigned DNA; note = element_e94a28f
  misc_feature 1..2: note = core
  misc_feature 3..242: note = LE
  misc_feature 243..1373: note = CDS
  misc_feature 1374..1536: note = RE
  misc_feature 3..221: note = bridgeRNA
ctcgtataataaagtagtagtttttattgtccctcttcaaggacatatgctacactgtaaacggtgctgtggattggttaaattctcctaccggacagacggtttaataaaggctccaaccacagacctttgcagtattgttaatcagttagataccgcccgacggtttatttaaaacgaggttacaagagcaaagaaccctgtggataacagcatcaaaataaatctatcggaggtacataatgattttcgttggaactgatgttgcaaaagacaaacacgattgcttcatcataagttccgaaggcgaggttcttgccgatgtctttactgtcagtaacagtagagagggctttgaacatctccttcaaacaatcaatacctgtacaggtatcggcaactcaaaaataaaggtagggcttgagaccacaggacattacagttacaaccttctcgggtttcttctcgacaacggtctgaccacctatgtcattaaccctctgcacaccaacctttaccgtaagagtcaatctctcagaaaaaccaagaccgaccgtgtggatgcaagaacgattgcttctatgctaatgtctgatgtgagcctcaagccctacacaaacatagcataccacaattacgagttaaagtcactaacaagatacagatttgacaaagtttccgaacgggctaaactcaaaacatcggtttcgaggttggttaatatccttttcccggaattggaaaaactgcttccgaccctgcatacagcctcatcttatgcattattaagcgagttaccaagtgcaaaacatattgccgatgttcatcttacgcaccttacaaatttgctttatactgcttccaagggtcgttataaccgtgatagagcaattcaaattcgtgagactgcaaggaactctatcggcacatatatgcccgcaaaagctttggaactgaaacatacaattaaactcattcgtgaattagattccgaaattgatgagattaacattgccattaaagaaataatggataagatagactctccgattatctctatccccggagtcggtcttaatatggcggctatgattattgccgaaatcggtgattttaataactttgattcgccggacaagatacttgctttttcaggcctttcgccttccacttaccaatccgcaagctcaataattgctatgctcacatggaaaaacgaggttctcgatatttacgatatgctctttttaatgctaccaagttcgtttgtaattggaaccttgttttcgtcgattatcttgcaaaaaacgcttggaaggccaagcattacaatgttgctgtttctcacgctgccaagaaattggttcgtttgatttttgcaatgcaaaaaaccggacaaccttatttagccaaatcctaaaaacctttaacttttgaaattcggcgtctttgacgcctgtttcgttatgccttttttaccgtcacaactttttttgcaccattcctccaatttagacttgacttttaatagttagt

SEQ ID NO: 9325 - DNA, 1570 bp, unidentified
  source 1..1570: mol_type = unassigned DNA; note = element_e94af9a
  misc_feature 1: note = core
  misc_feature 2..309: note = LE
  misc_feature 310..1137: note = CDS
  misc_feature 1138..1570: note = RE
  misc_feature 1341..1561: note = bridgeRNA
taatgggatggtccggccgtgctcctgccccgccagcaagcgaagctggcaaggggcgccaaagacaaggagagcacgccatgtctcagacacccaatactgcgatcgccgtgatcggcatcgatatcggcaagaactcgtttcacgccgtgggccacgatgcgcgcggcgccatcgtgctgcggcaaaagtggtcgcgtggccaagtggaagcgcggctcgccaatatacctccttgcctgatcggcatggaagcctgcacatcacctgagccgcaaactcgcatcgctgggtcacgatgccaggctgatgccggccaaatatgtccgcccctatagcaagggacagaagaacgacttcaatgatgccgaagcgattgccgaagccgtgcagcgcccgacgatgaagttcgtggcgaccaagaccgcggagcaactggatctgcaggcgctgcatcgggtgcgcgagcggctggtgtcgcaacgcaccggcatcaacaaccagattcgcgccttcatgctggaacgcgggatcgctgtgcgccagggtatcggcttcctgcgtacggaactgcccaccatccttgcgacgcgcaccgatgccctgtcaccccgcatgttgcgtgtcatcgaggagttggcaggcgactggcgccggctggatcagcgcatcgatggcctctccggcgagatcgaagcgctggcccgtcaagatcaggcatgttcgcgcctgatgacggtgcctggcatcgggccgatcatttcgagcgccatggtggctgcgatcagcactggagacgtgttctccaaaggccgcgacttcggcgcctggctcggactggtgcccaagcagatctcgacgggagaccgcacgatcctcggcaaaatctcgaggcgcggcaatcgctacctgcgcgttctgtttgtacaggcggtatgggttgtgctggtcaggatcaagaactgggaacgctacgggctcaaatcctggatcgaagccgccaagaggcggttgcaccgcaacgtgctggcgatggcactcgccaacaagcttgcccgcatcgcctgggcggtgctggccaaaggacgcgccttcgagctgaagaggaccgacgatgcagccgtccgacccgcgtgatcctcgcgccgtgctcggcgcggtcaaggcgcagcctggcaacgccggagccagccgcaagcccagcgcgacggccggccttgaccgcccctgcgcacgacgcgatcgacgttgtgcgggccgggacgagggaacgacccttggctcgaacaaaggaactgcgcgataggaggagcaagcgacgaggtaaccctatcaaagtttccagccgaggtctgcgagaggatgagacgagatggaggttcggtcttccgagcgcgtgcgaacactggtgacccagatggcccgttgaggcctgtccgttaatgaggtcgcacgcgcgctgatatccatgatggcccggagcacaacacactccaatctgaggccggatacattgatgcaagaccgctcaccgtcgaaatcctcttgcgacgcacggccggaccataca

SEQ ID NO: 9326 - DNA, 1547 bp, unidentified
  source 1..1547: mol_type = unassigned DNA; note = element_e954b0d
  misc_feature 1: note = core
  misc_feature 2..225: note = LE
  misc_feature 226..1524: note = CDS
  misc_feature 1525..1547: note = RE
  misc_feature 17..240: note = bridgeRNA
ctacttatgtcttccaagaccgctcgggtcggcgcaggctcgggtgaggtgcccggctggacgctcttcttcgcggctgcccgtctcggtatcgagcgtggctctttcatgggatgcgtcctggccgggtgccgcggcgaggcgtggctcaagaagggtctgctcagctcgaagtagcgttgcccgtccttgcctgcagtggcggcacgagcaaggaggctgggcatggaccgggtagtcatcggcgtcgacccacacaagaaaactgtcacgttcgaggccagggatagccgggagatcttgcgggcgactggctgtttcccgacggacgcgggtggttaccggctgctggtgcagtatgcgcggcagtggccggaccgggtctgggcggtggaaggcgcgaacgggatcgggcggccgctggcgcagcggctgctggccagcggggagcgggtgctggatgtgccggccaagctcgccgcgcgggcccgggtcttcgacaccggccagggccgcaagaccgacgccgccgacgcgcactcgatcgtcatggtggcgctgcgggacaagggcttacgcgaggtcagcaacgatccggagctgacggtgctgcggctcttgtgtgaccgccgcgacgagctgtcgaaggcccgggcgcaggcactgaaccggatgcaccgcctgttcctcgagctggcgcccggcggcgcgccagtgaagaagtccgccagccagtacaacaagctgctggccagcgttcggccacgagatctggcaggccagactcgccggcggatggccgccgaggaactggaggacgtcacccgcctggacgccaagctgaagaccatcaaagccgagctcaaggccgcggtgctggccaccgggtcacgcctgatggatgtccacggcatcggcccggccggggccgccaggatccttgccgatgtcggcgacgtggcccggttccccagccgcgaccacttcgcgtcctggaacggcaccgccccgatcgatgcttccagcgggcagcacatccgtcatcggctgtcgagggccgggaaccgcaggatcaaccacgtcctctacatggccggcatcgtccagctccgcaacgacaccaaaggccgccgctactaccggcgccgcctagccgacggcaagaccccgatggaagccatgcgcgccctgcggcggcagctctccgacgtcatctaccggcagctcgccgccgacgcggcaacaaagaacgcaggcccgggagggcactcgggggcggctatcaaatccagcgcggccgaccttacccgcgacatcggctcttcggacaagccacttcccggacccgcgcacccgacgctaccgctgcccccgtctaccggaaaggcccccggtccgggaacagctgccacaccacgacggcgcgccggaggtgtcaacgtgcagcgccccaccggacgaacgacgttgacaccgacaagtgccgtcgcatcgtcgaaggcatcccggaccgataccccttgacagccgccgtcatagaagggagc

SEQ ID NO: 9327 - DNA, 1839 bp, unidentified
  source 1..1839: mol_type = unassigned DNA; note = element_e95b6f4
  misc_feature 1..2: note = core
  misc_feature 3..352: note = LE
  misc_feature 353..1711: note = CDS
  misc_feature 1712..1839: note = RE
  misc_feature 134..311: note = bridgeRNA
ctagtataataatggtgtagtcaagaatgactactaagttaatagttacaaagtccaatctaataaatctatatagctataacggaaggaggggttctccctccatcagaagttatagcgcaatattatttactttatttaaggtttccttcctgcaccagacaaaatatagaggtataatcactgaggcaggatcattgacgactcctccttgggaaccggcctttcgctggtgaaacctctcagaaagtctgtcagtccattcggtggtgatttatgttttggctggttgggaagcccctggctatacctgtataagccgctaggttgtgtatccaccctctggaaatggatgcctgccagaaaggacttaaccatgaaatatcaaaaagtacttacgatgcttgaaaccatcccttacctctctgtcgggcttgatgtcggctctgacttttcctggatgtccatcatgctccctaatggcattctcattggaaaaccttttaagatcattcattctgatccgctctcccgtgagcttgctgtcgcaaaaataaaggaagcacaagagacgtattccctcgaaagccgctgcttccttgagtccacagggatctaccacatcccgctcctgtacttccttcgtgataaggggtttgactgctccgtcattaatcctatcatcactaagaatagcacaaatttgaacgtaaggaaactacataatgatatttttgattcaaaaaaagttgctaaagtcggtctggacgcctcccttaaaacttccattgtcccggatgacgccgtcattgacctgcgtaacctcgtgcgggattactattatttcaaagacctgcagtctgccgttgttctgaaactcaatgccgaactcaaagtgtcattccccgcttatctgcatgtgttcagcaagatcacaacccagacctccttaaagctcctggaagcttacccacttgctgcggacatgcttgctgcctcaaaagacgaactcgtggaaaccatccggcggacagcacgttttggtatgaaatatgccatttccaaatatgatgccatttgtgctgctgcaaaggatgccgctgttttcggacatgcgcttcaatgcaatgcgctccggatccggctgtatatcaaagcctaccgacaatatcaggagcatctggacactatactgggagaactgcataaggctgttgacaagctggaagggacgccagtctatgaccgcatcttccttctccagtccctgcgtggggttgggtttctcagttcggttgtcctgatcgctgaaatgggctcctttgacctgttttcctctccaaagaagctttatgcttactttggcctggatcctgccgtaaagcagtccggcaagttccatggtgacaaagtccacatgtccaagaggggctccagccttgccaggcgtatcctgcacatggtggctctcaataatcttaaagtagagaaagggacaaaagcacctgtaaatccagttatccacagctattatgccgacaaatgcaaaagcaagaagaaaaacgtggcggttggagctgtcatgcataaaatctgcaacatcatttttgccatgctccgggataataaaccatttgcgatcatgactcctcaggagcactgtgagcggtatctagcggaacatcctgacaagatacagaacgtagcctaacagattcttatgaattttaaatatttccacataagtgggtttattaaagttacgcttttttacattaactgcttgaaaaaaacttttttaacattttttattttacctattgacatttcttagctgga

SEQ ID NO: 9328 - DNA, 1135 bp, unidentified
  source 1..1135: mol_type = unassigned DNA; note = element_e95dc4b
  misc_feature 1..2: note = core
  misc_feature 3..181: note = LE
  misc_feature 182..1120: note = CDS
  misc_feature 1121..1135: note = RE
  misc_feature 12..191: note = bridgeRNA
cttgtaacttagattttgccgtttctggtatagtaccggttgcggtggcggacgggagaccgcccccctctgggacgccaagcccgcgagtgagcaagggtcctcgtccgccgttccatcgaccccgaacagtcgcttgggccgctcgaagcgaagcccgcttgcgcaaggatgggataggatggacgctctctacattggtatcgacgtttcgaaagatcgtctggatgtcgccgcaaacaccccctcgatagcccctttccatgttccgcgcgatcatggcgggctggccgatctggtcgagcgattgaagccgcttcaggccgaacggattgctattgaggcgactggtggttttgaaacggttgttacggcggcgctggcggcagccgggttgccggttgtcatcgtcaatccggcgcaagtacgggcttttgcaaaggcgcttggcaaaagggccaagaccgatccaatcgatgcggcagtgattgcccgcttcgccgaagccaccaggcccgacctgcgtcccttgccggacgcagagacagaggccctgggtgacttcgtcgcccgtcggaggcagatcgtcaccatgattggcgcagaaaatcaacggcttaaacgggcttcggcccgcatgaccaagagcatcaagcggctcctgaaggcgctggagaaggagcttgccgaaatcgatcaggacatcgacgatgccatccgccgatcgccgaactggctcgataaagtcgagctcgtgaagtcggtccctggcattggcgaccagatcgcccgcacgctgattgccgaattgccggaactcggcacgctcgaccggcgccagatcgcagcactggtcggccttgctccctggacgcgtcaatccggccaatggcgcggcaagagctttatcggcggaggccgcgccgcagtcagaacggcgctctacatgggcgcactcgttgccgcgcgccacaatccaaccctcaaaaccttccgtgaccgcctcgtcgctcagggaaagccaaagctcgtcgccatcatcgccgtcgctagaaagctcattactatcctcaacgctctcgtcagggacaatcaatcatggcgcgaacaaaacgtttgactggcaagacagtcg

SEQ ID NO: 9329 - DNA, 1448 bp, unidentified
  source 1..1448: mol_type = unassigned DNA; note = element_e960af1
  misc_feature 1..2: note = core
  misc_feature 3..227: note = LE
  misc_feature 228..1433: note = CDS
  misc_feature 1434..1448: note = RE
  misc_feature 10..201: note = bridgeRNA
gccctaccttctttgggtgcctccggtcgtccggaatgatcggggcgtgcgggcgggatcggtatggccctcatcaggctgccgccggatggctcaggccgctctgccgccgatcccgccaccttgttctgactgctgattaggcgctgcggaccatcgctatgtagggcgttgacggcggagcagggtcgccgcacaccagaggacatcaaggaactggagacgccgtgagggttgtggcgggcatagacatcgccaaggagttccactgggtcgcagtggttgtcgtcgaaacagggaaggaattgatctcgcggcgggtcgacaacgaccccgaggcgatcgccgagttcctcaccgagctcgcccgcatcgccgacgaacacggcccggtcacggtcggaatcgacgtgctgggcgggatcgcagggctgatcaccgcgatgctgctcgacgccgagcgccgcttggtgcacgtccccggcctggccgtgaaccgcgcccgtcacgccacccgtggcggcgagcacaagtccgaccctcgcgacgcgcgggtgatcgccgaccagctgcgcctgcgcaacgactggcgcccggtcatcggtgaggacgacctgaccgtcgatctcggcctgctggtggcgcggcgacgcgatctggttgccgaacagacgcgtcgaatcaaccgtgctcacgacatgctcgccggcatcttccctggcctcgaggcagccctcgacctgaccaacctcgcagagctgcacctgctggcccgctacgccacaccggcacagatccggcgcgccggccgcgctcgcatcctcacctaccttcgtcgcgccggagtccgcagcgaccgagccgcccgcatcgccaccgcggcagtcgacgccgcccagcggcagagagcggaagtacctggcgaagccaggaccgcgcagttcttgcgcgagttcgccgtcgacgccatcaccgcgcgaggacgcatcagtgctgtggaggctgagatcagcgacgtcctcgaccgccaccctgatgcggccctcgtcctcagcctgccgggcatgggggccaccctcacggccgaattcctggctgaggccggcgacctggctcgattcccgagcgccgacgcgcttgcggccgcgtccgggctcgccccggttctgcagcagtccggcaagatgcactacctccgccgagcttccggcggcgcgagaaccctcaagcacatcttctaccggtcggcgttctgcgccatccaagtcgacccggtcagcaaggcctactactcgcgaaaacgagccgagggcaaacgacaccaacaggccctcatcgccctcgccagacgacgggtagccgtgctgcatgccatcctgcgcacgcgcaagccctaccaggccggccacactcgaaccgccgccgcggcttgacagaagcattagaca

SEQ ID NO: 9330 - DNA, 1345 bp, unidentified
  source 1..1345: mol_type = unassigned DNA; note = element_e96aa36
  misc_feature 1: note = core
  misc_feature 2..238: note = LE
  misc_feature 239..1084: note = CDS
  misc_feature 1085..1345: note = RE
  misc_feature 1112..1337: note = bridgeRNA
caatggtatggactccctcaactttaaacggcatcgtaatgtgccacactggaagttgataatcaccagtcactaatagaaggagtccacccatgattaagcttactcgtattggtattgatttggcaaaaaatgtgtttcaactgcacggcgttgatggtgctggtaacgctgtcttcaagcgtcgtttgtcacgcagccaatggataaactattgggttgatcacattcaaccaggatgtgtcattggcatggctttgtggtaaaactggttgctccacagtttgtaaaaccgtatgtcaaaagcaataagaacgatgcgcgtgatgccgaagccatttgcgaagccataagtcgacctggcatgcgctttgtcactgtgaaaagcgttgcgcaacaagatagtcaagccctgcatcgggtgcgcagtactttggtgcaacaacgtaccgccaaaggcaatcaaatccgtggtttggtgagtgagtatggcttggttgccccgcaacaactcgccgtgttacgtcgcaccattccgatgtggttagaggatggcgagaatggattaaccgaacgctttcgttgtttgctgcaaggattatacaacgatctgatcggactgcatcaacgcgtacaaacgcttgataaagacatcgagcagttggccaaacaaaacgaagtgacacaacgtttgcaacagttacggggtgtcgggccgatggtggccacggcattggtggctactgtcggcgatgccacacaatataaaaatggtcgccaaatggctgccgctttgggcttaacgcccagacaacacagttcaggaaacaaagaacgattattgggcatcagcaaacgcggtgatgcgtacatgcgcaccttgctcatccatggggcaagagcagtgatcgcacaagccaaacatcgagacgatcatttaagccaatgggtcaccgacctggcacagaaaaaacatccgaatgtagccgcggtcgctttagcgaataaaaccgcacgcatggcgtgggcgatgctacgcaataacaccgattacgatcctgagtttgcgataacgtcacattaagttaaaaggttaatcacagaggagacctccaccacgattgcaaagtaaaatacaagatggcaaaccggttgaaccgacatcagtcaaccccgagaatgacccggtactttaaaagtccgtaatagcgattgggaacttatgtgcgaatacaccattgtggcccgacagcaacgtctgtcaccttatgaggccgaatatacgtgtgcagtcgacctactctgtcattgaatattttgcttgcataatgagggagtccatata

SEQ ID NO: 9331 - DNA, 1357 bp, unidentified
  source 1..1357: mol_type = unassigned DNA; note = element_e96bcf3
  misc_feature 1..3: note = core
  misc_feature 4..74: note = LE
  misc_feature 75..1094: note = CDS
  misc_feature 1095..1357: note = RE
  misc_feature 1096..1343: note = bridgeRNA
tgatggggaagacggccccgcttccgataggggaccgtatgttggtctctcatatctaaagaggagcaaaccaaatgaccccaactgttatcggcctggatctggccaagaatatatttcatgtccatgttgttgatacatcgggagctgctatcgcaagtaaacgtttaacgcgcagagaactactgcccttctttgaagcgatgccaccttgtcttgttgggatcgaagcatgtgcgactgcccacaattgggcgcgtcggttagccctcttcgggcatgacgtgcgtctcattccaccagcatatgtgaagccgtatgttcgacgtggtgcgaagaatgacgcggcagatgccgcggcgatttgtgaggctgtgacccgtcccaacatgcggtttgtcccggtcaaatccgaagaaaatcaggcattcctcatgctgcacagagcacgtgggctacttattcgacagcgcacgatgtcggcctgcgcgatccgggcgcatttggcggaatatggtattgttgttgctcaaggcagacaccgggttgaggcgcttgtgtccaagatggacgagcaacgcgaatatttgccggatgaagcatgctttgcccttgatgccctgattggtcagttaaaggcgctgaacgtggggatcgaagaggttgatgcacggttggctcagatccacgaaactcacccaatctgccacctgctcgcgaccatcccgggaattggcccagtcactgcaacagcatttgccgccactattcctgatccgtctgcgttccggtcaggccgtgagttcgccgcatggttagggctgacgcccagacagaactcatcaggcggtaaatccaggcttggcggcattacaaaacaaggtgaccggtatttacgtcatctattggttttgggtgctcgaacggtcgttcgctatccaaaggcacgttctcgtgttgatgggccatggattgaagcccttttagagcgccgtcgcccaatggttgttgcggtagcagtcgccaacaagctagccagaataatttgggcgatgctgaccactggtgaattttttaggtcagcaactgcgtaaccacaagccgtagttaaacaaaagaacactgagatggcaaaagtgcaatgaaggcgtgatggtaaatcggcagagctgaggattgagaaagcccggagagctttaagcgtaagcaagcgcgtcccgttgatgaggcctcaatccgcgaactccatcagggccagcagtcatgaatcggctgcacaaataggccgaatacatgaacgcacccgccggtaagcatcgctttcaaaaacacttgcgcccgcggggtcgtctataca

SEQ ID NO: 9332 - DNA, 1271 bp, unidentified
  source 1..1271: mol_type = unassigned DNA; note = element_e96fc80
  misc_feature 1: note = core
  misc_feature 2..250: note = LE
  misc_feature 251..1267: note = CDS
  misc_feature 1268..1271: note = RE
  misc_feature 69..227: note = bridgeRNA
accttagatttgcatttgtataatacttcgtatatttgcaataatacactatggttcaacaaatagagacaaaataaggggagcggcggaacaaccaattatcttagatgagtaaaactcgtccccctatgatggattccgccgcttttttgacacttcaaccaatataagaatatgcttcaaagcattaaggtcttcaggcatggtcgaaaatccccttacttgttgtttctaaaaacaatgcaaagttatgaaaaaaactgttatcggcatcgacatcagcaaaaaaacattggattggtgcgtcatcaacggcaaggatgtggtatgcgtcatcaacactaagaacgacatggactctattgtcagtagcatggaggccatcctaaaagactaccgcattgacattcgcgacgtgcttgtatgcgcagaatacacggggcggtacatctacccgctgacgctggcctgtctcaaatgcggggcggacttgtggctcgaaagcggttacaacattaagtgtgaggctcgcaaggaaagaggcaagagcgaccgtgcggatgcctttcgcatcgccgagtacggacgcaagaaccaggatgactcccgtatctatagaatgcccgccgaaagtatatcaaacctcagatacctattctctgaaagagagatttataactcgcagcgtgccgctctcaaggctcagatccacgacatgcaaggctatatgcccatgagtgcctattcggagtgcgcggcaagagaacttagcgtcattcgattattagactcgctgattgcggaaattgacaacaaattggaggacatcatctcctctgacccggagttgcgtcgacaatacaaactcctgcaaacaataccaggtgtcggggcattgtgcgccgcaactctgatagcggtcacggctggcttcactatttttgaaaacggacgcgaactatgctgttttgctggacttgcacctttctcctactcgtctggaacttccatccgttcaaggaacagggtctcgcaccgcgccaaccatcatctgaaggcactcctgcacttgtgcgccatctcatctgctacgagagcaaaagacaacccctttgcggattactacagaagaaaggtcgacgagggaaaaaacaagatgagcgtccttaatgctgttcgcgcgaaaatggtgctgacggcctttgccatgataagagacaacacaccttttgataaaaatcacaaattagacttgcatgtatcataagaat

SEQ ID NO: 9333 - DNA, 1493 bp, unidentified
  source 1..1493: mol_type = unassigned DNA; note = element_e970dbb
  misc_feature 1..2: note = core
  misc_feature 3..248: note = LE
  misc_feature 249..1472: note = CDS
  misc_feature 1473..1493: note = RE
  misc_feature 47..241: note = bridgeRNA
ctaataagagcaaccgggtagggcggcagtcatactcggctccggtagccgccggcgggtgagcacttccctgaccaggacgttgagtcctcagcgcagatcgtgcccccgttggtggtcgggagacaggaccgctgatgggatgtcgtgcctcgctgactgtggcgtgagcactcgtttattaggtcgctggtagttctccgcaggctcgccggagcagatctgtccgctatggattggagtcgagtttgctgttcgtcggagatgactgggcggaggatcaccacgacgtcgagttgcaagacgagacgggccgggtgttgggccgggcgaagctgcctgagggtgtggcgggtatcgggcggctgcacgcgatgatcggcgagcacctgggtgaggacgacgaggcgacggtggtggtcggtatcgagaccgaccgcggcccgtgggtgcaggcgctgatcgcggccggctaccaggtttatgcgatcaatccgctgcaggtggcccggtaccgtgagcgtcgtggtgtgtcgggtgccaagagcgacaccggtgacgcacatgccttggccgacatggtgcgcaccgaccgccaccagctgcgcccggtcgccggggacagcgcccaggccgaggcggtcaaggtcctgtcccgtgtgcataagacgctgatttgggaccgtacccggcagatgctgcggctgcgtcacgcgctgcgtgagttcttcccggccgcgctggtcgccttcgacgatctcaccgccccggaggcccttgagctgctgggcgccgcgccggaaccgaccgcagccgccgcgctgagcaccgaacggatcaacgaagcgctcaagcgcgcacgccgccacggcagggcagccaaggccgaggccatcgcggccgcgttgcgggccgagcatctgggccagcccccagtagtggctaccgccttcgccgcgaccgtgcgcgcgcacgtggcgatcctgggcaccctcaacgccgagatcaagaccatgggtaaggagatcgaggcccatttttccgagcacccggacgctgaggtctaccttagccagcccggccttggcgtcgtgctcggcgcccgggtgctcgccgagttcggcgacgacaaacagcgttacgccgacgcaagagcacgcaagaactacgccgggaccagtccgatcacccgccagtccggcaagaagaaggttgtgctggcccgctacgtccacaacgacaggctggtcgacgccctcggccagcaggccttcaccgcactgaacaactcaccaggcgcccgcacctactacgaccaactccgggccaaaggcgtcggccaccgcgccgcgctccgccagctcggcaaccgtctcgtcggcatcctccacggatgcctcaaaacaggcaagccatacagcgaagacatcgcctgggcacaccacagaaaagatcttgacactgccgcttgacaacaaatccacatgggatgt

SEQ ID NO: 9334 - DNA, 1359 bp, unidentified
  source 1..1359: mol_type = unassigned DNA; note = element_e9774a4
  misc_feature 1: note = core
  misc_feature 2..80: note = LE
  misc_feature 81..1106: note = CDS
  misc_feature 1107..1359: note = RE
  misc_feature 1129..1355: note = bridgeRNA
taatgggatggtcaccccctgcccatgcccatgcccaaggctacgctttcgcagagccttgtattttggagaccatagccatgaatccagtagcacaggtaggcattgatttgggcaaacacaacttccacctgcacggccaagacagttccggccgggaagttttccgcaaaaagctgactcggccccagatgatgcattttctgggcaacctgccgccctgtacggtggtgatggaagcctgttccggagcccactacacggcccgcgaggtcagcgcactaggccatgaggccaagctaatttctccccagttcgtccggccgttcgtcaagtcgaacaagaatgacttcgtggacgctgaggcaatctgcgaggctgcctcgcgcccctcaatgcggttcgtgacgcccaagagcgaagcacagcagacgctttccgtcctgcaccgcatgcgcgagtcacttgtccgcagccgcaccggcactatcaaccagatgcacggtttcctcctggagttcggcatcagcctacccaaggggccaaccgtcatcaggcggtggtccgctgtattgagtgagcacaatctgccgccccggctgaccgccttgctgcagagtctgcacgagcacgccgtctacttggatacccggatcaaggaattggaccgtgccatggatcgacagctcgccgaagacgacctcggcagccgcctgctgagtattcccggtgttggcccagtcaccgccagcctgctgtccggcgaaatgggtgacggcaaacagtatgcgtgcagccgcgatttcgccgcttcactcgggctggttccgaggcaatacagcacaggtggcaggtccaaccttctgggcatcagcaagcggggtaacaagaacctgagacggctactggttcaatgcgccaaaacctacctgatccatctcgaccgccagcgagggccgctagccgaatgggtacggagcctgtgcaggcgtcgccacgccaatgtggtgacctgtgcactggccagcaaactggcgcgcatcgcttgggcactggcaacaaaacactcaaggtttgactcgggggcggacgccgtggcggcttgactccaacgcggcaccgaacagcaacatccctttccggttttgcgatagtgaatgaagtgatgacgtgaacggcacagcggcccgacgaagaacctgatgtgtgaaatggcacttggtgccgacaacgtttttaggatcggcgggcgcggaactcatcgtggcgcggagcatgctccacatagacgccggatagatttaggcaagccaacacccaccaccattcggtattgcaaaatagggggtgaccatagat

SEQ ID NO: 9335 - DNA, 1333 bp, unidentified
  source 1..1333: mol_type = unassigned DNA; note = element_e9774b2
  misc_feature 1: note = core
  misc_feature 2..64: note = LE
  misc_feature 65..1099: note = CDS
  misc_feature 1100..1333: note = RE
  misc_feature 1105..1324: note = bridgeRNA
taatggaatggtctgcccctcctctcgcacaatgagcgagatcggctaatggagaggagcagccatgatgaccgcgccaacgatcgtcgggatcgatctcgggaagaactggtttcatctcgtcggcctggacgggcaaggcgcggcggtgctgcgcaagaaactgaatcggaagcagctcgccgagtacgcggccaccgccccgaggtgcgtcgtggcgaccgagtcgtgtccaggctcgcagtactgggggcgagtctttgcgcaggcgggctatgaggtgcggattctgccggcgcagttcgtcaagccgtacctcagatccaacaagaacgacttcaatgatgcccaggcgatcgccgaagcggccagccgggcgagtatgcgatgcgtgccgttgaagacgaccgaacaactggaactgcaggcgctccaccgagtgcggcagcgggtcgtgaccgaacggacggcggtcatcaaccaaatgcgcgcgctcctgctcgaacacggcatcgtcattcccatcggccggactctcttgattggtcggctccctgcgatctttgccgaagccgagcaccggctctcgccgcggctggtgggtttgctgcatcggttgcggcagcgctggctcgccctcgatgtcgagatcgaggacacgacacgcgacctgacggcatgggccaagcaatcagacctgtgccagcggattacaacggtccccggcatcggcccgatgatcgccacggcggcggtcgcggcggtggggaatggtcgcatgtttgcgcgtgggcgtgacatggccgcgtggctcggcatcgtcccgaggcaatattccacgggcggcaagcccaccctcggacggatcagcaagcgcgggaacatgtatctgcggcaactattcattcaaggcgcccagtcctcgttcttgtacctcaagcgggatcaatcctcgctcgggcagtggctgcggcaggtcgaaacccgccgtcatcgccaggtggtggtggtcgcgctcgccaataagatggtccgcatctgctggaaagtgctgacgagcgagcaagtgtacgaaccgtacccggcgcgcgtcgcgtagaaacacccgtcttcggattgcgagggatgtcttgctgtgatggcccaaccgtcgatcggcgcaccgtcagcctgagcgataaaccggtcgttcgtgaccgccggcgttatgaggaccggtgcgcgcgtattccatcaaggccaggagccgcgggctccaccagtaggccggatacattgacgcaaacggtttttgccatcagacattgcttgcaacggaggggcagaccataca

SEQ ID NO: 9336 - DNA, 1601 bp, unidentified
  source 1..1601: mol_type = unassigned DNA; note = element_e9798d2
  misc_feature 1..3: note = core
  misc_feature 4..122: note = LE
  misc_feature 123..1208: note = CDS
  misc_feature 1209..1601: note = RE
aaagttcctatgtttaaaatcggaagtgtcggataacataagatagcactaaaaaagctataccattatagttaactttgtatatgacaaaaaaacaacattaaccaataacgatatagcttatgaaacgtgtacaaagtaacaaattagatttcagtgggcaaaatatttacgtgggaattgatgtccacttgaagagttggtcggttgcaattttatcagagtatagtgctctgaagcgattcagccaaagtcctgaaccggaagcgttgcataagtatcttgtcagcaattatccgggtgccaattacttctctgtgtacgaagcaggattctgcggcttttggatacacgagaagctgacgggcttaggaataaccaacatcgtggttcatcctgctgatgtaccgactatgagcaaggaaaaacttcgcaagactgatgccgtggactgtaacaaactggcccgtgaattacgttccggttcgttggaagggatatatgttcccaaggcggatgtcctcgaaattcgctctttaataaggacgagaaacatgattgtaaaagacagtacccgtacgaagaaccgcatcaagtcattgctccgttttcatggagtggatataccagaagagtttacccgttcctcgataggacgttggtcaaaacgttttctggcttggcttcattccatcgaactctcaacagagtatggcaagaagactttggaactgcaccttgaacagttcgtgcgtttgcgtaatatgcttcttcaggaaacacgtgccatccgtgagatatcacgtaaggcaccttttgagaagccgatgcgtcttctgacttctgttcccggaataggcgttactacagccgccaccttgatggttgaacttgacgacattgtccgtttcaagaatgctgaccatctggcttctttcatcggtctggtaccaatgtgccattcgagcggtgaaagtaacggcacgggagatataacagtacgccgccattttatgctccgatgcctattggtggaagccgcatggattgccatccgtaaggatcccgccatgactgtagcctatacggaataccgcaggcgaatgaatccacagaagtcaatcataaagattgccagacggcttgtaaacagaatatattatgtgctcaaacatgaaaaggaatatataccgtgtgttgtcgaatgatacagaatcctataaggtaaaacagctttcttttgaggaaaatactaccatcgcattgcggctttgaagtccgcttaaaaaagtttgtaaccctcattaatggtttgactgataaaggaatttgcagcccctcatagggtgtctgctgtggaaagtttgttttaccataggattatggttaggttttcttagccatattagacgatatcagtaatacaaaaagagaggcgtgtaaccgcctccccaagcagcattactgcataccgtcaggatgtttattgctggtaggttgctcctcagcagagcctacttcctcttaacatcctggcacaaagatatgtaactaaagttaattattgatgaattatctaactttgtttggattttaaatgg

SEQ ID NO: 9337 - DNA, 1372 bp, unidentified
  source 1..1372: mol_type = unassigned DNA; note = element_e97aae9
  misc_feature 1..2: note = core
  misc_feature 3..79: note = LE
  misc_feature 80..1108: note = CDS
  misc_feature 1109..1372: note = RE
  misc_feature 1082..1359: note = bridgeRNA
cgatggggtggacgccccccggcggcatcgatgtcccatggtggcgggtgttgaagcaccgttacagaggggagcgtccatgggagaagttagcatcatcggcctggatttggccaagaacgtgtttcaggcgcatggcgccgggtctgacggggcggtggtcttccgccggaagctgtcgcgcgcgcagctgctgaagttcatggcggcgcagccgccttgtgtggtggcgatggaggcctgtgccagctcgcatcactggggccgggctatcggcgatctcggccacgaggtgcggctgatcccgcccgcctatgtgaagccgttcgtgaagcgccagaagaacgacatggccgatgccgaggcgattgccgaagcggcgtcgcggccgaccatgcggtttgtcgctgtgaagagcgaggcccagcagccggcggcgatggcctatcggacccgagaccttctggttcgccaacggacccagacgatcaatgccctgcgtgctcatctggccgagcagggcatcgtggcccctgccggcccggcgcatgtcgggcgcctcgcagccatcatcgatggcgatgacggcatgttgccggcagcggtgcgcgacctcgcacgcctcatgctgaatcagattgccggactggccgagaagatcgcgggccttgatgccgagctgcgcaagcgcgtgaccaccgacgacacggcgcgacggctgacgacgatcccgggagtgggggcagtgaccgcggcggcgatcaccaccttcgcgccgcctatggagaccttctcgaagggtcgggacttcgccgcctgggtcggcctcacgccgcgacaacattcgagtggtggcaaggaccggctgggccgaacctcgaagatgggacagcgcgacatccgaaggctcctgatcgtgggagccgtcgccgtagtgcgatgggccgcacggaagggtgctcccggtgggtcctggctgggacggatgatggcacgcaagccgaagatgctggtcgcggtggcgctggccaaccgaatggcgcgcacagcttgggcgctgctgcgcaagggtgaagattacagggatccggcgatggcggcctcataggcctttatcgtcgggttgtcgccggatgtgagagggggcgagggaacgtaagggcagacggtcaagagaccgggtcgagagaaccatcattgcgaacgcagcgcttccgagcgcgggtaagcgaactggtcctgacctgcatatctccatacaggcccgcggcgcatgacaggccgcatcttcgaggccggacacacgaccgcacctgatcacatgcccaaacgaacctaagattccgcttgcatccaggggggcgtccacaca

SEQ ID NO: 9338 - DNA, 1409 bp, unidentified
  source 1..1409: mol_type = unassigned DNA; note = element_e97e17a
  misc_feature 1..2: note = core
  misc_feature 3..79: note = LE
  misc_feature 80..1135: note = CDS
  misc_feature 1136..1409: note = RE
  misc_feature 1134..1395: note = bridgeRNA
gatgtggtggatggcgccctccgacggcatcgagtgtgccagaataggttgttgcaaaccttgagaggagccacccaccatgggaaagattacgactatcggtctcgatatcgcaaagaatgttttccaggttcacgggatcgacgcggatgggcatgtcgttctacgcaagacgttgcggcgctgccagatgcaacccttcttcgagacgcttgccccttgtctgatcggcatggaagcctgcgcgactgcccatcactgggcgcgagtgctgttgcaagctggccatgacgcccggctgatcccgcccagctacatcaagccttatctgcggcggcaaaagaacgacgccgccgacgcggccgccatctgcgaagccgtgacacgaccgtcgatgcggttcgttccggtgaagagcgggggccagcaggcgacgttgatgttgcacagcgcccgcgagctgctgatgtcgcagcgcaccgctctcattaacgccctgcgcggccacttcgctgagcttggcattgttgtgccgcagggtgcccgcaatgtccggcagctcatcgccctcctcgaagacgagcaacacagctcgccggccgttcgcgttgccctcatacccttggcaatggcattgacagagacggaggcgcaggtcgccaagctcgacaaggctatccttgctgcccatcgcaacgacgacgtcagcgtccggcttgcggccgtacccggaataggtcccatcatcgcgacatgcctttcggccagcgttcctgatgccaagctgtttgagggcggccgtgagttcgcggcctggctcggcctcgtccccagacagcactcgaccggtggtaaaccaaggctgggcactatctcaaaaatgggcaataggcacctgcgcaagcttctcgtggtcggggcgcacgccgcgctctaccggatgaggaaggagagccgtgacacgcccttggcgaactgggcgcgaggcttgctgtcgaagaagcctttcaagcttgtcgcggttgctctcgccaacaagattgcccgcatcgcctgggtgatcatggcgaggagcattaacttccagccgggttatgccaccggcgacagcgctaaggtcgcagcgtcggcctgatcaagacagtgcccctacgggcaaaacagttggcggagtgacgatgatatgatgtgacagcgaaagcggaatggaccgcacgaaccgaagaacccgaggtgatgtcttgcgcaacaacagcgcgataacctgatagggatcggttcaagcgaacaacatcagggccagcggtcgtatcgtgccgcatcaacaggccggagacatgactgcacccgacccgcaaagctcaatcatcatccaagatcacattgccaaacgggcgccatccagacag

SEQ ID NO: 9339 - DNA, 1500 bp, unidentified
  source 1..1500: mol_type = unassigned DNA; note = element_e98e8e6
  misc_feature 1..2: note = core
  misc_feature 3..250: note = LE
  misc_feature 251..1480: note = CDS
  misc_feature 1481..1500: note = RE
  misc_feature 6..237: note = bridgeRNA
ctaatgggttctgccgggtctctgggaggcttggtttcggtagcggctggcgggtcagcactcatccgtttctgatcccgttttggtaggtcttgcggcagactgtgcgccgacacgctggtcgtgaggaggcggggatcgctgctgggatgacgtgcccccgggttgtgggtgagcacttgggccattagatcgccgggtcgtctcctccgcgctgctgtactgctggaacgagtaccaggaggcgggcatgttgttcgttggtgatgattgggccgaggatcatcacgatgtggagttggtcgatgaggctggccgcacgctggcccgtcgacggttccccgaagggctggacgggatcacccggctgcacgctctgattgcggagcacctgcccgagccggccggtcctgcggatccggttccgctggtggtggtcgggatcgagaccgagcggggcccgtgggccgcggcgttggtcgcggccggctatcgggtgttcgcgatcaaccccatgtcgtcggcccgctatcgggaacggcactcgacgtcgggggcgaagtccgatgccggggatgcgcacgttttggccgagatcgtgaggctggaccgggcacatcaccgtcaggtcgctggcgacagcgcgctggccgaggcggtcaagctcgcggcccggacccaccagtcgctgatttgggaccgtacccgtcagatcctgcggctgcgttcggcgttgcgggagttcttccccgccgcgttgaacgcctacaacgagctggacgcgccggacactttgcagctgttgcggctggcaccggatccggaccaggcggcccggctcaccaaacgccaggtcgtggccgcgttggcccgggcgaaccggcgccaccccgatcaaatggctgatcagatcaccgccgtgctgcgggccggggagttacggcaggcgccaccggtgcaggccgcgttcgccgcgatcgtggccgcccaggtcgaggtcatcaccaccctgaacgaccagatcgacatcctgggtgaggtggtggccgaccattttggtcgtcaccgggacgctgagcttctcaccagcctgcccggcctcggtgtgatcctcgcggcccgggtcctcggcgagttcggcgacgaccccgcccgctacctcgacgcgaaagcccgcaaggcctacgccggcaccgccccgatcacccgcgcctccggcaccaagaaagtggtgatggcccgctacgcccgcaaccaacgcctcggcgacgccctgcaacagtgggcgttctgctccatgcgcggatccgtcggggccaaggcctactacaacacgttgcgagcccgaggaatcggccaccaagccgccctgcgccaactcgccaaccgctgggtaggcatcctccacggctgcctcaagaccggccagccctacaacgaaaccctcgcctggaaccacccatccaccgctgccgcttgacaacgaaaaacctgggatgt

SEQ ID NO: 9340 - DNA, 1675 bp, unidentified
  source 1..1675: mol_type = unassigned DNA; note = element_e99035c
  misc_feature 1: note = core
  misc_feature 2..62: note = LE
  misc_feature 63..1100: note = CDS
  misc_feature 1101..1675: note = RE
  misc_feature 1454..1669: note = bridgeRNA
tactggtatggtccgccgcttattccttagcggaggtataaacggggaacaggaggcgtcccatgaagattcatacgatcggtatcgatctggcgaaaaccgtgtttcatctagtagggctgaatgcacgcggcgaagtcgtagtgcgcaagaagtgttcacgcaaccagcttctgcgctttacatcgaacctgcacgtgtccttgatcggcatggaggcctgcggaggagctcattttctgggccgggctcttcgtgaacaggggcataatgtacgcctgatgccggcgcagtacgttaagccgtacgtgaagacgaataagaacgattacatcgatgcagaggcgattgccgaggccgttggccgtcccacgatgcgcttcgtgcccatcaagacggatgatcagctggatcttcagtcattgcaccgaattcgcgaacgatgggtaacgcgccgtaccgccgtggtcaaccaaattcgtggattgctgctggagcggggcatcactatacgcaagggacgccggcatgtcgaagtgtcactgccagcaattctggaagaccccgacaacaagctctcgggcgcattgcgtttgctcctcgcacaactgcagctggagatgcagtatctgagtagacagatcgacgaatcggacaagctgatcctgcgaattgctaacgagatagagtcctgtcgacgactgatcgcaattcccggaattgggccgttgacagcgaccgccacgatcgcagcgatcggcaacggagccgcattcaagaagggccgcgggtttgctgcttggctgggggttgtacccggcgaacactctaccggcggcaagcaaaagctgaccgggaccagcgggcgcggaaacaagtatctgcgaaaactttttgtgcaaggggcgcagacagtcctgctgcgaaaggagaagcaatctacgggcctgaggacatggctaattgatctgacatcgcgcaagcgcaaacaagtcgcagcagtcgcgatggcgaacaagatggcacgcatggtctgggcggtcttgtctaaaggcgaagcttattgcccgccactattagcgcaaacggtcgcagcttgatcgccaagtggaagcgtccagtccatggaagtcggcgctgaactgattaacgctgctttggcaggactcgatccaaagcctcaacgcaatcgtgacgcccggcttccttcgcccggaaaatcttcgataaggccgcctgcggccaccgtcaaggctctgcgcttcgctccgaccgctaacgcggcaaggccttgaccgcggtcctcgccggccaaataatcgactatccgggcgaatgaaagaaaaaagtttgtctggagtaaaccaacaagaaccgcgcttagagactcggcacactaaccagactattgaaatccaactgaggcccaacgatctagattttcgaatcccagccaggtttgctggcgaaccatgagatggcacaacgggtcgatcccagcgctctcgaaacctgtacgtggaaaaggtcaacgaaggccgccctactagataggacgaggcgcagcgcattccattaaggtcaggagatagcttctccagcaaaggccggatacattcgcgcagaccaattccgccatctcatttttgcttgcaaaacagcggcggaccataca

SEQ ID NO: 9341 - DNA, 1268 bp, unidentified
  source 1..1268: mol_type = unassigned DNA; note = element_e99e151
  misc_feature 1..2: note = core
  misc_feature 3..193: note = LE
  misc_feature 194..1228: note = CDS
  misc_feature 1229..1268: note = RE
  misc_feature 37..202: note = bridgeRNA
cttgtatgatcaaatttaaagaacccattggaagaaacatccaataagctttacccgttcattgggaggccgtcccagcctgaggactgatttgttaatcagagcctgtgcgtagattggcccccgccctattcacccattccgtggagtatccgaggcttagagcctgtatatacaaggaaggtaggtgcttatgcagggtcgggaaccagtgagtagtctactttctttaattcgattcaggcaaattcctatgacatctattgaactgaatgctactgcccatgacgcttgcctttcgctctttgccggtatcgatgtcggggctgaggatctggtgctggtcattcgcaaaaacggtaagccatttgaccctcagaagtacgccaacaccccggctgacagacgtcgcttagtaaagaagctaagcaagctgacaggcattattgtgtgtttggaggcgaccgggatttatcactttgacttatccatcgcgctgcatgatgccggggtgttattgatggtcgttaacccaaagtcatcacacaattttgccaaagtattaatgaaaaacagtaaaaccgatgcggtcgatgcccatactttggcagaatatgccgcacgaatggactttgtcgcctggactcggcccactacagagaaactggcgctgcgcagttttgctcgccgtattaatgcgctcaccggccaaaaagccgctgccaaaaaccatttgcatgccctgaacgccacgcaggaaacaccaaaagccgtgctgcgcgatgccaacttggctatcgcccaattggaaaagcgcattgatcgcttaacggctgaggcactgcttttgattgctgctcatccggaactcaaacgaaccctctccttgctggtgggtatcaaaggcattgctgaaaccagtgccattgcccttatgggcgaattactgttattgccgccgggcttgtcgcaccgagaatgggtgaagtttgccggccttgaccctaaagctttcgattccggcaagagcgttcacaagaaaacacggctatccaaagcaggcaatcgccaacttcggtcggctctgtatatgcccgcgttaagcgctaaacaacatgacccgcatgtcagggcctattttcaacatcttgttgataacggcatgttgaaacatgatcagcctttcgataactctcggttttatactattccgagtgcggtcggataagaagaaatcgacaaatttgggttgatttttaacagagtat

SEQ ID NO: 9342 - DNA, 1324 bp, unidentified
  source 1..1324: mol_type = unassigned DNA; note = element_e9a0dde
  misc_feature 1..2: note = core
  misc_feature 3..253: note = LE
  misc_feature 254..1285: note = CDS
  misc_feature 1286..1324: note = RE
  misc_feature 36..203: note = bridgeRNA
cttgtatgattaaaatcaataaaatattgccgagaagatcagataagctttaatggtttattgggaggccgtcccagcctgaggactgattttttaaatcagagcctgtcgcgtagattggcccccgccctattcacccataccgtggagtatccgaggcctagagcctgcatacacaagggaggcaggtgcatgtgcagggtcgggaaccaatggatagtctactttctttatcttatcctgacaaacaaccatgaaaaacatccgacctaaaatcaccccgcttcctaaagaacccctctttgcaggcgtcgatgtcggcgcagaggaactggtcttggtcatccgcaaggacggcaagcccttcgacccccagaagttcaccaacacgcccgcaggccgggccaggctggtgaagaagttggtaaaactaactggcattaaggtctgcctggaagccacggggatttaccatttcgacctgtccatcgcgctgcacgatgccggcgtagcactgatggtggtgaaccccaaagcctcgcataactttgccaaggtgttgatgaaaaacagcaagaccgatgcggttgatgccgacaccttggccgaatatgccgcaaggatggactttgttgcgtggacgaggccgtcgaacggcaagcttgccctccgcagtttctcccgccgcatcggtgcgcccaccggacagaaagccgcctgcaagaaccacttgcatgcgctggccgccacccaggaaacgcccaaggcggtgctgagggatgccaaactggccattacgcaactggagaagcgcatcggacagttaaccgcagcggcgttggccttggttgccctgcaccccgaactggggcggacgctacagttgctggtcggcatcaagggcatcgccgaaaccagcgccattgcgctcatgggcgaactattattgctgccccccaacctgtcccaccgtgaatgggtgaagtttgcagggcttgacccaaaggccttcgactccggcaaaagcgtccacaagaagtcgcggatatcaaaagccggcaaccgccacatccgttcagccctgtatatgccagccttgagcgccaaacagcacgacccgcacgtcaaggcttatttcgaccatctcgtggcaaacggcaaaaaaccattgcagggtgtttgtgcggtgatgcgcaaactgctccatgctatccacggcatgttgaaatacgacaagccgttcgacaacacccgtttttatacgattccggtatctgccggatagtcaaaaacaacgaaatgcgcttgactttgaacagagtat

SEQ ID NO: 9343 - DNA, 1410 bp, unidentified
  source 1..1410: mol_type = unassigned DNA; note = element_e9a2ac2
  misc_feature 1: note = core
  misc_feature 2..61: note = LE
  misc_feature 62..1117: note = CDS
  misc_feature 1118..1410: note = RE
  misc_feature 1188..1404: note = bridgeRNA
taatgggatggtccgccgcctgaagccctgcggggtataagggtgagcgaggaggcttcccatgaacctgcatgcaatcggtatcgatttgggcaagacagtttttcatctggtgggcttgagccatgccggagaggttgtggtgcggaagaagttctcgcgaacgcagcttcttcgcttcactgctaacgttcaagtcgatttaattggtatggaagcttgcgcaggctctcatttcctcggcaaggctttgcgcgaacaagggcatgaggtacgcctgatgccggcgcagtatgtaaagccattcgtgaagaccaacaagaacgatttcatcgatgcggaggctatcgccgaagcagtgagccgtccctcgatgcgcttcgtgccgatcaagaccgacgagcagctggatatgcagtctctgcaccgagtgcgtgaacgctggatcatgcgacgtacggcagtggtgaaccagatccgaggactgttgctggagcgaggcatcacggtgcggacgggacggtgccatctggatgcagcgttgcccaacatcctggaagatggttcgacgccgctttccggaacgctccgctgcttgcttgtcgaactgaagcgggaactggaacagctggccggacacatcgaacaagccgaggcactgattcagagagccgcgcagcagagcgaagcttgccaacgtctggacgcgattcctggcatcggaccacttacagcgacggctctgatcgccgccatcggcaacggtgaagcctttcgcaagggccgcgaccttgcagcgtggatgggattggttccccgcgaaccatcgaccggaggcaagcagaagctgctcggcatcagcaagcgagggaacggttatctgcgaaaactgttcgttcagggtgcacgtgcggtcctccagtttagagaaatgcagtctcccggcctaagaaaatggctagaagaactctccgctcgcacacactacaacgtggttggtgtcgcgctggccaacaagctggcacgcatcgcgtgggccgtacttgccagaggcgaagcttatcggccaccggttctggccgacagcctgactggtctgcagatggagcctgtctagcgacaggcttggaaatcgctccgcgattcccacatctgcaaaccagcgacgactacgaaatttgatcctgccaggtctgctggcgaaaccatgagatggcacaacggtcgaacccggcgctccccaaacccgaacccggaagaagtccatcgagactgcgtaattaatggggaacggagcgcagcgcattccatcctggcccggagcctcgactccaacaaaggccgaatacatttgcgcagaccaacccgccactctcatttttcgcttgcaagacggcggcggaccataca

SEQ ID NO: 9344 - DNA, 1613 bp, unidentified
  source 1..1613: mol_type = unassigned DNA; note = element_e9a6edb
  misc_feature 1..2: note = core
  misc_feature 3..276: note = LE
  misc_feature 277..1491: note = CDS
  misc_feature 1492..1613: note = RE
  misc_feature 13..295: note = bridgeRNA
ctattacaatatgtttacggtttaaggcacggcagccagccgtgtcttttccgtatcgttgcctaagctgttagaatgagagtgtcttggcctgatgcaatcctccaaggatcatcgcgtccgtaacgaagtccgtcagccagcctctcgttcgcagcgttcgatttatgcaggttgagccgccacaccggtgcgcccgtgtcatcaaatagattggatcggcaatgatgaaatggttggtcgccaaagacaaatccatgatgaggagcgttgtacatgaacaatgtggcagggattgatatttccaagggaaagagcacggtgtctgttctccgtccctttggggaagtggtggcaaagccgttttctgttggtcacaccggcagtgaactcaaagagctggcagactacttgaaaagcttggatggtgagacacgggtagtcatggagcacaccgggcggtactatgagccggtggcccgctttctccacgatcagggcatctttgtcagcgcggtcaatccaaagctcatcaaggactacgggaacaacaccctgcgcaaagtgaaaacagacaaggcggatgccaggaagatcgcccgctatgggcttgacaactgggtggaattgcgccaacatactcctatggacacgattcgaatgcaactgaaaacgctgaaccggcagcaggggctgtactccaagaccaagacgatgatgaaaaacaatctcattgcgctcctggaccagacctatcccggtgtcaatgccctgtttgacagtcccgtccgagaggacggcagccagaaatgggtggactttgccacggccttttggcatgtggactgcgttcggaatataagccttactgcctttaccgagcgctaccgcaagtggtgcaagcgccatggttacaacttcagccagagccgagccgttgagatccatgctggagcacaagatctgattgccatgctccccaaagatgccctgaccaaaacgatgatccggcaggctattgatgcgctgaacgccgtctctgcgtctctggaacggctcaaggccgaaatgcgtaccttggcagcccagctcccagaatatcccgtagtcatggctatgcatggtgttggagattctcttggcccgcagcttatggcggaacttggtgatgtaactcggttcacccacagaaacgccattacggcttttgcgggggttgaccctggagccgaccagtccggcacccatgaggcaaagagtacaagagcctccaaaagcggtccgccagaactgcgcaaagcactcttcctggtcatggactgcctgttaaaaactatgcctgcggacgacccggtgtactgctttatggacaagaagcgagccgagggcaaaccttatctggtttacatgacagccggcgccaacaagttcctacgcatctactatggccgtgtaaaggagtatctggctttacgggaaaatgctgattgaccacttccatactctttcaatttgaccggcgcttgcgcggcggtctttttgttttgctctctttcgcctcctactaaggttgcaaactttcctcaattccctgttgactttttatttgcaga

SEQ ID NO: 9345 - DNA, 1466 bp, unidentified
  source 1..1466: mol_type = unassigned DNA; note = element_e9b23e8
  misc_feature 1..2: note = core
  misc_feature 3..96: note = LE
  misc_feature 97..1149: note = CDS
  misc_feature 1150..1466: note = RE
  misc_feature 1199..1465: note = bridgeRNA
ataatggtatggacctaccctagtatacagaatctataacaaatgttattgttctagaataggaaatgaatcctaaacaacaatagagaggtccacatgacaaatattactacaataggtattgatatagcaaaaagaattttccagtttcatggtgtagataaaaatggcaagactgtattaaagaaaaaactaatgagggatcaggtattaacttttatagctaatttacctaaatgtttagtaggtatggaagcttgtggaggtgctaattattgggctagagaaattagcaaactagggcacgaggtaaaattaatggccccacaatttgtaaagccatatgtgaaaactaataaaaacgaccaagctgatgcagaagcaatatgtgaagctgtatcaaggccaaatatgagatttgttccgattaaaagtatagaacaacaggatatcttatcaattcatagagtaagggctagattagtaaaaaatcgtactgctcttgctaacgagatccgagggctattacatgaatttggaatgattattccacaaggtataaataaaattacatcaaagttaacagaggttctagacagcgggaaattaagtccaataagtcaacaaactttcagtgatttaaaagaggaatttatcgagaatgataagaaaataaaatgcttagaaagtagactaaaaataatggctagtgaattagataagtatcaacaaataattgctatacccggtataggtttaattacatctactgctttgatagcatctattggtaatggaaattgttttgagaatggtaggcaactatctgcatggcttgggttagtgccaagacaagcttctagcggtggtaaagagaagctgcttggaatcagtaaaagaggcgatatatatttgcgaactttattaattcaaggagcaagagcagtacttaatacaaaactaagatttactactgaatcacagaaagctaaaaaagattatagtaaatttactcagtggatgtttaatttacatgacaggagtggtcataataaaacaattgttgctgttgctaataaattagccagagttgtatttgcagtgctaagctcaggtaacgattatattgaaaataaagtgtgtagttaaggtaagtaacatggtgttacttaccgtggctactagaatttaaagaattccaaccaggaatatgcgagaggtgataaacattgatggcaaaataagacaaatcttatacttacaaagaaactgttttgctcgtgggctcaaatacgaagccgatgtaatgattatgttaagtttgtaagtaacgaatttccatcagggctgtagagtaaatgatttaatagaactatttacttaactataagtcggatacatgaatgcattttgatttttttgctattaatattatttatttcttgcattatcgcgtaggtccatac

SEQ ID NO: 9346 - DNA, 1185 bp, unidentified
  source 1..1185: mol_type = unassigned DNA; note = element_e9c31f6
  misc_feature 1..2: note = core
  misc_feature 3..210: note = LE
  misc_feature 211..1170: note = CDS
  misc_feature 1171..1185: note = RE
  misc_feature 22..213: note = bridgeRNA
cttgtatctagctctttccagagtttgcagacattctgatcagggcgccagctcgatgccgtctgggtggtgaacaccgtgcgttagccggagcggcgttcctgatcgtcgtcgcatgagcccgaacagttgcgggggccgaccgtcgggtcgagcccgaattcttacaaggacgggccgagggcgacattctctcttggtggagggcggatgctgatcggaattgatgtcgccaaggcagagctggtggtcgcagccaggccaagcggggaacggtggacggtagcgaacgacgagcacggtgtgcgtgcgctggtcgagcggctccgggtcgaagcaccggagctcatcgttctcgaagctaccggtggatatgaacttctctcagtcgccgctcttgtcgccgcggcgctgccggtcgttgtagtgaatccgcgccaagtgcgtgacttcgctaaagcgacgggacagctcgcgaagaccgatcgcattgatgcggatatcctggcacttttcgccgagcgtgttcggccagtggtgcgtgagatcccggatgccgacgcgcaggagctcgaagctctcctctcccgccggcgacagctactcgagatgctgggggccgagcggaatcgtttaggccaggtcttcggccgcggcaagcagaaagtgaggaagagtctcaagggccatatcgcctttctcgagcgcgagctcaggatcgccgacactgatctgggcgatatggtgcgaagatcgagtgcctggcgcgagaaggacgacttacttcaaagcgtgccgggcgtagggcgtgtggtctccttcacgctgctcgcggatcttcccgagctcggacgcctctcgcgtcgcgagatcgcgaagttggtcggcgtcgcgcccttgagtcgcgactcaggcacttttcgcgggcggcgattcgtccagggcggtcgcgccagcgtgcgcgccgtgctctacatgggcgccctcgtggcgaccaagcgcaacgctgtcattcgagcgttctatcagcgcctgctcaccgccggtaaaccgaagaaactcgcactggtcgcctgcatgaggaaactgctcaccatcctcaacaccatgatccgcaccggccagcgctggtcaatcgatcaaagcgctcccgtgcctatttctacttgactttcgagacagttg

SEQ ID NO: 9347 - DNA, 1450 bp, unidentified
  source 1..1450: mol_type = unassigned DNA; note = element_e9c475e
  misc_feature 1..2: note = core
  misc_feature 3..227: note = LE
  misc_feature 228..1433: note = CDS
  misc_feature 1434..1450: note = RE
tctaccatcggattttgtacggagacgggagcaccctcgttgatgtagactaccttcgacgggggtgtggctcgcggggtccgcagtctcgtactgctcggctctgaaatgccgcccccgtcgtctgtgccatccaggagcgtctgtcgggatggtgccatctgtggctctgagcagtagacgagaccgcctggatgggcgaactcatgctgcaaggaggcacgcgtatggatcctcacctctgtgttggcgtcgatgtcggctacaggtctcatcgagtcggcatcgcacacccgaacggctcgatcctggaggagttcgacatctcccacaccgatgccggcttcaatgagttcttccgtcgagtcgaggaacgtaggcaccagctgtctctgcctgtcgcggtagcgatggaagggttcaacggctacgcacgaccactcgaccgtctcgtccaagagaagggctaccggctgtacaacgtcaacaacctgaagcttgcccggtacaaggaggtgttccctggcgctgccaagacggatccgatcgacacccgcaagatcctcgagctgtttcgcctcaaggatcagcttcctcttgccaaggacgccatccaagaggtcgtcatcgctccagcagtgaacgagaagctgaagagattgagccgacgtagacgacacctcgtgatcgagaagatgcgagttctgaatcggatgcaggccgatctccaagccgtatgccccgaacttctcgctgcgacgcatgatgcagacaacctatggttccttcgcttcatcacctttcgtgatgatctgaggcagctggcgcggctacgacgagcgacggtcctacaaatccccggcgtgggtcggaagtatgccggcatcatccacgactggcaaaggcgtgcggtgttctcgtccgaggtcgagtacgtcggcccgatgatcattcaggatgcaaagcggatcctggagcttcgcaagcagatcgacgtgttggataacgcgttggctgagctgtccgagcaatcagagatcgcccggcgtctgtctagtattcctgggtttggcaagacaacgattgtcgaactagcaggagagatcggaacgctggatcgcttctccggtgaggcgagtctcgcgctgtacctggggatgtgccctctcacccaccagtcgggggaggtgtcaagagcaaggattcctcgccaggtcaacacacgctgcaaggcagcgatgatgacagcagtggcacgacacatcgggtgcgttcctcaatccaagacgtactacgatcggaaacgcactcagggtaagactcacaaccaagcgatccgtgctctcggacgccacatggtccgtgtcatctgggcgatcctacgggatggccgcgactacacgattcgagaggactcacaccccgcgacttgaaaatccaagagggatgt

SEQ ID NO: 9348 - DNA, 1400 bp, unidentified
  source 1..1400: mol_type = unassigned DNA; note = element_e9d154f
  misc_feature 1: note = core
  misc_feature 2..89: note = LE
  misc_feature 90..1121: note = CDS
  misc_feature 1122..1400: note = RE
  misc_feature 1155..1392: note = bridgeRNA
caatgggatggactcctcctcacctaaccggcatcaacgtgccagactggcagtgtcaccaaccagtcaatagagagaaggagtccacgatgaagattatccgcgcaggggtcgatttggccaagaacgtctttcaggtccacggcgtcgatcgccaggagaaaccggtatggcggcgaagactagaccgcgccgaatggcttaaggttttgctgaggacgatcgagcccgggtgcgagatcggcatggaggcctgcggaggcgcgcatcactgggcgcgtcagctgccggcccaagggtacgtggtcaagttgatcgccccgcagttcgtcaaaccctacgtgaagagcaacaagaacgacgtcaacgacgccgaagccatctgcgaggcgatgagccgaccgcacatgcgcttcgtgccggtcaagaccgtcgagcagcaggatatccaggccgcccaccgcatccgggccgacctggtcggacaacgtaccgccaaggtgaatcagatacggggcctcgccgcggagtacggtctcgtggcctcgaaacagatatggcacctgcgatcggccctgccgttgtggctggaagacgccgagaacgggctgaccgaccgctttcgccggctgctcaatgggctgtgggcggatctgctggcgctcgatcagcgcgtgaaggcgctcgatcaggagatcgccacgatcgccgccgaagatccggtggccacgcgcctgcagcagctgcgcggggtcggtccgatgattgccacggccctcgtggccacggtcggtgatgccaaacagtttaacaatgggcggcagatggccgccttcctcggactcacgccgagacagaacagctccggcggcaaagagaagctactcgggatcagtaaacgcggtgatgcttatctgcgttgcctgctcatccacggtgcccgctccacgatctacgccgccaggaccaaagaggaccggctgagccagtggctgaggcggattgccacgaagcgccaccccaacgtggccgcggtggccctggccaacaagactgtgcgcatcgcctgggccatgatgaaaaacggaacggattaccagcccgaccgggctgccggctaaaacacgcaggagattttaaaaccaaggagcctatcaccacgattgcaaaacaagccgcttaatggccaacaggtcgaaccggcgccggccgaacccgtgagtgtccaagggtattaaacccgtcaaagcaacagggagtcggcgcgcgaaaagcccattagggtcccgcatccaaatcgtatctatatggatgccgcagtcagagaccggatatacgtgagcagtcgtacctcacggcagaacaagcggactgtttgcaaacgaggaggagcccatata

SEQ ID NO: 9349 - DNA, 1624 bp, unidentified
  source 1..1624: mol_type = unassigned DNA; note = element_e9db980
  misc_feature 1..2: note = core
  misc_feature 3..283: note = LE
  misc_feature 284..1504: note = CDS
  misc_feature 1505..1624: note = RE
  misc_feature 13..309: note = bridgeRNA
ctactacaatagatttatggttagtatcccttacagccagtaaggaattatccatcttgttgcttaagctgttagaatgataagagcaatcggtatatcggaaacctccttggacttcgcgtccgtacgaaagtctgataaccagctcctcattcgcagcgttcgttttatgcaggttgagccgccctctcggtgcgttcgcgtcacaccacagtagattgaatgggcaatgagtaaaactggcactgaccaattgcaatctttatttaggagtgacatttttatgaacatgaacgcagtaggtattgatgtttccaaacgaaaaagcacggtagcaatcctccgtcctggtgggaaggctgttggaaagccctttgatgttcctcatctgtccgcagatttccaatctctgataaagcggatccgggagcttgatggtgaaactcgcattgtcatggaatgtactggccgctactatgaaccggtggcacgtgaactttcccaggcgggcttttttgtaagcgctgtgaatccccagatcatccgtaacttccagggacaggacaatcctctccgcaaagtcaagaccgataaggcagattccgtaaaaatcgcccgctatactcttgacagctgggcaaatctgaaacagtatagtcttatggatgaattacgttcccaacttaaaaccatgaaccgccagtttgatttctacatgaaacacaaaaccgccatgaaaaacaatctgatcggtctcaccgaccagacctatccaggcgccaatgcctatttcgacagccctgcccgcgaggacggcagccagaaatgggtggacttcattgacacttactggcatgtcgattgtgttcgaaaattgtccctgactgcttttattaaccactatcagaagtggtgcagccgtaagaagtacaacttcagcaagtcgaaagctgaagaaatctacggaaaggccaaggagctcatccccgtacttccaaaggacagctttaccaagcacatcatcaagcaggccgtcgggcagttgaacgtctcgtcacagactgttgaacagctgcgctcgcttatgaatgaaactgcctctaagctcccggaatatccggctgttatggcgatgaaaggtgtagggccgtctctgggtcctcagctcatggctgaaatcggagatgtgacacgtttcactcacaaaggggcaatcacggcatttgccggagtagatccaggcgtgaatgattccggagattattcccagaaaagtgtacatgcctctaagcacggttcgccagcgttacgcaaaaccctgttccagatcatggatgtactgatcaagaccaaaccggatgacgcggtatatctgttcatggacaagaaaagggcacaaggcaaaccttattacgtctacatgacagcgggagctaacaagtttctgcgcatttactatgggagagtgaaagaatatctcgccgctcttcccacgtcaaactaaccatcacactgcactctttcagaccggcatattctggcggtctaattgtaatacccatttttcaacctgtataaaattttcgatgttctttaaaatttagcttgactttttatttgcagg

SEQ ID NO: 9350 - DNA, 1394 bp, unidentified
  source 1..1394: mol_type = unassigned DNA; note = element_e9dea53
  misc_feature 1..2: note = core
  misc_feature 3..130: note = LE
  misc_feature 131..1153: note = CDS
  misc_feature 1154..1394: note = RE
  misc_feature 1165..1357: note = bridgeRNA
acatggggtaatcgcgggagcgagttacctctgagctgtagatttatgaagagaggtggctgttccccgatatgatggaagtacgggctcacgaccggaagccgtgcccaagcatcaatggagaacagccatggacgagtatatcggcttagacgtctcgttgaaagagaccgcgatctcagtgcggcgcggcggcaagcgggtctggcgcggaaagtgcgcatcggatccacaactcattgccgaagtgatccgcaagcgagcgcccgctgccaagcgcgtcgtgttcgagaccgggccgctttccgtctggttctttcatgccctcacggccgaaggcatgccggcgatctgcattgatgcacgtcatgccaaggcggcgctagacatggcagcgaacaagaccgacgccaacgacgccgacgggctcgcgcacttggccgaggtgggtttcttccgcgaagtgcgagtcaaagcgttcgacagcatgctctcacgaactctcgtcgcggcccgcgtcaaactcgttcgagcatcattggatgtggcgaaccagatgcgcgggctaatgaagacgttcggcctcatcgtaccgcgcagcatgggcgggaagttcgaggacaacgtacgcacccgcttggctgatgatccaaatctcgcgaggatcattctcccgctgctcgaagcatggcgcgccctccgcacccaagctgccgaactgacgcgacagcttcttgcgaacgcgcgcaggagcgaacaatgccagctcctgatgacgatccccggagtcggcgcgatcactgccacttcctatctgactgccgtggaagatccctccaacttcaaacgatcacgctcggtcggcgcttggctcggcctaaccacccggcgctatcagtcaggcgaagtcgattatgatgggcatatatcccggcgcggcgatacccatgtgcgctcgcttctttacgaagctgccgtcgtgatcctgactcgcagccatgccgcgagcgacctacgcacctggggaattaagctgcgtgaaaagatcggcttcaaacgggcggcggtcgcggtagcccgaaagctcgctgtgatcatgcacgcaatgctctgctccggagagctcttcaacaggacacaagccactgactgatcaaacaagctcgacagcgccaatggcgtgacgaggcgtccctgccaggacgcaggctggttcattccgtagttgccgttgcactacgagctccgactcgaagcgtgcgtaatgaacattggaaggaccgccttgcgaagccccatgatgcggcgacccatgtcgaccgcgaagacgaccatgctcctggcacgatgacgacctctcgcgaaacagcgcttgcaaatgccgctattagacg

SEQ ID NO: 9351 - DNA, 1129 bp, unidentified
  source 1..1129: mol_type = unassigned DNA; note = element_e9dfc95
  misc_feature 1: note = core
  misc_feature 2..183: note = LE
  misc_feature 184..1113: note = CDS
  misc_feature 1114..1129: note = RE
  misc_feature 10..193: note = bridgeRNA
tgtaacttgccatcatgtgcatgggacatacttcctgtatgcggtggcggatccaagcccgcagcccccttgggatttgtagcccgtggcagagccagggctggctccgttgttccattgaacccgaacagtcgccagggccgctcgcgcatgcgaagcccgcttagacaaggatgggattagatggaaaatgttgttggcatcgatgtttcgaaagaccggcttgatgtacatgtcctggcgtccggggaaagcttcgcagtcccgaacgatcacgacggtcttgatgcgctttgcgctcgtcttgtgccaacgaagccggatgtcgtcgccatggaggcgacaggcggctacgagatcgtggcggccggagatctttcgagagccggccttgccgttgcgaccctcaatcccgcccaggtgcgtgcctatgccaatgccttgggcaagcgcgccaagacggatccgatcgatgcggccgtgatcgcggccttcgtggctgccacgaagcctgccatccgacccctgtctgacacgcaaagccaggcgcttgcggctcttctgtctcgtcgccgacagatcattgcgatgatcgtggccgaggagcagcgattgcgcatggctctggccaaggaggcgcaaaagagtatcaagcggctgcttgcggcccttcggcgcgaactcggcagcctcgatgccgatctcgacgatcatatccgcaagtcgcctctgtggcgggtccgtgaggcgcttctgacgtcggtgcctggggtcggacgggtgaccgcacgcacactgcttgccgagatgccggagctcggcgatcttgatcgccgggaggtggccgcgcttgccggcgtcgcgccatggacgcggcaatcggggaaatggaaaggcaagagcttcatcggcggtggacgatcggtggtccgttcggctctgttcatggccacactggtcgcctgccgtcacaatcccgtgctgaaggctttccgcgacaggctggttgcctctggcaagccgaagatcgtcgccatcgtcgcatccatgcgcaaactgctgactatcctcaacgccatcatccgggacgaaaaaccatggcaaagcgcttgacagcaaagacagtcgc

SEQ ID NO: 9352 - DNA, 1475 bp, unidentified
  source 1..1475: mol_type = unassigned DNA; note = element_e9e611e
  misc_feature 1..2: note = core
  misc_feature 3..248: note = LE
  misc_feature 249..1451: note = CDS
  misc_feature 1452..1475: note = RE
tctaccatcgaatttgcgtatgacttgcgtcagatgaaagcgtagcataaccgtctgacgggggtgtggctcttggggtcggcggacttggaaacgggtttcgctaatgtctgaaatgccgcccccgtcatccgcatcatccaacacgcctgccgggatggtgccaatctatcaagatcgtggctctgaaagtagacgagacgtatggatgatttcattcaactgtcttgtttatcgaggagacgatgatgaaccccctctcaatccgagttgctgtggatgttggcagcacccgtcaccgtgtggcgatcgggctgccggacggcaaacttctggacgaattcgatatcgaccacaacgcggttggcttcggcgaattcttcaatcacattgaaactgtcgagaacctccatcacttgccggtagcggtcgcgatggaaagctacaacggttgggcgcgcccgctggacgggcacatcctccgccacggctacagcctgtatagcgtcaacaacctcaaacttgcccgctacaaggaaatctttccggcaccggccaagaccgacgcgattgatgcgcgcaggatccttgaactgttccgcctgtccgagcacctgccgctggcgcgggatgcgctgcatgaagttgccccgacgcccgttgccaacgaccagctcaaacgtctcacgcggcggcgcaagcagctcgtctgggaacgggtgcgcgtcatcaaccggctgcaaagcgacctgcaggcggtgtgccccggcctgctggcgatcaccggagaagcgggcaacctgtggtttctcaatttccttacctgccgcgacaaactacccaagctggccaagctgcggcagagcagcctgctggcgatacgcggcgtgggcaaactctatgcgtcacggatacaggcgtggcaactacaggcgcaattcgcccccgaggtcgaatgggtgggcgaaatgattcagcaggacgcgcgccgcatcctcgccctcggggaagaaatcaaggcaatcgaacagcaaatcgccggcattgccgtgcaatccgaactggcgcaaatcatcggcagcattccggggttcggcaaaaccacgatggctgaaattgcgggcgagatcggtacgctggagcgcttcgaaacggaagcggggttggcgatctacacgggcatggctcccctggacaatagctccggcaaaaagaacagcaccaaagcgccgcgacaagtcaacacacgcgccaaggctgctatgatggtggcggtagcacggcatatcgaatgcgtccccgcatcgcgcgcctactacaacagaaagcgcgccgaaggaaaaaaacataatcaggcaatccgcgccttggggcgacaattggtgcgggtgatttggtctttggttaaacagggtagaaaatacgaaatccgggaagaaaattcaaaataaggcttgaaaatttaagcgggatgt

SEQ ID NO: 9353 - DNA, 1636 bp, unidentified
  source 1..1636: mol_type = unassigned DNA; note = element_e9ea0f8
  misc_feature 1..3: note = core
  misc_feature 4..261: note = LE
  misc_feature 262..1482: note = CDS
  misc_feature 1483..1636: note = RE
  misc_feature 77..232: note = bridgeRNA
tcctgttactgtaaactagacaaagagagaccgatagcgtagaacattatgagacgatccatcgtcacaatgtctacccatcggtctctggcctgggatcaaggaccctgtcattcctgcgccatgagcgcctgcctcggaccgtcccccaggcctggtgggcggtactgtccaaagcatgcagcgccaagagcgccctaacaggaacacagtaccccaccacgatggatgggtccctcgtgaatgcacaaggaggtcccaatgcaagtatatatcggaatcgactggagtgaagcaaaacacgacgtgattatgatgaatgcagcaggtgccgcactggctcggtttgagatccctcacagctcggagggctttctccaattggacgaaacccgttggcgcatgaagttggcacccgaagattgtgttgtggggctggagacagctcacaatctgttgatcgacttcttgtggtctcgcggctacagcaaggtatacgtggtgcctcccaccacggtcaaaagcaatcgaaagcgtttcggcagcagtgctgcccgatccgatcccaatgatgcattcgttatcgccgatagcctgcgcaccgaccatggacgcttgcagccatggcgcccggacagcttgcttacgcgccaaatacaagccaaggtcagtctgatcaatcatcttaccagcagcacggtccggctctccaaccgcctgagagctgtgctgctgcgctattacccggcagtgctgaacatgttcagcacgtggccaaccaaagttgccttggagttcgtttgcgcattccctaccccaggggaggctgaaaacttgtcgcttaacgaatttcagcgctttgcccgccaacatcgatatccaaacccgaagagattgccggcttgctttgcacgtctgcaggcaccgcagccgcaagctgctcaagagaccgtggaagtctaccagggtgaggccgtgttgttggcgaccatgctgctgaccgcaatgcgagccaaaaaagcagcgttgtgcgagctcaaaaccctcttccgtgaacatccaggccatgcgatctttgactccttgccgggtgcgggtgactttctggcgccggctcttctggccaagtttggtgatgatcggaagcgatttccatccccggccagcgttcaggccttagcaggtacctgcccagtgacggaccagagtggtaaacggcgcatcatcaagttccgccgtgcgtgtgaccgcgagttccgggcgatcgctcaacagtgggcgattgcttctttgcagcgatcggcctgggcaaatgcctattttcagcaagcacgaccccgttgtcgttattccagccaggccttccgtcgtcttgccaatcgctggttagcgatcgcctggaagctctggcagacaggtcaggtctatgatgaagcctatcatctgaagcagcgtgcgcttcgaagcaaaaggaaccgctgaccgctaatccctttcatgtgaatgtgtatcacgaaggcacaggtgatgatggatcgctgtcgtgatgatggaagaccagctccggactgaaaggcagtaccggtgccgttgctacatcgcgtctacttacaaaatttggtattgacaaagcatg

SEQ ID NO: 9354 - DNA, 1580 bp, unidentified
  source 1..1580: mol_type = unassigned DNA; note = element_ea008f8
  misc_feature 1..2: note = core
  misc_feature 3..247: note = LE
  misc_feature 248..1423: note = CDS
  misc_feature 1424..1580: note = RE
  misc_feature 5..228: note = bridgeRNA
ctactattatataaagtcatagtctttctttaccttttctataggtttgactatgctattttaagatactgtggattggtatttttctcctaccacttgatggttttaaaaaggctccaaccacagtctctttgttcatttgttaatcagttagttaccgcatgacggtttatcaagaagtaggttacgattgcaaggagccctgtggatcttaaaacagtatcaatctattttaaggaggtcctatatgatttttgtaggaattgatatcgctaaagataagcatgattgctttatcactaacaccgatggagaagttcttttcaagtcctttaccatcaccaacaaccttgatgggttcgatgaactttatcagaaaatagaatctgttatggaagatgtttctaaagtaaaagtaggcctagaagccactggacactatagttacaatcttcttggatatcttcttgataaaggtttgccgacctacgttatcaacccgctacatacaaatctgtacagaaaaagtctaagccttagacagacgaaaacggataaggtagatgcccatacaattgcttctatgctaatgtctgatgtgaacttaaagtcctactcagacacatcgtaccacaacgaagaacttaagtcactaacacgttatcgctttgataaggtcaaagaacgtgcaaagctcaaaacttctatttccagacttgtctgtatcttatttccagaactggaaaagcttgttccgactcttcatcagaattctgtatatgaactcctttacgaattccctggggcaaagcacgtagccaatgctcatcttacaagactatctaatcttatagaaacagcatccaagggacattacaccaaagatacagccattaactttagagaagctgccagaacttctattggttcaaatatgccagctaaatctctagaactgaagcacaccataaagctcattcgtgaactagatgccgaaattgaagagattgaaaatgaaatcaaaatcatcatggatgaaatcaactccccaattcttagcattcccggaattagttaccgtatgggggcaatgattattgccgaaataggcgatttcaaccagttttcttctcctgataagatactagccttcgctggtatgtcgccttccacgtatcagtcaggccagttagataactgctatgcacgaatggaaaagcgtggttccagatatctccggtacgctctgtataatgctacagcatatgtttgcttatgggatccaacattcaaggcttaccttgccaagaaacgatccgaaggtaaacattactatgttgcattatcgcatgcaacaaagaaactggttcgagtcatatatcagcttgaatcatctggtcagcaatacataaacgctaattaatcattccaatatcatatcttcttgtcagagcaccatttctgatgctctatttgtcatgcaattttcaatgtactgattgcgatgatatagtcaccacaactgtatttaaaacatttctgtttttataactttttattgactatttctaatagttagt

SEQ ID NO: 9355 - DNA, 1517 bp, unidentified
  source 1..1517: mol_type = unassigned DNA; note = element_ea04e0b
  misc_feature 1..4: note = core
  misc_feature 5..106: note = LE
  misc_feature 107..1489: note = CDS
  misc_feature 1490..1517: note = RE
gtcactagtgcaccctcttccgtgcagacgccgtcatggcgtgtgtggtaggaaccaggcggaagccggggtgacggcctagtgtggtcgcccttcgagggcctgcatgacactgccgcccccggcttccccggaaccgcgaagcgatgacaagaggacgcgccgtagagcgccggttagtgaccactccgctgtcggttccctcgcctccgcctggcgcctgccccgagtcacgaacggaaaggcgacggggttgtcgctgccagacgcgttgttcttcgtcgggatcgactgggcggcggccgagcacgccgtatgcgtgctcgatcccaccggccgtaaagtcgccgcgttcaccatcgcccacaccgccgccgggttcgccgagctggtccgcaagctgggcaagctcgccgactgcgagcgggcgccggtcgcgatcgaacgcccggacggccgcctggtcgacacgctgctggaagccggctatccggtggtgccggtcaaaccgaacgcgatcaagacctggcgtgaagccgaggtgctctccggcgccaagtccgaccccggcgacgcccacgtcatcgccgactaccttcgagtccgcgcccaccggctgcggccggcgacgccgttctccagccacaccaaggccttgcgggccaccgtgcgcagccgcactgacctcgtcgaggcgcgcgtggccgcgatcaaccagctcggcgcgctgctcgacgcgcactggcccggcgccaaagcgatcttcgccgacatcgagtccgcgatcgccctggccttcctgacccgctacccgaccgcggcctcggccgcccgcctgaccgagaaacagctggccgcgttctgcgccaaacagggctactccggccgcaaacccgccgcggtcctgctggcccgtctgcgtgacaccccggctggcatgaccgatcccgttacctgccacggcgtccgtgacgcggtcctggctcaggtcggcgtactcaccgcgctcaacaccgcgatcaagaacctggaccgctcgatcgccgagcagatggacacccaccccgacgcggagatcttccggtccttcccccgcgccggcaccatcaacgccgcacagatcctcgccgagtggggcgacgcccgcgaagcgttcggccatcccgacgccatcgccgcgctggccggcatcaccccggtcaccaaggcctccggcaagcaacgcggtgtcagcttccgctgggcctgcaacaaacggctgcgcaccgcgatcaccacctgggcggcgaacagccgcttctccagcgactgggccgccgacatctacaaccgcgcccgcgccgagggaaaggaccacccccacgccacccgcatcctcgcccgcgcctggatccgcgtcatgtggcgctgctggcaaaacaacacgccctacgaccccatcctgcacggcgcagcccgacgccaggccgaacaccagatcgcggcctgactttgatcttgaggttgacacaagaggt

SEQ ID NO: 9356 - DNA, 1471 bp, unidentified
  source 1..1471: mol_type = unassigned DNA; note = element_ea19107
  misc_feature 1..5: note = core
  misc_feature 6..221: note = LE
  misc_feature 222..1454: note = CDS
  misc_feature 1455..1471: note = RE
  misc_feature 1..225: note = bridgeRNA
cccccgttacctttttcgcagccccaaccggggttgcaggccaccggccgcggcatgacttagtccccctgttgtccatgatctggggggtgttgtcaccggggtccggagggtgccagtgaccgctaatagagacctgaccgcttcttggtctgttcgtaacgtggctgccggcgcgaggcatcgaggcggcctgctccgtacgagcaagggaccaggcgttgaccgagcaggacggcagcaccgaccggtacgacgtgtactgcggagtagacgtcggtaagagcgagcaccatgcgtgcgcgctcaaccccgccggcaaacgcctacacgacaaaccgctgcccaacgacgaagacgccttgaaggaggtcctcggcaagcttcagacccgcggccgggtcttggtgatcatcgaccaaccggcctcgatcggcgccctggtcatcgccgtggcccgcatgatgggcatcgaggtcgcctacctgcccggcctcgcgatgcgccggatcgccgacctgtaccccggcgaaggcaagaccgacgcccgcgactcgttcatcatcgccgacgccgcccgcacgatgccgcacaccctgcgccggatcggcaccgacgacgaaaccgtcgccgacctgacggtcctggccggctacgacgacgacctcgccgcccagtccacccgtctgagcaaccggctacgcgatgccctgctgcacgttcaccctgccctggaacgcttgctgggtaagcacttcgaccgccccggcgtcctggaactgctcgtcgcagcctcgaccccggacgccctggcacggctgaccccgcaggccatgaccgagatcatgaagccccgctcgccgcggcttgccaagaccctgcccgcgaagatccgcaccgctctcgacgagcagagcgtcatcgtcccgggcactcaggcgttcgggcgggtcatctccggactcgccacccagctgcgtgacatccacctcgaacgggcatccctcggcgccgaactcgaagcacgcctacaggcccaccctctgcacgaggtcctgacctcgatgcccggactcggggtcaggaccagcctgaagatcctcaccatcgtcggtgacggctccgcgttccccagcgccgctcacctggccgcctacgccggcctggccccggtgacccgccggtccggaacctcgatcaagggcgagacccggtcccggcgcggcaaccgcgccctcaagaacgcgctgttccaatccgcgttcgcgagcctcgccgacccgaccagccgcacctactacgaccgtaaaagagccgagaagaagaaacacaacgccgccatcgtctgcctcgcccgacgacgcaccgacgtcatctacgccatgctccgcgacaagcagccctaccaacaacccagcaccgaaaaccccacaaaacacaccgctgccgcttgacaaagatcatagagaca

SEQ ID NO: 9357 - DNA, 1294 bp, unidentified
  source 1..1294: mol_type = unassigned DNA; note = element_ea22cc3
  misc_feature 1: note = core
  misc_feature 2..211: note = LE
  misc_feature 212..1180: note = CDS
  misc_feature 1181..1294: note = RE
  misc_feature 35..202: note = bridgeRNA
tcttaagtttgattctctataaattgatgtactaatcagaaagaacaaaagagagaattaaggttactatacacggtgaagcttacgacttcgacaacattgttaatcctctctcttttactacttaaatcacgttcagttctgtgagaccttgatctcgttttcaagttgttgtgataccagtagctagttctttcataaatcatttcttatgaataaatataaagaaacttatggagtcgacatcagtaaggatgtctttgatgtacatggtagtaacaaaggtcacgaccagtataagaacgatgaaattggatttaagaaattccttaaggaattacccaaaggttcattggtggttatggaagctaccggttattatcattatagacttgcacagtttctttacaaaaacggagtattggtttctgttgtaaacccattgtcgataaaacgtttcgtacaaatgaaactggccaaggtaaagactgacaaaagcgatgcaagggccatatgtgaatatgcccttataaatgaagttccgctttacaatgctttaacggatacccagagcgaatgtttacagttgttccggttattggatacctatttaaaacaacgtaccgcgaccaagaacaagatacatggggaagctgttttgggtataccctcaaagtttgtttatcgttccttgatacgcaacaagaaacagctgaataaagaggtagttgctatcgaatcaaagatcctgtcgttggtaaagggagaccaacaagaacaattgaccttgttgatgtcaatacctgggataggtcaaaagactgcgttatttttaatagtggcaactgatggtttcagcaagttcgaaacggcatcacagctatgtagttatgttggtataaccccaacgatacgtgagtcgggaagcagtgtaagaggtcgtgcacgaataagcaaggtcggcaatagaaagcttcgtaatctattgtttctatgttctttcaatgcctgtaaacataacaaggcatgcagagaggtatatgagcgaatcgtaaataagggcaagagtaagaaactagcattgatagcagttgcaaacaaactattaaagcagtcttttgctattgcaaaatctggtagaccatatgatgaaacttacgtttccatactgccaagataaatagaagatggattgaataaaaaaagctcaaaaaatcaagttattgaacctatgagcgtggaataatattgtctcaaattaaggaagaatttgtttgttttttacctcagttct

SEQ ID NO: 9358 - DNA, 1320 bp, unidentified
  source 1..1320: mol_type = unassigned DNA; note = element_ea25000
  misc_feature 1..2: note = core
  misc_feature 3..71: note = LE
  misc_feature 72..1109: note = CDS
  misc_feature 1110..1320: note = RE
  misc_feature 1084..1304: note = bridgeRNA
agatgtatggactccctcttccccagagggatatggtgaagtcgtcaaacaaaccaaaagagagtccatacatgcaaaactatacagttctggcgattgatttagcaaaacatgtgtttcaggtggtcaaaaccaccgggtatggcaaggcggtttttaataaaaaaatgaaccgtacagagctcaaaaagctgttatgtaacgaacccaaagcgacggtggtgatggaagcctgcggcggcagccattattggtgtcgcctggcagagtcgtttggtcatcaggtcaaagcgttgccggcccggcaggtgaagccttttcggcagggacaaaaaaccgatgccaatgatgcagttgcgattgccaccgcggcgcgccagcctcatttaaaaccagcacgggtcctgagtgaggaagagcagggtttacagtgtattgagaagatgcgcgagctgcaggtggcgcataaaacggcgctgagtaatcagttgcggggcttgttgtttgagtttggcatcgtgatgagcaaatccgatgcagcacttaaaaaagcactgccggaaattctggaagatgcagaaaatggtttaccgggcggattcagaaccgcgctggcgcagatatgggccttgtatttaacgataatttcggaacttgaaaagctcagccagtttcagcaccagctcaccctgcaggatgagcagggccgtgcgttgagcgcgctggaaggcgttggcccggtgggcgctttgggtttgaagctggcgattggaaatggtgcgcattttaaaaacggccgccaggccgcagcctgtatcggggttacgccggtgcagcacagcagtggtggtaaagaaaacatcggctccatcagtaagctcagcggccataagaaactacgctctgtgctcatccagggcgcgatggccgttttgcggcatctggcacaacgtgaggccagaaataccaaagaacaatggttaaaagcgctggtgcaacgcagaggaacacggattgcggcagtggcgctggccaataaaacagtgcggacagcatgggcaatgctgagccggcaacaagagtaccaagcgccgggattgttggcgtaagcgttctgtcagcagatgcgacacatacaggtaagaccgaccatcaagagcctgcgcgtacctcagcgttgaaaaaaccgcttcgtagaataggcatgatggtgcgacaacatcgatgtggcagaggtagctcctcaacaaagcccgaatataagctcgcatctatacccgtatgcaaagatctgttgatagtcccgagggagtccatata

SEQ ID NO: 9359 - DNA, 1564 bp, unidentified
  source 1..1564: mol_type = unassigned DNA; note = element_ea25a3b
  misc_feature 1..4: note = core
  misc_feature 5..287: note = LE
  misc_feature 288..1451: note = CDS
  misc_feature 1452..1564: note = RE
  misc_feature 49..268: note = bridgeRNA
tcacgtataatctatttatcttcttaaagggggtaaatagattatttttctccttttctcagatttgttatatttgcaggagtagctacctgcggtataataatgacaagcactgtggatttgtacctattttattacagcttgactgtttcgaggtgactcaaaccacagtggtttgtctgaattggtaatcagttagttaacgcttagacgtttttatttgcgtgagtacatagacaagccgattgtggaaacagcagtgcaaaatttaaaaaggaggacgagaaatgtattttgtgggaattgatatttctaaattcaagcacgactgcgttgtggcagatagttcaggcgaggtttattgcccatcctggtcgtttgcaaacgaccaggatgggttttcggctctggcaggtttgctgagtagtatcgagggtgaaaaaaggataggctttgaagctaccggtcattatggactgaatttaaagctattccttgaaaaacaaggctacagctttatggagcttaatccgcttctgattaaaagatttgttcacagcaaatcactcagaaagacgaaaaccgataccctcgatgccctctcaattgcccaatatatgatgacggtagaatacaaaccctatccgacatcattttatcacatggacgctttaaaatcattaacaagatttagagatagccttgtgaggcaaagaagcaggcagctgactgagcttacaaacatccttgacaaggtgttcccagagtttaagccgttctttaaaaaccgcttttccggcactgctttgtatattctttgcaattacccatcaccggagaatatttccagcttgaactctcgttcctatgatattctccgcaaaaaatctatggggaaatttaaaatgagtgattttgttcgcttaaaagagttagctaagagtactgttggcagaactaataaatttttgctttttgaaatggctgcagttttggatatctattctcagctgaattctaaagtcgaagaaattgaagccaaaattaaagaccacataataatccttaacccgccaatgcttactatgaccggcataggtgctttatctgctgcggttatcctttcggagtttggcgatttctctaactatgaaagtccatccaaaatgctatcttttgcagggcttgagccgggttattttcaatcaggtatttctgagcataccggtagaatggtgaagcacggttcatctcatctgcgttatgcaattatgaactgttgcgtgccactgattactcacaacattgtttttgctgaatattacgcgaaaaaacgagctgaggggaaaccttatcgggttgctctttctcatgtcgcaaagaagttaattagggttatttacgccttacaaactcaaaatgtcccttttaatcctgaaaagttaatttgattttttatgttgtcctaaattgctttgaaaattaattttttcaaggtttgtttgctatacccttttttactaactaaaaaattttcaaatttctcttgacttttaatagttag

SEQ ID NO: 9360 - DNA, 1312 bp, unidentified
  source 1..1312: mol_type = unassigned DNA; note = element_ea2823f
  misc_feature 1..2: note = core
  misc_feature 3..67: note = LE
  misc_feature 68..1102: note = CDS
  misc_feature 1103..1312: note = RE
  misc_feature 1088..1306: note = bridgeRNA
ttaattagatggtccgcctcacctctaagctagtcttagagttaggcaatcaaagaggcgaaccatcatgtctactattaaagttcttggaatcgatttaggcaaatcatcttttcatgtgataggccgggattattcagataaccaaatcattcgcaaaaaattttcccgttcggcactcattcattttcttcatcagttaacgccatgcacgattgcattcgaggcttgtggcggtgcacactggcttggcaggcagtgtgagtcgatagggcatacagtcaggcttattcctccgcaatatgtaaagcccttcgttaaaagcaacaagaatgatttcatagatgcagaagctatatgcgaagcgtcgacaagacccaatatgcgcttcgtcagcgtaaagtcagaagaagcccaagttatttccgctattcataaagctaggcacggttacattaaagaccgaacagcgtgtatgtcccgcataggcgctttacttctggagtttggtgttgcgctgcctacaggccatagcgtgatgaagcaactgtttaactggcttgctcagcaaaaacagaaaataccagggttacttatgcaagagctgatggagcttcacgagtactatctgtttctcaatgaaaacatcgatagacaggataaaaagttgaagcaattggttgaaacaaacccgataggccagcttcttaaaacgattccggggattggagacatgactgcaagtctttgtattgccaacatcagtagcgccactgactttaagagtggtagaaacatggcggcatggctgggactggttcctgctcagcattcaactggcggtaaacccaaattactggggataagcaagcggggtaacaaagaactccgcaccttgtttatccatgccgcaagggcggttatgtccagaccggataagaccggaaagatttatggcgagtggctgataaatttacgcgccactaagccatttaatgtggtaaccgtcgcattggctaataagcttgcccgaatcgcatgggcggttatgaagacgaaacaggcgtttaacaacaacgcattagcaccgagtttgcaatgataaatatgatgacgaaaacggtagaaccactggattagaacctgacacaaaaaacagctcttagaagctttcggtttttttgaggataatccagcgcggatctcatcgtggagcgggttgcgaaagcacctaatcagactccgaatacattagcgcataaccaaccccgttatcgacatttattgttgcaataacgaggcggaccataca

SEQ ID NO: 9361 - DNA, 1178 bp, unidentified
  source 1..1178: mol_type = unassigned DNA; note = element_ea299fa
  misc_feature 1..3: note = core
  misc_feature 4..422: note = LE
  misc_feature 423..1175: note = CDS
  misc_feature 1176..1178: note = RE
  misc_feature 7..181: note = bridgeRNA
ctcgcttgtatgtttagacttgaaggggtgggtgggactaaagctcgtcatctgactctaaccagtacagaccgtgggagacttcgtcccaccccttcacctaatgcgccgataaggaatgcatcggctcggaccgacgatagaaacaagccagcgcaacggtgaaccccgtcaagtatctaaaccctagctcggagggtgtgccatgacaatcctggattcgcaggtggtcgtcggtgtggatgtggcgaaggacgagatcgttatctatcgatccgacctggaaaagaccctaaatatcgcgaacaagcgatcaaccttgaagcaatggctcaagacgctgccagcgcacagcgcacagcgctatcgcgctagaagcgaccaatatctatcaccttgatacaacggaaatggcccatgaaatgggccatgacgtttacgtcatcgatggcagtcgcctcaacaaataccgcgatggaataggcatgaaggcgaaaacagatacgttggatgccgaactgctggcccgttacttgagccgcgaatccgacagattgaggatctggaatccgccaccgaaggcttacacacaaatgaaaagcctgcttcgccgtcgggctcagttggtccgggcctgtgttgcactcaagcagagctggaaaaacgaatccttgctgaaagagcacttcaaccagcttctggccgccattgcccagtttgaaaagatgattcagaaaacgctcaaggaaattgctgaggaaggtgggattgatgatcaggtgaagcgttgccaggccatcgagggcgtagggctcctgacggccaccgcagcggccactgcttttatgcgtggggaatttgccaacagcgacgagtacgtcgccttcctcggcatggatccgcgtgtgaggcagtcaggacaaaaggatcaaaagcgccgactctctaaacgaggggactcggagttccggcgcttgtttcacaatagcgctatggctgccagccgttcgccgacctggaagccgtactacgaacgctatctggccagaggtctaaaaggcactcaggccttggttatcctggcacgcaagctggccagagtgatgtttgccctgatgaaaaaccaaaccgaatacaagccaaattctatgtttgggtgttccccccaaacatagaat

SEQ ID NO: 9362 - DNA, 1616 bp, unidentified
  source 1..1616: mol_type = unassigned DNA; note = element_ea2e304
  misc_feature 1..2: note = core
  misc_feature 3..273: note = LE
  misc_feature 274..1494: note = CDS
  misc_feature 1495..1616: note = RE
  misc_feature 14..296: note = bridgeRNA
ctactactatatatttatggttaatattcctaacatccagctaggatgttatccatcttgttgcttaagctgtagaatgatggaagcataggtctggctgttttctcctagaaccttgcgttcgtaaataagtcagccacccagctcctcattcgcagcattcgttttacgcaggttgaacctcccgttcgtgtgaaacacccagtagattgaataggcaatgagtaaaactggtattgaccactgctaatacatctcaaaggagtttctatcatgatgaatgctgttggtattgatgtttcaaaaggtaagagcactgtcacaatccgaaggccaggtgatgaaattgttcttcctccccgtgatgtccgtcatacccgctccggtattgatgctctgatcgatcagatcaaaagccttgatggtgaaaccaagatatgcatggagtgtacaggtaggtactacgaacccatggcaacatggctaacagaagcaggtctctttgttagtacagttaatccagcacttatcaaagccttcggtgatgactcgctccgtgctcccaagaccgataaagctgactccaagaaaatcgccaggtacactcttgaccgttgggcaaaattgaagcagtatggtcgtatggatgaaacacgcaaccaactcaaaacaatgaaccgccagttcggattctacatggatcagaagacctcaatgaagaacaacctcatcgctcttcttgaccagacattccccggcgctaatgacttctttgacagccctgcacgctctgacggaagccagaagtgggtagatttcgtctacacatactggcatgtcgattgtgtgacaggaaggacacttgatgcctttacagagcactaccgtaactggtgtagccgtaagggttataacttcagcgcagctaaggccaagaccatctatgatgtctctaaagaccttattgccgtattcccaaaagacgatgtgacaaagatgatcattcatcaggccgtggatcttcttaacgctgcatccaaaactgtagagactctccgggccaagatggatgaaactgcatccaagctccctgagtatcccattgtaatggatatgaacggggtcggtcctacacttggtcctcagcttatggctgagatcggagacgtcatgcgctttgaaaagcgcggttctctgacagcatttgccggtgtggatcccggtaaaaacgaatccggacaatatgtgcaaaaaagcgtgcccacctccaagaaaggatctccgcatttaagaaaaactctctttcagatcatggacgggctcattcagcgttctcctgtaggtgatgccgtctacgatttcatggataaaaaacgtgcccagggaaagccttattacgtttacatgactgccggtgctaacaaatttcttcgcatctactatggtcgtgtaaaagagtatctggcatcacttgcagccaacaaatccgaataatcaatagcgccttctcgccatcacagaccggcatatatggcggtcttgttttgatgtcttaaattcaacctgtataaaattttcaaagttcatcaaaatctgcttgactttttatttgcaga

SEQ ID NO: 9363 - DNA, 1329 bp, unidentified
  source 1..1329: mol_type = unassigned DNA; note = element_ea3ead9
  misc_feature 1: note = core
  misc_feature 2..78: note = LE
  misc_feature 79..1101: note = CDS
  misc_feature 1102..1329: note = RE
  misc_feature 1115..1327: note = bridgeRNA
taatgaaatgaacccctccccaaaacggcttcagtgagccatgctgaatacatcagcaaaaagatgaagaggtgtccaatggaacaagttatcggaattgacctggcaaagcgagtatttcaattacatattgcgtctccgcttggaaaaatgatgaaaaatacggtggtctcgcgcgataaactgacggctttccttgctcaacaacccccttcaaaaatcgtgatagaagcgtgtggcagcgcaaattactggagctgccaatttaaacgctttggtcatgaggtgaagcaaatcagcccccaatatgtcgccccgttcagaatgggcagcaagaatgataaaaatgatgccgccgcgattgtggaagcagacagtcgcccgggaatgcgttatgtcccggaaaaaacgcaggagcaacaggatattcagtgtttgcaccgggtctgccagcgactcatgaaaaacagaacggcactgattaatcaaatccggggactgggcttagaatatggcattgccatcccggaaagcgcccacaaggttgagcaatgtttgcctgaccatctggaaaacgcggaaaatgacctgacgccgttgagccgtgaactgtttcaggaattgttgtttgaactcaaagaacagcagcagcgcctgatggaactgaataaacgcctcgaccacttgaatgcgcaacaagaagatatccgtcgtttgctaacactgccgggtatcggtcctctgggcgcatcagctctaatggtcgccttgggtgacagcaaagacttcaaaaatggccgccattttgccagctatctggggcgggtgccaagagagcatagtagtggtggcaaagtcaggttattggggatcacgaaacgcggcgatggctatttacggggaatactgatccatggtgcccgttcagtggcttatcgggtgcaaaaactccgcgatgaacaatgtaatggcttacaacgctggttaaaaggcgtgatagcccgcagcgggatcactaaagcggccgtggcactggcgaataaaaatgcccgaatcgcgtgggccttagtcaatcaacaatcagttgatgaaacacggtgaatgaacagttcagcgtcatgatgtaagagaagtccataagttgatgtactgacaggtagtaccgactctctgtgaacctggtaaatagctcagtctgtcgggactgttgaaataatgagggcagagagtgcggattttcatcagggctcgttgaagccgaatatatgcttgcgactacgttatcagaaaaatttactcacccacttgaattaagtcggtgtccatata

SEQ ID NO: 9364 - DNA, 1370 bp, unidentified
  source 1..1370: mol_type = unassigned DNA; note = element_ea4cac6
  misc_feature 1..2: note = core
  misc_feature 3..78: note = LE
  misc_feature 79..1107: note = CDS
  misc_feature 1108..1370: note = RE
  misc_feature 1081..1357: note = bridgeRNA
cgatggggtggacgccccccgacggcatcgaagtgccaaggtagcgggtgttgaagcaccgctatgaggagggcgtccgtgaaagaggttagcatcatcggcctggatctggccaagaacgtaatccaggcccacggcgctgcgccggatgggtcagtcgtttttcgacggaagctgtcgcgcgggcaactgttgaagttctttgcggatcaagcgccatgcacggtcgcgatggaggcctgcgccggggcgcatcactgggcccgagcaatccgaagcttgggccacgaggtgaagttgatcgcgccagcgtacgtcaagccgttcgtgaagcggcagaaaaatgatgcggccgatgccgaagcgatcgccgaggcggcgtcgcggccaacgatgcggttcgtggagccgaagtcggaggcccagcaggcggcagcgatggcgtaccgaacccgtgatctcctggtgcgccagcgcacgcaaacgatcaacgcgctacgcgcccatctcgccgagttcgacctcgtcgtgcccacgggcatcacgcacgtcggccgactggcggcgttcgtcgaaggtgacgaaagtggcttgccggaagcggcgacagccttggggcgaatgctggtggatcagatcgagatgctggggagccagatagaggcgctcgacaaggagttgcgcgtgcgagcgagcgccgacgataccgcgcggcggctgatgacgatcccgggggtggggccaatcaccgccgcggcgctcaccacgttcgccccgccggcgcagaccttcaccaaggggcgcgacttcgccgcctgggtcggccttacgccgcgtcagcattcaagcggcggcaaggggcggctggggaagacgtcgaagatggggcaacgcaacattcgccgtctcctgatcataggtgccgtcgccgtcgtgcgatgggcggctcgaaagggagcgcccgagggatcttggctggcgaggatgatcgaccgcaagccgcgcatgctggttgcagtcgcgcttgccaatcgcatggcgcgtgtcgcctgggcgctgatgcgaaacggcggagagtaccgggatccggcgctggcggcgcaataggccgagccgccgggttgacgtcgaggatgtgagcggggcgaaagaaacgtaagggcaaacggtcacgagaccggatcgggcgaaccagcattccggatgcagcgccattgagcgcgggtaagcgaaatggtcccgatctcgcctatctccatacgggcccgcggcgatgaaggccgcaccttcgaggccggacacacgaccgcacctggccacatgtccttcgatcccaacaaaacgcttgcatccgagggggcgtccacaca

SEQ ID NO: 9365 - DNA, 1724 bp, unidentified
  source 1..1724: mol_type = unassigned DNA; note = element_ea5da4b
  misc_feature 1..2: note = core
  misc_feature 3..358: note = LE
  misc_feature 359..1585: note = CDS
  misc_feature 1586..1724: note = RE
  misc_feature 52..331: note = bridgeRNA
ctcgtataatatcttttagatacattaaatgtaccttgataacttaataaatctatgttcaataggcttagtaaagcccatggtataattgatccttagtgtcaatcaggtaatagttctgatccctcctgttgaaccaataatggttacttcattgatagtctgttcccctgacacggatgttagcttcaaaccagctggctgtttgcctaagttcatggcctgcctcttagcagtgggggtcgcatcagtccatcttaggctggattcttatatgcgagggtgtcgatgctccgtgatcatgggttttaccaagccgattgaacactcaaatccaacatagaaagaaggtgataacatgaacccactttacgtcggtattgatgtgagtagcaaatccaatgtcgtatacctgatgcttcctgatggcagtaagcatagcaacttttctgttgctaattctcacgatggatccactcaactggtaaaacgtatcttgtcagcgattaaatcgctttcccttgacactgtaatcattggtctcgaagccacttctgtttatggtgacaacctcgtgtatttcttaagggaagatgccactctggtaccctatgacaagaagattcatgtcctcaatcctaagcaggttaaaaacttcaaagaagcgtataacgacctgcccaagaatgattatgtggactcctatgtcattgctgactgcctgcgtttcggtagaatcaacaaagaggtctatcaaagcgattaccgttataaagctcttcagaacctcacaagggcgcgttttttcgcagttcagaatctcgttaaagaaaaacagcgattcatcaatgtcctattcaagaagtattctacgatgacgcaggagaaggtatttggcgataccttcagtactactgccttagctgtctacgaagagtttgaatccgcagaagcgttggcctcgatggacttacaagagcttacagatttcattatggaaaagggaaagaaccgcttccctaatccggatgctgtagccaaagccatccagaaagctgccaggagttcctaccgtttacccaagacggtgaatgactccgttaatcaggtgctttctatatccataacctcgataaaggcattggatgctcaaatcaaggagtttgacaaagctataaaagcccagatggaactcctcccaaatgtattgacatccatccccggtattggtccggtatactccgcaggcattattgcggagataggagatatcaatcgttttccgtctcaagctcagcttggcaagtatgcaggcctagcttggactcagaatcaatccggtgactttgaagctgaaaacacaaaactcatacaatccggaaaccgattcctaaagtattacctgtgtgaaggtgccttgtctctcgtgaaatgcgacacagagtaccgcaacttctatcactccaagtataaagaagtgaacaggcaccaacacaaacgtgcactcgcattaactgcccgtaaatttgtgcggttagtctttcgactgctgaaagacaatcgcctataccgagcagtggaatagttgtctattcctgctgatgaatgccctgcttcaaaaaagcagatagcacagggcttgttaaggttacccttttttcagcaaatgatatgaaaaagtctcaaaaaacttttcaattaacacttgacatatcaccgctgga

SEQ ID NO: 9366 - DNA, 1575 bp, unidentified
  source 1..1575: mol_type = unassigned DNA; note = element_ea649d0
  misc_feature 1..2: note = core
  misc_feature 3..260: note = LE
  misc_feature 261..1457: note = CDS
  misc_feature 1458..1575: note = RE
  misc_feature 14..280: note = bridgeRNA
ttggtactgtataagtgtaagtgttaaaccagatatgtctggttagcatttgcacttattttatttataattagggagtaattggtctgacgtcggtatttttggattaataacatccgtcataaaaactgtcagccatcccttattataaatattcgattaagcaggttgaaaccctagaggctttcgtgtaactaaccaaaatgaattgtaataagtgcagatggagacaattacaaaaataaagttggaggttacttatgataagtgtaggaattgatgtatcaaaagaaaaaagtacagtatgtatattaaaaccatacggcgagatcgttagatctccatatgagattacgcacacagaaagtcaaattgcagaattagtatctacgataaaatgccttgatgatgaagtaagagttgtaatggaagccacagggaattatcacctaccagtgcttagttttcttaaagagcatggaatttttgtggctgttattaatccattgataatgaaaaaatatgcaagcataattcttagaaaggggaaaacggataagctggattctataaagattgctaattatggtttggataactggtttcacttaattaaccatgaatctagtgaagaaatttatgtgcaactacgtcttctgggaagacagtacggtcactacattaaactccgaatagaaagtaaactatctttaactacaatgcttgactacacaatgccgggaattaaaactatgctgaaaagccgttcagataaaccagaaaaagataagctaaatgattttattgaagaatactggcattatgataatattacaaaaaaaagtgagaaccagtttattagcaattataaaaattgggcaaaaaagaagggatatcaacaaagcgaagcgaaagccataaagatatatgacttagctcagcaaggaatccctactttatcttccaatgctccatcaaccaaaatgttagtattggaagccgttcgagttctccgagaaatagataaaactcttgcattgattttatcacaaatgcaagaattagcaaagtctttaaaggagtatacagttgttcgtgaaatggcaggagtaggtgatatcattgcaccaagactaatggctgagataggagatattagaagattccatagcggaaaagcattgatagcatatgcaggtattgatgcaccaccatatcaatcaggacagtttaccggaacgcgaaggcggatatcaaagcgaggttctgctaccctaagaaaaactggatttgaaataatgaaatgtttaaaaagcaataaaccagagagtgatactgtatatttgtttgttttaaaaaaggaagctgaaggaaaagcttcaaaagtagctaaaattgctggattaaataagtttttaagaatatattatgcaagagtgaaagaagtatataattaataaacaatttaataaataaaggcttggaccagaaaaacagctggtctaattagcatgcaaaaaaatagaaaaaataatttaaaaacctgcttcaaaagtattgactttcattagcagg

SEQ ID NO: 9367 - DNA, 1111 bp, unidentified
  source 1..1111: mol_type = unassigned DNA; note = element_ea6d8e5
  misc_feature 1..2: note = core
  misc_feature 3..163: note = LE
  misc_feature 164..1105: note = CDS
  misc_feature 1106..1111: note = RE
  misc_feature 1..165: note = bridgeRNA
ccctgtgtcttggaagtctgtcatgatgagggtgggcgggaagccgttgggtccttggcgcttgacgccgtgagccggcgcggtctcccgcccgttccatctattaacctgaacagttgcacgaggctgcagcaacagacctcgcatcacagggacaggcgccgtgatcataccgcttcgttacgtcggaatcgacgtctccaaacaatatctcgatatcttcgatgaagtcctgggcgtgccggagcgcatcgccaacgcgacacaggccatcacacagctggtggcgcgttggcgatgcgagacgctggtcgtcttcgaggctacgggcgtctatgacctcgaactgcgcgaggcactgcgtcaggccggcatccgcttcgcccggatcaacccggcccgggcccgcgactttgcacgcgccagcggtcggcttgccaagaccgatccgatcgatgcacggatgctggcagcctttgcgcgggccatgcagccggtcagcgagcaactcgccgatccggcccgcaacaccttggccaaactggcaaaacggcgagatcaattggtcctgatgcgggcccaggagaagacccgacgcagcgaagccgaggatcacgccatggcgggacgcatcagccgccttatcgaggttctcgatagcgagatcgccgagatcgaggccgacatcagcgcactgatcaaagcagagccggagatctcggatgatgcacagttgatgcgctcactgcccggcgtgggccccgtggcctgcatgcagctcatcgcgcagatgccggaactcggcaaggtcggaccgaagcaggtggcggcgctcgccggcctggctcccttcaacgtcgacagcggcgccttccgtggcaaacgcaagatcgcaggcggtcgaaagcgcgttcgtgacgccctctatatggcggcacttaacgcggtgcgcagagccagcccattcaagaccttctactcacgactgagacaggccggcaagccggccaagctcgccctcattgccgtcgccaggaagctgctgactgtcctcaacgccatgatgcgcgataggaaatcgtacctgcaaaccaacccaacataacagttg

SEQ ID NO: 9368 - DNA, 1219 bp, unidentified
  source 1..1219: mol_type = unassigned DNA; note = element_ea7fd1d
  misc_feature 1..3: note = core
  misc_feature 4..222: note = LE
  misc_feature 223..1185: note = CDS
  misc_feature 1186..1219: note = RE
  misc_feature 39..197: note = bridgeRNA
gttgtatatttaaaatattatttgtatctttgcacccgatttaacatctaagtatggattaaggccgagtttaggatggtgataaagaccgtattaaacgtttagtccccatacttatacatccaaaaactggatagttcattgggcttttgaccccgcattcgcaacgatagtgttcagatgtattgatgtttaatcgcgcacaaattattgttaatagttatgacctacattggtattgacgtaagcaaggattcgttcgtagcagcttatcctaagaagagtggttacaccactaagacattccttaacaccactagtggtgtgcgccagtttatctcctcacttccagaggactgccactgcgtaatggaagctaccggcaactatagtatgcttcttctttatctgctccagcaggctaacatcatcgttagcatggagaacccgcagaagattaagcattttgctcgtgctatgctatccactactaagacagacgagattgatgctaaactgattgctctgtatggtgagaagatggagcctgcgccctataaaattccgtcagagagtatcattctgcttaagcagaaacgcactgtccttcggcaacttaagaagcaactaatagccatgactaacatgcaacacgctatgtctgttctgccgaagcaagatcctacagctaaagtcgctatcgagcaaaccattaagttcttgcgcaagcagatctctaaattagaggacgaaataacacacttgtccaataaagagtttaaacgccagatggagttactcacgtccatcaaaggtattggcgaaaacatcgcttctgcgctcatactggctaccggtggctttacctactttagtagtgctaaacagatctcgcggttcctgggactttgtcccacttaccagcaatcaggtacgtcagttaatgtcaaaggtcacattaatcgcaatggagatacacatttgcgaagccttatgtatgtcgtcgcattttcatctattagaagcaatactgcctgtaaagaaacttacgagagattgcgatcaaggggtaaatccggtagagttgcaatcattgctatcgctaacaaacttattagacaagctttcgccgttgttaccaacaatcgcccctatatagatggatatgtatcatcattagcctaaaaaatcattttttgtcgcatttttaatatagttc

SEQ ID NO: 9369 - DNA, 1417 bp, unidentified
  source 1..1417: mol_type = unassigned DNA; note = element_ea835ff
  misc_feature 1..2: note = core
  misc_feature 3..138: note = LE
  misc_feature 139..1161: note = CDS
  misc_feature 1162..1417: note = RE
  misc_feature 1177..1378: note = bridgeRNA
acatggggtaatcgcgggatcgagcgccctgggccggattgagtcggcctggattggaagtggcgattgttccccggcagtatggagttgcgggctcacgactggacgccgggcccatgccacaagcggagaacaaccatgagtgagtatatcggtctcgacgtatccctgaaagagacggctatctgcgtgcgcagggacggcaagcgagtttggcgcggcaagtgcgcgtccgatcccgcgattgttgccaaagtgctacgtaagaatgcaccagaagccgagcgggtcgtgttcgagacgggtccgctgtcgatctggttctatcatgccctgacggcggaaggggtcccggcgatttgcatcgatgcccgccacgccaaggccgccctcgacatggcgcccaacaagaccgacgccaatgacgccgaaggcttggcacatctggcggaggtgggcttcttccgcgaggtgcgtgtgaagggatatgatagcatgctggtgcgaacgcttgtcgccgcacgcaacaagctggtgcaaatgtcgaccgagctctctaaccagatccggggcctcatgaagacgttcggcctgatcgtgcccagcgcgagaggtggatcattcgaggcccaggttcagcgtcttctgtccggcgacgaaggattgacccagattatccttcccctgctcgaagcctggcaagcggttcggacgcgggctgcaaaactggggcgccaccttcttgctggtgcccggcagagccaggcttgccggcagctcatggccattcccggtataggagcgatcaccgcaacctcgtttgttactgcagtggaggatcctgacaacttcaagtcttcacgctcagtcgcagcctggttcggactaacgacgcgtcgctatcaatcgggcgaagtcgactatgacggacacatctcccggcgaggcgacgctcatatgcgggggcttttgtacgaggcggcgaccgttcttctgacgcgcagccgcgttgatagcgatctgcgcacatggggactgacgctgtgggaacggctcggcttcaagcgtgccgccgtggccgtcgcgcgcaagctggctgtcgttatgcacgccatgctgaagtccggcgaaccctatcatgcgaaggccgccgtggcctgacctcaaacatccgagcttgccgcgcctagaagcgcgtcgaggtgtccctgccgggacgtgggcgaaccattccgctgaggctgttgcaccctctagccaccataaggctggccgagtgcgtctcacacattggaaggttcatcctgcgaagccccatcatgcggcggcttatgccgaccgcgaagacgaccgtgctcccggcaaacgacagatcggcctgctaaaaaggacttgcattatgcggagcgattagacg

SEQ ID NO: 9370 - DNA, 1364 bp, unidentified
  source 1..1364: mol_type = unassigned DNA; note = element_ea861a5
  misc_feature 1: note = core
  misc_feature 2..70: note = LE
  misc_feature 71..1105: note = CDS
  misc_feature 1106..1364: note = RE
  misc_feature 1079..1348: note = bridgeRNA
cgatggagtggatggctcccgctcaccggctgaggcagactgcctcggctgaagagcgaggagacggacgatgagtgagattgtcacgattgggctggatatcgcgaagtcggtgttccaggtccatggtgtagacgctgcgggtcaggtggttgtgacccggcaattgaagcgcggacagatgttgaagtttttcgcggcattgcctccggttctgatcgggatcgaagcctgcggaacggcgcatcactggggtcggcagctccagaacctgggccacgacgtaaaactcatcccgccgatctacgtgaaaccttacgtcaagcggcagaagaacgatgccgccgatgccgaagcgatttgcgaggcggtgacgcggccgacaatgcggttcgtcgaaatcaagtcagttgaccagcaggctggcggcgtgctgcacaaaacgcgggcactgctgatcaagcagcggacgatgatgttcaatgccgtgcgcagccatctggccgaattcggtcttgtgacgggtaccggcgtggcgcaggtggtgcgcatggtcgatcggcttgcgaaaggggacgaactcgatcttccggaactggcgcgcgagacactcggcgtcttagcgcgccacattcaggaactgcaggacaagctcaccgggatcgataagcagttgacccgctggcattatcgcaacgacgtcagcaacatccttgaaaccatccccggcgttggtgtgatcaccgcctcggcgctcgcgtcgatggtgaccaacgcgcagagcttcaggtcggcccgccatttcgccgcctggcttggactcgtgccccggcaaaactcgtcaggtggcaagacccgcctgggcaagattaccaagggcggcaatcgctacctgcgacaattgctggtcgtcggtgcgacttcagtgctgcggcatgtccgggcgggcagcgtcaaaggctttgaatgggccaaagccttgcttgatcgccgtccgcccaaggtcgtggccgttgctctggccaacaagatggcgcgtattgcatgggtggtgatgacgcgcggcgtcgagtatgaaagaaaggaattggcgatcgcagcctgattggcaggcgatggcaaaacaaggttgaggtgtgaagaccgactgaaggcaagccattcgatccaccgagcttcggcaaacctgcttagcgtacaggacttcgagtccgcgtaaacgatgaggaggccagggctggcggaatccttcaaggccagcagccgtataaaggctgcacataaaggccggacacgcgactgcactcgatatggcatgtcagaacgtcagaaaatcgcaccgcaacgcgggagccatccacacg

SEQ ID NO: 9371 - DNA, 1437 bp, unidentified
  source 1..1437: mol_type = unassigned DNA; note = element_ea9373f
  misc_feature 1..2: note = core
  misc_feature 3..70: note = LE
  misc_feature 71..1123: note = CDS
  misc_feature 1124..1437: note = RE
  misc_feature 1216..1431: note = bridgeRNA
taatgggatggtccgccgccttttacctcagatgcgctgaggtgtaataggtgatcggaggaggtatcccatggaactgctgacgcttggcattgatctcggcaaaacgagttttcacctggtgggacttggccttcggggcaacatagtcgtacggaagcgattgtcgcgtgcccaactcctgcgtttcacctcgaacctgcgcgtcgaactgatcggcatggaggcctgcggaggagctcatttccttgggcgcgctcttcaacaacagggtcacaaggtgcggctgatgccggcgcagtatgtgaagccattcgtcaagacgaacaagaacgacttcatcgatgcggcggctatcgccgaagctgtcgccagacccacgatgcgtttcgtccctatcaagacagatgatcagttggatattcagtcgctgcaccgaatacgtgagcgttgggttatgcggcgtacggcggtcgttaatcagatccgaggattgctactggagcgcggcatcactcttcgtaaagggcgacagcacgtggatgcagcgctgccggagatcctggcggatgcctcgaccacgctttccggatgcttccgcacgcttcttgcgcagctaaagctggagttggatcagttggcatcacgcattgccgaggccgattgcgcactggagcagacatctcgggagaacgaggcttgccagcgcctgatcgcgattcctggcatcggtccggtgacggcaactgcactgattgcggccatcggtaatggagcagccttcagcaaggggagggagttctcagcttgggtagggctggtcccccgagaagattcaacgggcggcaagcagcgattgctcggaatcagtaaacgcagcaattcctacttgcgacggctattcgtacagggtgcacgcgctgtcatgatgcatagaaccaaacaagcttccggcctcgccctgtggctcgaagatcttgctgtgcataaacaccacaacgtcgccatcgttgcgctagcgaataagctcgctcgaatcgccttggcagtactcgcgagaggcgaaatctatcatccacctgtattggcaatcgctatttcggccgaacatgcctgcagatgacgcctggctaacgccaggcttggaaatcgctcacgcgattcccacatctacagccccgcggctacgactactgagacgttgatgattttgcgccaggtctgctggcgaacaatgagatggcacaacggtcaaacccggcgttctccaaatctgatgtgggtaaaagccttccaaggctgctcaattaaacagaaagagagcgcggcgcattccatcctggccagggatcatcgatcccataaaatgtcgtatacatatgcgcagaccacctgtcaccttcatttttcgcttgcgacacggcggcggaccataca

SEQ ID NO: 9372 - DNA, 1355 bp, unidentified
  source 1..1355: mol_type = unassigned DNA; note = element_eabc465
  misc_feature 1..2: note = core
  misc_feature 3..80: note = LE
  misc_feature 81..965: note = CDS
  misc_feature 966..1355: note = RE
  misc_feature 1150..1350: note = bridgeRNA
tgatgtgatggacgccccctttttcaatggaaaatagtgccatcttttatccgatgcactgaatttcgggagaacatctcatgagtacgatcaaagtggtgggtattgacctcgctaaaaatgtctttcaagtttgtgtctggatggaagacggttctgttgcttcgaaccgaaaaatttcacgacagaaatttcttgataccatacgggcttttccacctgaaaccctcatcgctatggaagcctgtgccacttctcattattggggacggacgttgcagtctatgggctatcatgtccgcattgttcccacccagcatgtaaaagctttcagccatcatcaaaaaaacgatgccaatgatgcgttggctatctgtgaaacggcctgccggcccggtctccattttgttcccatcaaaaccgtagaacagcaagatatcaaatcactgcgccgtgcccgtcagctcatggtggaacagcgtactgctcttgctaatcaaatcagggcctttctcgctgagcagggaataattgtgcctgtggggattcagaaactccaacagcacctccctgatattctggaagaaggtgataatgctctgtcttgtgtgctgtgtcgtttattgcatacgctgtgggaagatctgcagaatttgaacgtcagcattcatgaaatggataacgaaattacggcactttcccgtcagcaagcagggtatgggcacttgctgactattcccggtgttggtcccctgattgcggcggctttcgtgagtgacgtcaacgcatcccaatttactaatggccggcagttgtcagcctggtgtggtttggttcccccggcaacacagttcgggcgggaaaagccgtctttcttctctgagcaaacatggcaaccgtcatctccgaacgttaattattcatggtgcccgagcgatgatgcagggcgtgcaaaaacgggatgatcctttaggcgagtggcttagaacacggattacccgatgtggccccatgaaagccatagttgctttagctaacaagctgacccgaattatctggcgtattctgacagatgaggttgattatgatatgaaaaaagcttttgctatccattaattgaattaagtgaattgaaacagacgctttaaccgagtttgcaaacactgatgaaaaaacggctatcggccctgcaataacctgagtaaaacctaggtagtcacataccgatgacggctgagaaggaaacagggtgcggatgacatcatggcgcgggcaaataagccctttatgacgccggatatatggtagcaaaccgtatcgactcaatgcttgcacaaccggggggcgtccatata

SEQ ID NO: 9373 - DNA, 1528 bp, unidentified
  source 1..1528: mol_type = unassigned DNA; note = element_eac1571
  misc_feature 1..2: note = core
  misc_feature 3..254: note = LE
  misc_feature 255..1481: note = CDS
  misc_feature 1482..1528: note = RE
  misc_feature 51..226: note = bridgeRNA
cttatattagaaccgttgcagtttgtcatagaggagatcatgtttatgtgacactggtttcaacagcttgctggaatgaggacccatcctgaccgattccctcggaggatctggggaagactgtcccgtccagcgagagaacggatttgaggttcaatagaaagttgtcccttgggtgaggaccgatataaggcgaactttccgttcaccgctattggaattggcagtacacaatgaaggaggagaaagagaaagtgaagcgatactatgtgggagtggattggtccgatgagtttcatcaggtgtgggtcagcgatcctgaaggcaagaaagtaatggagaagaaggtcttggagaatgtcgaggggctggccgagtttggccgttggcttgatgagagccgggctaaggggatcgagctgtgggcggccatcgagaaaccggcgggacggattgtagattttcttttggatcatggggtggtggtctatccggtcaatcccaaggcgttggatcgggtcagggatcgctttcgtatgagccagtctaagagtgactcttttgatgcctacgtgttggcggagtttttgcggaccgatcacgctcatttgcgagcgctggagcccagctcggagcaggcccaggagcttaagctgctcacgcgggatcaccaccgcctggggcgccacaagacgcgaatactcaatctgctcggtcgcacgctcaaagagtattatccacggcccttggaggtctttggcgatcttgaatccaagatagcgttggattttctcaccaagtatccgaccccccaggctctgtcgaatcttaaccgtagacaatggaatcgctttgccaagcgcgagcaccatctcgctgaggcgcgctgtaaggagctgtgggacaatctgcataagccgcaactgaaggttcccgagcatgtggtcagggccaaggcgcaactgctcacggtgctcgtggtccagcttaagaccctgattcaagctgtagagagctacagcgagagggttaaaagttttttcgcctctatgccggcagctgagctggtccagtcgctgccgggaggtaagagcggcacgattctgcccatgctttgggctgaactgggcgatgccaagagtcgatgggaatcgtttaagcaccttcaggccgaggcgggcgcggtgccggtgaccagatccagtggcaagagctcttacgttcagtttcgtttttcctgtaacaaacacatgcgctacgctgcctactggtttgcgtttgtctcgctcaatcgatgtgagtgggccaacaaatactaccgcgaccaacgcgctagaaggaaaagccatcaccaagcgcttcgcgctctgggagcgaagtggctcaagattatctttgtgatgtggagagatcataaaccgtacgatgagaattaccacttggcaaacatcacacggcagcagatgcgccaagcggcatgaaataaaataaataaaataaaaaagacttgacaagtctcatagaaagt

SEQ ID NO: 9374 - DNA, 1193 bp, unidentified
  source 1..1193: mol_type = unassigned DNA; note = element_eac1723
  misc_feature 1..2: note = core
  misc_feature 3..182: note = LE
  misc_feature 183..1163: note = CDS
  misc_feature 1164..1193: note = RE
  misc_feature 12..191: note = bridgeRNA
cttgtatctctcctggagctgaggttagctacctctgttccgatgagtttggtgatgctgagtccgaccttagtacctgatgctgttgtgtagatcagcgcccagattcttttgttctaatacattgaatggtatccaagcacctgttttcagtgatgctgtatgtacaagggtagtgatagatgcattatatcggtattgatgtcagtaaagccaaactcgattgttgttggttgcgtgacgcggaaaaaaacaaattcaaaaccaaagtatttaagaataatgtggcagacagcaaggccttagacatctggcttacaagtctgaccaaagctgctcccagtgagattaccgtgttgatggaagcaaccggtatctaccatgaaaatcttgctcattatctttttgagcgcggttatcagatctgtgttgttaacccggcccgaaccaaagagtttgcatccagtctgggcaacactcacaagacggatgccaaagacagccagatattagctctctattgccacagaatgcatcctgaacactggcagccggagcgcccggaaattcgtgaattgaaagcacttctggcacgcttagaagcgttagaaacagatttaaatcgcgaggctaatcgcttggagaaagctgagtttaactgctcgtcagagcgtgtcattgggtcattaaacctgatgatcgaacagcttaaagcggagaaaaagcgacttgaaaaagatatcgacaaccatattggtcgctatccacagttgagaaaagaccgccagttgatggaaagcattccgggtgtagggccgatagtctcccgtttaatgcttagcgtgctgcacagccgttcattcagaacagcggggcaagttgctgcatttttagggttagtaccccgcatacagcagtctggacaatggaaaggccgtagccgtctaagtaaaaaagggcccgctaatgtcagagcaaagctgtatatggcggcagttgtttgcttgagatataacccggatatccaggcacaatgtcggcgcctaatggaaaacggtaaaagtaaaatgcaggctttaggagctggaatgcgcaagctggtacagatttgttttggtgtggtgaaacatcaaagcgaataccacccgcaagtggttacataaccctttacggatggttcggagagatggtat

SEQ ID NO: 9375 - DNA, 1392 bp, unidentified
  source 1..1392: mol_type = unassigned DNA; note = element_eac3260
  misc_feature 1..2: note = core
  misc_feature 3..103: note = LE
  misc_feature 104..1111: note = CDS
  misc_feature 1112..1392: note = RE
  misc_feature 1109..1379: note = bridgeRNA
tgttggtgtggacggcccccgacggcatcgagtgtgccagaatgaggtcgttgctgatctcagacaaaggggaccatccgtggaacagattagccgaattgggatggacacgtcgaagcacattttccagcttcatggagtaaatgccgccgaaaaaccggttctgcggaggaagctgcgacgcaaagagatggtatcgttcttcgaaaagctgccgccggttgtgattgcgatcgaagcgtgcggcggatcacaccattgggcgcgcctcctgcagtcgtttgggcatacggtgaagctgatcgcgccgcagctggtcaaaccgtacatcaagcgcggcaagaatgacgcggcggatgctgaagcactttgcgaggcgatgagccggccgacgatgcgctttgtgccggtgaaaacggcggagcagcaagcggccctgatgttggtcggcgcgcgtgaccgcttgatccgcaatcgcacgcagttgagcaacgccattcgcggctatgcgggcgagtttggctatactgcggccaaggggaaggctcacctcggtccgctgctcgagcgcatccaggccgatcagagcctgccgagcttggctcgggagctgttcgcgacccaggcccaggaatatgcgcaactgcaggcgcaaatcgatgaggtcgatgccaagcttttggcctggcatcgcgccgacgaatgcagccgacggctcgccaagatccccggcgtcggcccgatcggtgcggtattgctgacaatgaagaccccggagcctgggctattccgatccggacgccagttcgcggcctggatcggcttgacaccaaaggatcactcgaccgcgggcaaggtcaggctgggcgttatcacgcgagccggcgacgaaggattacgcagcgtgctggtggtcggggccaccgccgtgatccagcatgttcgacgcggcggaagggcgtcgccttggcttgccgcgcttctcaagcgcaagtcgccgaagttggccgccgtcgcactggccaacaagatggcgcgcattgcttggaagctgatggttacaggagaaaattacgccgtgaaacctgccaaaacggcaggcacagcctagaggtcagccagacacggggagcaacgcaactgcaaccgtgctgagccgatgccagaacttgcaagatgagcagatggtgtgatcaatcgatcctcgatgagagaaataccgcattcgccagtggccctctataaggccgctaatctgtttggaactctcatcgcggaaaccatcttggccagcgttcatgtgcgagcgcgcaaacaggccggacatatggacgcaagcgatctgatcaacgcagctgcaaaacaccttgcaaggaggaggccgtccacata

SEQ ID NO: 9376 - DNA, 1421 bp, unidentified
  source 1..1421: mol_type = unassigned DNA; note = element_eac6323
  misc_feature 1: note = core
  misc_feature 2..226: note = LE
  misc_feature 227..1408: note = CDS
  misc_feature 1409..1421: note = RE
  misc_feature 14..237: note = bridgeRNA
ctacttgtttcattgacgcaggaccggtgcccgcgcaggctcggttcaggtgtcggggacggacgctcgcattcatcggctgtccgtccttcgggtcgtgactctcacatggcatgcgccgtcctcggcaccgctgagccggagaggctgaagaagggactgtgctgccggaagtagcggtgccctccgcgctcgaccacccattggttcgaccgcaggaggcatcgtggagcagtcaccgacaacgagcgtggtcatcgggatggacccgcacaaacgcagcgtcacgattgaggtcatggccgccgacgaggcgatcctggaccggggccgcttcgacaccgacgagcgagggttcgccgctctgctcgagcgggccgggaggtggccgtcgcgggtgtgggcggtcgagggctgcaacggcatcggccggcacgtcgcgacccggcttgtcgcggtcggtgaacaggtcctcgacgtgccgccgaagctgtcggccagggtgcggacctttgccaccgggcagggccgcaagaccgacgccaccgacgcgcactccgtggcgctggtcgggacccggatggccggcctgcgaccggtcgtgcctgacgcgcagcgggagatcctgcggatcctggtcgaccgccgccgagcgatcggtgacgagcacaccgtcaaggtcaaccagctgcatgcccttctgctggagctggttccgggcggagccaagcgcgacctgtccgcggcccaggcccgcaagatccttaccggtgtccgaccgcgagatgtggtcggcaagaccaggaagcgggtagctgccgagctcgtgacggaccttgagcggctgtacctgcgcaaaaaggccgccgacaaggagctcaccgtcctgctgcgcgagtccggcaccaccctcacccagctccatgggatcggcccctcgggcgcggcccggctgatcgtcgaggtcggcgacatcactcgcttccccaacgccggccacttcgcctcctggaccggcaccgcccccattgacgcctcctccggcgacaacgtgcgccaccgcctcagccgcggagggaaccgcaagatcaaccggaccctgcacatcatggccatcgtccagctccgcaaccccaccgaaggccgggcctactacgaccgcaaggtcgccgccggcaagacccccaacgaagcgatgcgctgcctcaaacgacgcctgtccgacctcgtgtaccgagcgctgctcgacgacctcacccacggcgcggcgacgggcccgggagggcaacgaggcaacgactctgactccagcgcgaccggctcacaacctcacaccggcacttcggacaagccacttcccggacccgtcgcagtcaaggctacgacccccgtccagcaggcttcttgacacaaaagggagc

SEQ ID NO: 9377 - DNA, 1445 bp, unidentified
  source 1..1445: mol_type = unassigned DNA; note = element_eac7be3
  misc_feature 1..2: note = core
  misc_feature 3..222: note = LE
  misc_feature 223..1428: note = CDS
  misc_feature 1429..1445: note = RE
  misc_feature 1..226: note = bridgeRNA
ccgttaccttgttctcggccaccgggtggtggctcctggctgctgggaccggcatgacttactacccctgtcgttgatgatccggggggtgttgtcaccggtcccggcggtgtcggtggatcgctgatagggacatggccgacggtttcgtgggtctcttcgtaacgtggctgccgagtgccgatgccatgccggccagatcgacgatgcagggaggcactgatggagcaagcactggacttcgacgtggtcgtcggactggacgtcgggaaggcggcccatcacgcggtcgccttggaccgcggcggccgtcggctggtcgaccgggaggtcgcgaacaccgaggaggacctgcgggccgtcctggcaagggccggccagtccggccggatactggtggtggtcgaccagctcaactcgatcggcgcgctgcccgtggcggtcgcgcacgcgaccggcaccgccgtcgcatacctgccggggctgtcgatgcggcgcctcgcggacctgcatcccggcaacgcgaagaccaacgcacgcgacgcgttcgtcatcgcgaacgcagcactgaccgccccgcacgcgctgcgggccctggacatcccgtccgaggcgcaggccgacctgtcgatgctgctgggctacgacgacgacctcgccgaggcctgctccgcggcgatcagccggctgcggggcctcctcgtccacatccacccgagcctggagaagtcgttgggggacaacgtctcccacgaggccgtccttcgcctgctcatcaaggcaggcgggccagccgggctgcgggcgctcggccgggcacgcatcgaccgggagctcgccaagcacgccccccgcatccacgcacgcctcgcggacgagatctgggacggcctcgccgcccagaccgtcaccgttccgggcaccaccgccgcggccagggtcctgcccgggatcgcgagccagatcctccagctccgggaccagcgcaggcaggtcgcccaggacgtcgagagggtcctcgatgcccaccctctttccgacgtcctgacgtccatgccgggaatcggcgtcaggatcacagcacggttcctggcagagaccggcggcgacgtcgccgcattccccaccgccgcccacctcgcggcctacgccggcctcgcgcccgtcaccaggcgctcgggcacctccctccgcggggagcacgtcaaccgcggaggcaacacgcggctgaagaacgccctgttcatggccgcattcgcatcgctgcgagccgacccagaatcccgcgcctactacgaccgcaagcgagccgagggcaagcggcacaacgccgcgctcatctgcctcgcccgccgcaagaccgacgtcctctacgccatggtcagagaccaccgacacttcacccccgcgcatcccaaagccgcttgacaacaagatagggacac

SEQ ID NO: 9378 - DNA, 1408 bp, unidentified
  source 1..1408: mol_type = unassigned DNA; note = element_eacac90
  misc_feature 1..3: note = core
  misc_feature 4..89: note = LE
  misc_feature 90..1139: note = CDS
  misc_feature 1140..1408: note = RE
  misc_feature 1146..1395: note = bridgeRNA
tgatgtggtggacggcacccactccgcggcatcgaatgtgccatagggtggttgcgtcgaaacgcaaaccacattgaggggagccgtccatgggcgaggttagcacgatcggtttggatatcgccaagaacctgtttcagattcacggtgttgatgcagatgggacggtggtcattcgcaagcgtattggtcgagcgagaattcttgagttttttgccgatctgccgccttgccgcgtcggcatggaggcgtgtgcaacggcgcatcagtgggcacgcgaactcaggaagttggggcatgacacgcggctcatggcgccgacctatgtcaaagcctatgtgaagcgcggcaagaacgacgccgccgatgcagcggcgatctgcgaggccgtcacgcggccatcgatgcgatttgtgccgatcaaggacgccgagcagcagagcctgctgatgctgcaccgggcgcgcgatctcctgatccgtcagaggactcagctgatcaacgcacttcgtgcgcaccttgccgagctcgggttggtggcagccaaggggcgtgaaggattgcaccagttggttgcggttgtgacggaatgcggcaatgagcggctgccaagcaacgcgcgctttgcctgccaggcgatcgtgacgcaactgaacgccgcgcagatcgaaataagtgggctcgacaagcgcatcactcagacccatcgcgccaacgcggacagcaaacggctcgatacaattccggggtttggcgtgatcctttcgacggctgtggcggcgacgatggccgacccaaaggcgttcaggaccggacgcgacttcgcggcctggatcggattggtgccgcgtcagaactctacaggaggaaaggaacgcctcggctcgatttccaagcaaggcgatcgttatctgcgacggctgctggtgatcggtgcaacatccgtcattaattgtgctcgagcgcggccctaccagtatccctgggtgatcgagctgctgggtcgtcggccgaccaaggtggtcgcggtggcgctggccaacaagatggcgcggatcgcctgggcggtgttggccaagggcaagccctatcgggtgccaacccgctcaagcaacgccaccgttccagcggcggcctgaaccgtggcattgaattgcaaagttacatcgagcacgtagaggaaagtcgaggtgatgatggcttgatgcgaaccggttggaccggggatcgggagaacccgttattgggtcacgcgccgtcgagcgcgggattttgatagggacccgatctgcggatcacatcagggccagcggtcatgagcgccgcgcaaacaggccggacacatgacttgcacccgaccgcaagcaaaagccaaaaaatcccttgacccgtgggtgccgtccacaca

SEQ ID NO: 9379 - DNA, 1425 bp, unidentified
  source 1..1425: mol_type = unassigned DNA; note = element_ead24f4
  misc_feature 1..2: note = core
  misc_feature 3..138: note = LE
  misc_feature 139..1164: note = CDS
  misc_feature 1165..1425: note = RE
  misc_feature 1179..1421: note = bridgeRNA
agatggtatggacgcctccccccggcagcgggccgaccgcagcacctctgcatcgatagaggatcctcgctgctcggcatcggagtgccacagtgaagcgtgtgaatggcaagcatcacttgagcaggaggatccaccatgaaacagaacgtgatcggcatggacatcgccaagaaggttttccaactacataccgtcgatcggaactccggaaaaatcgagcgcatcaaactgcggcgcgatgaagtcctaccgttcttcgcccagcgccaatcctgcctggtggcgattgaggcgtgcggcagcgcccactggtgggctcgtcagcttcggcagcaggggcatgaagtgcacttgctggccccgcgctcggtgcgtcccttcgtactgcgcaacaagaccgatgcggccgacgcccaggccatctggacagcagtacagcagcccggcgcttgcctggtcgccatcaagcaagcggaccagcaagccatcctctcgttgcaccgtatccgtgcccagctgctgaagtttcgcatcatgcagagcaatggcttacgtgggctgttctacgagttcgggattgtcttgcccgagggccatgcccaactggccaaagccatgccggaagccttcgccgaggcggaaaatcaggttcctcccgtacttctggagagcctgcgcgagcagtgggcgcgggtgctcggactggaggaggaaatccgggtgatcgaactccgcctgaaacactacctgcgcgagaacctcgactgccggaaaattgcagagatccccggcatcggtttattgacggccactgccgcggttgcctcactgggcgacgcgacgacctttcgttccggccgacagttctccgcctggctgggactagttccccggcaaaccggtaccggcggtcgagtccgacaactggggctgagcaagcgcggtgacagctacctgcgcatgctgttgatgcacggggctcgctcgatcctcgccaggagccagaaatccggatggcttgagcgcttgctggccaggcggccttacaacgtggcggtcgccgcggtggccaacaagctggcccgaaccctgtgggccatgctggccaagggctctccgtaccgggccgagcgctttaccgcatgccctgcggggcattgagaaacggcaaccaacaggcttcacaaggagcgcaggcggtaagcacgtgatggcggaacaggtcagaccgtggcgaggtaaacctgataaggaaggtgagcgtgggcactgccttcagctcgattttcagatgagggcctcgtcggcggattccatcagggccagcaggtttttcggcctgcacaaacaggccggatataagactgctcctacctgaacgccagctggtctacctcttgagttccgggaggcgtccatata

SEQ ID NO: 9380 - DNA, 1167 bp, unidentified
  source 1..1167: mol_type = unassigned DNA; note = element_ead92f0
  misc_feature 1..2: note = core
  misc_feature 3..203: note = LE
  misc_feature 204..1139: note = CDS
  misc_feature 1140..1167: note = RE
  misc_feature 39..213: note = bridgeRNA
cttgtatgtttaaagtcatattagttacccgcctccgggcgggtacactgtcaaagcgttgtacctgacgtttcagcccgtctgccctctgggacatcaagcccgcgggagagcttatggcggaacgtcagtttttctcttaacccgaacagctgccaggaccgctctgcgagtccgtatcttacaaggccgggagatgtgaaatgactgaatactctgtaatcggcatcgacattgctaaagagacatttgacgtttatatcgatacttcctgtacttatctgcatctcgataattcacccgacggtcatcagcaactgctgagcgtattgtctgcccttcgcgtgaaacttgtggttatggaagcaaccagccgctatcactcgctgctggccgccatgctgacgctgcagggctttgccgttgctgtagtcaatccgcgtctggtaaaaaatttcgcccgcgcaacgggaacgctgcataaaaccgacccaaacgacgcgcgcctcatctgcgaatttggccggcgcatggagccggaagtacgcgccacgccggatgagcagacacaacggctggcaggcatggtgacccgtcgcaggcagttggttgagaatcgtgcaatggaaataaaccggcataaaagctgtgatgacgttgccatatcggcgagcctcaagcgtcatattgactggctgaaagcggagattaaggatgcggatgacgatatcgacagacagataagaacgatgccgctgtggaaagagaaggttaagcttctggaagaggtaaagggaataggaccgacgacgatggctgtgttgctgtcaatgttgccggaactgggggcgctgagccgtcataaaatcagtgcgctggtcggcgtgtgcccttacgcgcacgacagcggaaaaatgaaaggtaagcgctgcatctggggtggccgaagtgcggtgcggtcggtgctgtatatggccacgctgacggcggtgcgttacaacccgacaatcaaagctttttttgagcgcctgacagggcggggaaaagtgttcaaagtcgcgataacggcgtgtgtgagaaagctgataaccattttgaacgcgatgctgagggacaataaagaatggaggccggcgtagcggcatccattgactttaaacacagctg

SEQ ID NO: 9381 - DNA, 1172 bp, unidentified
  source 1..1172: mol_type = unassigned DNA; note = element_eae1c2a
  misc_feature 1..2: note = core
  misc_feature 3..180: note = LE
  misc_feature 181..1149: note = CDS
  misc_feature 1150..1172: note = RE
  misc_feature 34..201: note = bridgeRNA
cttgtatcttgaaaattggttaaaatagcacccgtgtgatttggcaaggctcatgcagcacgaactccccccagggactaacaagcccgtcggtaagctattggcgcatgagctgagccactcgtctgaaacccgaacagttgtcagaacttcaattcgaatatgcaaggatgggtaataatgagtcagccaaatcagatttgtgtcggcattgatgtagcaaaaggaactctcgatatttgcgcaggagccggcaacacgtccttcactgtagtaaatggcaccgatggctttgagaagattattaatgcccttaaagatgcctccgtctctttgattttgatggaggctaccgggggacttgaagccggagttgcttatcacctccagtctgagggctatgaaatagcggtagttaatcccagacaggccagagatttttgccgggcaatgggatacctggcaaagaccgacagcattgatgccaaagctctcgcacagatggctgatgtcattaacaaccatccggatcgtgaacgctttattctttccctgcccgataatgaacgtcaggtccttactgccctggtggtccgtcgtcgccagctggtaactatgctggtctctgagcgaaaccgcctctacacatcccaccctgcggtaatgaaaagcgttgagtgcgttatttgtgccctgaacggagaacttgaactcattgatattgagatgagggagcacgtaaagaaccattttgttgagctgtcgcaacttctcagcaccatcaaaggcgtcggtgatacaacaatcgcgagcctgcttgctgaggttcctgagcttgggacgctttccagaagagcaatatccgctcttgtaggcgtggccccaattaacagggactcgggaaaaatgcgagggaaacggacgattttcggcggtagagcaagcgttcgtacgactctgtacatggcaacactgtctgctgttcgctacaaccaggcgattaagaccttttacacgcgactcgttcaggctggtaagcccaaaaaagtagctcttgttgcctcgatgagaaaactgcttagcatcatcaacgccatgatcaaaaaaggagaaggatgggacaattctttccataatttggccttttaatttggtggtgctcaagacagttg

SEQ ID NO: 9382 - DNA, 1394 bp, unidentified
  source 1..1394: mol_type = unassigned DNA; note = element_eae503f
  misc_feature 1..2: note = core
  misc_feature 3..90: note = LE
  misc_feature 91..1119: note = CDS
  misc_feature 1120..1394: note = RE
  misc_feature 1090..1381: note = bridgeRNA
agatggtatggttgccgcccttccccgagaggcatcaaagtgccaacatgagtggtgttatagaccacagaaatagagaaggacggcgagatgtacgatacaatgatcggggtagatttggcaaagcgagtttttcatctgcacgtcgcgtcgatgacagggcatgtgagagatcgcaagaagctgacgccattgcagtttcggcgctacatggcggacgcgccgaattgcgttgtggtctttgaagcctgtgggagcgcgcattactgggcgcggcaaatgatggagctgggccacgaggcgcggatcatcccggcgcagtacgtaaagccgtttgtaaaacgccataaaaatgaccggaatgacgcagaggcgatcgtggtggcggcgcagcgtcccgagatgcacttcacgacggtgaagagtgaacagcagcaggcacgcgcggtcgtatttcgggcgcgcgaacgacttgtaaatcagcgcactgagctggtgaacgctttgcgctcaacgctctatgaatacgggcacacattccctgtgggatttggccatgtgaaacggatcgccgaactgttggaggcgcctgagtgcgaccttcctgctcttgtcgtaacggagtgccaggacctgctggcgcaaattgctgagaagacagaacgcatcacagcgaaggacaagttgatcaggcaactcgcgaaagaaagcgccgtggcgcggcgtctgcaaacgatgccaggggtcggcccgatgactgcgctggcgatggaggcgtttgcgccggatatggcgcagttctcctgcgggcgggatttcgcggcctggctggggttggtgcctttgcaaaaatcaactggtggcaagagcagattgggcaagttatccaagatgggccaggtcgatatccgacggcttctgatcatcggggcgatgtcgcggatcattggtcgggcgcgtcatacgattccagatgacagctggctcggccggaaagtggccatgaagccgaagatgctggtgggcatcacgctggcgaacaagatggctcgccagatttgggcgatgctgacgaagaatgaggattacagagatccggcgctggtgggcgcggcatgagtgtcatgtcttaacctgcaagcgtcggtgccaaggggagtgtgagagtgcaatgacctgaatgggcgcaacgatcgaatagatctggattgggaaaaccatagttgaactttgcgccaaaagcgcttccccaagatttggaccctatccgctgatcaccataccggccgcggcttctggaaacgccgctcagaataggcctgaaagaagcacgcaatcgatcacacgctcagaaacggtcaaaagactcttgcatcacgggcggcaaccaaaga

SEQ ID NO: 9383 - DNA, 1375 bp, unidentified
  source 1..1375: mol_type = unassigned DNA; note = element_eaf760b
  misc_feature 1: note = core
  misc_feature 2..85: note = LE
  misc_feature 86..1117: note = CDS
  misc_feature 1118..1375: note = RE
  misc_feature 1141..1367: note = bridgeRNA
caatgggatggactcctcctcacccgactcagacgtggcgcatgattagcgacatgttcgactggtcaacgaggaggaacccgaaatggacatgattcgcgtcggaattgatctcgccaaaaacgtcttccaggttcatggaatcgatcgaagcgagaaggcggtatggcgccgcaagctgagccgttcggaatggctcgaggtcttgcagcagactgttcctctgcatgctgagatcggcatggaggcttgcggcagcgcgcaccattgggctaggcgcctgcaggcgctcggatatacggtgaaactgattgccccgcagtttgtgaagccatatgtcaaaagtaacaagaacgacgcgaacgatgccgaggcaatttgtgaagcgatgagccggccggcgatgcggtttgtcgcggttaaaacgatcgagcagcaagatgtgcaggccgttcaccgcgtccgctcaggattgatggagcagcgtaacgccaaggcgaaccagatccgcggcctgacgtccgagtacggtgtcgtggcgccaagggagattgctcagttgcgtcgtgcggttccggtttggctggaagacattaactgcggtctgagcgatcgtttccggcgtctgcttgtaggcctttgggaggatctgcgttcgctggacgaccgcattcacgagctggaccgtgaaattatggaaattgctgcatccgatccagttgccaggcgtttgcagcaactgcgtggcgttggtccgatggtggcgacggcgttgattgcaaccgtgggcaatgccaaacagtttgctaatggccggcagatggctgcgtcgctcgggctgacgccaaaacaaaacagttcagggggcaaggagcggctgctcgggataagtaagcgtggcgatgcctatgtgcgttgtctgctaattcacggtgcacgggcgatgatccagatggccagacgacgcaccgacgcactcagcgtgtgggtcatgtgtatcgccggcaagcgacatccaaacgtggccgccgtagcccttgcaaacaagactgcccgcatcgcctgggcgatgatcacgcggggaacggactatcaaccggaaccttcagcatgttgaagttgtgagtacccagcagcacctttctcaatgattgcaaaacaagccgcacgatggccaacaggtcgaaccggcgctgatcaaacccgcgaatgaccgaggcttagagcccgtacaaccgattgggagtcagcgcgcgaatagcccatcagggtccttgcctcattgaggcataactgtacgagaccggatatacgtgagcgatcgacactcaggctcaaggggcgacatgtttgcaaacgaggaggagtccatata

SEQ ID NO: 9384 - DNA, 1199 bp, unidentified
  source 1..1199: mol_type = unassigned DNA; note = element_eaf8e12
  misc_feature 1..2: note = core
  misc_feature 3..212: note = LE
  misc_feature 213..1196: note = CDS
  misc_feature 1197..1199: note = RE
  misc_feature 33..197: note = bridgeRNA
tcctttagacttgcataattatatttattgaaataaaaaagagcagaacttaagtacactaataacactcagaagggtaaacttcatagttcgatttagacttaagttctttctttcatcaacaatctctaatagaaattcgggattttaagcccattatcaaggagtcgagttatgatgaaaatgctcttttcattcagagaggtaaaattatgaaaagtatttatttaggaattgacattagtaaaaaaacattagatatttgtttagttgatcagaaatcagaagcattctttaagattgaaaataaaatcaaagcgattaaaaaactctttaagcagataactactttagatgctgagatctttattgcaatggaaaatactggtctttataattataatttatatgaagttttgaaggattattcatttaatgtttatgtgatcgatcctaagcacattaaacgaagcatcggtttagttcgtggtaagaatgataaagttgatgctaagcgcattgctacttttattgaaaggaactatcaagattttgattgctggaagcccacaagtgaggctgtacaaaatataaaaatactgatgagccaacgtagacataaggtaaaaactagacaggctattaaacaacaaaataaggagcttaaaacagttaaaaggactaaaataataagttcctcaatgaaaatcaatttaaaagaaattgagcagattaataaacatatagcggctatagaaaaattgattaaagaggagatagctaatgattctgttttggaaaaggacatagaacgtatcagaactataccaggaataggatcagttacagcttggactttagctgtgaaaactgatggttttgtgcgattgactaatccgagaaaactagcttgttttgctggcgttgttccattcgaacaacaaagtggaacaagtctaaagacaaaaccaagagtatcaaaaatggcggatatgcaacttaaatccgtgctccaaatggcagctatgagagcagtaagaatggataacgatcttaaacacttttacttgagaaaagtagaagaaggtaggaacaaaatgagtgtactcaatgctgttagaaacaaactaatacatatcgcaatggcattaataaaaaacaaatctttttatgaaaaccgtttggtattgtcatagaaa

SEQ ID NO: 9385 - DNA, 1354 bp, unidentified
  source 1..1354: mol_type = unassigned DNA; note = element_eaf9b0f
  misc_feature 1..2: note = core
  misc_feature 3..73: note = LE
  misc_feature 74..1105: note = CDS
  misc_feature 1106..1354: note = RE
  misc_feature 1107..1344: note = bridgeRNA
ttatggaatggcccgcccctatccccagcgtctgttatgatgctgtggtgcgaaaaaagaaaggaacgggcctatgagcatcatgatccttggaattgatctgggcaagaactcttgcagcgtcgttggtgtcgacgctaccggcgcaatagttacacgtcgaacgatgcgtcgccagacactgattgattacgtaacgaaactccccgcctgcatagttgctatggaagcgtgctgcggagctcatcatctgggccgcttgtttacggaacgaggtcacgaggtccggctgatgtcgccggaatatgttcgcccgtatatcaaagcccagaaaaatgatgatcgggatgctgagggtattgccgaagctgcatctcgaccgacgatgcgtttcgtcgatctgaagagccaggagcaactggacatccagacactgcatcgggtgcgttctcgccttgtggcagagcgaacaaacctcatcaatcagcttcgcgcaattctactggaacgcggggtgatctttcctgccgggcggcggaaactggaactcggcgtggacagcatgctagccgaagatgtgaagttattatcgtcgcgtgtacaacaactggttcgtgaattacgcgccgagtggcaagagctcgacacaaagatcggagcattgaatactgagcttatccagttggcacgcaatgatgcggccacgcgtagactgacgactatccccggtataggcgtactcaatgccacggctttggtcgccgctgtaggtaatgcaagcagctttgccaaagcgcgcgatctgggtgcctggctcggactggtacctcgacagtacagcaccggcggtaaaccccgactgcttgggatatcgaaacgtggcaatacctatttacgcactttgctcatccatggcgctcgagcgtcactgccatcactctcaaagagtgatacgccaacgggccgttggcttaaggcaatgatggagcgtggtgttcaccgcaacgtcatggttgtagcgctagcaaacaaattggcgcggatagcatgggccgttttgcgtaaggaaacaggctttgatcgcagttgccctgcggtagcgtaatcagaccggctaggcaatgagaacgcgtagcctatgaggtttgcaggaaggatcgtgaagatggcctgacagtcgaacggcgtttggaaagcccggtcaaaaaaatggcattaactgccgatccgtttatggggctctgaacgtgcggatgtccatcttggccatgggggtgctcatgagaccgtatacgttgacgcagactgatcagaacatcgtaaaaatcctattgcaaacggggcgggccatacg

SEQ ID NO: 9386 - DNA, 1783 bp, unidentified
  source 1..1783: mol_type = unassigned DNA; note = element_eb02028
  misc_feature 1: note = core
  misc_feature 2..309: note = LE
  misc_feature 310..1404: note = CDS
  misc_feature 1405..1783: note = RE
  misc_feature 1451..1702: note = bridgeRNA
aacattcctgtatagcctaagaaatgggctttgtcaaaaaaggagcgcctcggtatgatgggtttgtcgacgggttaatacccaacaccatcaaggaggcgctcttattatgaagtttaagcaatcagacggacaaaatcaacgtattgaacgaattactacttcacatctagttgtgggcattgatatggcaaaggaaacacaagtagctcaagctacaaattatcgaggaattgtccttacgagccaacatctttcattcaaaaatactattcagggatttgagaaattacaaaattacagcgttggatggaaactttgcaacaaaaacatcgactgaaggacatcataattggcatggagccgacgggacactactggtacagtttagctaactggcttgtccaaaaaggcctaaacgtcgttttagtgaatccagcaacgacgaaacgaaacaaggagaatcgagataattgtccttccaaaagtgacccgaaggatgcccttgttatagcagatgtagttagccgtggctattactatgaatacatccggcaggcaactcaatttcaaaggctacggaccctaatgaatgatagagaattttgggttacaaatagtgttcggatgcagaatcggatcattcgctggttggatattcgcttccctgagtatgcttctgtgtttaaagattggacgtgtccacgctccatagctacactcaaagagttcccgtctccgttggatctaaaaggtcaatctacatcagaagttattacaggttggcgaaaatatatgaaacgagctggcggctccacaggtattcagaaggcagctgaactactctctaaagcggttcaaagcgtgggggaaactgtagcgctgaatgaggctaaacaggatctacatcgcttattagaagagttcgagcgcattgagggtatattgaatcaaatagcacaagaaatcgcattgttactcggtgagatcccaattgctagccaacttcgctccgttaaaggtttgggcacaatctatattgcagcaattctggctggtgcgggtgatttgaagcagtacgttcacggccgtcagttgctacggaaggccggtttaaatttggcagagagcatgtctggaaagcgtaagggccagatcatactctccaaacgaggagattccacacttcgaaagtatttgtatctggctaccttaacattagtgggaacaaatcctatatttaagcaattacatgagaataatgtgcaagttaaacatatgagtaagcagaagtcgatatttaaattgcttggaaaactggcaagaatcttagttggtatggtgcattccgaggagtcatttacccctgaaaaaacagtcgtacagtgtactcaggctgcctaacatcttcgaactaacgtaaattgattcattcgcaggacttcaaaaaagaaagcacggaggaccgagttcgttcttcaaaagggcacagacccatccgctaaacgctatcggtctccacaccttggataggtgtaacgaaggaatgttagggcgacgacccgtagagccttgggatggtcaatctccgagggaattgtggagtatgcgtgcagtagagtatgatatggggaaatattccatatgttcctctgttcccttatgaccaaaaaggttaacttacgttcgctgcaacttaatatccttacggccgctgtattccaaagtgatgaaatcctgcgaatgagtgagtttacgtgagataaatccttaatactgaggg

SEQ ID NO: 9387 - DNA, 1302 bp, unidentified
  source 1..1302: mol_type = unassigned DNA; note = element_eb044d2
  misc_feature 1..4: note = core
  misc_feature 5..87: note = LE
  misc_feature 88..900: note = CDS
  misc_feature 901..1302: note = RE
  misc_feature 1048..1289: note = bridgeRNA
atgatgtggtggacgacgcccgctcccggcatcgaatgtgccaaagggtgatcgttgaaaaacgaatcaccggaaggggtcgtccacatgcaggttagtgccatcggcgttgatctcgccaagaatgtgttccaagtgcacggcgtggatagcgcgggcaaggtcgtcatcacccgtcagttgcggcgcaagcaggtcatcgacttctttagcaagattcctgcttgcctggtcggcatggaagcctgcggaaccgcccatcattgggcacgtgaagtctccaagctcggtcacaccgtgcgtctgatgccgccgagctccgtgaagggctatgtcaaacggtcgaaaaacgatgctgccgacgcagccgccatctgtgaggccgtgacacgcccctcgatgcggttcgtgccgatcaagtcggccgatcagcaagccttgctgatgttgcatagaacgcgggatcttttagtccgtcagcgcacgcagctgatcaatgcgctccgagcccaccttgccgagttcggcctcgttgcggcgacaggacgcgaaggtctcgcgcagcttgccgcgatcatcacggacgagagtaatcgcgaagctcttccctttgcgatgaaacaggcgttgcagaccattatcgatcaactcgctgctctggaattgcagagcgggactctggatcgcgccattcacgcccatcaccgtgacaatgacatgagctgccgcctcgagaccgtgcccgggataggcgtgatcggggccacggccatcgcttccactgtcgcagacgcgggcgccttcaaaaccggtcgagactttgcggcatggatcggacttgtgccgcggccgttgttcgataagcccggcagcatccgcaaaagcatccctggatcatgaggctgctggccaggaagccggccaagctcgtcgccgttgcggttgccaacaagatggcgcgcatcgcttgggcgatcatggccaagggaggatactatcgagcaccggagcttgctgccgccgcctaaagaggctcggcaatgggaaggtgaggcgatggcggagcaagacaattgaattgcgagggtgatgatggcgtgatgcgaaacggtcgagccgtcgattgggacaacccgcttctgggtcatgggcggcaaagcccgtgcgaatgattgggacccgatccgcggactacatcagagccagcggtcatggtgccgcgcaaacaggccggacacatgacttgtacccgaccgcaagctgcacgtcagattcttcttgcaacgcgggcgtcgtccacac

SEQ ID NO: 9388 - DNA, 1452 bp, unidentified
  source 1..1452: mol_type = unassigned DNA; note = element_eb0b937
  misc_feature 1: note = core
  misc_feature 2..75: note = LE
  misc_feature 76..1053: note = CDS
  misc_feature 1054..1452: note = RE
  misc_feature 1218..1443: note = bridgeRNA
taatgggatggtccggccgtgctcccgctccaccagcgataagctggccaggggcgtcaagacaaggagcacgccatgtcccagacacagaacgctgcaattgccgtggttggtatcgatatcggcaagaactctttccacatcgtgggccacgatgagcgtggcgcgattgtgttgcgtcagaaatggtcgcgtggccaggtcgaggcccgctttgccaacatgccgccgtgcctggtcggcatggaagcctgcgtcggtgcgcatcatcttagccgcaagctaaatagccttggacacaatgcccggctgatgccggcgaagtacgttcgtccctattccagagggcagaagaatgacttccgcgatgccgaggccatcgccgaggcggtgcagcgaccgacgatgaagttcgtggcgaccaagaccgcggagcaactggatctgcaggcgctgcaccgcgtacgggagcgcctggtcagccagcgcaccggcattatcaatcaaattcgcgccttcctgctggagcgcggcattgcggtgcggcaaggacaacggttcctgcgcgccgagttgccgcgcatcctggtcatgccaccagatgtcctgtcgcctcgcatggtgcgcatcatcgaagacctggcgggcgactggcgccggctcgatgagcgagtcgagagtttgtcgaacgagatcgaaaccatcgcgcgccaggatgccggttgcgaacggttgatgagcgtgcccggtattgggccgatcatctccagcgcgatggtggccgcaatcggcgcaggcgatgtgttcaccaagggccgcgattttgccgcctggctcgggctcgttcccaaacagatctcgaccggcgaccgcaccattctcggcaagctatccaggcgtggcaatcgctacctgcgggtttctgttcgtgcaggcggcgtgggtcgtgctgatcaagccgaagatctgggagcgccatgggctcaagccctggatcgaggcggccaggaagcggctgcatcacaacgtgctggcgatcgcactcgccaataagctcgcccgcatcgcctggagcgtcctagcccgtggccgggcattcgaggcgcggaagatcgatcaggcagcgaaccaatccgcttgattcctattctacgccaacggcaacagaggccgaaaaatgaggagtccgcgatgacgtagccagattgatacgctttacctgccgaggtctgcgagaggatgagaagagatggaggatcggtcttcccggcgcatgcgaacactggtgacccaaatggcccgttgaggcctgtccgctaatgagaacgcacgcgcgctgatatccatgatggtctggagagaccaactccaatcagagaccgcatacattgatgcaagaccgctcacgccagctcgacgaaaacctcttgcaacgcacggccggaccataca

SEQ ID NO: 9389 - DNA, 1409 bp, unidentified
  source 1..1409: mol_type = unassigned DNA; note = element_eb0e8b8
  misc_feature 1: note = core
  misc_feature 2..77: note = LE
  misc_feature 78..1109: note = CDS
  misc_feature 1110..1409: note = RE
  misc_feature 1186..1403: note = bridgeRNA
taatgagatggtccgccgcctggatcagccctgaagtgggatgatcacggacagcttacatctgggaggatcatcgcatgaacattgcttctattggcattgatctgggcaaaaccacctttcatctggtcgcccttgacgatcacggcaacatcattatcaggaagaagttctcacgcaagcagctgctggcctatacggcaaacctgccgagttcattagtcggcatcgaagcctgttcgggggcgcatttcatcggtgccagattgcgcgatcaagaccatcaggtgcggctgatcccggcgcagtttgtaaaaccattcgtaaagtccaacaagaacgactttattgatgccgaggcgattgccgaagccgtgtcgcgacagaacatgcgcttcgttccgatcaagaccgacgaccagctcgacctgcaggccttgcatcgggtgcgcgaccggctggtgcatcgccgcacggccgtcatcaaccagattcgcggtttcctgctggagcgcggcatcaccttcgccaagggaccggccaacctgcgcaaccggatgccggacatcgtggaggatgcagatgccaatctgacaccgcgcatgcgcacactgcttgatcgcctgtggcaggagtggaagcaactggagtccggaattgagacggccagcgatgagatcgagcagatcgccagcgaggatgaagcctgccaacgattgcgccagattcctggagtagggccgctggtgtcaaccgctacggtcgcggcgatcggcaacggtgctgcgttccgcaaggggcgagagttcgcagcctggctcggactcgtaccccgccagtactcgaccggcggcaaaacgcggctctacggcatcagcaagcgtggcaacacctacctgcgccgtatgttcattcacggtgcccgcgccgtgctgatgagggtgaagtacgacaccgccggcttgggccaatgggtacatcagctagaggcgcgaactacgcgcaacaaagtgatcgttgccgtcgcaaacaagctggctcggattgcctgggccgtactgttcaaagcagaagcctatcgacacgcggccgtttgcgcccaggcctgaatacggccgtggaaaagtggaaagcgctgtgcccttcccacttttccaccgccacggcgacgacgaataagctcaccagggtctgctaggagagaacaagacgaacgaacagtcaaacggcgtgccggaaaacctgtcccccgaaatggttcttggtaaccgagcggtttatcaggaccggcacgcgcggatcatcattgtggcccggagataatctccacccagaggccggatacatttacgcagactgtaacttcgctcccaacaatctccccttgcactcaggcggcggaccataca

SEQ ID NO: 9390 - DNA, 1356 bp, unidentified
  source 1..1356: mol_type = unassigned DNA; note = element_eb19d64
  misc_feature 1: note = core
  misc_feature 2..221: note = LE
  misc_feature 222..1217: note = CDS
  misc_feature 1218..1356: note = RE
  misc_feature 48..209: note = bridgeRNA
cctttagatttgttgaataagaaaatgataattttatagaagtataaaaaagcaaccaaatcaataaagtgaaccaaccggattcccaagttaattacttagaatgcgactaggactttgttgattttactaaaaagtattagactagtaattaagacgtttgggtctagtattaaggtttagatgatatttagtattcggttgccttaaataattatcatatggacaaatttacacaatttatcggaatcgacatttcaaaagaatattttgatgcatcaatttatgtagaagtaagcaattataagcacaaccagtttgctaataccaagaaaggtgtattacaatttataaaatggatgaaaggtgaaggttgtttagttgataatactttgatctgtatggaacatacagggatttataagaacattttagttagagaattacaaattaaaaactgtaatatctgggtagagatggcttacaagattattagaagtagtggaatacaaaggggtaaaaatgataaggtagattcagcaagaatagcattatatgctaaaaagaatcaagaagaggcagctttgtttaaagcatctgatcaagtaatagataagatacaagcattattagggcaacgcgaaatgagtatagttcataaaacagcaatgaatgtaagaacaaatgaattaaaggactttaatgctgagttgtataaaacactatgtgctaatgaaaaagcttcattaaaagccttagaagagatgatcaagttaatagatgagcaattagatattcttttaaaagagaatcaagaaattaaagagatttatgattgtgttacatctgttgttggtattggtcctattacagctatgttcttaatctgttatactaatagatttacctcatttgatgaagctagacaattagcatcatactgtggagtagtcccttttgagtatacctcaggtaagtgtgtaaaagggaaacctaaagtacacttcatgtcaaacaagaagcttaaaaagcttttacatatgtgtgcattatcaagtattaggcatgatcctgagatgaagagttattatgagagaaaggtgggagacggaaaacacaaaatgcttgtattaaacaatgtaagaaacaaattagtacaacgtatatgtgcatgcgtgaaagacaaaaaaatgtatgtaatgaaacaagtagcttaatcaaaagctatacataacggatataaatatagaggataatatacattattccaggtatatctatgtcttagattattgaattattatcagaaaaacgaaataaatattatgaattattatttgcttttatcatagtaat

SEQ ID NO: 9391 - DNA, 1565 bp, unidentified
  source 1..1565: mol_type = unassigned DNA; note = element_eb2a05e
  misc_feature 1..2: note = core
  misc_feature 3..245: note = LE
  misc_feature 246..1421: note = CDS
  misc_feature 1422..1565: note = RE
  misc_feature 3..226: note = bridgeRNA
ctcgtattatatagtagtagtgtttatagtccctctccaaggactgtatgctatactgttggagacactgtggattggttcgtcgctcctaccactcgatggttttagaaaggctccaaccacagtctctttgtatatttgttaatcagttagataccgcatgacggtttatttagaacgaggttacaatcgcaaagagtaccggtggttccaaacagtgttaaatacttttaaggagattttgtatgatttatgtaggtattgatattgccaaagacaagcacgattgtttcatcacaaactcagatggtgaagtattatttaaaccatttaccatcacaaataaccgagacggtttcgacgatctttacaataagatttgctctatcaccacagatttaagcaaagtaaaagtaggccttgaagccactggacactatagctacaatcttttgggattccttgttgatagaggtttggccgcctttgttatcaacccgttacatactaatctgtacagaaaaagtctaagccttagacagacgaaaacggataaagtggatgcccgcacaattgcttctatgctgatgtctgatgtgaacttaaagtcctactcagacacatcttaccacaacgaagaattaaaatcattaactcgttatcgttttgataaggtaaaagaacgtgcaaagcttaaaacatctatttcacgtcttgttctcattctttttcctgaactcgaaaagatggtctccacacttcacatggtatcagtctatgctttactttatgagtttcctggagcatccaaagtatcatcagcacatctaactagattgaccaatctactggaagatgcctccaacggacgttactcaaaagatacagctatcatgtttcgtgaagctgccagaacatcgatcggctcaaacatgccagcgaagtctcttgaactaaaacacaccattcgctcaattcgagcattagatactgaaattaaagaaatcgaaaaagaaattaaaatcattatggatgaaatcaattctccaatattatccatcccaggaatcaactatcgcatgggtgcaatgattattgctgaaatcggtgatttcgaacgatttgatacaccagataagatacttgcctatgctggattatcaccgtcaacctatcagtcaggacaactcgataacgcatactcccatatggaaaagcgtggttcaagatatctgcgatatgcactgttcaatgcagcaaaattcgtatgccactgggatccgacattcgctgcctatcttgctaaaaagcgagctgaaggtaaacattacaccgttgcgatttcccatgcagcaaagaaacttgttcgaatcatttaccaattggaaaaaaccggtcaaacatacagaagagttgcttaactcattcattccatatttccatttagagcacctaaaatgatgctctatttgtcatgcagttatcaaggttccaatatatctgaaatgcatttctgcaattcactcaaaattttactgttttagacttgacttttaatagttagt

SEQ ID NO: 9392 - DNA, 1160 bp, unidentified
  source 1..1160: mol_type = unassigned DNA; note = element_eb2fae5
  misc_feature 1..2: note = core
  misc_feature 3..188: note = LE
  misc_feature 189..1124: note = CDS
  misc_feature 1125..1160: note = RE
  misc_feature 24..190: note = bridgeRNA
cttctgtatccgggttctgctaggctgcccccgtcaccggccccggccagggtcagtgacggggtggtgcgcgacgtctgacccttgtggcataaccacgttctctagcctgtcggcaccgcctctcttcatcgtctcgaacagttgattgcggccttgcaaggaccgcgcaccagaaggaagagagcatggacaacctatcacatggccgcgttatcggcatagatgtcagccgcgattggcttgacgttcattgcctcccggatggacatcgctgcaaagtgccaaatgctccagcaggtcatgctgccgtggcagatcttgcccgggaccgggatgccgtcgtctgctttgagtcgactggcggtcaggaatggcagctctgggcggttcttgagacagaaggtgttgccgcccgccaagtgcccccggctcaggtgaaggcgtttgcgcaaagccgtggcacacgcgccaagaccgaccggatcgatgccgagctcatcgcccgcttcttcgccttcaggcccgaagcaggccgcagtcttcctgcggaaaagctacgccttctcagagctttgacgaccaaacgagcacagctggtcgagatgcgaaaacggcttctggctcaaatccgtgcgcatcagaagctcggcaccgccgtgatgttcgaggacgtcgacaccgagttgaagcaacggatcgacagcctgatcaaagaactggaagaccgcatcaccctggccatcgcgagcgatgaacgcctgtcggagactgccggtcttctccgttctatcccagggatcggcccggttgcgagttcaatgctggtcgcagaaatgcccgagatcggcaccatcaccggcgaagaggctgccgcacttaccggattggccccggtcgcgcacgacagcggaactcttcgcggaaaacgggccatcgccggtggtcgccgcgccctgcggcacgtgatgttccaggcggccttggtcgcggcacatcacaacccgagcctcaaatccttcgcagaacgcctccgcaaggccggaaaaccgcataaggtcatcatcaccgcggtcgccagaaagctggtcactatcgcgaacgcgctatgcaagaaccgttaaaactggaccgctgcggcagcctaaaagatacagttg

SEQ ID NO: 9393 - DNA, 1382 bp, unidentified
  source 1..1382: mol_type = unassigned DNA; note = element_eb3914d
  misc_feature 1: note = core
  misc_feature 2..90: note = LE
  misc_feature 91..1125: note = CDS
  misc_feature 1126..1382: note = RE
  misc_feature 1152..1374: note = bridgeRNA
caatgggatggacgcccccaccccgtaacggcatcggtgtgccagagtggaagtgtcatcgaccactcaaaatgggtaggagcgtccgcgatggatgttacgagagtcgggattgatctcgctaagcaggtcttccaagtacacggggtgagcaaccgtggcgcggtcttgatacgtaaacagttgaagcgagcggaagcagcgaagttcttcgctactctgccgccgtgcttggtcggcatggaggcctgtgcgagcgcccatcattgggctcggacgatccaggcacatgggcacacggtgaagctcatggcccctcagtttgtgaagccgtacgtcaagagccacaagaacgacgctgccgatgcggcggctatctgcgaggcagtgagccgcccgagcatgcgctttgtgccgatcaagaacatcgaacagcagtcggtcctcgccctacatcgcgttcggcaggggttcatcaaggcacgtactgcgcaggcgaaccagattcgcggcttgttgggcgagttcggcttggtagttccgcaaggcatcggatacatcactcagcgagtgccagcattgttggagagggcggccggcgatctgcctggtgcattccggcagctgatcggccggctcctcgagcacctgcgactgctaagcctgcaagtcactgacatcgatgagcaggttaaggcgtggcatcgctccacagaagccagtcggcggctggagaagattccgggcatcggaccgatcacggccagcgcattagtggctaccgtcggcgatgccaagaacttcgatagtggccgccagctcgccgcatggctcggtttggtcccgcgtcaacattccagcggaggcaagcctatgttgctgggtatgagtaaacgaggagacccgtatctgcggacaatgctgattcatggcgccagatccgtaatctaccgcgctacgcaaaaggcgaacccgcagaactgggccttcagggtcacggcacggcgtaacaagaacgtcgccgccgtcgcactggcgaacaagaacgcgaggatcgtttgggcgctgctggcccacgaccgagagttccagggcggatactcatcagctgcggcagccatgtagacgagggcgtaacgtacgaacacaccacagattgctcaggcgattatgaagtgatggcatgacaggtcagaccgtggttggcaaagcccgcgccggacgaggcacccagagtgcgtgtaaccgatcgaggcgccgaccagctaaacccatcagggacagcgggccgagctcgcacaaaaagtccgaatgtacgggtgcaatcgaatctgtccggccattatcgaatgagagcctgacaatgtgggggcgtccatgta

SEQ ID NO: 9394 - DNA, 1355 bp, unidentified
  source 1..1355: mol_type = unassigned DNA; note = element_eb39f0f
  misc_feature 1..3: note = core
  misc_feature 4..246: note = LE
  misc_feature 247..1209: note = CDS
  misc_feature 1210..1355: note = RE
  misc_feature 3..220: note = bridgeRNA
cttatattatatttaacgcagttagctactgccaaagcccaagtggtatacttggaataagccactgtggattagttcatttcctccaatcgcttgacgatttccgaaagggtctaaccacagctttttgtttcaattggtaatgagtttgataacgcatagacgttttatctcgtctaaggtaacaaggcaaaaaattcgtggataaccaagtagacttgaaatactacatctggaggtactcccatgctttatgtgggcattgatgtcgctaaaaataaacacgatgttacagccttgaatgttccaggaaaaactgttcttaaaccactcactttttcaaataataaagctggttttgaactcttagatctgtcttttcgacagctcaaccaagactgtctcatcgctcttaaacttctttctgaccccaatcgtgaacaatttcaacacgataatcggcaagtagaactaaaaatactggctagacatattcatcgtctcaagaaaaaacagtctgattggaaagtacaatacactcgttgtcttgatatcatctttcctgagttggataaaatcgttggaaagcattcagaatatacctaccaactcttgacacgctaccctaatcctcagaaaaggcttgaggcaggatttgataagctgatagaaattaagcgattgaccgcttctaaaattcaggatatcctctcagtcgcacctcgttctatcggaacaacatctcctgctcgtgaattcgaaatcatcgaacattacaagaggctcattgacaaggcggaaacatgtgtcaatgacttgatggctgagttcaactcggtcatcacgacggttactgggattgggggtcgtttaggggcggtcattttagccgagattcgaaatattcatgcctttgataatcctgctcaattacaagctttcgctggactggattcttctatttatcagtcaggtcagattgatttagctggaagaatgatcaaacggggttcccctcatctgcggtgggcactcatacaagctgccaaagcatgccctcgcttttcgcctgcttttaaggcctatcttaagactaaattagaacaaggaaaacattacaatgtagccatcatccaccttgcaaaaaaacttatccgaaccctgttttatatcctaaaaaagagctgccatttgacgaacaaaaagtgatgtaatttctgaaattaacacaggattacctttgaaaaaatggactttttcaagggctttttgccgtgctctaaaatcatcgccaaatcatcaaattgaaataagaaataatttagataaaactattgacttttcttatagtttgt

SEQ ID NO: 9395 - DNA, 1339 bp, unidentified
  source 1..1339: mol_type = unassigned DNA; note = element_eb452ac
  misc_feature 1..2: note = core
  misc_feature 3..81: note = LE
  misc_feature 82..1119: note = CDS
  misc_feature 1120..1339: note = RE
  misc_feature 1094..1323: note = bridgeRNA
agataattggactcccccacctcctctaggaagtgggttaatgtaatcgttccgacacaattcacattaatggagtccagcatgaagaatactattgttggtgttgatttggcaaaagatgttattcaagtgtgtgtttacgcgagcaagaaagtgcaatcgaacaccgaaatgacacaccacgaatttcttgaatggctatttacgagctccagcacgacggtagtatttgaagcttgcggcacatcaaattactggaaacagaaggccacggaggctggccatgctgcacatttgatatcagcagatctggtatccaagatcagacagaaccagaaaacagataagaatgatgcattggcgattgtccaggcatccatgttgccggacataagtttcatcaagggaaagactattgagcaacagcagttgcaaaccattttgcgcttaagggagttatctgtgaaacaaaagaccgcttctggcaatcagctaaaagcactattattagagtttaatattcgtgttagcgcgagaaatggtggattgggaggggtaatagaatctgtgcttgaagatgcggagaatgaattctcggcagcttttagagaggcgttgcataccgcctggcaacaccacctgagcatcatcaaatccatagctatatacgatgggtgcctggaggaattagttgagcagcatgaagattgcaagcggctgctcaagctggaaggggtgggagtaatcaatgccgtgaacctgtatatagcactgggctgcgcggacctgggttcgttttgcaaaggtaaggatgcctcggcatgcatcggattgactccgatacagcacacatcgggaggcaaggtaaagctcggctcaatcggcaggtatgtgaaaaacagcttgttgcggagccagcttattaccggagcgatggcagtcgttgcacaggtgtgcaaaagaacagcggtcaccagtaaagaggtgtggatacagcagctggtcgcgcgacgaggcaagaaaatcgcggcggttgctctggccaacaaaaacgtgaggacggcatttgccatgctcacacaaggtaccgaatataaggcggatcctgtcgccgtctaaaaagcgttccaacgatgaagatgcaaaaacgaagataaaaatcagcgtgttaactcagttagtaacgaagagccttgagctcgttgagtagaattgaaaacacgtcccgcgtaaatatcacagagcctgagttcgctactcaatcgagagctcgtacataagtacgcatctatttcttcatttatgcaattttgttgttgacacagggggagtccacata

SEQ ID NO: 9396 - DNA, 1358 bp, unidentified
  source 1..1358: mol_type = unassigned DNA; note = element_eb47fdc
  misc_feature 1: note = core
  misc_feature 2..74: note = LE
  misc_feature 75..1091: note = CDS
  misc_feature 1092..1358: note = RE
  misc_feature 1123..1355: note = bridgeRNA
taatgagatggtcacccccacaccctgcgagggctaagctttagcagggtgctttattttcggagggcgtcatcatgagcgagtcagcgctgataggtattgatctcggtaaacatacgttccatctgcacggccaggataagtcaggccgggaggtgtttcgcaaaaaatgttcacgggcgcaaatgatgcaattttttgccagctcgcagagctgtgtcgtggcaatggaggcctgtgcggggtcgcactgtgttgctcgtcagttggcggcaattggacacacgcccaagctgatttccccgcagttcgtcaagcccttcgtcaagggcaacaaaaacgactttgtcgacgctgaggcgatttgcgaagccgcttctcgtccttcgatgcgtttcgttacgcccaagactgaatcccagcaaaccctttctgtactccatcggatgcgcgaatcgttggtgcgtgatcgcaccagaaccgctaatcagatgcacggttttctattggaatttggcgtcagcctgcccagaggtttggccatcatgaagcgtctggcggttgttttggctgagcatgaacttcccgttcgtctgacggtgctgctgcagcgtttgcacaatcacctcatctatctggatgagcaaatcaaggcactggataaagagctggcatgccaagtggccgatgatgatctgggtagccgtttgctgagcattccatgtgtaggcccggtcaccgccagcctgctagctgtggaaatgagcgatggtaagcagtatcgatgcagccgggactttgccgcatcagtgggattggtacccaagcaatacagcgccggcggcaaggccaacttactggggatcagtaaacgcggcgacaagcaccttcgacagttgctcgtgcaatgttccagggtctacatgcagagactcgatcaccagaaaggagccttggccgactgggttcgttcattgctgagtcgacgccactccaatgttgttgcctgtgccttggctaacaagctggcgcgaatcgcttgggcgatagccgcgcaccatacgcagtacgaagcagggccaggcgcctgagcgcctgattcggcagttgttgctgtaccacgatttacctttcaggttttgcgatagctgaatagtggatgacgtaaacggcctatcggcctgacgaagaacctgttttaaaaattggctcagcaagaagccgttagccttttcaggatcgttaggcgcgactctcatcatggcgcgggtgaatcatccaatagacgccggatagatttaagcaggccaactacttcgcccatgaatcagcattgcaaaaaagggggtgaccataga

SEQ ID NO: 9397 - DNA, 1245 bp, unidentified
  source 1..1245: mol_type = unassigned DNA; note = element_eb54d86
  misc_feature 1..3: note = core
  misc_feature 4..210: note = LE
  misc_feature 211..1209: note = CDS
  misc_feature 1210..1245: note = RE
  misc_feature 8..193: note = bridgeRNA
tgcctttagtttgcatcaagaaaaaaacattaacttaaccgaaagagaaacgggtgaactcaaacgttttgtaggaataaattcctttaagctgcataagtcccgtttccccattcggacttgcaagtactaattggaatattgggcgttagagcccgttaaaggcgatagcacagcaagtttttttgttttatccttaaatacgaaattatggaaaatgttgaagaaaccatcggtattgatgtatcaaaaaaaacattagatgtacacctacatcacaagcaactacacaagcaatttatcaatgacgaaagtggttacaaaaagattttacaatggataaaatcacaaaaggttttaattacacaatcagtaatatgctttgaacatacaggctggtattgcttgcatttaagttattatttgcatcagcatcaggtttgctattgttgtgtaaatccaatggaaattaaacgatccattgggctgaaacgaggtaaaacagacaaagcagatgcgaaagaaattgcgcgttatgcatggcttcatcgtgaggagttggtagccagtgtgccaccgccagagaaacttattgagttgcaacggatgatgagcctaagggagcaaatagcaaagcaattacgtgctttgaaatgccttgaaaagggaatgcaggtgctaacagtaaataaacaaacagaagatgtatcagaggcgatgatagcagaaaccatttgccacctggaacaacaaatgaaaaagttagagaatgcaatggtgagtttaatcaaaacggataatcagatgcataaacattataaactaagtcgaagtgtaaagggagttggattggttttagcagtgcaaatgttagtgcatacgcacaactacacacgctttgcaagttggcgccagttttcttgttattgtggtttagtgccattcccacatcagtcaggcacgagtattaacgggcgcatgaaaattcatcccataagtgaccgaaaaatgaagagcctattatccatgtcggccatcagtgccatacaacacgataaggaactaaagcaatactatgaaaagcgagtagaagaagggaaacctaaaatggtagtactaaatataatcagaaacaaacttgtatcaagggtttttgcaactatcaatcgcggcacaccatatgttgaactaagccaatatgctgcctaaaatatattaagaaaaaacttgtttttgatcttggaa

SEQ ID NO: 9398 - DNA, 1313 bp, unidentified
  source 1..1313: mol_type = unassigned DNA; note = element_eb54fea
  misc_feature 1..2: note = core
  misc_feature 3..238: note = LE
  misc_feature 239..1264: note = CDS
  misc_feature 1265..1313: note = RE
  misc_feature 17..184: note = bridgeRNA
cttgtatcttgcgttctgaagcgtgacgatggttgcgtttcggcggagaggccggcccaccctgaggccagcgttggttgagcctgtggacagatcggcccccgcccctctctttttgacgccgtggagaatcggaggccttttgagcctgcatgttcaaggttggcggaaagagcaaggtccgttctgagcggacgcggggcggcagccgaagctcagagtaacgcggaggaaagttatgagcaagggatcgacggttgcttgtcagaggttgttttgcggcatcgatgtcagtgcggcgacgcttgccgtggcagttcaacaggaaggcttggaaaggttcgagcatcacgagttcgccaacacctgcgctgggcataagaagctgacggcgtggttgttgcggcacagccggacggtgcgggtgtcgttggaagcgacggggatctactcgcaggacctggctctggcgctggatgcggctgaggggatcgaggtggccgtgctgaacccgcagcaggtgcatcagttcgctcggtcgatgaagcggtctaagaccgacaaggccgacgcgatggcgctggcggagtacagtcgtcggatgccgttcgtaccttggcgtcggccgtcgctggccgcgctgcggctgcgggcgatcagccgccttatcgcctcgttgcgggaagaccatagccggttgcggagccggctgcacgcggcccgggcttcggccgccacgccggactgtgtggtcaagcttctgaaggacgcgatggcgcaactccagaagagcagactcaagctggtgagggaggctatggccgtgatcgcccaggatacggaactgcagcggaagttcgagttgcttaagagcgtcaagggcatcgccgagaccagcgcggtgcagctgctgggcgaactggcgggcatggacccggcgatgtcggtcagacagtgggtggctcacagcggactcgatccgcagcaccgaagctcaggcacttcggtgcatccgccctccaggatcagccgccgcggcaaccgccatctgcgcctggcgctgtacatgccggcgctggtggcgagccgcttcgaccctcacatgaaggtcttctacaaccagctcaaggcacgtcacaaggccagcctgcaggccctggtcgccctgcagcggaagatgctccatgcaatctacggatgcttcaaatccaacacaccctacaacggggcaacactcttccccaaactcatacccacttcataggaagtcttttgctaaatccgcaaaatgaacttgcaagcgaagagagaat

SEQ ID NO: 9399 - DNA, 1618 bp, unidentified
  source 1..1618: mol_type = unassigned DNA; note = element_eb58022
  misc_feature 1..3: note = core
  misc_feature 4..250: note = LE
  misc_feature 251..1228: note = CDS
  misc_feature 1229..1618: note = RE
  misc_feature 8..225: note = bridgeRNA
tttcgtattataaagtcagccagttatttctggttgaacaatttttatatcgatatatgataacggtagccggggtagaacgtacctgcccgtggggcttaagatcctgttaactaaacagttcgccccctacttgcttaaacatgatttggctggttgggaccaagatctcgtataacaagcgaagctatgatactgtaagaaggattaggggttaccggcaatactatgtttttggaggagataaaaaatgaatccagtggttagtctggatgtagctaaaggtgaaagtcaggttcaagcgttcttggataaaaagaagccttatcaaggtagttttaaagttacgcataccattgaaggactagaaacactatttcagtttctgagagaactagaaaataaaacggggatcaaacctccgattgtattggaatccacggggcattatcatacgcccgttgtacagtattttgaggagagaggttacttattaattgtcgttaacccactcatttcttatcgtgcgaagagctcaagtttacgcaaagtaaagacagatataattgatgcacgtcacctctgcgagctgtactataaagaggatttagagccttataaaaaacgagggatacaactcttaaatcttcgtaatctttcaagacaacacgaaaatataacagggatctatgtacaaacaaaactacagttccaggctgttcttgaccaagtatttccagaatatagaggggtttttggagatttgtattcagttgtttctttgcttactctattagaattccctacttctgaagacatattagcagtcggtgaagaaactgtagcaaataggattaatgaactttgtccaagtcgttctaaaaagtgggcgaatacacaggcagagaaacttacggctgcctcagctcgaaacccttttcagagaaccttatatcagagtcacattttaagccttgaaatgtatataaaaatgcttatagaataccaaaagcacctatccaagtttgaagacgagataaatgctttggcaaaagaaattgaagaatataagattatccaatccatccctggaatcggcgaaaaaatcgctgcaacgattatttctgaaattggagagattgatcggtttaatcaccctaaaaaactagtggcatttgccggaattgatccaagtatctttgaatcaggtaaatttaaagcacagtaaatcggattaccaaaagaggttctggcagactacgacacgccttgtatatggctgttaaatgtgccattcgtgattgtcgcaagaagaaaacgacagatgaaatcatccctcgtaacaagcgattacgagagttttatgataagaaacgtgaagaaggaaagccctttaaagtagctgtgatagcatgtgccaataagcttatacattggatttatgcactattacaaaataacacgattttccaatatctagcctagttcaaaagtataactaaatagtacaaaactttccaaatacagttcattggaaggttatttggcatgcacaaatttagtatagcatgaaatattttaagttttcattgaaaaatgttgactaactattagctgg

SEQ ID NO: 9400 - DNA, 1452 bp, unidentified
  source 1..1452: mol_type = unassigned DNA; note = element_eb5e886
  misc_feature 1..2: note = core
  misc_feature 3..231: note = LE
  misc_feature 232..1437: note = CDS
  misc_feature 1438..1452: note = RE
  misc_feature 19..201: note = bridgeRNA
tccttacctttcttctcgggtgctggaagctactggctgccataggctttcctgcacccgggagcgtcgggtatggctttcatggtgcagccgctgatggcccagggggattggccgcccggcgttccgcgacgactcgaccgctgattgagatacgcgacccgatcgcttcgtaaggacacgacggcgcagtcgtctgccggacaaccgaacaacgtgtggagaacggaagtggtcgtgcgacaacatctgtgggctggtattgacgccggtaaatcggcgcatcactgcgtcgtcatcgataccgacggcaagcgacggctctcgcgccggatcgccaacgacgaacccgctctgctggatctgatcgaggccgtcacgggcctggtcgacaacgccgaggtgacgtgggcgatcgacctcaaccacggtggggccgcgttgttgatcgccctgttgctcggtcgggaccagcggctgctctatattcccggacggacggtgcactgggcttcgggcacctatcggggcgacggcaagaccgacgccaaagatgccgcgatcatcgccgaccaggcccgtatgcgccgcgacttgcagccactgcgcgtgggtgacgaagcagcgatcgagttgcggatcctcacctcgcggcgcaccgacctgggctgcgaccgcacccgcgcgatcaaccgattgcgcgcccagctgctggaatacttccccgctctcgagcgcgcgttcgatctggcccacaacaaagcggcgttgatcctgctcaccggctaccaaacccccgacgggctccgcgcgatcggcaccgcccgcctcgaggcatggttgcgtaaacgtaaggcccgcaacagcgcccgcgtcgccagcgccgcggtcgaagcggctcgatcgcagcgcaccgcggtgcccggccagcgactcggcgcagcgatggtggcccgcctggcgcaggaggtgatccagctcgacatcgagatcgccgagatcgaagcgatgatcgagcagcgatttcgccgccaccgccacgccgaaaccatcgtgagcatgcccggcttcggagccttgctcggcgcggaattcatcgccgcgaccggcggggacatgaccgtcttcaacagcgtcgatcgcctcgccggtgtcgccggtctggccccggttccccgggactcgggccgggtgagcggcaacctcaaacggccgcgccgctacgaccggcgcttgctgcgagcctgctacctcgccgcccaaatcgcggccatccacgacccggtctcccggggctactaccagcgcaagagaaccgagggcaaaaaccacacccaggctgttatcgccctggcccggcgacgcctcaatgtcttgtgggcgatgctccgaacgagaaccccataccagcccgccccggggaccgttccggcttgacaaagtcattgagaa

SEQ ID NO: 9401 - DNA, 1397 bp, unidentified
  source 1..1397: mol_type = unassigned DNA; note = element_eb75fa1
  misc_feature 1..2: note = core
  misc_feature 3..119: note = LE
  misc_feature 120..1118: note = CDS
  misc_feature 1119..1397: note = RE
  misc_feature 1163..1392: note = bridgeRNA
agatgccgtaatgggccggcgcttccgagattgtagccatatagtggctgtccctcaacatgacgatgttgaaacggggtccgaacgggtcggccccaaacatcaagtgaggaacagccatggactattatgctggaattgatgtttctttggaagcaagcagtgtgtgtttggtggattctgcaggcaagatcatccgcgagacgaaggtggcgagcgatccggatgcgctcatcgaccattttgcgtcactgggctttgcattgaagcggatcggtctggaagctgggccattgtctcaatgcctgcatgaaggcctgacgaatgctggctttgatgttgttctgctggaaacccgtcacgtgaaggccgcgctatcggcgatgatcatcaagacggaccggaaagatgcacgtggcatcgcacaactattgcgcatgggctggtatcgtgccgttcattcaaagtctcccggctgccaagatgtccgagcgcttttgaccggtcgcaaactgctgcaagccaaattgcgtgatgtcgagctcagcattcggggcattttgcggggctatggtttgaaggttggcgaggtgagccgcggccgatttgaagcacgaatattggagctcgtcgaaggacatccggtgttgaagaccgtgataggcgctatgttgcaggcccgtcatgcgctttggaccgagtttaccaaaatgcaccgtgagatgctgaagatcgttcgccaggatcgggtctgccgaagactgatgaccacgccgggcgttggtgcgctcgttgcgattacctatcgctccgctgtcgatgaccctggtcggtttgcaaaatcccaaactgttggcgcgtacttcggattgacgccgaagaagtaccaatccggcgaaacagacctggacggtggtatcagccgggtcggtgacacaatggtgcgcactgccctttacgaggcggcccacatcatgctgacccgcgccaccaggttctcggcgctgaagcgatgggcagtcgacgtggcaaagcggcgtggcatgaaacgggcaaaagttgcgcttgcccgcaagcttgcgacgatccttcatcgcatgtggatggatgaaagctaattccgttggggcaaggaaacctctgcggcatagatagcggtatcgagacgaagccgttgtaaggtttcgtctccatcaaggtcccgtcaccgggacgagagcctggcaaggtcgcaagtagtgctgtgatgttttggcaatcacgccgcctagattgacctgccggttctgatcttatggcatggtgtggcgaccctggtgttgaccacggacagaagcatgatcctggtgacgagattttggtactgagggacttgacgaacaaaggcccattacaga

SEQ ID NO: 9402 - DNA, 1366 bp, unidentified
  source 1..1366: mol_type = unassigned DNA; note = element_eb790af
  misc_feature 1..3: note = core
  misc_feature 4..349: note = LE
  misc_feature 350..1108: note = CDS
  misc_feature 1109..1366: note = RE
  misc_feature 1081..1354: note = bridgeRNA
tgatggggtggacgccccccgacggcatcgctgtgccagaatggagtgttgcaaccattcgaagggaggcgtccgtgcctgaggttaccacgatcggtctggatatcgcgaagaatgtgttccatgcgcatggttcggattcacgcggtcgaggcgttttctcgaagcggctgagccgggcgaaggtgctcgacttcttcgctgcgcaatcgccttgcaccgtggctatggaagcctgcggcggtgcgcatcattggggccgtgaactgatggcgctgggccatgacgtgcggctgatcccacccgcctacgtcaagccgttcgtaaagcggcagaagaaaacgatgcggtggatgccgaagcgatctgcgaggcagcgcagcgcccaaccatgcgcttcgtggccgtgaagagcgaggagcaacaggcgtccgccctcgtgttccggacccgcgatctcttggttcgccagcgcacccaactcgtcaacgccatccgggggcacctcaccgagtacggttgggtggcgccgaagggagtgtcctacgtctcgatgctcggcgatatgctcgaggaggagatggccgcctccttaccggcggcggcggtcgcgatgtttcgtgtcatgctggatctcctggccgagctggacgagcggatcgcgtatcttgaccgggagatcgctcgccgtgcccgcgaggacgagacggcgcgccggctgatgaccatccccggcatcgggccgatcaccgcgacggcgttgaccgcgcttgctcccgctgccgaaacctttgccaagggtcgcgacttcgccgcctggctgggtctgacaccgttgcagcgatcgaccggaggcaaacagaagctcggcgcgacgtcgaagatgggcgagcgaacgctgcgccgcctgctgattatcggcgccagcgccgtcgtcaaacaggcgtcgcgtcgcggagctcccaagggatcgtggctggaacgaatgctgtcgtgcaagccgcgcatgctggtgacggtggcgctcgccaacaagatggcgcgcattgtctgggcccttctggcgaagggcggaagttaccgagctccggcggcggtcgcggcgtaagccgggatcgacgtcagaggctgtcggagacgcgaggtcggtcgaaggagggtatggcacaacagtcggcgagacggggctgggagaaccagggaatggcagagcgctacccaagcgcgcaaagctgatgtggatccagtccgcgaactcccatacgggcccgcagccgatggctgcatcaggaggccggacagatggcagcatccgacatcgtgcctaccgccaaaaactgcttgcgtccgaaggggcgtccacaga

SEQ ID NO: 9403 - DNA, 1495 bp, unidentified
  source 1..1495: mol_type = unassigned DNA; note = element_eb7ed07
  misc_feature 1..3: note = core
  misc_feature 4..333: note = LE
  misc_feature 334..1479: note = CDS
  misc_feature 1480..1495: note = RE
  misc_feature 50..259: note = bridgeRNA
tgttatattatcgaacagggatacttccccacaaaacaccttcaaaaccgatatcaacgccccttgagggagcgatgatataatatcctcatgcggacagagaatttcctgcttctatctttgtagccaagtctactgcgcacagactgaaacctctgccctgtgggatgtcacttatgagccggatgtcgaagcgatggatcgctttcttctaatctcgcaacaggttgtgaccttcagcagcacgaggaatgtccgtaatttgaacatgagaggagcctacactatgtacatcttgggatcgacatcgccaagaggaagcacgaggcagcggtgatcgacggcgagggcgccgtcatcatcaagccgttttccttcaccaacaactgctccgggtacaatcggctgctggccatgctcaccaaggccaaactgccgcttgacgaggtttcctttgcaatggaggccaccggacactactggctcgctctttttaccagacttcagaaggagggcttccgtgttcaggtcatcaacccggtgcagaccaactccattcgcagcttctacatccgtcaggccaaaacagatccgcgggacgccctgctcatcgcggagatgatccgtttcgggcacttctccgagtctaccctgcatcccgaaaatatttatgaactgagagagctgtgccgtggacggcacgccatcgtttccatgcaggcagatgttaagcgaaaggtcgttgccctgctggatcaggtctttcctgaatatgaaactgcttttaccaatatgtttggcgatacttccatggcgattttacaaacctgtcctacgccaaaggaattatccaagatgcctcttgaggagctttgtcatctcatcgaagtctccagccacaagcgcttccgcatggcgaaagcgcaggagcttcaggcgcttgcgcgcaattcctttggcttcgccatggccggcgacgttttcagcacgatgatccgactctatgcaaagcacctcgttttcttgaaacagcaggttcaagaaatggaccgcaaaatcgctgagatcatggataccctggacacgccgatcactaccatcaccggcatcggtccgacccttggcgcgtacatcctcagcgagatcggagacatcagccgtttttcctccgcggcaaaacttgccgcctatgcggggatcgatccaaccatgcggcagtctggcgaatacaacggcgtcagaaaccgtatgtccaaacgaggctcgccttatttgcggcacgccatttggctggcggcttcatcggcggtgctccacgatccggcgctgaagctttattttcagaaaaaacgagatgaagggaagccctacatggcgtccgtgggccacgcctgcaggaagatggtctccatcatttacgccgttatgagagacaacaaggcctacacgccctatatcccaaatgagatttcagcttgacaaattatagccggtc

SEQ ID NO: 9404 - DNA, 1434 bp, unidentified
  source 1..1434: mol_type = unassigned DNA; note = element_eb84ca2
  misc_feature 1..2: note = core
  misc_feature 3..118: note = LE
  misc_feature 119..1150: note = CDS
  misc_feature 1151..1434: note = RE
  misc_feature 1187..1384: note = bridgeRNA
agatggggtattcggctttgccccacgtctcgaacggtgtttgaggtgctgcgcttcgagctgatgataaaacgtggtctgcgtgaacagccacaagcatcaggaaaggaagcgcagcatgaagcattatgccggactggacgtctccgtgaaagagacgaccgtttgcatcgtggatgaaggaggccgaatttgccgagagatgaaggttgcgagccatccggacgatcttgttgaggcgttgaagaaccccgcctggaatctggtccggatcgggcttgaagccggtcccttatcacaatggttgttcagtggtctggcgggagccggactacctgcaatctgcatcgaaacccgccatgcgaaggcctttctcaaggcgcaggtcaacaagaccgaccgcaatgatgcgcgcggcatcgcgcagatgatgcgggttaatttgttccggccggtgcacgtcaagacgctgatgagccagaaacgccgggcgctgttgacagcccgcaagttgctgcaggaaaaggccatcgcaattgagaacgacattcgaggcctgttgcgtaacttcggtctcaaggttggcattgtcggcgctgccaaatttgcggatcgcatccaggacctttccggcgacattccggagctacgtgacatcatggaggtgttgctcgccgctcggcagaaacttcgcgagcagttcacggtactgcacgaaaggctgttgtcgatcgtgaagggtgacacggtttgcaggcggttgatgaccgtacctggtgtcggacctgtcgttgcgctggctttcaacgccacggtcgacattcctgcccgcttcaagaattcgaaggacgtagggccggctctcgggttgacgccgcgcttgcatcaatcaggcgaggacaatcgcgtcggacgtgtttccctgtgcggtgacgccatgatgcgaacgctactttatgaagccgcgcaagtcttgctgacggtggtgaaaaagtggtcatggctgaaagcttgggcgatgaacgtcgctaagcgccggggccgacaaagagcgaccgttgcccttgctcgcagattggctgtcatcatgcacagaatatggtccgacggcagtgagttccgctgggcgcgagaggaagcaacggcgtgacaggtccaccaaaacgaaagggagaagatccgataacgagatccgccaggggcggatgaatgtccttcgcgggacggaggatgaagagaggacgtgccgggactcgcttccaccgcggcaacatggtgagaacgctgtttagattgtccccttcattccaactgatcccatgctgggagggccaacgcgccgatcccgaagagaagcaaggccccgcgaaagacatcaaatgcccgtggtagaggaagcttgaaagcgattgacttcaacacgccgaatagaga

SEQ ID NO: 9405 - DNA, 1683 bp, unidentified
  source 1..1683: mol_type = unassigned DNA; note = element_eb87eac
  misc_feature 1..3: note = core
  misc_feature 4..316: note = LE
  misc_feature 317..1381: note = CDS
  misc_feature 1382..1683: note = RE
ttaaccatacattcctttccgcctgcggctacaaggcacacatcgttatggataattccttgcttgtgcaggcattttattttatattcttactgaaggagtcttatactacaaagcacggtagggtgagttgtagatttctgcagcccgttcagttcaaaacagtatattaaccagtgcagggctgtacttttcaagcacacatgagtatcgacatcctagtctgcagattaatcattgacttgagttaatcttttagtgttgttcagccagtcactgagctccttctctataatctgaaaggagctttttatttatggaaattgtttaccctagagcctgtggcgttgatgtgcacaaatccttcattgttgcggtgatctgcatctctgaatccatcaagcccaagtatattaaaaaaagattctcaaccttcaataaccagttgattcaatttagagaatggcttatcgagaacaactgtcaaaatgtatgcatggaatccactggcaagtactatattcctgtatacaatgcattggaaagccacatttccaatgtcgttgttgccaatcctaaatgggtcaaggctatcaaaggtgagaaggatgacaataaggatgccaaatggattgccgatctctttaaatttggtatcgtcagatcaagctatatccctgaaaaggatattcgtatcctcagggaatttactcgctatcagtataagcttgtcaatatccgttcttctgagaagaatcgtttccagaatgccttaaccactggaaactgcaaacttgaccttgttttcactgatgtctttggtaaatccgcttcctctattgtcgatactattttatcagatgaaccctatacaagtgaagatattctttctaaagttcatggaagatgtaaatcttctacagaagatattctctctgctgttgaaggaactgatttgaatcactttcaaaaagaaagaagcaaaatcgttcagaagcatatagaatatgttgattcccttcttgatgaagttcagcatcacattgacatgatggttctagcctatgaagactatattcagcttctgatggcaattcctggtatcagcagaaaatctgctatcatcattatttccgaacttggcatcgatgtgtcccaatggtcaaatgctcgtaagctagccgcatgggctggactagctcccggacgcaatgaatctgccggaaagaaaaaatccgtaaagatttcaaaagtggtatctaccttaaaccatgccttgttcaggttgcatatgctgctgtcaaggataagacatgcagctactatgcagaaaaatttgacagaatttccaagcgtcgcggcaagaagcgtgccatcatagcgattgccagaaagatacttgtagccatctaccatatactcaagacaggtgaagtcttcaatccatcagatatggtagatgttgaaacaacgaaagaacagcgcatcgcttatatcacaaacaatttcagaaatgccttcaatcagctcagccgaactggtttgagtgaagaagtaatcttaaacattatcatcaagaaatcaggcaactcaccccaaacagaatagctttccatttggggaaaggggcattatgctcttttttagcaaaatctatatttccattcctattttttattcaga

SEQ ID NO: 9406 - DNA, 1435 bp, unidentified
  source 1..1435: mol_type = unassigned DNA; note = element_eb891e1
  misc_feature 1..2: note = core
  misc_feature 3..213: note = LE
  misc_feature 214..1293: note = CDS
  misc_feature 1294..1435: note = RE
  misc_feature 2..169: note = bridgeRNA
ctcatataatatggatagcgttccagagtggtagagagattcgaacaacgcttgcggcgttgaccgcgtggcttagagtaatccctgccactctcggcacggcaccaatctgaaccgtatcaagtggccctgaccacgtattatgagcgcagagagaagcctgctggaatcgctatcaatgctgaaaagacccgttcaaggaaggaaaaagcgatgcgttctgtccccccttctgctgcttaccaattgtatgtcggcgtggatattgcagctgcgactgccacagtcgcatggcaggcccctactcagaagcctggtaaaccgattactattgaacaaactcctgaaggcttttcgtcattgcatcaacggctcgtgaagactggagccagaccggctgagatcctggtagttatggaagcgacggggatctactggctcgctctggccacctttttcgcacaccttggctatgcagtcagtgtggtgaatcctgcgcaagcccatcattttgccaaagccttgctcaagcgggcgaaaaccgatgccatcgatgcacaaacgctgacccaacttgccgcgctcctgcacccagcattgtggacccctccaccagccatctatgaggaactggagcaacgcttgacccaacgagacacgttgttggtgatgcgcggccaggtacgtaatcaacttcacgccctcgaacacaatcccgtcgtggtggcccaggttcgtcaacggatgcagatgttagatcagaccattgttgagcagattgctcaaatcgaaacggaactggcggctctggtgtccacagacgagcaggaagcggctgaaggcgaggacaattccgtggatcgggcatggcgttgtaccctggcgaagcttcagactattccgggtatcggactggtgacggctctgtggatagttgtagcgaccctcaatttcacactttgttcctcaactgaacaggctactgcttatgcagggttggctcccatgccacgggaatcgggaacgagtgtccacaaacgtccgtgtattggccacactggcaatgggcgactgcgaactgccttgtacctggccactctctccgctgcccgctacaatcctgtactcaagcccttttatgatcgattgcgcgccgctggcaagccagacaaggtcgcgcgctgtgctgtggcacgcaaattgttgcatctcgcctttgctgttggaacccatctggaggactttgatcccaactatcagccaaagtaccaacaacgagcaatagggtgctaatctctagcatgagtaggtttcactccaggctgctgctgttccccaccaggcagccctgccccgctatgctttcctgctttctacacgtcaaaccggttctttcggaaaacggctcctaccctcttgacaaacaacaccgtat

SEQ ID NO: 9407 - DNA, 1356 bp, unidentified
  source 1..1356: mol_type = unassigned DNA; note = element_eb946bc
  misc_feature 1: note = core
  misc_feature 2..70: note = LE
  misc_feature 71..1081: note = CDS
  misc_feature 1082..1356: note = RE
  misc_feature 1123..1352: note = bridgeRNA
taatgggatggtcaccccctcccgcgcagcgggtgtacgctgccgggaatttcctcgggagatcactgccatgcaaaacgtcacgctgatcggaattgatctgggcaagcatgcatttcaccttcatggtcaggacaaggcaggcaaggccgtgtttcgcagaaaggtatcccgcaagcagctcttcgaattcttcgccaccttccagccatgtaccgtcgtcatggaggcctgtgcaggggctcactacatggcacgcaagctcatagcgttcggccacgagataaagctgatttcaccgcagttcgtacgtccgttcgtgaagagcaacaagaatgattttgtcgacgcagaggcaatctgcgaagccgcttcccgaccgtcgatgcgcttcgttacgccgaagactgaatcgcagcagacgttgtcggcgttgcatcgggtacgcgacgcattggtgagggacaaggtgcgcaccaccaaccagatgcatgggttcctgctcgagttcggcgtgacacttcctattggcaatggggttgtcaggcgtttgcccgagctactcgcggagcattctttgccgccgcgtatcgttgcgatccttgagcgcctgcatgcacatctcaaataccttgttgagcagattggcgagatcggaaaggaactcaaccgacagcttgcagatgactccataggtcagcgactgctgacaattcccggcgttggaccgattacggcaagcctgctcagctccgaactcggcgatggcaagcaatatcgatgcggccgcgactttgcggctgctgtcgggttggtgccacgtcagtacagcacgggaggccgatcgaacctgctcggaatctccaagcggggagacaggaacattcgccgcctgctcgtccagtgtgcccacgccttcatgttgcatctgcacagttactccggcccagttgctgattgggtgcgctcgatgcttgcacggcgacactcaaacgtggtgacctgcgctctggccaacaagttcgcgcgaattgcatgggcgatcgcgagccgcgacgctgtattcgagctgcgtacgtgagcgccggtgcgcaagcggccaccagttttactgacttaccgtagtcaacccatctggttttgcgattgctgaaatattgatgacgtgaacggcaaaccggcctgacggaaatcctgagaggttagccagcttccgaagctgcttctgttataaggaccgccaggcgcgattctcatcgaggcgcgacgattcactctgctccgacgccggatagatttgcgcgagccaccacaccatcgaaaatcagcattgcaaaaacgggggtgaccatagat

SEQ ID NO: 9408 - DNA, 1418 bp, unidentified
  source 1..1418: mol_type = unassigned DNA; note = element_eb98c2e
  misc_feature 1..4: note = core
  misc_feature 5..201: note = LE
  misc_feature 202..1404: note = CDS
  misc_feature 1405..1418: note = RE
  misc_feature 22..174: note = bridgeRNA
ctccgtaagttgttgggcggtccgggagggccggatgtggctgatgcggtcttgcccttggtggctccgaaggagtggccgtccggctctccggggcaccctggctgctgattgagatgcgcgtgctgatcgctgtttacggagacgacggcggggtgttcctcgggccgatggtcgatcgagcagttcgaggagacgtgtttgaacgagcaacgcacccgcgcctgggcagggatcgacgcgggcaaggcccaccactgggcggcagtggtcgacgacaccgggaccacgctgtggtcgcgcaagatcgtcaacgacgaggcggcgatcctcgacgccctggccgacatcctcggcctggccgggcaggtgtcctgggcgatcgacatcgccggcaccgcctccgcgctgttgctggccttgcttgccgcccacggccaacaggccgtctacgtgcccggccgcaccgtcaaccggatgaccggcgcctaccggggcgaagcgaaaaccgacgcgcgcgacgcctacgtgatcgctgaaacgtcccgtgtccgcaaggatttcgcgatgatcgacgtgcccgcgcaactcgccgccgatctgggcctgctcaccgcgcaccgcagcgatctggtcgccgaccgggtccggttgatcaaccggttgcgtgatgtgctcaccggcgtcagccccgccttggaacgcgcgttcgactactccgcgcacaaaggcgccctggtgttgctgaccggctatcagaccccggccgcgatccgccggatcggccagacccggctgacggcctggctcgtcaaccgcaaggtccgcggcggcgaggctgtcgccgtgaccgcgctgtccgctgctcgatcccagcacacgaccctgcccggggagcacgtcgccgcgacgatcgtggccgagctggcccgccagatcctcgccctggacgaccggctcaccgcgatcgagacccagatccgcgatacgttccgcgcgcacccgcaggcggagatcatcgagtcgatgcccggcatcggcccgatcctcggggcggagctggtcgcggccgcgggcgacctggccgcctacgccgacgcggggcgcctggcctcggccgctggtttggtgccggtgccgcgggattcgggccgccgcaccggaaacctgcaccgtcccaagcgctacagccgccgactgcgccgggtgttctacctgtccgcgcaatccagcatcatccgcgacggccccaaccgcgacttctacctcaaaaaacgaggacaaggactcaaacacgtccaagccgtcatcgcactcgcccgccgccgggtcgacgtattgtgggcactgctgcgcgacaacagggtgttcacccccgcccagcccgtcacgcagtcggcttgacaaactcattgaga

SEQ ID NO: 9409 - DNA, 1406 bp, unidentified
  source 1..1406: mol_type = unassigned DNA; note = element_eb9acaa
  misc_feature 1..4: note = core
  misc_feature 5..201: note = LE
  misc_feature 202..1392: note = CDS
  misc_feature 1393..1406: note = RE
  misc_feature 1..192: note = bridgeRNA
ctccgtaagttgtcaggtggcccgggagggccggatgtggctaatcggttcttgcccttggtggcttgcgaggagtggccgtccggctctccggggccccctggctgctgattgagatgcgcgtgctggtcgctgtttacggagatgacggcggggtgttcctcgggccgatggaagatggttcggttcgaggaggcgtggttgagcgagcagcggacccgtgtctgggcagggattgacgcgggcaaggcccatcactgggctgtggtggtcgatgacaccggggcgacggtctggtcgcgcaagatccccaatgacgaggcagcgatcctggacgcgctcgccgacatccttggcctgagcgagccggtgtcctgggcgatcgatatcgccggcacggcctcggcgttgctgctggcgttgctggcggcgcacggtcagcatgcggtctatgtgcctggccgcacggtcaaccggatgtccggcgcctaccggggcgaggcgaagaccgacgcccgcgacgcctccgtgatcgccgagacttcccgtgtccgcaacgatttccaggccatcgacgtgcccgcggacctggccctgctgaccgcgcacggcaccgatctggtcgccgaccgagtccggttgatcaaccgattgcgtgatgtgctcaccggcatcagcccgaccctggaacgggcattcgactactccgcctgcaaaggcgctctcctgctgttgaccggctatcaaaccccagcggcgctccgccggatcggccagacgaggttgacagcctggctggccaaccgcaaggtcccaagcgcggacaccgtcgcggccaccgcactggacgccgcgcggtcccagcagaccactctgcccggcgaacaggtcgccgccggaattgtggctgaactggcccgccagatcctcgccctggaccaacggctcaccacgatcgagacccagatccgcgacacgttccatacgcacccgcaggctgagatcatcgagtcgctgcccggcatcggcccaatcctgggcgcggaactggtcatcgccgccggtgacctcgctgcctacgccgacgccggccacctggcttccgcggccggactcgtgcccgtaccgcgggactccggccgccgcaccggcaacctgcaccgccccaaacgctacagccctcgcccgcggcgggtgttctacctgtccgcgcaaaccagcatcatccgcgagggccccaatcgcgacttctacctcaagaaacgcagccaaggactcaaacacgtccaagccatcaccgccctggcccgccgcagggtcgacgtgctgtgggcactgttgcgtgacaaccgggtcttcacccccgtccaaccggtcacgcatccggcttgacaacatcattgaga

SEQ ID NO: 9410 - DNA, 1303 bp, unidentified
  source 1..1303: mol_type = unassigned DNA; note = element_eba00e2
  misc_feature 1..2: note = core
  misc_feature 3..66: note = LE
  misc_feature 67..1089: note = CDS
  misc_feature 1090..1303: note = RE
  misc_feature 1091..1297: note = bridgeRNA
ttaatgagatggttcccctcccttcagggtctaatctgaagggaagcaaaaaaggagaatcatctcatgtctactattcaagtcattggaatcgatttaggtaaatcaaacttccatgtttatgccttagattcaaatcctaactcctcgttcaaaaagcatttctctagaaaacaactcatcgatttcctttctaatcaattaccgacagttgttgcgtttgaagcgtgtggtggagctcactggttggcaagaaaatgccaggatctggggcatgtagtgaagctaatccctcctcaatacgttaaaccctacgttaaaacgaataagaatgactttgtggatgcagaagcaatcaccgaggcagctactcgccataatatgcgctttgtgtctcctaaaaccgaagagcagcaggtgattgcgatttgtcaccgagtacgagatggctatgtcaaagagcggacagcggtgatgagtcgtattggagcaacgctccttgagtttggtttgtcgttaccgacagggcataaatgcatgaaagagttattttgttggcttgcacgccaagaacatgtgactttgccaccgttactgcttcgggaattagaggtgatgcacagtgattaccatcgacttaatgatcaaatagcagagcaagatcgaaaattgaaagagtgggcgaaacaggaagagctctgtgagcttgtgaaaagtattcctggggtgggagatatggttgctactgcgttagtaatggaggtgggtagtgctgtgcaattcaggaatggccgagaaatggcagcttggatggggttggtgccaaggcaatactcgacaggaggcaaacataaactcttagggattagtaagcgaggtaataaacatcttcgctgcttatttgttcatggtgccagagctatgatgtctaggttaggacgaaataaagggccgtatgatgtttggctgctgaagctcagggaatcgaaaccctttaacgtggtctgcattgcacttgctaataagctggcgagaatcgcatgggcagtacttacaacaagaacgccgttccaaggaacggcgtgttaatcaggtttgcaaattaatgtggatgtaggaatggacataccagctagaaaggaacccgtcacaaaaaatagcacctagatgctttcggctttttagggctttctagcgcggagctcatcgtggagcgaggattaagcccctcaattagactccgaatacattagcgcaaaccatccctctaaatattagttgcaatatcgaggggaaccataca

SEQ ID NO: 9411 - DNA, 1367 bp, unidentified
  source 1..1367: mol_type = unassigned DNA; note = element_eba1267
  misc_feature 1: note = core
  misc_feature 2..42: note = LE
  misc_feature 43..1116: note = CDS
  misc_feature 1117..1367: note = RE
  misc_feature 1137..1358: note = bridgeRNA
taatgagatggtccgccgcctagtgagccagccagagtaatgatggtggttggcaaaagccagacggaggacattgtcatgcagattcagtcagtcggtatcgatctgggtaagaccacattccacctggtcgcactaaacggccattcccaagtagtaattcggaagaagttttctcgccaacagctgttggtcttcacggcaactctgccctcgtcattggtaggaatggaggcaggggtgggatcgcacttcctgggtcgggctctacgggagcaaggacacgaggtgcggctcattccagcgcagtttgtgcgaccgttcgtgaagtcgaacaagaacgactactgcgatgcggaggcgattgcggaggcagtggagcgcgagaacatgcgtttcgtgcccatcaagaccgaagaccagctcgacttgcaagctctgcatcgagtacgcgagcggctagtgtcgcgacgaaccagcgtcatcaaccagattcgagcgttcctgttggagcgcggcatcagctttcggaaagggccggctagcctgcgacgacagatgccggagattttggaaaacgcggacgagaagctgacggctcgcatgcgccgcctgttggattttctttggcaggagtggaaacatctgcagctgcagatcgagagcttgagcgaggatctggagaagatcgcgaacagcgacgcagcctgtgttcggctacagcagattccaggagtggggccgctggtggcgacagccgtggtatcagctatcggcaacggggccgcctttcacaagggacgccagtttgcggcctggctggggctggtaccccggcaatggtctaccggaggaaaaccgaaactgctggggatcagtaagcggggcaatccatatctgcgcaagatgttcatccacggggctcgggccgcggtgctgcgggtcaaacgcgaaggatcgtgtctgggccagtggatgagtggcttggaaagccgcgccgcccgcaatgtagtgatcgttgccactgccaacaagctggccaggatcagttgggcggtgctctccagtggcaatgactatcgcccgctgcacccagctgtagattgttccagctagacgaagtgacttgaaattcgcttcgcagaagtctgcagaagaaaaggaaggacgaaaacacagtcaaacggcgtgcccgagaacctgcgtcgtaatacggtctttcatgaccggggcgattattaaggacgggcacgcgcggatcatcatcatgcgcccggagaccactctccactagaggccggatacattttcgcagactgcttctcgtcccaactaattcctcttgcagttcggcggcggaccataca

SEQ ID NO: 9412 - DNA, 1398 bp, unidentified
  source 1..1398: mol_type = unassigned DNA; note = element_ebaf85d
  misc_feature 1: note = core
  misc_feature 2..89: note = LE
  misc_feature 90..1127: note = CDS
  misc_feature 1128..1398: note = RE
  misc_feature 1167..1390: note = bridgeRNA
caatgggatggacgcccccacccataaacgacatcgatgtgccagagtggaagtgtcatcgaccactcgaataggaaggagcgtccgccatgcagattacgacagtcggtatcgacctggccaaaaatgtcttccagatccacggtgcggacaatcggggcaaggcagttcttcggaagcgacttcggcgggatcaattcgccgcatttttcggcaatctgccgccctgcctggtaggtatggaggcctgcggcggagcgcatcactgggcgcggcgacttgagacgttcggacacaccgtgaagctgattgctccgcagttcgtgaagccctacgtgaagggcaacaagacggatatggcggatgccgaggcgatctgcgaggcggtggtccggccctcgatgcggttcgtctcgatcaagaacatcgagcagcagtccgtgcttgcgctacatcgggttcggcaggggtttgtcaaagcgcgcacggctcaggcgaaccagattcgagggctattggcggaattcggcctggtggtgccgcaaggtatcctctgcattcccagccgggtgccagggcttctcgaggacgccgagaacggactacctgaccggatgcggcatctgatcagccagttactcgagcattttaaggtgctgcacggccgggtcatagagatcgaggcgcagatcaaattgtggcaccgttccagtgagcgtagtcgccggctggaaaaggtgcccggtatcggtccactgaccgcgagtgccctagccgcagcgctgggcaatgcccggaatttcgacaacggccgccagcttgccgcatggcttggactggttccacggcaacattccagcggtggcaagccaacgctacttggaatgagcaagcgaggcgatgcatatctgagaaccttgctcatccatggcgcgagatctgtgatttaccgtgccaggcagagagcagacgagaaaagttggctgttcaatttagtcgagcgacgaaatgcaaacgtcgctgccgttgcactggcgaacaagacggcgaggatagtctgggcgcttctggcacacgagcgggagttccaagccgaccacgccgccgctgcggctgcagcgcagtgatgcagtcataggatcgtccataacggggagaatctcaccaccgattgctcaggctatcacgcagtgatggcacaccaggtaagaccgtggttggcacagcccgtcccggccgaggcaccgtgagtgcgcgtaagcgatagaggcgccgaccagcagaacccatcagggacagcgggcattgcctgcgcaaaaagtccggatgtacgggtgcaatcgttaccttcgtgccttctcgaactggtggcttggcaaggttgggggcgtccatgta

SEQ ID NO: 9413 - DNA, 1431 bp, unidentified
  source 1..1431: mol_type = unassigned DNA; note = element_ebaf98b
  misc_feature 1..2: note = core
  misc_feature 3..69: note = LE
  misc_feature 70..1104: note = CDS
  misc_feature 1105..1431: note = RE
  misc_feature 1202..1422: note = bridgeRNA
taatggtatggtccgccgccgacccgacagtgcagctgggttataaagggcgtacggaggaggagtgccatggagctattcacgctgggtattgatttgggcaagacgacgtttcatttggtagggatgaatcaactcggagaggtagtgttgcggaagcgattttctcgagtgcagcttttgcactttaccgcgaacctgaaggtgaagctgatcggcatggaagcatgcgggggatcgcattttctgggacgagcgttgcgggagcaagggcacgaggtacgactgatcccagcgcaatatgtgaagccctacgtcaagacgaacaagagcgactacatcgacgcagaagcgattgccgaagcggtgggaagaccgaccatgcgttttgtgccggtcaagagtgatgaccaactggatctgcagtcgctgcatcgagtgcgtgaacgctgggtgatgcgaagaacggcagtagtcaaccagattcggggacttctgctcgaacgtggcactacactgcgcaaaggccggcggtacgtggatgaagcattacccgggatactcgcgggtggcccgttcaacctgtcaggggcagtgctggtattgctcgcagagctgaagcaggaactggagcaactagccgagaagatcgaccgtgctgacaagtcgcttgagaagatcgctcgggagaatgaagcctgtcgaaggctggtcgtgatgccgggagtcggtcctgtgacggccaccgcgatcatcgcgacgattggcaacggcgcggcattccgcaaagggcgcgattttgctgcgtggctgggagtggttccggaggaacactcgaccggaggtaagcaaacattgtggaagattcctcggcgtggaaatcagtacctgcgcaggctgttcgtgcaaggagccagagccgttatgcagcaccggaccaagcagtcgtctggtttaagtgcatggctggcacaactcacggcacgaacacaccagaacatcgccatcgtcgcactggccaataaactggcacgaatggcctgggcagtgctggccaaaaatgagatttacaggccaccgttactagcgggcaatatcatctaaccggcctgcagatgacgcctggaagaacaccaggcttggaaatcgctagcgcgattcccacatccgcagaccggcgacggcggcggagttcaaattttcctgccaggtctgctggcgaagaaagagatggcaccacggtctaaccgtcgttctggaaacctgctttcggtaagggtctttgaagaccgagaacttaattaggaacagagcgaagcgcattccatccaggcccggggtagtcaatcaccccaacaaggccgtatacatacgcgcagaccttacctgctattctcacttttcgcttgcgacaaagcggcggaccataca

SEQ ID NO: 9414 - DNA, 1783 bp, unidentified
  source 1..1783: mol_type = unassigned DNA; note = element_ebb59b8
  misc_feature 1..2: note = core
  misc_feature 3..71: note = LE
  misc_feature 72..1235: note = CDS
  misc_feature 1236..1783: note = RE
  misc_feature 1271..1484: note = bridgeRNA
agaagctatggggcaggcggtcgtagaaaggcaggatcgctgcagttatcaacgccgatggagttatccggatgccccagcccaacgacctcagcagatcgcgtgcttctttcgagcaggacgcaacgatagtcgcagtcatcgagatgagccaatcaagttggctcattgccgggacggtgccgggaatcgaacgacagcccctgaagaagattgtgccggacgctgtggccctgctgcgcctgctgcagcgctggcgtgatgaggcaacgcgaggcggtcgctgcgtcgcacgtattgccgttgccttcgaggccggccgggacgggttctggctggcgcgatggctgatgcgacacgagatcgagacccatgtcattcatccgaccagcgtcgccgtttcgcgtgaacacaggcgggcaaagacagatcggctcgataccgccatgctgatgcgcgtgttcctgggctggctgcgcggcgaacgcggacattgcgggatggtcgcggtgccgagcctcgaggaagaggacgccaggcgcccaagccgcgagcgggagaatctggtcggcgaacgtacgcggatcgtcaatcgcatgaaggcggcgttggcccggcttggcatccgcggcttcaagccggagctgcgcaaggcagcgcagcaactggagtcgctgcacacgccggaggagtcgccgattccgcctaacacgctggatgaattgcggcgagacctcgcccgcctggccatcctgcgcgggcagatcatcgcgatcgaacagacgcgcttagaacgtctggagcaagcaccgcacaccggagcgaacgcaatgatccggctgctggccagcgtgatcggcgtcggcattgagaccgcggacatgctcgtgcgggaggcgctctcgcgcggcctgcgcgaccgaagagctgtggcgcgctacgccggcctcaccgggtcgcccgatgagagcggtaccaggcgacatgagaagggtctcgccaaatcaggcaatgcccgggtacgccgcggcatgatccagctggcctggcgcttcctgatgcttcagagggacagcgtgctggcgcaatggttccgagccaggacggagggtgtcaagggcgcgcgcaagacgacgatgatcgttgccctggcacgcaaactgctcatcgcgctctggcgcatggtcaccaccggcgaagtgccgcagggtgtcgtgctccgacagccaacctgatcggcgctgcaagaaaacagcacaaccggagattcgacgcccgcgatttgggccgtcgatgacgacccgaggtgtcggtgacccgaataatcgcatggcctccatgccgtccacagaatgggcccgccgcctcggagcctcgccgctgaagcggatggctgcttcatggtctggtccgacgtggggccaaccgaatacaaggtcgcggcgcgatcctttgcgcctatggcgggctcccctcggttcgtccgcacatcgcttctatcgaccacgtagctgtggatttgatggacaacgcggcgcgttgaccacagcctccacagctacagctacctatccagtaggccagactgattcttctccgcgaatagtggcagagaggcatgtatggacctctcgaaagaccctctgtcaccgtaacggattgaaagaatgtctttggaccacacaactcacgccatagaaggagttccacgccctgcgcaaccaccccaagcccccgtcgaatatcggaacaaaattctcttgacagcgataggccccataca

SEQ ID NO: 9415 - DNA, 1321 bp, unidentified
  source 1..1321: mol_type = unassigned DNA; note = element_ebb9625
  misc_feature 1: note = core
  misc_feature 2..69: note = LE
  misc_feature 70..1086: note = CDS
  misc_feature 1087..1321: note = RE
  misc_feature 1088..1314: note = bridgeRNA
taatgagatggtacgtacctcttcacagctaaactttgactatgtttagtgttactaggaaggtgccacatgtcgaacactcacatcatcggtatagatctcggaaaaaatacttttcacattgccgctcatgaccaaaacggacatgagttatttcgtaaaaagctctatagaaataaacttctcgaatttctatcaaatattgaaccgacaattatcgctatggagtcatgcggtggtgctcattggctcgctagaaaatgtgaatcttatggtcatacggcaaaattaattcctcctcaatatgtcaaaccatacgtgaagactaataaaaacgattttattgatgcttgtgctatagctgaggctgcatctcgtcccactatgagatttacgtctcccaaaactgaatctgcacaaataatttccacggttagaaaattacgcagcgggtacattcgtgaacggacatcatgtatgaatcgtattggttcaatattattggagtttggaattagccttcctaaagggcactctgctatgaagaacctctttcaatggcttgctgaacaagggcattatctccctccccagctactttttgaacttagtgaattacatgagcactatgagttactgaattcaaaggttgaaagccaacaaaggaaaattgaacgaatactctcagagagtaaacagatgcaacaattacaaaccatcccaggcgttggacctgtcattgctagcgcttgtatatctagtatcggtaatccctcagattttaaaaatggacgtaacttcgcggcttgggttggacttgtacccgttcaatgctcaacaggggggaaaacaacgctgcttggaatatccaagcgcggaaaccgagagctaagaacactatttattcatgcagcccgctctattttatggcgagataaatccgttgataaatactttggttcttggcttgctgaactaaagcaacgtaagccatttaacgtagctgttgtcgctcttgcgaacaaaatagcacgagttgcgtggtcagttatgatgaccccaaaaccattttcgccccaaatttaataagaatttgcaatggaaataaaagatgacaaaacggttagaccaccagattgaaaacctgttgccccaaacagcaacttagtatgctttaaactttgtgaggacaatctggcgcagatctcatcgtagagcagagactaatctaaatgaggtttctatcagactctgaatatattagcgcaaatcaactcgttatctggatcatccacttgcaataacgggacgtaccatatat

SEQ ID NO: 9416 - DNA, 1570 bp, unidentified
  source 1..1570: mol_type = unassigned DNA; note = element_ebc66bc
  misc_feature 1..3: note = core
  misc_feature 4..252: note = LE
  misc_feature 253..1452: note = CDS
  misc_feature 1453..1570: note = RE
  misc_feature 30..272: note = bridgeRNA
tttagtaccatagaagtgtagttgacagatatgtatatctgtagctgcacttgtttttgtataatgagggaaacagttggtctggcgtgcgcttttatggttcttgcatccgtcattaaaactgtcagccatccccttgttatacgaactcgtttaagcaggttgggaataactctcgcgtaacgaactaaaatgagttgtaatgagtgcggatggaaacaactgcaaatcaaaacacgaaggaggttcgttatggtaagtgttggaatcgatgtttctaaaggtaaaagtactgtctgtatgatcaaaccatatggagaaatcattgtcgggcctatggaggtaacgcatattgagtcagaattaaaggatttggtgaaggtcattaacggtttgaatgatgatgtcaaagtggttatggaagccacaggaatataccatttgccagtactgacatatctgaaagaaagcaggctattcgtgtctgtcataaatccatatcagatgaaacaatacaggtcacagggactgcgcaaagtgaagacggataaagcggattcgatagccatagccaattatggtattgaacactggtatgctcttaaagacttcgttgcatctgaagacaaatacaatgagctatcgatattaagccggcaatatcggcattatatgagacttcatgttgcatcactacaagagctgacacatgttcttgattatgcaatgcctggaatcaagaaccagttcaacagctggaatcctgaaaacggaaaggataaacttgcggattttgtagaaaaatactggcattacgataatatctgcaagaaatcagaaagacaattcgttgagagctatctgaactgggccagaaaaaaaggataccatccaaaccagaacaaagccgctaagatctattccatggctaaggatggcatccccacgttaccagcagatcaaaccactaaaatgctggtcattcaggccgtagaagtcctgagaagagtcgatgaaactcttagtacaatattatcacgaatgcaggaaatcgccaagactttacctgaatattctgtagttagatccatgggaggagttggggatatacttgcacctaaacttatcgcagacataggagacgtaagaaggtttcataacagcaaagccttaatagcttatgctggcatagaccctcctccatatgaatccgggcaatttattggtacgaaccggagcatgactaaaagaggctcttccgccatacgtaagacaggttatgaactaatgagagttctgaagacacacactgagccaaaagatggagcggtatacaggtatattctgaaaaaggaagcagaaggaaaacctaaaaaagttgccaaaatggctggactgaataaattcctgcgaatctattatgccagagtaatggaaatatacaacgactaaacaagaaaaaggaatatgcacgcgaggtttgctaaaaggcaagcctttttgaagtgagataaaatgagacaaaaacctgctatgaaagtcaaaattatgcttgacttttgttagcagg

SEQ ID NO: 9417 - DNA, 1637 bp, unidentified
  source 1..1637: mol_type = unassigned DNA; note = element_ebd328a
  misc_feature 1..2: note = core
  misc_feature 3..298: note = LE
  misc_feature 299..1483: note = CDS
  misc_feature 1484..1637: note = RE
  misc_feature 58..270: note = bridgeRNA
ctggtatattggaaatgactcatctaaaagtcattacaacataccttttcctttctatcaacctttatacccgtggttgattacggggttcattgtctgtatgattgaaatatgtgaatgtggatttgtattgctccttgtggctctgactactttagaaaggttcttaccactccttattccaaaataatgatgagttagatgagtctttgaattcgtatctcgttccaggttttatggtctaagtgctgtggtttcttcacttcacatactcttatttcagaaaggatgtgtttttatgtttcttgttggaatcgatgtcggtaagctctctcacatgttttgcatcatggattcttccaatggcgaaatcctcgtcagtcctgtttcttttaaaaacaataaacaaggctttgattttctgatgggcaacatcaagctttatcccaaagacaaattgctgatcggtatggaagatacaggccattatcatttcaaccttttgaagtttttactcgattccggttataccgttgcactcatcaatcccataacgaccgatcttacccgaaagatgcaactaaatcctaccaaagacgacaacctggataccatgaccatctgtgatgtcctggcttccagtcctcgtaaaaagggttacaggatttctgaaatcaataattttgaattttatgagcagaaacgtctgacccgtgaacatcacgatctcaaggaacaattaaacgtatatgccaataagcttcagaaatgtattgatatcgtttttcctgaatataactccctgtttaaatccaagtatggaactgtatatatgaaggtcttaaaagcgtttggctgtgcgaatgctattgctcatgccgatatccgcaatattcgcaaatgcttcgaaaccaataggaacggccgcactatttcactgacaccggaaaaattaaaagaagctgctaagcattcgatcgggtttccttcaaaggctgaagtgatcgaaatacgtcatctgatcgatttgatcgaattgatcaaagaacaaatcaacgatgtggatataaaaatagaagagttcagcacgcaacttaactctcctatcctcaccataccgggaatctcacatttctccggtacttctattttagctgaattaggagatttacgcaactattctaaggcgtctcaaatcatcaaatttgccggtgtttccccatataagcatcaatcaagtcaatatgaagcccaacatacagccattaccaagaagggatcacgatatcttcgcaaaacactttatcaggtgatcttacctgttattcgctacaatcctgtatttaacgaatactatcatctcaagttgtcgcaagggaaaggccatcgttgcgctcagggacactgtgtacgaaagttacttcggatcatctatcatctggtaataacgaatcaaccgtttgattcaactcttttaaaataagtcattactaaattcttagatcctctactaagttctttttgtcatgcctttttattcactatttcaaagatcgagacaacttcagctaactaacttcaataaatttttattttcagactttttcatacaatttacttgatttttatatagttag

SEQ ID NO: 9418 - DNA, 1427 bp, unidentified
  source 1..1427: mol_type = unassigned DNA; note = element_ebd3c20
  misc_feature 1..2: note = core
  misc_feature 3..137: note = LE
  misc_feature 138..1157: note = CDS
  misc_feature 1158..1427: note = RE
  misc_feature 1179..1425: note = bridgeRNA
agatggaatggacgcctccctctcgccgaggggagtgatgggtggagatgacatggaggagccctcgctgtacccgacggcatctaagtgccaaagtggagatgttgaataaccaccaagggtaaggagggctcgctatgaagattacgacgtttggcttggacttggcaaagcgggtgtttcaactgcactggatggatatggaaacaggtgaaatctttcggcgccaagtgaagcgcaaggagttgctcgaattctttggcaaccgagggccggcgctgattgccatggaagcgtgcggcagcgcgcacgactggggacggaaacttgtggcgctggggcatgaagtgaaactcattgccccgcagttcgtgcggccgttcgtcaagacgaacaagaccgatgcagctgacgccgaggcgatctgggaagccgcgcagcggccggggatgcggtatgtggcggtgaagagcgcagaccagcaaggcgtgctcacgatgcaccgggtgcgcgagcaactggtgaagatccggacgatgcaagtgaaccaactgcgcggactgctgtacgaattcggcgccgaactgccgcaaggtcggcaacggggggtcaaggagatcccgaacgctctggcgcagctcgaaagtgtcttgccggcgatggtgatcgaggcgctgcggcggcaactcaaatggcttggcgaattggaccgggacatcgccgagattgagaaaggactcgcggcatggaagaagggagacgccgccagccggcggttgatggacatcccgggggtcgggttgctcacagccacggcggcggtggcgacgatcggcgatgctcggagcttcaaatccggtcgcgagtttgccgcgttcctggggctagtgccgcgacagagcggcaccgggggacgagtgaaacttctgggcatcagcaagcgcggcgatgtgtatctacgtactttgctaatccacggcgcgcgctcggtcatcacccatcagaaaaagcgcgggccatggctcgaccagttgctggccaggcgaccgctgaatgcggcggtcgtggcgctggccaacaagatggctcgcacgatctgggcactgctggcacatgagcggaaataccagaaaggttacgcggctgctgtcgcgtagcaaatcaacaaaccacaaggaagctggatcaccaataggttgcgcaggttgatgtgcgattgatggcgtaacaggtcggaccgcggggaagagaagcctgatgaacggcaagtccttcgaggactcggagcagctgaggccttccccggcgaattccatcagggccagcgggctttgccgcctgcactataggccggatataagcctgcagccagatctcaagcgccaacacatcaaacatcacttgccaaaccgggaggcgtccatata

SEQ ID NO: 9419 - DNA, 1177 bp, unidentified
  source 1..1177: mol_type = unassigned DNA; note = element_ebe2315
  misc_feature 1..2: note = core
  misc_feature 3..206: note = LE
  misc_feature 207..1154: note = CDS
  misc_feature 1155..1177: note = RE
  misc_feature 3..181: note = bridgeRNA
cttgtatgctaggacttgaagggaggaggagggacaaagcccgattctgactgttggcgcagtacagaccgtgggagatttcgcccctcctcctttcacccaagcgccgataaagaatgcatctggctatgaccgacgataggaacaagcctgcgcctctgggtgagcccttcaagtgctcaaaaccatagcccggaggaagtcccatggcaatgccagttcctgtctcaaagccgatcgttggcgtcgatgttgctaaaaatgagctggtgatttaccacgccgaactcgatctgctggaagtaatcccgaacaacaaaaccgccattaaaaaatggctgaaggccctaccgggcaccgtggcagttgcgattgaagctaccaacatctatcacttggagttcgctgatctcgcctatgaagctggctgcgtgatctacatggtgggtggatatgagctcagccattatcgtaaaggtgtgaatatccgggctaaaaccgacgcccaggatgccaaattgctcgctcgctatttaaaaaacgaagccgatgaacttcgtccctggacgccgccatctcctctgtatcgccagcttttgagtcttttccgccgccgggcggcgctggtccaggcacgcgtcagcctgactcaaagctgggcgaatgagccgttactgaaggcctcttttaccgagcaggtgaagtcgatgcaaaagctagaaggcctgattgaaaagatgatcggtgatcgcctgaaagaagctggactgtcggatcagctaaagcgttgcttgacagttgaaggtatcggttttttgactggagcccgcttggttactagctttcaacgaggtgattttagaaacgcagacgctttcatcgccttcttgggcatggatttacgcgtttctaagtcaggacagaaagataatcgtcgtagcttgagcaaacgtggcgactcagaagctcggcgtcttttgcacaacgcagcgatggcagctagccgaacggctgcatggaaggagttttatcaagcgcaacgggcgcggggttacagcaccactcaggtgctggtaatgctggcccgcaagcttgctcgagtggtatttgccttgctaaaaggacaaagcgaataccaaccaaaggttggttgagggttgcccctcaaccatagaat

SEQ ID NO: 9420 - DNA, 1363 bp, unidentified
  source 1..1363: mol_type = unassigned DNA; note = element_ec002f9
  misc_feature 1..2: note = core
  misc_feature 3..78: note = LE
  misc_feature 79..1104: note = CDS
  misc_feature 1105..1363: note = RE
  misc_feature 1080..1350: note = bridgeRNA
tgatgaggtggacgccccccaacggccacggtgtgccaaagtggaggtgttgaagagcaccacttgagggaggcgtccatgggagaggttagcacgatcgggttggatctggcgaagagtgtcttccaggttcacggcgccgatgcatccggagccgtcctattccgtaggaagctgcgacggcatcaggttctcaccttctttgcaggccaaccgccttgtacggtggctatggaggcctgcggcagctcgcaccactgggcgcgcgagatcggccggctcgggcatgccgtccggctgatcccgcccgcttacgtgaagccgttcgtcaagcggcagaagaacgatgcggccgatgccgaggcgatctgtgaagcagcccagcgcccgaccatgcgctttgtggcgcccaagagcgagcaggctcaagccgctgccctcgtgttccgggcgcgtgatcttctggtcaggcaacgcacccagatcatcaatgccctgcggggacatctgacggaattcggcatcgtggtggcgaaaggacccgctcacgttccgcacctcgtgcgaactgtcgaggatctggacggaccaatcccggaactcgcgcgaccagttctccagatgctggtcgacacgctccgtcgcctggataagcaggtcgcggatctggatcgcgaggtcagccagcgggctacagagaacgagaccgcgcggcggctgatgaccatcccgggtgtcggtccggtcacggcagtggctctggccgcacttgcgccaccggccgagaccttcaagtgcggacgggactttgccgcttgggtggggctcacgcccttgcagcattccacgggcggtaagcagaagctgggagccacctcgaagatgggtgagcgaacgctgcgccgcctgctgatcatcggcgccagtgccgttgtgaggtgggcagcccgcaacggggctcccgcgggatcctggatcgcgcggatggtcgcgcgcaagccgccgatgctagtgcgggtggcgctcgccaacaagatggcccgcatcgcctgggcgctgatggcacgcggtgaagtctatcgggctccagctgtggcggcataagccgtcgcggctgaggggctgttggggcgtgggaaggtcagaaggagagagatggcgcaacggtcaccgagacgggatcaggaaaaccagctttgcgacaggtgcttcaagcacgtggctctgaattggacccgatccgcgaactcccatccgggcccgcggcatgtgagccgcagtagaggccgcacacatgtcagccctgaccacgcgctgcatcaaacctgaagatttctcttgcgtctcgcggggcgtccacaca

SEQ ID NO: 9421 - DNA, 1167 bp, unidentified
  source 1..1167: mol_type = unassigned DNA; note = element_ec008f5
  misc_feature 1..2: note = core
  misc_feature 3..202: note = LE
  misc_feature 203..1138: note = CDS
  misc_feature 1139..1167: note = RE
  misc_feature 3..178: note = bridgeRNA
cttgtatgtttagacttgaaggggtgggcgggactacagactcgattctgactctgaccagtacagaccgtgggagacttctcgtcccgccccttctacccaaagcgccaataaggaattcatcggtaaaccgacgacagagacaagccagcgcaacggtagaccccaacaagctcttaaaccctagctccgaggattcgtcatgacaatccttacttcgcagacggttgttggtatcgatatcgccaaggccgaaatcgttgtctatcgcgccgacctggaaaccattgaagcggtcaagaatgatcgtgccgccctcaaacgttggctcaaaactctgcccgcgcaaagcgctatcgctgtcgaagccaccaatatctaccatttggagactgttgatctggctcatgcgatgggacatcaggtctatgtggtggatgcttatcgagtcagccactatcgtcgcggtgtcggtcagcgagccaaaaatgatccctgcgatgcacgcgtgctcgcacgctatctgacgaatgaacaaagcaaactgcggctttggaacccgcctcctaaagcctacaccgtactgaaaagcttgctgcacagacgcgcgacgctgattcagaaccatacgggtctgatgttgagctgggccgacgaacccttgctgaagaaagaacgtacggctcagcaaaaggcattcgagcgatccgacaaggtcattcaaaacctgctgcgcaaagtcagcaaagaggccggtattgatgacaatattggccgctgcaaagcaatcgagggcgtgggagagctgactgcaacggggttggcaacgacctatatgcgcggtgactttgccaacagcgacgcgttcatcgcgtttttgggtatggatctgacggtggacgattcggggaaaaagaacggcccgaggttcctgagcaaaaaaggagatccggagatccgtcgactagcctacaacgccgcaatggcggcgtgtcgctcaaccaagtggaagcctttttacgagtcttacctggccagaggcttctcgaaaacacaggcattggtagctcttgctcgcaagctctgccgagtggcattcaccctgatgaagaatcagggcgaataccgatcagtttgagattctagggttgctgagcaacatagaat

SEQ ID NO: 9422 - DNA, 1621 bp, unidentified
  source 1..1621: mol_type = unassigned DNA; note = element_ec0132e
  misc_feature 1..2: note = core
  misc_feature 3..320: note = LE
  misc_feature 321..1361: note = CDS
  misc_feature 1362..1621: note = RE
  misc_feature 73..280: note = bridgeRNA
ctcttacctttgcaccagattatagataatgttctaattgtaagatgttaaacatccatattttttagggcatgcggtcagaattttatagttttgctagagattgtggccgtggagggtgagattatgtgccgctagataagcaatgaaagttatatcgcgaataagaccttttccacccttcttttaaagtctttagagtctgaacaaagaatcgaagtacgccatcgggtgatgcagtgtccactaagagtaaagtcgaagaagattttggctatagtctataactagagttattaaccctttaaacagttatcaagatgaagccaaattcacagatgacacttgacaagtactttaggcagtgtgtaggcattgacatctcaaaggataaattcacagcctgcctgtacatgtatgacattgccagtgatgtgggttgccacaccgagagtattgatttcactaacaccaggactggtttcaaccagatggtgaaatggagccgtagggaggcacagaagggatttccattgacttacctgatggagcctacggggagctattatgagccgctggcatatcacttgaataagattgggcagacggtctatgtggtgctgcctaacaaggcacgcaagttttgcgagtacgagggcatcaagaccaagacagatgcaatggatgcacgctgtctggcacttttggggtgtgcaaatcgtaagcttcgcccatgggagcctcccaagcctatttatcgcgaattgcgtcaactcacacgactcagggcatcgcttgttaagatgcagactcagttaagaaatcacatagaggctgtagatcatatggagagtgcttcgaaagaagtacgaaaaagctacgagaaactgttggataccatagacaaacagttggaaaagaatgagcaggccattgccacgaaggtcgcccaggacaaagaactggaggccagaataaagcgtattgctacggccaaaggcatcagaacaggcactgtaacatgcatcgttgcagagacgcagggattttacctcatcaacaaccgaaagcagctcacaagctttgcagggcttgacgtagtggcgaaacaatccggtaaggatgatcctaagcacaaaatctccaagaaaggaaatgcttatatccgggcagcactctatatgccggccttgagtgctgcatattgcaacaggcagatgaatcagacatatatgaatatatgtgataggcatccagacaccaagatgataggtgttacggctatcatgcgtaagatgctgctacttgtatactcgctttggaaaagcggcgaggaatacgatgagacaagggattcctaacaaaagtggctgcgcctcaagctacagccacacgagatagtacaaaactggtgattgacaccagcgacttcccttagtggctgcaaagatacaacaaaatcagtagaactgcaaaggaaaaagagaaaaatataccatatcgatattatcggatcttggctggagccaagaagtgtctttgttgtctcaaagcatttgcatgccattaatgttaaaatgtcctatttttcatatccaaaatttggaaatatgcacagaat

SEQ ID NO: 9423 - DNA, 1391 bp, unidentified
  source 1..1391: mol_type = unassigned DNA; note = element_ec08e72
  misc_feature 1..2: note = core
  misc_feature 3..246: note = LE
  misc_feature 247..1371: note = CDS
  misc_feature 1372..1391: note = RE
  misc_feature 49..242: note = bridgeRNA
ctaataagtgttatcgggtcggccgtgcggcagactcggtgcgaggtggctgccggcaggtgagcactggtcgtccccgggctgtggagcccttgagcgcagatcgtgcccctgccggtgtccgggagagttgatcgctgctgggatgtcgtgccgcgccgggtggggtgagcactgttttattagggcgctgatggttctcccgcaggccgctgacgagattcggtatctgggacgggagagctgatgcggctgttcgtgggcgatgactgggctgaggaccatcacgatgtggagctgatggacgcggcgggccgggtgctggccaggaggcggctgccggaaggggtggcagggatggcccggctgcacgagctgatcgggcagtacctgggcgaggacgaccaggacgcggaggtggtgatcgggatcgagaccgaccgcggcccgtgggtggccgcgctggtcgccgccgggtacgtggtgcatgcggtgaacccgctgcaggcatcgcggtaccgggaacggcacggcgtgtccggggccaagagcgatcagggtgactcgcacatgctgaccggcatggtgcggaccgattcgcatcagatccgggtggtggcgggcgacagcgcggacgcggcgggcatcaaggtgctggcccgcacccataagacgctgatctgggaacgcacccgccacacccagcggctgcggcaccagctgcgcgagtacttccccgccgcgctggaggcgttcggggacctggccgctgacggcacgctggagctgctgggcaaggcgcccgacccggcccgggccgggaagctgacccgcgcccaggtcagcgcggcgctgcggcgcgcccgccgccgcgacatcgccggcaagacgacagcgatcctggcggcgctgcgcggcccgcagctgggccgggcgccagctgtcaccgcggcctacgccgccaccatcggctccctgatcgcggtgatcaccaccttgaacgagcaggtcaaggccctgcaaaggcaggtggaggagtattttgggcagcacccggacgctgagatctacctgtcccagcccggcatgggcgccatcctcggcgcccgggtgctcggcgaattcggcgacgacccccaccggtacgccgacggcaaggcccgcaggaactacgccgcaaccagcccggtcacccgcgcctcgggcaagaagaaagtcgtcgcggcccggttcattcacaacgaccggctcatggacgccctcatggcccaggccttcaccgccctgaacgcctcgcccggcgcccgcgcctgctacgaccagttccgcgccaaacgggaaaaatccccgcaatccgccgtcgctgcttgacatctaagctcctgggatgt

SEQ ID NO: 9424 - DNA, 1598 bp, unidentified
  source 1..1598: mol_type = unassigned DNA; note = element_ec0c178
  misc_feature 1..3: note = core
  misc_feature 4..298: note = LE
  misc_feature 299..1468: note = CDS
  misc_feature 1469..1598: note = RE
  misc_feature 71..275: note = bridgeRNA
tcacgtataatataattatccgaattttaagggatagttatattatttctccttcctttaaaatttttcttatttgcttataccaaaggtcagctgcctttgatataatatataggcactgtggatttgttcataatttttacagctttgactggtcaggagtgactcaaaccacagtttttcgccttcattgttaatcagttagttaacgctttgacgtttttattcgcgtgattacattgtcggaattcttgtggaaaacaacagtgcttaattcttactaaggaggttttatttaatgtactttattggtattgacatttccaagtacaagcatgactgctttattgtttcaagcgagggcgaagctccatttggggtgttttcttttgagaataacaaagcgggttttgagatgttccttgataaattaaattctcttgattctttcgaagaaaagagaatagggtttgaatcaacatctcattactcattaaaccttaagttattccttgaaaaacacaattatactttcatggaatttcaacctgcgcttattagtcaatacggaaaagctctaacgcttagaaagactaagaccgatgcaatagatgctcagactattgctcgttggttaatgaatattgattacaaaccctatccacattcattttaccacaattattcgctaaagtcactaacaagattaagattttctttaattaaacaaagaaatttatatttaattaagcttactgacatattagaccatacttttcccgaatttaaaccgttttttaacgatagattcggagtgactgcactacatatccttgaaaaatacggtaatccctctaagattgccaacatgaggacaacctcttatgatgaacttcgccgtatttctcgcggcaagttctctatgcagaaattccttaagctaaaagaacttgcaaaggatactgtcggcgaatccaatcatatttttgagcttgagctttcctgcattttacgactttacaaggaaattgatgatgaaatcactaagctcgaggaggaaatcacagttctcacaaatgaactaaatcgtccgactatgactattccgggtgtaggtgttttgtctgccgcagttattctatcagagtatggtgatgtgtccaaatttaagtctccggctcagatgttatcttttgcaggacttgaaccggggtattatcagtcaggacaatcggagcatacagggcatatggttaagcgcggttcatcacatcttagatgtgcaattatgaactgctgtttaccacttattcaattcaatatggtattcgccgaattttatgcaaagaaacgaggtgagggtaaacctcatagggttgcattatcacacgttgccaagaaactcataagggtgatttatacgctcgaaaccacgaaccagccttttgatgccgataagctgcgttaattatttctttatttaatttcttttagaccttttttaaaattttgcctaaaaaggtctgtttgccatgcaattttattttttgaaaaaaattttgtttttttctcaaaaactcttgacttttaatagttag

SEQ ID NO: 9425 - DNA, 1621 bp, unidentified
  source 1..1621: mol_type = unassigned DNA; note = element_ec0cce3
  misc_feature 1..3: note = core
  misc_feature 4..278: note = LE
  misc_feature 279..1469: note = CDS
  misc_feature 1470..1621: note = RE
  misc_feature 26..298: note = bridgeRNA
tttggtacaatataagcatagtctcaaactgctgaatgaagtagtgacaggctatgcttattttagtataataggaaggtaatggactgacgttttttctttagaacttcgcgttcgttgctgaaagtgtcagccgccttcttattatagattcgattaagcaggttgtccctgctgtgagaaatcatggcagcgtgcgagtaactaaccaaaatgaattttaataagctcctgagcgggaacattacaaatcaattcattagaaagctggtatcattatgattagtgttggcattgatgtttcaaaaggaaagagtacggtatgtattctgaaaccaggcggtgaagtaatcaaaccgccttttgaaatcaagcacacagccgagaaactcgacgccttggtttctctgatcaattctttcgatgaggaaacccgtgtcgttttagaagatacaggtcattatcatcttcctgtagcttcctatctttcttctcaaggcgtatttgtttgctgtgtcaatgcgttgagaatgaagaagtactgttcgcaagacatcagacgggcaaaaactgataagatagatgccgtacggatcgcatcgtttggaattacctactggtcggaactgatgaaagcttatccaatgtccgatacatatgatgagttgcgtttccttgctcgacagtattatcagattacatctgtccttgttaaggaaaaagtaaatctcagcaatctgttggatcaggttatgcctggtatctcagatgtccttcaagatcagaaggggtatcataagctgacagaatttgtagaccgctacatccatttccaaacaattctggatatgggtgagaagaagtttactgcgaattactgtaaatgggcaacgaaaaagggataccgttgtaacgaacgaaaggcagctgaaatctttgcccttgctcaaaacggtatcccatcgcttcctaactcccaatccatcacaattgccgttagagaagccatcaagcggattcactcaacagaggaatcgcgcaataccattttatcacaaatgcaggaactttgcaagaccttgcctgaatattctgttgtcagagaaatgagcggcgttggagatatcctgacaccatgtatcatcgccgaaattggtgatgtgcgccgtttcagaaacaagcattctctgattgcgtatgccggcatcgatacaccgccatatcagtcaggagcatttaatgcttctgagcgaaagatctctaaacgtggaaattcatatcttcgcaaaacaggctttgagattatgcaatcactcattcggaataagcccattgacgatcccgtatatgcctttatacagaagaaacgcagcgagggaaaatgcggcaaagaagctatgatcgccggacttaacaaatttctacgcgtttactacggcaaagtcatggagctatatgctgagacataactgttgtcagaaacacatactcgtcaagcgtttgaatgctgtatttctaacgctgtctttgttgtaccctctaaactttcaacacaccaacactttcaacaaagcattgctttcaactttggctgttttgccgattgatttttcttagcagg

SEQ ID NO: 9426 - DNA, 1574 bp, unidentified
  source 1..1574: mol_type = unassigned DNA; note = element_ec13376
  misc_feature 1..2: note = core
  misc_feature 3..570: note = LE
  misc_feature 571..1428: note = CDS
  misc_feature 1429..1574: note = RE
  misc_feature 3..227: note = bridgeRNA
ctcgtattattaatttgtagcttttctttacctgttcttggtaatcagctactattgttatctgatgctgtggattggttccaatctcctaccgcgcgacggtttttgtaaggctccaaccacagcctctttgttacattgttgatcagttagataccgcatgacggtttatgtagaacgaggatacaatcagcaaagagccctgtgggtcgataacagcatcaaacactttttacaggaggatttactaaatgatttacattggaattgatgttgctaaggataagcatgactgttgtatccttggcccagataccgaagaacttttccaagtctttacgatacggaacaatagcgatggctatggagaattattccacaagattgagtcagtctcaaaggacaaatctcagataaaaataggactcgaggctaccggtcactattcctacaacattctgggatcacttcttgaccatggctaccacacctttgtcatcaatccgttacatacaaatcttttacagaaaaggtcaaagcctttagaaagacgaaaaacggataaagtcgatgcccgctccattgctgaaaatgcttgtgactgataagacactcaagccctatacaggtacatcctaccacagcgaggagcttaagtcattaactcgttatcgttttgagcttgtcaaagaacgtgcgaaactgaaaacttcagtatctaggcttgtaaacatcctgttcccggaacttgagtctcttgtttcgactctgcacatgaactcggtataccgtcttcttcaggaactgccgggagcatattttatcgcaagttccaatctcacccacctgaaagctctacttgctgattcttcaaaagggcactatggtcgtgaaaaggccatcgaaatcagagagactgcaaaatcttctatcggatcacttatgcctgctaaatcaatggaactcaggcagacaatccgccgaattgacacactgtcttccgatattaaagaagtcgagcagtccattcaaaaaatcatggatgagtgtggttctccaattacaactattcccggcatcaagtatcgtatgggtgcaatgattctggcagagattggagactttacacgctttagcaatgcagatcaagttcttgcttatgcaggactatctccgtctacgtaccagtccggacagctaatatcttcttatgctcgcatggaaaaacgtggctctaagtatctgcgttacgcacttttcaatgctgctatatatgcttctgtatgggacgagcgattcaggctttatctgtcaaaaaaacgggcagaaggcaagcactactatgtcgcaataagccatgtggttaaaaagcttgtcagaaccatctttcggatggaaataactcatacgtcatatcagcctttataagttaaattagctcataatcttttctgagagcatcatcgctgatgctctattcgtcatacagttttcaatgtactaatctatctaaaatacgtttccgtattttattctgaaaatctaaattttatgcttgaccattaatagttagt

SEQ ID NO: 9427 - DNA, 1441 bp, unidentified
  source 1..1441: mol_type = unassigned DNA; note = element_ec17c13
  misc_feature 1..4: note = core
  misc_feature 5..424: note = LE
  misc_feature 425..1432: note = CDS
  misc_feature 1433..1441: note = RE
ctcattggatgacaatggccttgcgggccaggttggcctgttcgccgggagcggcgagggacggcctcgatgtctcgccactcgatggcctgtttgagctggtcgccctcgtcgttgtcgggaggcgtgatcggcgcgagagagctgccccgatgagggccgaacaatgaggaaccgacggccgccccgactccaacggcgatgtccggccgggaggtcaacatatgttctgcggatgggactggggctcaactgtgcacggggtatgcctgatcgatgatcagggtgcgctcgtcaagagctggatggttcagcacaccgaggaccagctcgctaatgtcttccgggagctcgctcagctcgttggcggtgacgttggacaggtgccaatcgcgattgagcggggtgaaggcctggtcgtcgggtgatcgccggagccggtcacccggtctggatggtcgaacccgccgccttcaaggcagcgcgtccgcggtggggctcagccggcgcgaagtcagacctcggcgacgccttcaagcttgccgactacgccagaactgacggccatcagctgcgccgagtcgaaccattggagcgtgccactcgagaactcgccgcgttggtgcgggcacgcacagcgttggttgaggcccgcacggcggcgtccaaccagctctgggcgatccttgccgagcactggcccggtgcggccatggtgttccaaaagctgacctctcagatcgcgctcgcgttcttgaccgactacccgaccccacaagccgcagcacttgtcggtgagggtcggatgggtcagttctgccgtcgacacagctaccgcggcgggaagagcccggccgagctcgtccgcaggctgcgcgccgccccggccagcgcgaaccccatcgcgcccaagatcctcgaagcgatcgtgcgttcctcgaccgcgcagatccggctgctcaacaccgagatcagccgtttggaagccgacatcgcccacgcacttgccgcccaccccaagacgccccttctgcagacgctgccgcgcgtcgccaccgtcagcctcgcagccctgatcgccgagatcgggccgctgctcgaacgttgcgaaaaccccgaacaagtggccgccatgtgcggcgccgccccagtcacccgagcctccggcaagtcgcgcaccgtcagcttccgctacaccgccaataagccggcacgcgtcgcgatcaccggcttcgccgacaactcacgacactcctccgcgtgggccagcgacgcctaccgacgagcacgcgcacgcggcgcccgacacccccacgccgtccggatcctcgcgcgcagctgggtccgcgtcatctggacctgctggaccaccgacaccatctacgaccccgcacgacaccgaaccgaacaactcatcaccgcggcgacttgaccaagagag

SEQ ID NO: 9428 - DNA, 1428 bp, unidentified
  source 1..1428: mol_type = unassigned DNA; note = element_ec1d47b
  misc_feature 1..2: note = core
  misc_feature 3..130: note = LE
  misc_feature 131..1147: note = CDS
  misc_feature 1148..1428: note = RE
  misc_feature 1192..1427: note = bridgeRNA
gaatggaatgaacgcccccactgcggccggtgaggaaatgcaggaaggtggatcctcgcgggccgacggcatcagagtgcccaagatgggagatcatgacgatttcccaaggcaaaccggaggatccacgatgaactatacgactgttggggccgatatcgccaagaacgtcatgcagttgtactgggtggatccaaataccggcgaaatcatgaacaaggcaatcaagcgatccgcatttcttgaacacttcgcaaatcgtgctccctgcctggtaggcatggaagcatgcggaggcgcccagcattgggccagacggctgctggaaatggggcatcaagtgaagctgatacccgcgaagttcgccaaggcgttcaatattcgtaacaagaacgacgctgcagacgctcgtgccatctggatggccacgcagatgcccggcaaatctgtggcagtcaagacagaggctcagcaagcgatacttgccctgcaccggatacgccaacagaagattaagttccgcaccatgcagatgaattgcctgcgcggcctgctgaccgaatatggcgaagtgatgggcaagagccgcgcggccctcgataaagccattccgggagtgcttgaaaggctcacggatcgtctacctgccatgctcatcgaatcattgcgcgaacagtggaatgatcttcagaatctcgatcgccagatcgcagaaattgagcggcgtctgcgaggatggctgaaagacgacgaggcatccaggaagatcgcggcgatcccgggcgtcgggctcctgacttccaccgccgccgttgcaacaatgggtgacccgaaagcgttcagaagcggtcgcgaattcgcggcgtggctcggcctcgtaccaaagcaggtgggcaccggaggcaagaccgtactgctaggtataagtaagcgcggtgatacatatttgcggaccttgctcattcacggtgcgcgcagtgtgctctcgcactcccgggagccaggtgcatggatcgatcaactcaccagacggcgacatcgcaacgtggtaatcgtcgcaatagcgaacaagatggcccgcaccatctgggccatccttgctcacgggaagccatacgaaaaggaccacgtcagcatggcggcgtgattgtgaggcgcaatacgaagcagtaaaaccgcttacaggacggagtgcacgtccaaaggttgcggtggcaatcgagtgtgatgacatgacaggtcggaccggaactcgcacagcctggattacagagagagccttgagctcgtggacggaatgaggcgcgagttagcggatttcatcggggcctgcagcgaagcaggctgcaagaaggccgaatgtagagctgcaacctaacctgtcactcaacacatgcgaaaaccctcgcaaacgggggcgttcatgta

SEQ ID NO: 9429 - DNA, 1488 bp, unidentified
  source 1..1488: mol_type = unassigned DNA; note = element_ec2ed69
  misc_feature 1..3: note = core
  misc_feature 4..265: note = LE
  misc_feature 266..1465: note = CDS
  misc_feature 1466..1488: note = RE
  misc_feature 54..233: note = bridgeRNA
cccgttacttttttgaggagccctagttctgttgtttgtgcgggatgatgggtttgttggctggacgatcccggcatgattgtctgcccctgtcttttgaatgatccggggggtgttgtcaccgggatcggacagacatgttcgtgattgctgatcaggggcgtggcactggaataggatgcctgccgtaacgtgggtgtaaggcggatgtgtttgccctaaggccaacgaagttaaccgtttctacctcgaaggcgagagcatcatggaacctggagatttcaagatctggctgggtatagacgtgggaaaggctgaccactgggcaaccgctgttaacgattccggtgagctggtttactcccactctttgcctaacgatgaaagcaaactacgcgcgatttatgacgatctagcagcccaaggtcgtttgctaatagttgtcgatcaacccgcgacaattggcgctttagctgtcgcagttgcacaatcgatggcaatcgctgtcgcatatctaccaggcctggcgatgcggcgcatcgcagacttatacccaggcaatgcgaaaactgaccaacgcgatgcgttcatcatcgcccacgcagctcgtacaatgcctcacacgctgcgaactcttcgcactatcgacgaagacgaagccgagctggggatgctcaccgggttcgacgacgacctcgcacgccagatcacccagactcgtaaccgcatccgcggtttgttgacacagattcacccaggactagaacgcgtgattggaccacgcctggaccatccagcaatcctagccatgctacaaacctggcctgttcctgccgcattgaagaaagctggccactctcgcattggcgccaaactcaagaaacacggagccaggcgctggcaagcatgggccaatgagattatcgacgctcttgccacacagacagtgaccgtgacaggcacaaacgcggcagccattgtcatcccacacctagcacacaccttagccgggctctaccaccagcgtgatgatatcgagacacaaatcgagaagctggtgaccgaacaccctctttacccggtcctcacctccatgccaggaattggggtgaggaccaccgctgtgatcatcgccgagcttgcaggaaaagaattcgactccgccgccaatctcgcctcctacgcaggcctagtaccaagaacacgtcagtctggaacatcaattaaatccgagaacgtatcccacacaggcaacaaacgcctcaaacgagccctattcctgtccgccttcgcttccctacgtgccgatcccatttcacgacgctattacgacaagaaacgccttaacggaaaacgacacaaccaagccatcatcgccctagcccaccgacgcctaaccgtcatctacgccatgttacgagacggcaccttctacgaaacccagccccctaaaaaagccgcctagacttgacagaagacataggggca

SEQ ID NO: 9430 - DNA, 1553 bp, unidentified
  source 1..1553: mol_type = unassigned DNA; note = element_ec3c328
  misc_feature 1..2: note = core
  misc_feature 3..242: note = LE
  misc_feature 243..1322: note = CDS
  misc_feature 1323..1553: note = RE
  misc_feature 3..218: note = bridgeRNA
cttgtattataattgaaatagtagttttagtgattttctaaaagatcatatgctacactaaaagggatgctgtggattggttttccctcctaccgcaagatggtttgtaataggctccaaccacagctccttgcagttttgttaatcagctagataccgccagacggttgatgtagaacaaggttacaatgcaaggtgttctgtggatacagcatcaaatcttacatctggaggttctgcttatggtttgcgttggaattgatgttgcaaaggacaatcatgactgctgcatcctgtgctcggaggggaaggtgttagcgaacgtgttcaccatcaccaacagcatggaggggtttcaactccttctggagaaaatccacaactgtgtttcatctcaagatagtataaaagtagggcttgaggcgaccgggcattacagctataacctcctgggattccttcttgacagcggcctaccaacctatgtcttgaatcccctgcacaccaacctgtaccgaaaaagcctctccttgcggaagactaagaccgacagagttgacgcgcgtaccattgcgattatgctcttgtccgatttgggcctcaagccctacacggatacagcataccacaacgaggaactaaagtcactcacaagataccgatttgacaaagtgagagaacgagcgaaactcaaacaatccgtttcccgtctggtctgtatcctgtttcccgaactggagaagctggtacccaacctccacatgaactccatctacgctctccttgaggagtttccaggagccaagcagactgcggcggcgaacctcacccggttgaagactcttctgtccgaattttctaagggacattacaagcgagatatggcggtaacgatccgggatgctgtcagagcctctgttggctccgttatgtccgacaaatctctggaactcaggcataccatccgcctcatctgggaactggacactgaaataacagatattgaagcatctattcagtccatcatggaggaactgcactctcccattactaccatccccggtatggggctgcggatgggggccatgattctggccgaggtgggcgacttctcccgctttgactcacccgacaaggttttggcttacgccggcctttctccttccacctaccagtctgggcatctcaacgactgctacgcccacatggagaagctgggttccagatacctgcgctttgcactttacaacgccaccaagtacgtttgcatttgggacaccacctttgccgcctaccttgcaaaaaaaacgagcagagggtaagcattacaatgtagccatatcccatgctgctaagaaactggtgcggctcatctatgcgattgagaagtccaggcttccttaccagccggtggcctccgcgtagttcatcctgcatgttcgttcctcggtgtcctcacgaacacctgtttccttgtgcccttttaccatcttgtggtactacatcctctctttcactttcagctcatttcagtgcttgacttaatagttagt

SEQ ID NO: 9431 - DNA, 1165 bp, unidentified
  source 1..1165: mol_type = unassigned DNA; note = element_ec4220e
  misc_feature 1..2: note = core
  misc_feature 3..158: note = LE
  misc_feature 159..1073: note = CDS
  misc_feature 1074..1165: note = RE
cttgtattagcacagaccgctagaatgtagctgttccgtggggaacggtccggctcggatgacggtccgagccggaccgccggccgtcggatcgtgtgctccttagcgtcatgcgctgctcctgagcgagatcgcggccggctcttcatcgggcccggatggttgacggaaccaagggttcgcatcgcaaggaagggacgacgaagatgaatgagaataacatcaatgccgccggcatcgataccggcaaagccaagctcgatgtggcgttggccggaggcaaagcccggcttcaaatcgacaatgccttgagcggttggcgcgagctcgcgacatgggtgaagcggcacaacgtcgatcgcatcgggatcgaagccagtggcggatatgagcgtggtgtggtggcttatctgcgggagaagggatttaccgtcattctcttccagccccttcaaatccgggcctatgccggattccgtcttcagagggccaagaacgacaggatcgatgccgatctgattgctgcctgcacggcagctaccaccaccgtcagacaggctcccgatccgcgcttccaagccttttgcgaacatctgacactaatcgagcagatcgaagaagacatcgtccgggccaagacccggctcgaagccttccgcgatagccggcatcgcgagatcctcgcatccgagatcaaacgcctcaaagcctggcgcacggccgagctgaaacggctcatcgctgcgcttcgccgccatgatgatttggccaatcgtcttactctcatcgaaagcgttccgggcatcggaccgcgtacggctctggcactccttatccgtatgccagagctcgggagcctctcgcgcgaagaggcggcggcgctggcaggccttgctccctatgatgacgacagtggaaagcatcaaggcttgcgccatatcgccggcggacgcgaaaggctgcgcagaagcctcttcgccgcagcccttccagccgccttccagtggaatccgagcttggttgcgctctacgtgcgcctgaccggcgctggtagtcgcacaaggtcgccctgatcgcttgcgccagaaagctccttatcttcgccaataccgtcgttgctcgtggcaccccatggaccgaacatcacgccactgcataatggttg

SEQ ID NO: 9432 - DNA, 1366 bp, unidentified
  source 1..1366: mol_type = unassigned DNA; note = element_ec42693
  misc_feature 1: note = core
  misc_feature 2..67: note = LE
  misc_feature 68..1111: note = CDS
  misc_feature 1112..1366: note = RE
  misc_feature 1114..1356: note = bridgeRNA
tatgggatggcccgcccctctctccggccgcgtaggctggggcaaccaaagggagaggagcggagcgatgcaaatagccgtgttagggatcgacctgggcaagaacagctgcagcgtcgcgggattggatgcatcgggcagggtagtgctgcgccggcgcctgcatcgtgacagcgtggtgaagttggcgtcgcgcttgccagcctgcgtgatcgcaatcgaggcttgctgcggcgcgcatcatctcggccgcattctgcagatgagcggacacgagatccggcttatgtcgccggaatacgtgcagccctacgtcaaggcgcagaagaatgacgagcgcgacgccgaagccatcgccgaagcggcgacccggccaacgatgcggtttgtcgagctcaagagcgagcagcaactggacatgcagagcctgcaccgtgcccgctcgcggttggtgggcgagcgcacggcgttgattaaccaactgcgcgccgtgctcctcgagcgcggcatcacggtggcccaggggcggcacaggctgcaacggtatctcgcgctcgcattggatagtgactacacgccgccagtgccgctgagcccgcgcctccgcctgctcatcgacgatatgcaggcacaatggtccgagcttgatcggcggatcgcggcattcgatgccgaatttgtcgccgaggcccgcagcaatacggccgcgcgacggctgtcgaccattcccgggatcggcgtcctgaacgccaccgcgcttattgccgccgtcggcgatgcacgaagctttgcacgtgctcgcgatctcgcggcctggctcgggctcgtcccgcgacaagcgaccaccggcggcaggcccaggctgctcggcattaccaaacggggaaacaaatatctgcggaccttgctgatccacggggctcgggcggcgctgccctcgctcgcgacaaacgagggccgccttggcgactggctgcgcggcctaagcgcacgcgcccatcgcaatatcgtggtcgtcgcgttggccagcaaactggcgcggattgcctgggcggtgctgcgatcaacgacaatctacagcgccgcaaccggcgagccgtcggtggcgtaaacgagattggctgccgagctgtgtgtggccagtaagtgcgaatctgcgggtggcgaaagcgagatggcctgacggttgaaccggcgctctggaaccctggtttaaaaaacggcgcatcgatgccgtcgtctttatgaggaccagggcgcgcggacctccatcttggccggggcagcagctccgagaccggatacgttgacgcagaccggtcagatcacctcgtacaagccccttgcggatggggcgggccatacg

SEQ ID NO: 9433 - DNA, 1586 bp, unidentified
  source 1..1586: mol_type = unassigned DNA; note = element_ec485bc
  misc_feature 1..4: note = core
  misc_feature 5..298: note = LE
  misc_feature 299..1576: note = CDS
  misc_feature 1577..1586: note = RE
ctcactggtgcaccatcctctggtcggcgtgctcggtgagggcgtcgatgcaccccgggtgccaccaggtcactgcccggctcgcttgacgcgttctagcagtgcgatgtccgtcgtgagatctgcaggatctggtggtcgctcggagtctgtggaccgtcgatagggctgtgcgccaaggctggggttgccggctgcgagcgccgatcagtgagcgaaccggcaggcagactccggcaccaacggcgccgtgtgacgagggtgcctccccactgggtctagcagcgaggaggctgacatgaagtctgccagcaacaccatcgatagtgaatcgtctgggtctctgcccgaggttgcggtcaacgacgtgaccggtgggatcgattgggcccgcgatgaccacgccgtgagcatcgtcgatgcccgtggccgtgaactcgcccgcaccatggtcgagcacaccgccgctggtctgcgtgagctgaccgggttcctcggccggcacggtgtgggtgaggtcgcgatcgagcgccctgacgggcccgttgtcgacacgctcctggacgctggcctcaccgtggtggtgatctccccgaaccaggtcaagaacctgcgtgggcgatacgggtcggccggcaacaaggacgaccggttcgacgcctacgtgctggccgacaccctgcgcaccgaccgggcccggctgcggcccctgatccccgacaccgacgccaccatcgcgctgcgccgggcctgccgggcccgcaaggacctcgtcggccaccgcgtcgcggccgcgaaccagctccgcatgcacctgcgtaacgtcttccccggcgccgtcggactgttcgccgacatcgactccgagatcaccttggcgttcctgactcgcttcgacacccaggaccgggccgactggctcacccttcaacgcctgggcgcctggctgtccaggcagggctacagcggccgcaccgatcccgcggtgctgcaccagcgcctcctccacgccacccgcggagccaccggcgaacacgccaccagccaggcccacatcacccacgccctggtggaactgctcaagacgctggtcgagcagatcaagacactctcgacccagatcgaccgccagctcgacgagcacgccgacgcgcacatcttcacgtctctgccccgcgccggccgggtccgcgccgcccggctgctcgccgagatcggcgactgccgagcgaagttccccacccccgaatcgctgacctgcctggccggcgccgcaccctcgacccgccagtccggcaagtcccgcgtggccggattccgctgggcctgcgacaaacaactgcgcgacgctgtctgcgacttcgccgccgacagcagacgagccaacccctgggccgcccagctctacaacgacgccatcacccgcggcaaagaccacccccacgccgtgcgcatcctcgcccgcgcctggctctacgtcatctggcactgctggcaagaccacgccgcctacgaccccacccgccaccaagccctccaacgactcctcaaccaagaccaaccggagccggcttgacatagggctt

SEQ ID NO: 9434 - DNA, 1536 bp, unidentified
  source 1..1536: mol_type = unassigned DNA; note = element_ec4cd4e
  misc_feature 1..3: note = core
  misc_feature 4..262: note = LE
  misc_feature 263..1429: note = CDS
  misc_feature 1430..1536: note = RE
  misc_feature 13..241: note = bridgeRNA
tcttgtatactctatttaatgattatagtattaagcgagtatacatttcctttcttaatattttatactataatcaaaattaaggcactgtggatttgagtcatttatatgtagcttagactaccataaggagaatcttaccacagttcttattttttactattaattagttatctagcgctagacgctttatcacaagagtataggaataaggatcctgtgtcaaacatcagtgccaaataattttaaaggggtgatttacatgtatctagtcggtatcgatatcgctaaatacaaccaccaatgcttcatagctactgaagctggtgaagttatcaatgaattttcatttgataacaacttattaggttttaatgagttattaaaagccttaaagtccttagaccaaagccaagaaataaaaatcggccttgaagcaacaggacattacgctaacacattaaaacagtttatctcagcaaaaggttatacattcgtagaatttaacccttatcttgcaaaacagttcttcaaatccaccacaattagaaaaactaaaactgataaagttgatgcaagattactgtctagtatgttagccactgttaactacaaggccttacatactaaatattatcacattaatgaattaaaagcactcacaagggctagagattcattaataacagatagatctaactatctcgttcagataacaaacgctttagataacgtatttccagagtttaaatcctttttcaataatagacttggtgatactgccctttatattctaaacaaatataatagtttagaaaagatatctaaaataactagaaaccaatatgataaaatcagaagggtttcaatgggcaaatttacctataataaattattactcctaaagcgactagctaaagattctgtaggtataaaaagcggaacttatttttctttaattaaacgttatataagtttaatcaatagtcttaataacgaacttaaaataattgaaaacgatatttatgaaatcatgaatatggttgacactaaactaacaactattcctggattaagtttaatgtctgcagctattatcattggagaaataagcgatattaaaagatttagtagtccaagtaagctaactgcgtatgctgggtttgacatcgctatttatcaatcaggcgagcaaaaattctatggtagattagtcaaaagaggatcaccgcttttaagaaaaactatttggaacttagtttttggatctattcgactaattccacaaataacagagttttattacaaaaaacgcgctgaaggtaaacatcataaagtggcatattctgcgatttgcagaaagttaattaggttaatatattttattgaatcaacaaatactacatttgacataaaacaatatagataattaataatttgtagctaattattaaatctaaataattttaaatttaggcctaatatttaggttttttcaaattgatctagttaaaatacttgactattcaatagtta

SEQ ID NO: 9435 - DNA, 1375 bp, unidentified
  source 1..1375: mol_type = unassigned DNA; note = element_ec4ef67
  misc_feature 1..2: note = core
  misc_feature 3..244: note = LE
  misc_feature 245..1282: note = CDS
  misc_feature 1283..1375: note = RE
  misc_feature 13..227: note = bridgeRNA
ctatgtttgttgtgaaatttaaaaataataaatttaacatatttaagtgaaaaagagtgagagttgatttgtgcccaaacaacttcttatagtatgttctcacggagatattgcctcactcttttttgccttttagaatctgaacagaatgtaaggcgtatttattttgaagtatagccaggatatccaaccaggagaaaagatgaaggagggcaattcacttttactaattaaataaagaattatgtcatctattgtaaaacaggttgtaggtattgatgtggcgcaaaaggaactggtagtgtcacttgggagaatgagccatgacacaggtgttgagatatacgcctataaaatattttcaaatacttcaaacggttttagcagccttagctcctgggtggataaaaagactgtaaaaaatgttgatgttcggtacgtgatggaagccaccggtgtttatcatgaacatttggcttattatctttcagatcaggacaagcgcctgagtattgtccttccaaacaagatcagcaattactttaaaacacttgatgtaaggactattactgacaagaccgcttcacaggcgatatgccagtttggactagagtggaagcttgaagactggcagccacccaaaaagatattcagaaagcttaaacagcttacccgtgaaagagaccagctaattacggatagaacggttttgaaaaaccagcttcatgccgagctggtggagcgattccctaaccagagcagtataaaaaggatatcaaaacgtatccagctaatcaataaacaggaactggaaatcagaaacgaactgtctaaaacattaaaagaagattcagagcttgttcgcaaagtagatcatatcacatcaatccctggcgtgggtaagctaacagctttgattacccttgctgaaaccaatgggtttgaactgataaaaaacaaaaaacagctggtaggctatagtggacttgatgtaagggtcaaagactcgggaacctctgtaaaagggaaaccgaaaatatccaaaagagggaacagacatttaaggaaggcaatgcatatgccagccctaacagcaataaggcataaccagcaacataaagctgtgtttgtacgccttgtgtccaaacacggcataaaaatgaaagcagtagtagcggttcaaagaaaaatactcggacttatatataccatatataaaaccgacaagtgctttgatgctaactatagtaagattgaggtggaaaacgaagtaaattgttagagcagccattaaaaatgaactgccctaatgaagctagcttagagctgccttggactacaaaattaaaaattaatttggatatcaacacagaat

SEQ ID NO: 9436 - DNA, 1166 bp, unidentified
  source 1..1166: mol_type = unassigned DNA; note = element_ec57995
  misc_feature 1..2: note = core
  misc_feature 3..161: note = LE
  misc_feature 162..1160: note = CDS
  misc_feature 1161..1166: note = RE
  misc_feature 1..200: note = bridgeRNA
cttgttatagcgggatcgattattgtcggcgcgttccgaaaggaatgctctgccgcggacggccatccgcggcagagcggctggcgatcggatcgagcccaccctgagccatttctagctgcagcgtagcgtgatcgcgtcagcgccttcatcggacccggatggttgccggaacgaatggttcgctcaacaaggcggggtcgacgaagatgacgcagattagcacaacggcgggaatcgatacatcgaaagctaagctcgacgtggcgcttgccggccgggtcgagcgctggcaggtcgacaacactctggcaggttggcggcgccttgccgccgagttctcgaaaaccggcgtcacacgggtcggcatcgaggccagcggcggctacgagagcggcgtggtcggctatttgcgcgacaaaggcttcaccgtcctggtcctgcagccgctccaggttaaagcctatgcccgcgtccatctgcgccgggccaagaacgacaagctcgatgcggttctcatcgctgcctgcacggcgacgatcgatcggccgcgtatcgagccggatggtcgtttggcgaagttggcgcagcatctgacctttatcgaacaaatcgaagaggatatcgcccgcttcaaggtccggctcgaacatgtcggggagccgcggttgcggcgcttggtcgtggccgacatcgctcgactaaagcaacgaagggccaccgaactcctgcgcattgtcacagcgttgcgcgcccacgacgatctcgctcatcgtctcgatctcgtgctgagcattcccggtctcggcgagcgcaccgccagcgccctcatcatccgcatgccagaactcggtcgtgtcagccgcgaagaagcagcagcgctcgccggtctcgcgccttacgacgacgacagcggaaagcacaaagggcagcgacacatcgccggcggtcgaggacggctacgccgttcgttgttcgccgcagctctgcctgccgcattccattggaacaaagctctcatcgatctctacagacgactgacggcgcgcggcaaagcccacaacgctgcgctgatcgcatgcgccagaaagcttttgatctacgctaacaccgtcgtctaccgaggaacgccctgggtcgaaagaaccgcggccacttaatggttg

SEQ ID NO: 9437 - DNA, 1383 bp, unidentified
  source 1..1383: mol_type = unassigned DNA; note = element_ec660e5
  misc_feature 1..2: note = core
  misc_feature 3..92: note = LE
  misc_feature 93..1118: note = CDS
  misc_feature 1119..1383: note = RE
  misc_feature 1150..1381: note = bridgeRNA
cgatgtgatggtctcctccccacctaacttcggcatcgtagtgtgccatgattggtttgcggtcaatcaacaaggtgaaggaggagaccacgatgaaccatacgcttattggactggatttggcaaaaagtacttttcacgccatcaagttggatcgccatggcaagctccgctggcgtaggaagtactcgcgggcccaactgatccgctactttgctgcccggcgtgctacccgtatcgccatggaagcctgtggcacatccaatcactgggcgcggcaactcactgccatggggcaccaggttgagttactggcccccaaacacgtaaagggctatctgcgcggccaaaaaaatgactataacgacgcccaggcgattgcggaggcggctttccacggatcgatgcgtccggtgccggtcaaatccctggcgcaacaggacgcacaggtctttcatcgcatacgccgtcagttagtaggcgagcggatacgtctggtcaatcagatccgtgggttattggcggagtatggggtgaccatcccccagggcatcaagcatgtccgccaaagtgttcccggcattctggaatcggctgataatgagctgacaccgcggtttcgggcactgttacatcgccagtaccgtcggttggtagcactggacgaagagattgactggtacgctgagcaattggccacacaggtcaaggaagatgaggtatgtcagcggctgatggagattccggggtttggtccggtggtaagtagcgcaatggcatgctggatgggtgacgggcatcagtttcgcaaggggcgggatgcctcagcggcattaggcgttgtgccacgccaattcaccagtggagataaagaacgattgggtggaatcaccaagcgtggagactcttatgtacgcactcaggtcatcaatggggcgcgggcggtagttgcccaggcaaggcgtaaatctgacccactgagccgttggattaaccgcctggtggatactcggggttataaccgcgccgtggtggccttggccaacaaactgattcggatcgcctgggtggtgattgcccgaggcgagcgctaccaacctcgagaagtgttggtatagctgctaatagttaatggattgaagtaggaagcctaccccaggttgcgaaggcaaataggcaggagatgacataacaggtcacaccgacgtactgaaaccctgtagtgctcactggcaacaaatgccgcttctgcgattaggacggtacgtgcgacaagctcatcgaggccagaggcataagtctcaccaacaggccggatatacgacagctaacctgtactcatcacccacctaaatgtcttgcaaacggggaggagaccatata

SEQ ID NO: 9438 - DNA, 1494 bp, unidentified
  source 1..1494: mol_type = unassigned DNA; note = element_ec6b16d
  misc_feature 1..2: note = core
  misc_feature 3..175: note = LE
  misc_feature 176..1474: note = CDS
  misc_feature 1475..1494: note = RE
ctaataagaactaccgggtggacgagagtcatactcgggtccggtagccgccggtaggtgagcactctccccgccaggacgcttgcagtcctagtgtcagatcgtgcccctgctggtggtcgggagaccagaccgctgatgggatgtcgtgccttgccgaggttggcgtgagcacttgtttattaggtcgctggtcgttctcccgcaggctagccaggcaatactgtccactatggattggagtaccgggttgctgttcgtcggggacgactgggccgaagagcaccacgacgtcgagctacagaatgagactggccgggtgttggccagggcgaagctgcccgagggtatcgcgggcatcgccaggctgcacgcgatgatcggcgagcatctgggcgacgaagacggcatgacggtggtggtcgggatcgagaccgaacgcggcccgtgggtacaggcgctcatcgcggcgggttaccagatctacgcgatcaacccgttgcaggtggctcgctaccgcgagcgccacggtgtctccggggccaaaagcgacactcgtgacgcgcacgcgctggccgacatggtgcgtactgaccgccaccagctacgcccggtcgccggtgacagcaccgaagcggaggcagtcaaagtccttacccgggcgcacaagacgctgatctgggaacgtacccgccacttgctgcggctacggcatgcgctgcgtgagttcttcccggccgcgctggccgccttcgacgatctcgccgccgtcgacacgctggaactgctcggcgccgcccccgaccccgcctcggcggccgccctgaccacacaacagatcaccgcagcgctcaaacgcgcccgccgccacggcagggccgcaaaggccgaggcgatcactgttgcgctgcgcgccgagcacctagggcagcccgcggtcgtgacggccgcctacgcggccactgtccgtgcccaggtggcgatcctggggacgctgaacagcgagatcaagaccttggaggagcaggtcggggcaaattttggccagcacccggacgctgaggtctacctcagccagcccggcctcggtgtcgtgctcggcgcccgggtgctggccgagttcggcgatgacaaggatcgttacgccgatgccagagcccgcaagaactacgccggcaccagcccgatcacccgccagtccggcaagaaaaagatcgtgctggcccgatacgtgcacaacgaccggctcgtcgattcccttggcctgcaagccttcgccgcactacgcgcgtcacccggcgcccgcgcctactacgaccaactccgcgcgaaaggcaccggccaccgcgccgcgctacgccagctcggcaaccgcctcgtcggcatcctgcacggctgcctcaaaacaggcacacactacgacgaaaacaaagcctggacaccgatccagcaagatctacaacttgctacttgacaaaaaacatcatgggatgt

SEQ ID NO: 9439 - DNA, 1172 bp, unidentified
  source 1..1172: mol_type = unassigned DNA; note = element_ec7157d
  misc_feature 1..2: note = core
  misc_feature 3..221: note = LE
  misc_feature 222..1169: note = CDS
  misc_feature 1170..1172: note = RE
  misc_feature 10..197: note = bridgeRNA
cttgtatgttctaggctaggtacctgtcgaggggtggagggacgtgcgaggcttctgcaagcgacaagccagacagtaggagaattcccccaccccttactcaccacaagcgccgataaagaatccttcggtcggagcgacaacccgaaccgacaataccggcaagcctgcgcaacgtgagttttcgacaggtcgctcaatcttcaccgtcggagcacgccatgacaagccccacgcccgttatcggtatcgatgttgctaaagattccctaagcctgttttgtgcagcctctggccaggcaattgagatcggcaatgacacccgctcgattcatacctggctcaagcagctaccggcatctagcgccatcgccatcgaggccactgggatctaccaccttgatgtagcgtcccttgcgcaggctcagggtcatcaggtctatatcattaatggctatcggctcagcaattaccgcaagggaatcggtggtcgcaacaaggatgaccgtagcgatgcccggttgctatcgcgctacctgacccatgagcgcgaacagttgcagccctggcagccgcctcccgaggcctatcggcggttacagatcctgctgcaccgtcgcgccgtcctggttcgtagtggtgtctccttgcggcaaagcttttcacaggagcccctgctcaaagacgtcctcaaaccgttgctcgagcaactgagcgccgttgaaaagcgcttggaaaaactgatcaaccaagtcctgagcgaatcaggcctggccgagcaaagtaagcgctgtcaggccgttgaaggtatcggcccactgactgcggcaggcctgaacatggcctttctcagaggaacctttcgcaatagcgatgcgttcatcgcctttcttggactagacgtgcgcatgaaggagtcggggcgatattgtggccaacgcaagatcaccaaacagggcgatccggagatccgccggcttctgcataacgctgcgatggccgctgcccggacccagcggtggcaagaggtctatcagggttacctcaagcgtggactgaaacgaacagaagccttaaccatcctggcccgtaaactggcgcgcatcgcctttgcactcatgcagaaacaagtcgattacaaccccaggcaaggagggtcgttgacatagaat

SEQ ID NO: 9440 - DNA, 1359 bp, unidentified
  source 1..1359: mol_type = unassigned DNA; note = element_ec78661
  misc_feature 1..3: note = core
  misc_feature 4..85: note = LE
  misc_feature 86..1108: note = CDS
  misc_feature 1109..1359: note = RE
  misc_feature 1104..1332: note = bridgeRNA
tgatgatgtggacggccccacccaccggtatcgagtcgtgccatgatggtgctgtcatcgaccatcaacaagaggagccgcccacatggagattaccacgatcggcctggatatcgcgaagaacgtctttcagatccacgggatcgatgcacatggtcgcgccgtgcttcgccggaaggtcaggcgggaccaactgcttgcgttgttcggcggcctggatccgtgcctgattggcattgaggcttgtgcgacagcacatcattgggcgcgtcagctccaggcgcttggccatgaagtacggctgatgccaccggcctatgtgaaggcatatgtgaagcgcaacaagaatgacgcagccgatgccgaagcaatctgcgaggcggtgacgcggccgacgatgcgcttcgtaccgatcaaaacggccgatgcacagagcgtgttgatgctgcatcgtgcccgccatctgctggtgcgacaacggaccgcgcaagtgagcgcgatgcgggcacacctggcggagtatggtgttgtcgcgcccaagggtcgcacccatgttcgcgaattggtcgatgtactcaccggcggcagggcctcgatcccagagctcgcgcgccaaaccctgttgctgatcgccggcatgatcgacgggctgagccaacagatccgcgcgatcgaaatcgaattacgaaagtggcatcaggccaacgcgacatgctgtcggctggagacgatccccggtatcggcttcattaccgccacagcgcttgctgcgaccgtgggcgatgccaaggttttccgctcaggccgccagtttgctgcatggctcggcctcgtgcccaaacagcattcctcgggcggcaaggatcggatggggggcatatcgaagatgggagaccgctatctccgtcatcttctggtcgtcggagccaccgccgccatccgctacacgcgtcgtaaaacgacgacggtcagcacctgggttgcccaactgctcgagcgcaaaccagcacggctcgtcagcgtcgctgttgccaacaagacggcacggatcgcctgggctgtcatgacgcgagaagagaattaccgcgcggctcgggctactgcctgaagcgcgcgcggaacgaggttgggcaggagagaacgacacgagtgatgccaacccggtcaagccggggatcggaagaacctgactgattcaacgcgcttcaagcgcgccatcttgatgaggttccgatccaccgacaccatcatggccagcggcctttcgcgccgcgcgaacaggccggacacatgaatgaacctgaccaggaaacatcatccgtcgaaaatcaatcttgctcaagggcggccgtccacaca

SEQ ID NO: 9441 - DNA, 1377 bp, unidentified
  source 1..1377: mol_type = unassigned DNA; note = element_ec79357
  misc_feature 1..3: note = core
  misc_feature 4..224: note = LE
  misc_feature 225..1043: note = CDS
  misc_feature 1044..1377: note = RE
  misc_feature 1109..1364: note = bridgeRNA
tgatggggtggacggcccctgtgtccggcgtcgagtgcgccatagtgtggtcgttgttgatgtggccacagaacaggaaccgtccaccatgatgactaccacgatcggcctcgactcgccaagagcgtatttcaggttcacggcgttagcagcgaaggacgggttactgttcgccggaagctgcggcgtgctgaactcatgaggttctttagagatttacccccgtgcctgatcgcatggaagcgtgcgccaccgcccattattgggcccgtgaactctctgccttgggccacgaagttcggttgatgccgccgagttatgtaaaggcctacctccgccgccagaaaaatgatgcggctgacgctgaagcaatctgcgaggctgtgacgcgtccgacgatgaggttcgtgccggtcaagagcgctgagcgtcaagcgatcctgaccttgcatcggaccagggagttgctggttcgacagaagaccacgctgatccgggccatccgtagccattgcgcagagttcggcctcgtcgtcccgcagggcgcgcgacggatcactgatctcctgcagttggtgcgagagacacatccttcgacgcttccgcaagcggcggtgctgacaatgcagatgctcggtgcccagcttgatgccctggccgtacaaatacgcacgcttgagcggcgactgctggcttggcatcgcgagaacgagacaagccagcgtctggccaccattcctggagtcgggattatcacttcaaccgctctggcggccagcatcagcgatccaaaactgttcaaatccggtcgtgagttcgctgccttcctgggactggttcctcgacaaaactcatctggtggcaaggagcggttggggccaaatctccaagaagggagatggctatctgcgcaagctcctcgtggtcggggctacgtcggtgatccggcgtgctcgaaccggtgtgacgccatcagctggctgggtccaggcgttactggagcgtcggccatcccgcgtcgtgaccgtagccatggccaataagaccgcccggattgcgtgggcggtaatggcgcgaggcgagacctacagacctatcgctaaggtttaaccgagattgctgcggaccattggtttgtagctccgaactggaagggtgcatatgggatgatgatgatcaggtagtggccgcaggctgggaaaacccgaggtactgtcggagccttgagctcgatagcctgattgggacctggtccagcggactccatcagggccagcggccatcgacgccgcacaaacaggccggacagatgaccgcaacacccagatcgtcacttcaaaccagattcacccttgcagtgcaggggccgtccacaga

SEQ ID NO: 9442 - DNA, 1492 bp, unidentified
  source 1..1492: mol_type = unassigned DNA; note = element_ec806fa
  misc_feature 1..2: note = core
  misc_feature 3..244: note = LE
  misc_feature 245..1471: note = CDS
  misc_feature 1472..1492: note = RE
ctaataagagttatcgggtcgccgatgcggcagactcggtgcctggtggccgccggcgggtgagcactattgcctcctgggctttgagccctgtgcctagatcgtgcccctgccggtgaccgggagagttgatcgctgctgggatgtcgtgcccccgtccgtgggtgagcactgtctttattaggtcgccgatagttctcccgctggctgctgactggattcggcactgcgatcgggagagctgatgcggctgtttgtcggggatgactgggccgaggatcaccatgacgtggaggtgatgaacgaggccgggaaggtgctggcgaaaaggcggctgcccgagggtgcggccgggatcgcgcagttgcacgggctgatcggcgctcatctgggcgaggagccggacgaggcacaggtgatcgtcgggatcgagaccgaccgcggcccgtgggtcgcggcgctggccgcggccgggtacctggtgttcccggtgaacccgctgcaggcggcccggttccgggaccggcacggggtgtccggggccaagagcgatgccggcgacgcgcacgcgctggccgacatggtgcggactgattcccaccagctgcgccccgcggccggggacaccccggaggccgggggcatcaaggtcctcgcgcgcacccacaagacgatgatctgggaaagaacccgggaagtgcagcggctccggaaccagctgcgcgagtacttccccgccgcactggaggccttcgaggacctggacgcccccgacaccctggagctcctcagcaaggcacccgagcccgccagggccgcgaggctgacccgggcgcaggtgtccgccgtcctcaagcgcgccggccgccggaacatcaccggccggaccaccgccatcctggccgccctgcgcggcgagcagctcggccagccgccggcgctcaccgccgcctatgccgctgctacgcgggcgctgaccgcggtgatcagcgccctgaacgagcaggtcgagggcctcgaacagcaggtgaagaaccattttggccggcacccggacgctgagatcatcttgtcccagcccggcctgggactggtcctcggcgcccgggtgctcgcagagttcggcgacgacccgcgccgctacgccgacggcaaggcccgccgcaactacgccgccaccagccccctgactcgcgcctcgggcaagaagaaaaccgtcacagcccgctacgtgcacaacagccggctcgtcgacgccctcaacgcccaggccttttccgccctgaaagcctcgcccggcgcccgcgccttctacgaccagcagcgcaccaagggacacgggcacaacgacgccctcaggcgcctggccaaccgcctcgtgggcatcctccacggctgcctgaaggcccgcaccctctacgacgaagacaccgcctgggctcaccgccagcaaacccagcaggcagcttgacaagctaatcccctgggatgt

SEQ ID NO: 9443 - DNA, 1406 bp, unidentified
  source 1..1406: mol_type = unassigned DNA; note = element_ec881c7
  misc_feature 1..2: note = core
  misc_feature 3..76: note = LE
  misc_feature 77..1123: note = CDS
  misc_feature 1124..1406: note = RE
  misc_feature 1133..1393: note = bridgeRNA
tgttgggttggacggcccctacggcatcgatgtgccagaatgaggttgttagcgatctcaaacgatggagccgtccatgagtgatattattcgaattggtatggatacgtccaagaccgtttttcagctgcatggggtggatgttagcgagcagcctgtgttgcgcaagaagcttcgccgccgccaggttctggacttttttgccgttttgcctcctgcgcaggtggggcttgaggcgtgcgggtcctcgcatcactgggcgcgtgagttacggaagttggggcatgaggttgcgctgatcccgccacaatacgtgaagccctatgtgcagcggagcaaatcggacgcagctgacgcggaagcgatctgtgaggcgatgagccgtccgaagctggccaagagcttcgttgctgtcaagagcgctgagcagcaggcggagcagatgctggcgaagctgcgcacgcagtttcttggccggcgcacgcagctttccaactcgatccgcgggtttgcagcggagtttggtttggttgccccaaagggtctgttccagatcaaccggcttgttaatcagatccgtgcggacgagacactgccggagttggccctggatatgttcgaaacgctgttgcgtgattacacaagggtcgacgaggaaatcgcaggtctcaatgcaaagctgcaagagctgcatcgcaacagcgaagtcagccagcggctggccggtatcccgggcattggtccggtcggcgcgaccctgctggcgatcaaggtgagcgatgcgcacgccttcagatcagggcgcgacttctccgcctggctcggcctgaccccgaaaaaccattccacggcgggcaagaaccggctcggtgtgatcacccgcgccggagatgaaatgctgcgtgccacactggttgccggagcaagtgcggtcctgctgcaagtgcggcggggacgaatgaaaaccctctggccctggctggacaagctgtgtgcgcacaagccccataagctggctgccgtcgcgctggccaacaagctggcgcgcatcgcctggaagctgatggtcagcggcgagacttatcgcccactgtctgtgcggcacgaaccggcaagcgtgtgagcacatacaaaacaccgccccggccctgaacaagccagcgcggcagaggaacttgcaagggaagatgagaaggtgtgttcggtcgatccgaggcagatgggaaataccgtgggatccagtggcggcttcaaagccggtatcgctgtactgtttggaacctgtctgctgcggaacccatcttggccagcggtctcacggatcgcaaaataggccgtacatatgaccgcaagcgatccggagcacctgcgaacttaaaccttgcgaccacggggccgtccacata

SEQ ID NO: 9444 - DNA, 1360 bp, unidentified
  source 1..1360: mol_type = unassigned DNA; note = element_ec8c29b
  misc_feature 1: note = core
  misc_feature 2..70: note = LE
  misc_feature 71..1108: note = CDS
  misc_feature 1109..1360: note = RE
  misc_feature 1131..1351: note = bridgeRNA
taatgggatggtccgccgcttcagatggaccggcggttggagtataagaggcggagggaggaggcatcccatggaactacacaccatcggcattgatcttgataagacagtctttcatctagtggggcttaacctgcaaggcgagattgcggtgcgtaagaagttctcacgtacacagctgttgcggttcaccgcgaacatacacgtcgagttgatgggcatggaagcttgcggaggggcacattttcttggccgggcattgcgggaacagggtcatgaggtgcggctgatcccggcgcagtatgtgaagccgttcgtcaagaccaacaagagcgactacatcgatgcggaagcgatcgctgaggctgtcgcacggccgacgatgcgttttgtgccgatcaaaaccgatgaccagctggatatgcagtccttgcaccgggtgcgcgagcgctgggtgatgcgtcgcaccgccatcatcaaccagattcgtggattgttgctggaacgcggcataagttttcgcaatgggcgccgccacgtggaggccgccttacccggaatcctggaagacgccgatgcgaagctatcgggcgcattgcgcgtgctgctggcccaactgaagatggatctcgatcagttgggtatgcggatcaacgaagccgacgcggtgatcgagaaggccgctcaccagaacgacgcctgccgacggctggtggcgattcctggcatcggaccactcacggccaccgcactcatcgcggcgattggcaacggaggggccttctgcaagggtcgggagttcgcagcctggatgggtgtcgttccgcgcgaacactccacgggtggccaacagaagctgctcggtatcagcaaacggggcaactcctacttgcgaagactgttcgtgcagggtgcgcgtgcggtgatgcaacagcgcacgaagcagtcttccgggctgagtgcgtggctggcccagctcactgcgcgcacccaccgcaacgtcgccgccgtggcgttggcgaacaagttggcccgcatggcttgggccatgcttgcaaagaatgaagaatatcgcccccccgtgttggccgatatcgcggcagcctagcgactactgcggagaccgtgatttctttccaggtctgctggcgaatcatgagatggcacaacggtcgaacccgacgctctcaaaacccggactcggaaacagtctctcaagactgcgatagttatggggaaaagagcgcagcgcattccatcctggccaggagtgatcaactccgacaaaggccgtatacatttgcgcagaccatatagtgacgcctcacatttcgcttgcggcgaagcggcggaccataca

SEQ ID NO: 9445 - DNA, 1563 bp, unidentified
  source 1..1563: mol_type = unassigned DNA; note = element_ec8e191
  misc_feature 1..2: note = core
  misc_feature 3..262: note = LE
  misc_feature 263..1432: note = CDS
  misc_feature 1433..1563: note = RE
  misc_feature 3..239: note = bridgeRNA
cttgtatgatattgaggaagatcaatatcacatctttcctttctttttaatatcgtggttcaatacattcagatactgtggacttttgattttgccctgtagctctgactactctataggagtgtattgccgctacctttatctgaattgtttatagctggatgttgccggagcaatccgagtacttatttccatcaagtctacgatgataatcgctggtggatatcacggtatcagactttagaaagggaggtacaacctcatgatgatttttgttggcattgatattgccaaacttaaccattttgcatctgccatatcttcagatggcgaaatactcattgagccgtttcaattcacaaatgacggtgatggcttccaactgctgatctctaaactcgattctttcgataaagacagcctcatcatcggtcttgagtcaacggcacactacggcgacaaccttgtccgatatcttgttgcttcgttctacaaagtgtgtgttctcaaccctatcaagacttcctctatgcgaaaaaataacatccgcaagacgaagactgataaagtcgacacttacatcatttgtaaaacacttatgatgcaggaccatctcagatttgtaaccttctacgatctcgaccttatggatttgaaagcacttggtcgttttcgccagaaaaccattaagcagcgaacccggcttaagattcagctgacttcttatctggatgaagtatttcctgaattacaatacttcttcaaatctggtttgcatcaaaagtctgtttatgcgcttctcaaagaggcgccaacaccggaaactattgcttctatgcatatgactcacctggctcatctcctgaaatcgacttcccacggtcattttgataaggagacggctcagcagttaagagttctggcagagaagtctgtcggtgccagcgacagcgctttatctattcacgtaactcacacaatctcacagattgagttacttgatagccaattagaaagagttgaagctgaaatgactgaaatcatgaaattcaatgattctgtcatcatgaccattccaggtatcggatatatcaatggtggaatgatcctgggtgaaatcggtgacattcaccgtttctccaactctaataagctgcttgcatatgctggcttagatccttctgtttatcagtctggtaactttcacgctaccaaaacaagaatgtctaagcgtggatccaaagtccttagatatgctctaatcaatgcagcacataatgttgtaaaaaacaactcaaccttcaaggcttactatgatgccaagatggctgaaggccggactcattataatgctcttgggcactgtgccggcaagcttgtcagagtcatctggaaaatgatgaccgacgaagtcgaatttaacctcaagtaagaggtctggataccaacatcatagatttgaaaatggcacccaccagggagctttattaaagttacccttttttaccacgaaaagaagtttttaatttccagctaatttaaggttgacttttcatagctggt

SEQ ID NO: 9446 - DNA, 1396 bp, unidentified
  source 1..1396: mol_type = unassigned DNA; note = element_ec98cbb
  misc_feature 1..3: note = core
  misc_feature 4..89: note = LE
  misc_feature 90..1121: note = CDS
  misc_feature 1122..1396: note = RE
  misc_feature 1092..1382: note = bridgeRNA
agatggggtggttgccgcccctcccagacggcatcgcaatgtgccaaaatagtggtgttataggccacttagcggaaaggacggcaaccgtgacgaaagatacaatgattggcgtagatttggcaaagtctgtttttcaactgcatggcgcctcaatgacgggtgatgttcggttcaagaagaagctttccagggatggttttttgaagttcatgacgggcaaggctccggcggttgtagtgatggaggcttgcggcagtgcgcattactgggcccgtgagatggtccggctcggccacgaggtgaggctgatcgcaccgcagtacgtaaagccgtttttaaaacgtcagaaaaatgatgcggcggacgctgaggccatcgtgatcgcggcacaacggccggaaatgcgcttcgtcgagccgaagtccccagagcagcaaagccggggcattttgtttcgggcgcgtgagcggcttgtgcatcagcgcaccgaactggtcaacgccgttagggcctgcctttatgagtacggccacgtggttccgcaggggatacatcagatcaaccggatcgaagaaatcctgaatgagccgaacagtgacctgcccgatttgatgcgcgaagaatgtcaggacctactgaaacagatcgctgaaaaaacggcgcgcattgatgcacgaactcacaagatcaaggcactggctgaagaaactgacgtggcgcggcgtttgcagaccattcctggcgtcggccctttgacggccttggccgtcgaagcctttgccccgcctatggaaagctttgagtgcggtcgcgacttctcagcttggctcggccttgtcccacgccagttctcctccggcggaaaggaaaggctcggcaaaatttccaaggccggacagtccgatatccgcaggctactcataatcggcgcgatgtcgcgcctgaactggttgggacgtaagtcggttccagaggggtcttggctggcgcggatgatggcgcgaaagccgcggatgcttgtggcaatcgccttggcaaacaagatggcccgaacaatctgggccttgctgacaaaaaatgaggagtatcgagttccggcccaggtggcggcatcatgatccatgtgatgcgaaatctgcctggcgtcggctaagggagggtgaaagaaggcgatgacccgaatgggcgaaaagatcgaacagatctggatcaggaaaaccagtaaagctctatgagcatcaagctcgaaaattagatttggacctggtccgcagatcaccataccggccagcggtttctgaaataccgcacttaaaggccttacagaagaccgcactcgatcactcgcaaatttagttcagattcttcttgcactacggacggcaaccacaga

SEQ ID NO: 9447 - DNA, 1436 bp, unidentified
  source 1..1436: mol_type = unassigned DNA; note = element_eca1753
  misc_feature 1..2: note = core
  misc_feature 3..123: note = LE
  misc_feature 124..1158: note = CDS
  misc_feature 1159..1436: note = RE
  misc_feature 1190..1389: note = bridgeRNA
agatggggtaatcggccggcgttgttgtggatagctgaagattttgggtgctgcgcttcaggctgatggtggtgaaacgaggtccgtagtaacggcctcaagcatcagaaggagaagcgcagcatggagcattttgccggactggatgtatcggtcaaggagacgagcgtctgcattgtggatgatatgggcaggatcgttcgagaagccaaagtggcgagcgagcctgaagcattgctagcggtgctgaacaatccgagctaccgcttcaggcggatcggactggaggccggaccattatcgcaatggctttacagcgctctgggcgaagcgaacttgccggtgatctgtgtcgagacccggcacatgcgggcggtgctgaaggcgcagatcaacaagaccgaccgcaacgatgcccgcggtatcgcgcagatgatgcgggcaggtctttatcgcccggtgcatgtgaagacgttgcgcagccagaagctgcgcatactgctgacccaccgcaagctgctgcagtcgaaggctattgccatcgagaacgacctgcgcgggaccctgcgtaacttcggtctcaaggtgggtgtagtcggggcggtcaagttcgagacgcgcatcaagcagctggtcgagaacctccccgatctggcccttctggtggagccgctgctcgtcgtccgcagggtactgcgcgaacagatcgctgtcctgcaccgccgcttgctgcacattgttcgggacgatgaggtgtgtcggcgtctgatgacgattcccggcgttggacccgtcgtggcattgaccttccgcgccaccatcgatgtgcccgcgcgctttcgcaactccagagcggtcggggcggtattgggactgacaccctgcaggcatcaatctggcgaaagcgaccgcaccggcgccatatctaagtgcggagacgagatgatgcgggtcatgctctatgaagcggcccagatcctgctggtacgctcaacacgatggtcctggctcaaggtctgggcgatgcagatcgccaggcgctgcggcctaaaaaaggcaattgtcgcgctggcgcgccggttggccgtcatcatgcatcgcatctgggttgatggcaccgagttccgctgggcccggcaagcggctgcagcagcataacaatgcaacatcaaacccgataaggagaacgcgagctccaccacacggtggcatgatgtccctcgcgggacgatggatgaggtgagatcgtatgtccgcttggacctgccgctaacgtagcagcaaggccgccccttagattggtccccttgtcctcgaaccccatgatggaagggccttggtgccgattccgaagagaagcgcgcgcccgtgagcgacatcaacacagcattggtggatcgtctgaaagcgcttgacccaaaccggccgattagaga

SEQ ID NO: 9448 - DNA, 1614 bp, unidentified
  source 1..1614: mol_type = unassigned DNA; note = element_ecaf935
  misc_feature 1..5: note = core
  misc_feature 6..258: note = LE
  misc_feature 259..1476: note = CDS
  misc_feature 1477..1614: note = RE
  misc_feature 12..232: note = bridgeRNA
aaaaacatactaagattagaggggaacatcattgacgaatgatgttctcctctattttctatttttagattatagtgaagagtgaaagaaagttcgaacaaagccttgaggactacgagtccctatcaaaaaccgaacttctttactgtcattttagaatcaggtttacgtatgttggggccatgagcccgtgtataggaaattggaatcgaaatgaagcagtaaagttctttcaaaacttaaaaaggaggaaaacaaatgccttacattcttgcattagatgtttcaatgggacacagctacagtgtcctatacaaagacgacacctgcttatttgaagacgagatcgaacacactcaaagaggatttcatgcattactcgaagagatccagcacttgcctgaacgtccattgattgtttttgaagcaacggggatttattccagaccagtcgaaaagttctttcaagatcatcacttttcttactgtttgttaaacccgttagaagcgaaaaagcagatggaagaaaacaccttacgcagttggaaaacagataaatcggatgcccatcggctcgcacagactcatcttaaaaatcaacgtcagccaaaagaagtacaaagcaatttttacttagagatgcgcgatttagcccgtttttatcaagaaattgagaagaaaatcactcgtctgcgcatggatttacacaactgccttcagttgacttttccagagcttgaacagttcttttcaaacaggctgaccccttacgcattgacattgatccgtctttttccccatccagattttgtattggcatctactcggacaaaaataaaaaataaactgatcaacgaaacacggaaaaaaatctccgcgaatcgtgccgagcaaaaggcagatcaaatcatccactatgcacagtgtgcctatccagctgttgaaaaagacagtatccactgtcaaaaaacgatctattacgccgaacttctccaagatttactcgaacaaaaagaagcactggcgacacaaatgatcaaaaaagccgaaggctctccttgctttttgttgtaccaaacgttccctgggattggcgcactcacagccgctttattgctcggtgaattaggagatatcacacgatttaaaacccataaacaattgaatgcctttgtcggaattgacatccgacggtatcattcaggtaagtatactggccaagaccgcatcaataagcgtggtaatcccaaagcacggaaaattattttcttcaccattcgaaatatgattcgccagcaacgcgcagctcctaatcatattgtcgattattactacaaattaaaaaagcaacctatccctaagaaagataaggttgccacagttgcttgtatgaacaagcttctgaaatgtatgcacgctatggttagggcacatacagagtacgactatgcgtacgcggtctcagtggaccattaactaaaccacttacagtataccacttctttgcccagatcgaaaattttttacgaacggggctttatttggtgtgccttgattttgtcgctttcgtttatgagctatttttcttacaccttttacttgactaatcgtagg

SEQ ID NO: 9449 - DNA, 1392 bp, unidentified
  source 1..1392: mol_type = unassigned DNA; note = element_ecc13d8
  misc_feature 1: note = core
  misc_feature 2..98: note = LE
  misc_feature 99..1130: note = CDS
  misc_feature 1131..1392: note = RE
  misc_feature 1172..1389: note = bridgeRNA
taatgtaatgaaccatctcacccactgagttggcaaattgttattaccagcttagtattcgaatttgatagatttgaaactggatgggagattcaataatgaatgttagcgtattaggtatagatatagccaagaatatttttcaattacatggtgttgatagctctggtaaacggatattaaaacaacgagttgaacgagacaaattatcggcgtatgttgctaatctacagatgagtacgatagtaatggaatcctgtggtggagcaaattactgggctcgggtattccagcgccaaggccatagtgtcaaattaattagtccacagtttgtaaagccatttgtgaagacgaataaaaatgatgccaatgatgcagaagcaattgtggaagcggcaagtcgaccatcaatgcattttgtacccattaaacaagttgaacaacaagatattcaatcattgcatcgagtacggagtcgtttagttaaaaataggactgcgctaattaatgagatcagaggattgaacttagagtatggcatagcaatccctcaaggagctcttaaagttaaaagccacttacgatcaatcattgatgatacagaaaatgaattaacagtttcatcacgagagcttatgcaagaattatatgatgagttagtcgagctagagggaagactaaagaaattggaaaataaaattaagcttatttgcaaagaaaacgaccaatgccagcggcttcttagcatcccaggcatcggtgaattaactgccacagcgatcgttgcagcagtacccaatgcaaatgagttcaaaaatggtcgtcatatggcagcatggttaggcttagtcccacgtcagtcatcgagcggtaataaacaggtgttactgggtataagtaaacgtggcgatagatatttacgcactttgttaatccatggtgcgagagcagcgctgtgtcgctgtaaaaatacagacaacaaatacggtgaatggttaattagtaaaagggagtctcttagtctcaataaagcggctgttgcgctagccaataaaaatgcgcgaatcatttggtcgctattaaaaacaggtgaactatttgatagtaaccaacaaaagagtgctgcttaatattcaatattaagtggtcataattaatataacaaatatcacaagtttgctttagttgatttttattgatggttaataggttaaaccaactcttttaaaacctgttttgcgacacggtactttgataccacggttctgattaggaaaaagagtgcggattttacatcagggcgcaagctttgcttagacgccgaatatatgacagcaatttaaacctataaaatcgttaaaaattagcttgcaaaatgggatggttcatata

SEQ ID NO: 9450 - DNA, 1472 bp, unidentified; identical to SEQ ID NO: 76
  source 1..1472: mol_type = unassigned DNA; note = element_ecc5efb
  misc_feature 1..5: note = core
  misc_feature 6..222: note = LE
  misc_feature 223..1428: note = CDS
  misc_feature 1429..1472: note = RE
  misc_feature 8..220: note = bridgeRNA

SEQ ID NO: 9451 - DNA, 1382 bp, unidentified
  source 1..1382: mol_type = unassigned DNA; note = element_ecc8cd7
  misc_feature 1..2: note = core
  misc_feature 3..86: note = LE
  misc_feature 87..1118: note = CDS
  misc_feature 1119..1382: note = RE
  misc_feature 1151..1370: note = bridgeRNA
tgatgctgtggacggctcctccacccggcacgagagtgccaaagatgtgggcgctgttgaggctcccacgattcggaggatctaccatgcaaacggtcacgacaatcggtctcgacattgccaaatcggtatttcaggtccacggcgttgatgctggtggccatgtggtcattcgacgccagttgaagcggcgctacgtcatggcattcttccagaagctgccgcggtgcctggtcggtatcgaggcctgcggctcgtcgcatcattggtcgcgcgagctccaggcgcttggccacactgtgcgcctgatgccgccggcctacgtgaagccctatgtgaagcggcacaagaatgatgccattgatgccgaggcgatatgcgaagcggtcaccagggtcaacatgcggttcgttgcgaccaagacgccagagcagcagagttgcttgacgctgcatcggacccgtcatttgttcatccgccagcagacttcagtgatcaatgcgatccgcgcccatctggccgagttcggcatcgtcgcgccggttgggcgccatggtgtcgaacaactactcggcgtcgtcgctgatgcaagtgacaaacggttgcccgaagtggcccgtgcctgtgttgccgctctcggcgcgcagctgcagacactgaaggctcagatcctggagttcgaccgtatgatcagggcctggcaccggtccagcgaggcaagccggcgactggacgatatacccggcgtcggtccggtactggccaccgctctgattgccagcgttggtgatccgcgggctttccggtcggggcgagacttctcggcgtggatcggtctcgtcccaaggcagaactcgagtgcaggtaaggacaggctcggcagtatcagcaaacgaggcgatcgctatttgcgcagcctgttcacgaccggcgcactcgccgtgatccgctatgccaaaatccatggcaccaagcaccggccttggctcaccgcgttgctggtgcggcgacccaccaaggtcgcggccatcgcgcttgccaacaagatcgccagaatggcgtgggcgatgatggccaagggtgaacgctacaaggaaccagccgcgctggcggcttgaacgagatcacgcaccgggtatccggcgtgatgtgacggttgggagggcgaacagcacgtaatgcagacccggtcgatccggcgatcaggacaacccacatgggccatagcattgtcgaatgcgtccttttgaccgggacctgatccgcggagggcattatggccagcggtcacgtgaaccgcgctcaaaggccgaacacatggccgcaccgaccaatcctgcacccgtgaagaaaacccttgccaactcggagccgtccacaca

SEQ ID NO: 9452 - DNA, 1470 bp, unidentified
  source 1..1470: mol_type = unassigned DNA; note = element_ece3ac3
  misc_feature 1: note = core
  misc_feature 2..232: note = LE
  misc_feature 233..1453: note = CDS
  misc_feature 1454..1470: note = RE
  misc_feature 1..236: note = bridgeRNA
cgttaccgttttcgcggctccttgatcggggagctcctggtctccagatccggcatgactgatgcccccagtcgaacgcatgatccggggggtggtgtcaccgggcttggtgcatcgctggatcgctaatagggacacggccacccctgtggggaggtctcgtcgcaggcgtggatgccgaccgtcgatgcgtgactggtgaccaggacctatgcggggaaaggcctggtagatggcgagcagtccacagtacggggtgttcctcgggttcgatgtcggcaagggcgagcaccacgcgatcgggttgagtccggatgggactcggctgcatgatgcggcgttgccgaacagcgagccccagctgcgcgaggtgttcgaccggctcgccggccacggccggatcctggtcgtggtggatcaacccgccacgatcggagcgctgccagtgacggtcgcccggacctgcggccaggatgtggcttacctgcccgggctggcgatgcgccgcatcgccgacctctatcccggcaccgcgaagaccgacgcgcgggatgcgctggtcatcgccgatgccgcccgcacactgccgcacacgctgcgcgcggtcgatgtcggtgacgaaaccctggccgagttggaggtgctggtcggctacgacgacgacctcgccagcgaggccacccggatcagcaaccgcatccgcggcctgttgaccggcatccacccggccctggaacgcgccctcgggcccaagatcacccaccgggccgtgctggagatcctctcccaatgcggcgggccagccggtatccgcgccaccgacaccgacacggtcgccgcgatcgcggccgagtacgccccgcgcatgcacagcaagctcatcacagcgatccaggccgcgttggacgagcagagcgtgaccgtacccggcacggctgcggccgagacagtgctgccgcaactcgccgaaggcctgaaaaccgtgatgtcccaacggaaaacactggccaaacaagtggaggacatgcttgatgcacaccctcttgccggggtcctgacctccatgcccggcatcggggtcaggaccgccgcccgcatcctgctcgagatcggcgacgcctcccagttcgccagcgcagcccacctggccgcctacgccggtatcgccccagtgacccacaaatccggctcgtcgatcaagggcgaacacccagcacgggcgggcaaccgcaagctgaaacgcgcgttcttcctcgccgccttcgcgtccctgtccgacccggaaagccgggcctactacgacaagaaacgcgccgaaggcaagaaacacaacgccgccctgatctgcctcgcccgacgccgctgcgacgtcctgttcgccatgctccgcaacggcacctactaccaaccgcaccgacccaaacaggagcaacagatcccggcagccgcttgacaccaacaatagggaca

SEQ ID NO: 9453 - DNA, 1583 bp, unidentified
  source 1..1583: mol_type = unassigned DNA; note = element_ece5a79
  misc_feature 1..4: note = core
  misc_feature 5..257: note = LE
  misc_feature 258..1460: note = CDS
  misc_feature 1461..1583: note = RE
  misc_feature 14..277: note = bridgeRNA
ttttagtaccataaaagtgtagttgttagagagtaattaactctgacatctgcacttattttatttataataaggggagtaattggtctgacgtggcgctatttggatcattgcatccgtcataaaaaccgttaaccaaccccttattataaacattcgattaagcaggtagggattcgctcccgcgtaaccaactaaactggatggtagtaagtgcggctggaacaattacgaataacagttatgggaggttcaatatgattagcgtaggaattgatgtgtcaaaagggaaaagtactgtctgtgtacttaaaccatacggagaaatcgtgtgcagaccttttgaaatgaaacatgtggaaaaggatatggaggactttcacaacctattgcaaaaattggatggagagatacgaattgtgatggaagctacaggtatttatcatttgcctgttttgacattccttcatgacaagggatattttgtgtcggttgtcaatccgtttgcaatgaagaaatatgcgaaggacaacagcatcagaggggcaaagaccgataaacttgattcgattatgattgcgaactatggaatcgaaaaatggttcaagctgaaaggctatgaaggcgatgaagaaacctatgcggagcttaaacttttaggacgcagatatcggtactatatggaacttcatgtgaaagccttacaggagttgacgcatattctggactacgtgatgccggggctcaagaacctatttaacagttggaatgaaacgaatggcaaggacaaactcagcgattttgtggaaaggttttggcactttgatctaatcacgtccatgagccttgaaaaattcacagaagaatatcttgcctgggcaaaagaaaagaaataccaccaaagcagatccaaggctgaaacagtctatgaattagcttccagtggcatttccacgctgtcttccagtaccccatctaccaaaatgttagtacaggaagcggtatcagtattgagaactgtagatagttctctgtctcttattttaacacgaatgaaggaacttgcgaagtcccttcccgaatattcaacagtcagagaaatgggaggagttggtgatgtccttgcagtgaaactgattgcagagattggcgatgtgagaaggctgcacaatgcaaaagcactcatagcatgggctgggattgacccgccaccatatgaatcaggacagtttattggttcaaaacgaaagataacgaaacgaggttcttcgacgctcaggaaggtcgggtatgaggtgatgagagtccttaagagtcatcccgccccaaaggatgatgctgtatacaactatatcttgaaaaaggaaagtgaaggcaaaagcaagaaacatgcaaagattgccggcttaaataaatttctgaggatttattatgcaagggtaatcgcagtttatcaataaaacctaaaacccatgagtcagtacaggctggagctataatgccagccttgttgttgtacacaaaaatagaacgatgaaatattttaaaaacctgccgaaaagcacttgacttttgttagcagg

SEQ ID NO: 9454 - DNA, 1203 bp, unidentified
  source 1..1203: mol_type = unassigned DNA; note = element_ecf6d0e
  misc_feature 1: note = core
  misc_feature 2..211: note = LE
  misc_feature 212..1177: note = CDS
  misc_feature 1178..1203: note = RE
  misc_feature 34..201: note = bridgeRNA
tcttaagtttactttttattaattttaaatattaatcagaaagaacaaaagagcagagtaaggttactatagccgttggaagtttacattccgtcaacattgataatccctgctcttttctacttaaatttcgatcagatctttgaggcctggacctcgtttttaagttggtgaaacctaagtagtgtgtcctttcgtcatttgtttttctatgaataaatataacacaatttatggaattgacatcagtaaagatgtctttgatgtagtagactctaataaagtttactgccaatttgaaaacaccccaaaaggatttaagacctttttaaagacacttgcctcttcttcactagtagtgatggaagcaacaggttattatcactatcgtttggctcaatatctttttaagcacggagtggcagcatcagttgtaaacccattatctgtcaaacgctttattcagatgaagcttgctaaggttaagacagataaaagtgacgccaaagctatttgtgactatgccttggccaatgaggttccactttacaatgctttgaccgatgtgcaatctgaatgtttacaattgttcaggttactggacagttatctcaaaaagcgcacagcaaccaagaacaaacttcacggagaagagactcttggctttccctcaaagtttgtacatcaatccctcaagcgtgatttaaagcacttagataaagaaataggggcattggaagatagattgcttgaactggtaaaacaagaccagcagtatcaactaacactgttgaaaggaatccctggattaggaaccaaaacagccttgttccttattgtaacaactgatggttttcaaaaatttgaaaccgcagggcagttgtgcagttatgtgggtattactccaacaataaggcaatcaggaagtagcgtgagaggccgaagcaaaatttcaaaggttggtaataaaaaacttagaaatcttttgtttttgtgtgcattttcagcctgtaaacataataaggcgtgtcgggaagtctatgagcgcatcatagctaaagggaaaagcaaaaaactggctttgattgcagtagcaaacaaattacttaaacaagcttttgcaattgctaaaagcggattgccatatgaggaaaactttgtgtcaaaattgaactaaaaatagttgttttttaactcagatct

SEQ ID NO: 9455 - DNA, 1240 bp, unidentified
  source 1..1240: mol_type = unassigned DNA; note = element_ecf82b3
  misc_feature 1..3: note = core
  misc_feature 4..222: note = LE
  misc_feature 223..1209: note = CDS
  misc_feature 1210..1240: note = RE
  misc_feature 13..184: note = bridgeRNA
tcttgtatcttgattgatatagtgattagctaccactatacgcaaattgtagagtttggagtgctgctaaaatcttaaatttgaacctgagataaaacctacaatttgcccttatccctcatacaactctgaacggtaactaagcactttgatgctgtattcacaaggtaagatgatggttaatgggataaaaatcatagcttaaactcaaggaatatcaccatgattatgctaggtattgatgtcagtaaaaccaaaatagattgttgcattttccctcaaggtttgactggaaaaagaaaaaataaaatatttactaatacaaaaagtggctttggcagtctgctcaaatggctcatcactcttaaaattgaacctgatcaagtgacagcaatcatggaagcgacttcggtttatcatgagaatttgggatattatctatatgatgcaggtgtaaaggtttgtgtggctaatccttcacgagtaagagcctttgccaaaggcatgtccatgctaaataaaacggataaagctgatagtgaagctctttcacgttatggttacaccgcaaagttaatcatatggcagcctgaacctgaaaatgtcagattattaaaagctttactaggcagacgagatgtctatctaggtagtctattgcaggaaaagaatcgacttgaaaaggcgcagtccactcatacctccgttgttgtgattaaattacttgaagagaatattgagtatttaaatcagcaacttgaacatattgataagttaataaataatcacatagatcaagatccaacattgaaacaggatttgaaattactgcaaactattccttcaatcggtgaacgatcaggcttgttactgttggggttatttcattcgcacaagtttgaaaaagcaagtcaagctgctgcatatgtaggtttggttccagtacatcagttgtctggcagttcagtcaacaagcaaagtcacttatcaaaagcaggtgacagtaaaatacgctcagtattgtatatgtcagcattaacagcgattaaatataatccacacattgaagctttatatcaacgattattaagccagggtaaaaataaaatgtgtgctttaggtgctgcaatgcgcaagcttatacatctgtgttatggcgttttaaaacatcagactgcctatcaaagagattatttattggtcgaataatctcaaaacctgattgactaccaagacggta

SEQ ID NO: 9456 - DNA, 1379 bp, unidentified
  source 1..1379: mol_type = unassigned DNA; note = element_ecfb0c6
  misc_feature 1..3: note = core
  misc_feature 4..87: note = LE
  misc_feature 88..1110: note = CDS
  misc_feature 1111..1379: note = RE
  misc_feature 1114..1366: note = bridgeRNA
tgatggggtggacggcccctcccaccggcatcgcaatgtgccatgttggtgctgtcatacagccaacaagaagaggagccgtccgccatgaccattaccacgattgggattgatattgccaagtctgttttccagctccacggcgtggatgaggcgggcacagttgtcctgcgcaagaaattgcgccgaagcgcagtgcttgaggcgctgcgggatctggagccttgcctggtcggcatggaagcctgcgcgacagcccattactgggcccgtgagatctctgccctcggacatgaggtgaagctgatgccgcccgtctatgtgaagccttatgtcaaacgccagaagaacgacatggcggacgccgaggcgatctgcgaggcggtgacccggcccaccatgcggttcgtgccgatcaagagtgccgatcgtcagggcgtgcttgtattacatcgcacccgggatctgctgatgcgccaacggaccatgctgctcaatgcggtccggggtcatctcgcggagttcgggatcatcgcaccccaaggaccacgtaaggtgatggagatgattacgaaccttcgggatactgaagcgccaggcctgccagagatcgcacgttccgttgtgctgagccttggcctgcagcttgacgccctcgtcagcgagatacatgcgctggaacgtcagctactcgcctggcaccgacaggacactgccagtcagagactggagacgatccccggtgtcggcatcattaccgcaaccgcactggcagccagtgtaccagacccatccgtgttccgctccggacgccagtttgccgccttcctgggactgacgccgaggcagaactcgtccggcggcaaggaccggctcgggcgtatctcgaagatgggggatggctacctgcgacgactgctcgttgtcggcgccacatccgtgatccgccgtgcagaaaccaacccgtcggcaaccggggtctgggtcaggtcgctcctgacacgcaaaccggtgcgggtcaccacggtcgcaatggccaacaagaccgcacggatcgcatgggcggtactggcgcgcggcgaaacctaccgggcgccggccatggcgtaacagaatacgaaccgcgggcagtcagacctgttcgctccagactgtaagggcagaatgtaagtgatgatgatctaacaagggaccgtaaccgggagactccgaggtgctgtcaggacatcaagtccgatagactgaatggaacccggctagcggacttcatcagggccagcggtcgtacacgccgcgccaacaggccggacacatgaccgcatcccgtcagatcaaagtccatcaaactttgcgcttgcagaaccggggccgtccacaca

SEQ ID NO: 9457 - DNA, 1334 bp, unidentified
  source 1..1334: mol_type = unassigned DNA; note = element_ed0ea29
  misc_feature 1..2: note = core
  misc_feature 3..81: note = LE
  misc_feature 82..1092: note = CDS
  misc_feature 1093..1334: note = RE
  misc_feature 1100..1321: note = bridgeRNA
tgatgttgtggatggctcctgcttcagccggcgtattccggcatagttcgggtgtcattgtccggagcaaaggagcgatccatgtcagaacttgccacagttggtattgacctcgcaaagagcgtcttccagatccatggtgtcgacgagaacggtctggttcttgtacggcgccagcttcggcgcagccagttgcttgcgattttccagaaccgcccacggtgcctgattggcatggaggcttgcgctggtgcttatgactggggactcaggcttcagcaaatgggacatgacgtccggctgatgccgccgtcttatgtgaagccatacgtgaagcgcggaaagaccgacgccgcggacgcggccgccatctgcgaggctgtgacgcggccctcgatgcggtttgtcgccatcaagagcgagtcctgctcgttggtcatggttcttcatcgcacgcgggactttctggtccgtcaacgcacgcagatcggtaatgcgatccgggcccacatgactgagtttggcatcataacggctaagggcgcgcagaatatcgagcggttgaaggaacaagtggatcagttgccgcaagcggctcggatgctcttgatcttactctttgagcaactttccgaagcggacatgcggatcgagcggctgacgggcgagatcgaagagacctattcgcaaagcgagacaagtcagcgtctggcgacgatccccggtgtgggggtgctgtcggcgacgattatcgcggcaacgacaccgaatgtcgacaacttcgactgcgcgagggattatgccgcctggctcggccttacgcccaagcctcactctaccggaggcaagcagagggtgggcgggatctcgaagatgggtaatcgatacatccggcgcctgcggtatctcggcgccatggcgcagatcatgctcagacgtcggctcgagcgagagtcaggatcggaccggctgtcgggcatgctcgtgcggaagaagacgaagattgtcgcgattgccctggcgcatcgcatggcaagaatgatcttcgccgtcctcagggacggttctcgatacgagccgcaggccgcctgacagctctcggaatggtcagggcaacgcgaggtgatggccaataagcagagacgaagaaccaggacaccccgatcaatccgaagctcttcgagagcgctcgattgagtaggacctgctctccaggcggatattcatcagggcgcgcagcggtctcgctgcatatcagacgcggtatacctggccgcaaccgacctgttcaccggagccaatcgtatccttgactcgcaggagccatccataca

SEQ ID NO: 9458 - DNA, 1465 bp, unidentified
  source 1..1465: mol_type = unassigned DNA; note = element_ed23088
  misc_feature 1: note = core
  misc_feature 2..88: note = LE
  misc_feature 89..1114: note = CDS
  misc_feature 1115..1465: note = RE
  misc_feature 1234..1457: note = bridgeRNA
taatgggatggtcgcccctacccgaagcggcatcgaagtgccaaagtggaggtgttagacagccacttaatcgagaggagcgaccgacatgaagcttacgacaattggaattgatttggcaaaggaggttatccaggtgcacggagccgacgacaaggggaaggcggtgctcaagaagcagctcaagcgagcccaggtgctgccgtacttcgccaacctcacgccgtgccggatcggcatggaagcctgcggtggcgcccactactgggccaggaaactgcaggcactggggcatgaggtcaaattgattgcgccgcagtacgtcaagccctatgtcaggcgcaacaagaacgatgcagccgacgccgaagcgatctgcgaagcagtcacccggccgaatatgcccacggtgccgatcaagaacgtggaacagcaagccattctcagcgtgcatcgggcccggcaagggttgatcaaagcccggaccgcccagtcgaaccagatgcgcggtctgcttgccgagtacggttttgccattccacgcggaatagcctacttagcccagcgtgtaccggagatacttgaagatgccgacaacgaactccccggcagcttccgccggctgatccagagattgctcgaccacctcaaagagctggaccggcaagccaaggaactggaagccgagattggctgctggcataaggagaatgccgccagccagaagctggccgggataccgggcgttgggccgttgacggccagcgcgatggccgcttcgatcggcgacgcccggaacttcaagaacggccggcaactagccgcctggttgggattggtgccgcggcagcattccaccgggggcaaatcgaccctgctgggcatcagcaagcgtggagattcgtacctcagaaccttgttgattcacggcgcgcgcgccgtcttgcgtcgattagcggccaagccggaagccgagccctggatcaacgatctgctgagccgacgccacaagaatgtggcgaccgtggcgctggccaacaagaatgctcgcaccatctgggcgctgttggcacatgaccgtgagtatcaggccgattaccggagggcagcatgaacacgggttatccaccgcgcccctggcctctggcaatagggggcgccggccaggggcgcggtggataaccctgccgtgtagcagtgtcacgatatcaccgacttcgaaaggaaacccttccaccgattgcacaggcaatcatgaaatgatggcaagacaggtcagaccgtgaccgaatcagcccgcaaaccacaggggaacctcaattccgctttactgttggggcctcggtcagcatattccatcagggacagaggctgtagcctcgatcaaagtccggatctatggctgcaatctctaccttcttactttcatcgattgagcgcttggcaaaccaggggcgaccatcta

SEQ ID NO: 9459 - DNA, 1351 bp, unidentified
  source 1..1351: mol_type = unassigned DNA; note = element_ed35449
  misc_feature 1..2: note = core
  misc_feature 3..146: note = LE
  misc_feature 147..1088: note = CDS
  misc_feature 1089..1351: note = RE
  misc_feature 1117..1339: note = bridgeRNA
tgatggcgtggacggctctccaaccctccagcaggataacctgcggagagtcggaaggattcacaatgggcagcgtcattacgataggtctagatctcgcgaagaacgtgtttcaggtgcatggcgtcgatgcgtagggcgtggcggtgatccgccagcggctgacgcgcgggcgcatgctgaggttcttcgccaagctaccgccgtgtctggtcgggatcgaggcgtgtgcgacctggcattactgggcacgcgagctggtagggctcgggcatgacgtgaagctgatgccggcgcagtatgtgaagccgtacgtcaagcggggcaagaacgacgcggccgatgcggaggcgatctgtgaggcggtgacccggccgacgatgcgcttcgtcggcatcaagtcgcccgagcagcagagcgcgatgatgctgcatcgtgttcgcctgatcctgaatcgccaacggacgcagctgtcaaacgcgatgcgggcgcacctggccgagttcggaatcgcggtaccgatcggcaggaacggccttgagcagcttctcgacgtcatcgccgacccgactgacgagcgggtgccggccgatgcgcggttctgcctggagatgctggcggctgagctgcgcatcgtaaaggagcagatcctggagaacgaccgccgcatcctggcgagcgcacgcgagaccgagcttggccgtcggctgatggagatacccggcgtggggccgctgctcgccagcgccatcgttgccaccgttcccgatcctgcgatcttccgctcaggtcgcaacctcgccgcgtggatcggcctggtgccgcggcaaaactcaagcggcggcaaggagcggctcggtggcatcaccaaggccgggcatcagtacctgcgccagatgctgatcgtcggcgccatggcggtcgtgcgctttgccgaacgtaacggggccaagcggctgtggcctgttcagctgctggcccgccgcaaggccaaggtcgccgcggttgcgctcgccaacaagaacgcgcgcatgatttgggcgatgatggccagcggtgagcggtatcgtgagccgctagcggcataaggaacacggcgcgggcgaccgcgcctgacgaggttggaaagggcgatcaggagctaatgcaacaagccggttgaaccgccggatcgggaaaacccacaatgacccaagcgcatcaagcgcgtgaatgtgatcgggactcgagacgcgcgaatggcattacagccagcggcaccatgcgccgcactaacaggtcggacacatggccgcaccaaccagcaatgctaggcgaaagtcgtacttgccaacggagggccgtccacaca

SEQ ID NO: 9460 - DNA, 1459 bp, unidentified
  source 1..1459: mol_type = unassigned DNA; note = element_ed3c105
  misc_feature 1: note = core
  misc_feature 2..145: note = LE
  misc_feature 146..1168: note = CDS
  misc_feature 1169..1459: note = RE
  misc_feature 1206..1459: note = bridgeRNA
gaatggaatggacgcttccccccggcaacgggctactgaagtgacgtaaggcgagaggtagaagtggatcctcatgggccgacggcatcaaagtgccaaatttggaggaacatagagttcttcacaggcaaccagaggatccatcatgaattctaccgtaatcggcattgatattgcaaaacgtgtatttcaactctattgggttgacattgaaacaggagagattgtgagtttgcagcttaaacgcgagaagttcctagcatattttgttaaccggcaaccgtgtctgatcggcatggaagcttgtggcggtgcccagcactgggcgcgtgaactcatcaagcttggtcatgaagtcaagttgctggcaggcaagttcgtcaaatccttcgtcatgggtaataaaagcgatgctgctgatgccaaggccatctggattgccgtccagcaaccaggcgttaagccgattgcaattaagacagaacagcaacaagccattcttgcgctgcaccgtatgcgacaaggcctgatcaaggtgcgcaccatgcaagttaatgcgctgcgtggtttgcttacagaatacggtgaagttatgccacaaggtaaggctggacttcgcaaaggcattgcagtcgcacttgagcgtacggcagagcgtttgccaggcatcgtcattgaagccttgcgtgagcaatggcagcggattattgagttggacacacagatggttgaaattgaacgtaagttacagagctggcttaaatcaaatctggccgccaaggccattgccaatattcctggagtaggtctgctgacggcgacagccgctgtggccaccatgggtgatgccaaagccttcaggtccgggcgtgagttcgctgcctgggtaggcttggtgcccaaacagactggcactggaggtaagacgagattgctgggtatcagcaagcgcggtgatacctatttgagaacattgctcatccacggcgcccgctcggtactgatgcatgccaagcagccaggtgcgtgggtagatgaattaggcaagcgcagaccatcgaatgtcgtggtggttgcgttagctaacaagatggcgcggacgatctgggcgatattagcgcatgagctggcgtaccaaggtgactgggtcagtatcaagccagcatgatacgaagatgctgaactagtttagagaataacgaaagataaaaaggagcgaatgctgaaagattgcgataggtaaaaaatgtgtgatggcaaacaggtcagaccgtgacttgctaaacctgaatgatgaaccggacattaaaagtccgctcggagaataaggggcaagtcagcgaaatccatcgaggcccgcaggaatgtattctgcaataaggccggatatagaactgcagccttatcttgttggctaaaacacaaagaaaacccttggcaatcgggaagcgtccatata

SEQ ID NO: 9461 - DNA, 1352 bp, unidentified
  source 1..1352: mol_type = unassigned DNA; note = element_ed4d8b5
  misc_feature 1..2: note = core
  misc_feature 3..76: note = LE
  misc_feature 77..1105: note = CDS
  misc_feature 1106..1352: note = RE
  misc_feature 1121..1350: note = bridgeRNA
atgagatggctacccccgccgccccctgtgaacgcccactaagctttcacagggggacctatcggagaccgcagccatgagcaaagtagacatcaccgccgttgaccttggaaagcacagctatcacgcccacgaacaagatgagcgtggccatccactgctgcgcaaaaagtttaatcgagcaggattgctccagcatttagcctccatcgaaccttgtactgtcgtgatggaagcctgtggcggcgctcacttcatggcccaacaagttgccatgctgggccatacacccaaactgattgctcctcacctcgtgcgtccttatgtaaaaagcaataaaaacgacttcgctgatgccgaagcgatttgtgaagctgctagtcgaccaacgatgcgtttcgttgcggtaaaaactcaggctcagcaagcgttggccatgctcaattcggtccgtgactcgctcatcaaggagcgcaccggcgccgttaatcgaattcatgcagggcttttggaggtcggtgtcagcttggcaccgggctttaagtcaatcaaagaagtgcccgccttacttgaagcagcctcatttcatgggctgatcaaaaaactgctgcagggactgtacgaccactacgtttacctggatcgtcaggttaaggttctcgacaaagaagttgagagccaagtcgctgaagatgatctggcttctcgtttgatgacaattccctgcgttggcccgatcacctccagcgtcttggctgcggagttgggcgatggcaagcagttcaaatgtggtcgaggctattcagcctcgataggacttgttccaaagcagcattctactggcggtaaaaccgtactgttgggcatcagcaagcgcggagatcgaagccagcgacgcttgtttgttcagtgtgcccgtatctacttgatgcacttggataagcaaaaagggagtttggccgattgggttcgcaagctgctggcaggccatcgccactccaatttagtggtctgcgcgctagccaacaagctggcaagaatcgcttggtcgatcgcggcaaaccacactgaatttgatgcagggccaagcgcgatgaacgcctgaccctgctgtcacccgagcaccacccacctggttttgcgatgctggataacagatgacgtgaacggccaaccggcctgacgacaaccctgagctcccacacggctgaaaggccgtccaaataattagggtcgttgggcatcaattctcatcgaggcgcgggactaatgccccactcagacgccggatagatgaaagcaagccatacacaccatcaaagacagtattgcagaaaagggggtaaccatag

SEQ ID NO: 9462 - DNA, 1446 bp, unidentified
  source 1..1446: mol_type = unassigned DNA; note = element_ed4eeed
  misc_feature 1..2: note = core
  misc_feature 3..224: note = LE
  misc_feature 225..1436: note = CDS
  misc_feature 1437..1446: note = RE
ctcctaccatcagcttatgttataaacgagtatgggtatttcatactcagctaacatggaaaggcaggagggcttagttcttcctgggtctcagaacccttgtttcagtgtgtcccctgcctcccaaagccatgataagttgattgggtcaatgaatcctagtcacgatggaggattggtggggaggcaattcctgcttttaccgcaacagaggggggatgcgtatgtctaaggtattggacggggctttgctgagcttgtttgttggtatcgatatctcgaaggagaagtttgatgcctgctgcataggcagtaatggagacaaactatttcgtatgtctgctgctatgagcagggaggggtttgaggcactgctcatgcaagtctcttctattgcgaaaaataaagaatccatcctcatcgggatggaatcgacggcatgttaccatatcaatctcttctcgttccttacgtccaagggatttaccgtgatcattatcaatcccttgctcatatccaacttcatgaagctgcaactgaggaagaccaagacagataaaaaggacgcgttggtcattgcacaatttctcctcacgaagaaagattccctatttcaaaatgtgctgtcccctgacagtgcagacatgagagacctggcacggcagagggaaagcctgatcgaccagatgacggccatcaagagcgacacgaaaagacttcttacgatcacctttcccgaactcgagcatattgcaggcattttcacaaagtccatgcttcgtctgctctgccactatccctctgcgaaggctattcacaaggcaaagcgatccaagatagcaagcatcctgataccgggctcttacggaaaacagactgaggagaccgttgatgcgatcatcaaggctgcagcgacctctatagggacctctagtcctgcaaaagaggtgcttatcaagcaaaaagcatcaatcctgacacagttggaagatcatctgcgggagattactgatatgctgatagagcaatgccaagcgcagatgaaggacaatattgatatcctgacctctatccggggaatcggagagaagtttgccacaaacttcctggttgaactgggaggagatcccagggttttccccagtcatagacaaatcattgccatggcaggactggatccctcggtataccaatcaggacaatatgtgggcctcagcaagatatcaaaacggggaaacagacatctcagaaggatcatctggcttatgaccgtcaaggtcatccagtttgaaggatatttcagcagctacttcgagagaaggattaaaaatgggctgatctacaaaaaggcagtccttgctactgcccataaacttataagggtaatattcgccatgctaacaaataaaactcttttcaatgcaaaggtgagctgatgatagttga

SEQ ID NO: 9463 - DNA, 1495 bp, unidentified
  source 1..1495: mol_type = unassigned DNA; note = element_ed50e5b
  misc_feature 1: note = core
  misc_feature 2..199: note = LE
  misc_feature 200..1207: note = CDS
  misc_feature 1208..1495: note = RE
  misc_feature 6..193: note = bridgeRNA
catgtagatttgcagcgtgatgtaatcacaggtaatttcgatatggagtcgcagtgaaccggggcttgtcgtaagctttgaggcttggcggtagatttggactgcgactccattaaccagagagaatggctgtttagaattgtaggtttgaagacctggtacatgtgatagcatacgactctcacaaaactaacaagttatgcactatttgtattatgtgggtctggatgtgtcgaaagagactttcgatgcgtctttggtcgcctccgaggatgcaaacgagatggctcaccgcaaattcgccaactcccgaaaagggatctgctcgtgtctgcactgggttgagaagcggcatggtattcggctcgacgatgtgattttctgcgccgaggatatggggagctacatatccgagatggcggtttgtgcttccgacaggacgctgaatttcaatttttcactgatctcgccgttggtaatcaagtattcgatgggtattgcccgtggcaaaacagacagagtggatgcccggcgtatcgccgagtatgcgatcactcactatcggaagatagccctttatctgccggcagagaaggaactgtgtcagttgcgcacatggctgatcttaagggctcatctggcaaaacaacgtgtagcgaaactggtgttgctcgaaaaattagactacaaagagaaattcgcggatgtatctattcaacgttccatgctccaggaggagatcgcgtatgcagaaactcatatgaaaaccatcgaacgggaaatgaaggaactgatagccgccgacagcaacatttgccggaactacaagctgctgaccagcatcaaaggtgtagggccgatcacggccattgtgatgctctgttcgacgcttaatttcaccaaaatcacagaccaccgcaagtttgcctgctattgcgggctggctccgttcgaacatagctccggcacaagcgttcgcgggggatgccacacatcgagcatggcgaatcgagacattaaagtacaactgaaccgcagtgcactgattgccatcaggtgtgatccgcaactaaaggcatattacgaacgcaaagtggctgaaggtaaacataaattcagcgtcctgaatgctgtgagggccaaaatcgccgccagatgctttgccgtcgtaaggcgtggaacaccatatgtagcgttgcagatataatccggcatacatatctgccattcgataagattttgagatcattcaaaatctcaaaatcttattgtcgggacagtccgtctaattggggccgaacctactcataattaatgtattgtcatttccgtactccgcaaattaacgattctgactatgggatgcaaggctatacaagcgcttcgcggccttgcatcccatagccagaatcattttgctaaacgctacgacaaaaaatgacaatttccgggcatgaaactttttgcagcttttatttggttttatcttagaatt

SEQ ID NO: 9464 - DNA, 1563 bp, unidentified
  source 1..1563: mol_type = unassigned DNA; note = element_ed54019
  misc_feature 1..2: note = core
  misc_feature 3..282: note = LE
  misc_feature 283..1503: note = CDS
  misc_feature 1504..1563: note = RE
ctggtattatcctcacttgatacacctgtgagggaatttctgataaaattaacttatatttctgtagggagacatcttgcgtgcctccttatggcggcaatgccgaccattcaaaaaagactgttgcttcctgcgttctgactgggaatgtttattaaggatgctatggggttcagttgatactgatctaccattcatatcccaggatacatttagtcagaaactgccggaacaccatccctactgaaaaagaacaactaccacttactcgaaaggacgcctatgaactacctcggcatcgatgtgtcaaaatcaacatcccgttatgtccttttggacaacgacggtgaaaagtccacaaaggcatttacacttgataacaaccaacaggcttttacgcagctacttgatcgactcaaagaactcaaccttcaacccgataatcttctcatcggtatagaagccaccagcatctggtgggagaatatttattgcttcatgactgaacaaaaattcaaagtcattgtccttaatccacaccagaccaacaaattccgcgaagccctgcgcatcaaggccaagactgacgacattgacgcctatgttatagcgggcttgttacgttccggcgaatatgccgccagctatatccccgaagaaacgattcaaatcctacgcgaaatcgtcaaactcagacatcaactggtaaccaatcgccagaactttgaacggcaagcccaagcattattaggcctactattcccagaatacgagaaaactgccatcaaaaatccttttggcgtcgcatccctggccattctcaaggcctatccgaccgtgaaacatttggccgaggctaaatcaaagaacattgaaaaaatcgtccgtcacatcaaaggcaacaaccttaatatcactgaaatcaaaaatcttctcgaaactgcccaaaactcaatttattctggccgtgctaaagatgctcgcggtatgaatctaaacatattgcttactcacgttgagactcttcttcattcaattgctcaacttgacaaaagaatggaagatattttgtctcctcaaaaccctgatgatgccatgagcttcccaggagctaacttactctctattcctggtgtaggtcctaaaactttagctgccatactctcagtcgttggtgctgatggaagcgcctacccagacggcaaaagcttcatcggatacattggattcttcccacaaatctacgaatccggtgaaacacgccacgataacatcatctccaatcgcgggcctaactatattcgtcgagctctttacatctcagctgtcgcttgcttaaaacataacgctgagttcaagagtctttatgaccgtaaagtctcccaaggcaaaactgccaaacaagcattaatttacgtcgcaaaaaaattagctcatctttgcttaagtatgcttaaatctggcgaattttataatccgtcgcgtgtttttatgcctgcttaaaaaagaacgttttactgctctttgacaacctattttttaacttgaccctttataggatgt

SEQ ID NO: 9465 - DNA, 1489 bp, unidentified
  source 1..1489: mol_type = unassigned DNA; note = element_ed543dc
  misc_feature 1..2: note = core
  misc_feature 3..241: note = LE
  misc_feature 242..1468: note = CDS
  misc_feature 1469..1489: note = RE
  misc_feature 6..228: note = bridgeRNA
ctaatagggattaccgggtcgtcatacggcagactcggtgtctggtggccgccggcaggtgagcactcgctcagcctgggctttgagcccttaacgtagatcgtgcccctgccggtgaccgggagagctgaatcgctgctgggatgtcgcgcccccgttcgcgggtgagcactggtctattaggtcgctgatggttctcccgctggctgctgtggattcggcgttgtgattgggagagtggatgcggctgttcgtgggcgatgactgggcgcaggaccatcacgacgtggaggtgatggacgaggccgggaaggtactggggcgcaggcggctgccggagggcgcggcggggatggcccagctgcacggcctggtcggcggcttcctcggtgaggacgctgatgccgccgaggtgatggtggggatcgagaccgaccgcggcccgtgggtcgcggcgctggccgcggcgggttacgtggtgttcgcggtgaacccgctgcaggcggcccggttccgggagcggcacggtgtgtcgggggccaagagcgacgcgggggatgcgcacgcgctggctgacatggtgcggactgattcgcatcagctgcgcccggcggccggggacagcccggaagccggcggggtcaaggtcctggcgcgcacccacaagacgatgatctgggaaaggacccgcgaggtgcagcggctgcggcaccagctgcgcgagtactttcccgccgcgctggaagcgttcgctgacctggacgcccccgaggccctggaactgctcgccaaggcgcccgagccggcccgcgctgcgcggctgacccgggcgcaggtgtccgcggcgctcaagcgggccgggcgccggaacatcaccgagcgggccaccgcgatcctggcggcgctgcacggcgagcagctgggccagcccgaggccctgacggcggcctacgcggtcaccgtccgggccctcgtcgcggtgatcatcaccctgaacgaccaggtcaaggcacttgagcagcaggtgaggaaccattttggccggcacccggacgctgaggtcatcttgtcccagcctggcatgggaccggtcctcggcgcccgggtgctcgcagagttcggcgacgacccccgccgctacgccgacgggaaagcccgccgcaactacgccgggaccagcccggtgacccgcgcctcggggaagaggaaggtcgtcgcggcccggttcgtgcacaacgaccggctcctcgacgccctgcacgcccaggccttctccgccctgaccgcctcacccggcgcccgcgcgttctacgaccagcagcgcgccagcgggcacggtcacaacgacgcgctgcgccgcctcgcgaacaggctcgtcggcatcctccacggctgcctgaagacccgcacctgctacgacgaggacaccgcctgggcccaccggcagcaaacccagcaagccgcttgacaagctaaggccctgggatgt

SEQ ID NO: 9466 - DNA, 1285 bp, unidentified
  source 1..1285: mol_type = unassigned DNA; note = element_ed5b900
  misc_feature 1..2: note = core
  misc_feature 3..196: note = LE
  misc_feature 197..1042: note = CDS
  misc_feature 1043..1285: note = RE
  misc_feature 23..205: note = bridgeRNA
cttgtatctctccaaaacgtgatatatatgcctagctagctatatatcatcgtgcatgaccagagtttgtatccaggctgagaccttaagtctgtcgagtagataaaacccatgcacaccttatcttaaaactgaatggtatccaagttcttcccgaccagggaaagaaactgtatgaacaagcggagtagaagagatgaacattattggtatagatgtgagcaaggccaagctggattgcgcgtggtttagggacgaaaacaaggtcaaagccaaagtggtggctaatcggcttgacggctgggaagagttgataaagtgggcgcgggctaacaccggtgctggcatcagtggcctacatttcgtgatggacgactgcatggatgcaggaggtagggcaatgcaggagcaattgccgaggccacgggctcgtatcatgagaatttggcaacctggctgcatgacaacggtgcaaacgtgtccgtcgccaatcctgcctttatgcccttgggtgcatgtcaagcattatgcccaaagtttaggggggcggactaaaaatgacaagaaagacagtgtggtgttggcacgttacggcttaaaagaatgccccgccctttggcaacctgcccctttggaaatcaggacgttaaaagccttgttggcgcgcttgtcagcggtcggaaaagacctgcaacgggaaaaaaaccgccaagaaaaagccgccgccacggacatgccgacctttgttttagaatcaatccgccaaatggtagggcatcttgaaaccgaacgggagacccttgaaaaattcatcggacagcctattaaacaacacaatactctcaaagaaaatacggtgttacttgaaagcattccgggcgttggcaaggtggtcgcaaggcagatgctgatggtgctgggttctcatcaatttaatagcgccagccaatgtgccgcgtatttaggcttgattcccgtgcagagagaaccgtgcagcagtgtcaaacgccgttcgcagctcgcccttgtgccctgcgggtaagaaacggcaaccccgccatccgcgccaaactttacctggcagcggtcaccgcaacccgctacaacccggacattaaggctcaatatgatcgtttgaccaacaagggcaaaagcaaaatgtcggccttgggtgccgctatgcgaaaactggtgcagatttgttttggtgtcctaaaacaccagcaaccttatcaaccacaagtgggatgatttccctcttgcgattgatttggagagatggtat

SEQ ID NO: 9467 - DNA, 1195 bp, unidentified
  source 1..1195: mol_type = unassigned DNA; note = element_ed609dc
  misc_feature 1..2: note = core
  misc_feature 3..292: note = LE
  misc_feature 293..1057: note = CDS
  misc_feature 1058..1195: note = RE
  misc_feature 53..268: note = bridgeRNA
ctcgtattatatagtagtagtttttagggttcctctccaaggtccttattactattagatcatagtcttttctttaccttttctataggcttaactatgatatataagatgctgtggattggttcattactcctatcacctgatggttatagaaaggctcaaaccacagtctctttgttcatttgttaatcagttagataccgcatgacggcttatttagaacgaggttacaatcacgaagagaaccctgtggttttaaaacagcattaatatattccaaaggagatttattatgatttatgtaggaattgatgttgtaaaagataggcatggttgctttatcactaactctgatggcgaagtattatttgatgcctttaccatctctaacaacctggatgttttcaatattctttatcaaaaaatcatttccgttatgaaagatgtaacaaaagcaaaagtaagactagaagccaatagacactataattacaatctcttagggtatctcattgataaaggtttgctcgcctatgttatcaatccattacatacaaatctgtacagaaaaagtctatgccttagaaaggcgaaaacggataaagttgatgcccgcgcaattgcttctgtactaatgtctgacgtgaacttaaagtcctactcagacatatctcatcacaacaaagagctaaagtcactaactcgttattattttgataaagtaagagaacgtgccaaattaaaatcttctgcaagaacctcaatagattcaaacgtgccagcaaaatcattggaattaaagcatgcaatcaagctctttcagaagctcatatctgaaattgatgaaatcaaaaacgaaatcatcatggatgaaatcaattccccaattcttagcatccccggaatcaactaccgtatgagagctatgattattgccgaaatcagcgttttcaactgctctgattctcctgataaaatcctggcatatgttagattttcaccctctacatatcaatcaggacaacttaatggagcatactctcatatggaaaaatgaggctcccgatatttacgttataccttacataatgctgctctttttgtcatgcagttttcaaggttcaaatatatgtgaaatgcatttctgcaattgattcaaaaactttcattttagacttggcttttaatagttcgt

SEQ ID NO: 9468 - DNA, 1347 bp, unidentified
  source 1..1347: mol_type = unassigned DNA; note = element_ed6b749
  misc_feature 1..2: note = core
  misc_feature 3..77: note = LE
  misc_feature 78..1112: note = CDS
  misc_feature 1113..1347: note = RE
  misc_feature 1145..1342: note = bridgeRNA
tgatgtgatggacgcccctccctaaggttgtcagtgccatacttttactgactgcattattccgggagtaacaccgcatgaacacaatcagagttgttggtatcgatattgccaaatctgtatttcaggtctgcgtctggatgattgacggttccgttgcctggaacagaaaaatatcacgtcagaaattgctggatacgcttcaccagtttgaaccaggtacgttaatcgcgatggaagcttgttcaacctctcattattgggggaggaccttcagtgcgatgggattcagcataaggcttatccctgctcaatacgtcaaagcctttgtcagaagccagaagaacgatgcaaacgatgcactggcaatttgtgagaccgcatgccgcccgggcatccactttgttccggtcaaaaccacagagcagcaggatataaaagcgttgcgtaatacccgccaacttatggttgagcagagaacggcgctggctaaccagcttcgttctctgctcgctgagtatgggctcattatccctgtgggcatccagtgtctccagcaacatctgtctgaatttattgaagatacatctaatgacttaactttcacgcttcgacgtttaatctcttcattgcgggaagacatgcaggccctgaatgaacgcatctctggtctgaatagtgaaatcactgcattgtcttcacaacaggcagcctatcgtcatttattaacgatccagggtgttgggccgcttatcgcggcagcttttatcagtgaagtggatgctgttcagttctccagcggcagagagttgtctgcctggtgtggtctggtgccccgacagcacagttcaggaggaaaacaaagattgtcttctgtgacaaaaaatggcaatcgtagcttgagaacactggtcatccacggtgcacgatctgtgatgcgatgtatgaagaaacgtgatgaccgtctgggcctttggctgaaaaaacttgaggcccgtcgcgggtttctgaaaaccaccgtagcgttggcgaataaactgacaatgataatctggcgcgtactgactgatagtgttgattttaatattaataaggcttttgctatgagttaacgtaatggagtgttgaagaaaatatgtctctctgagtttgcagtcactgatgagcaaacggctaccgtccctgtaacagcctgaagttgacctgggtaatcaaataccggtgtagtgataaggaaacagggctcggataacatcatggcgcaggtcattgaacctactaacgacgccggatatatgctcgcaaaccgtatcgaatcaggacttgcagcacccgggcgtccatata

SEQ ID NO: 9469 - DNA, 1358 bp, unidentified
  source 1..1358: mol_type = unassigned DNA; note = element_ed75d82
  misc_feature 1..2: note = core
  misc_feature 3..70: note = LE
  misc_feature 71..1096: note = CDS
  misc_feature 1097..1358: note = RE
  misc_feature 1124..1355: note = bridgeRNA
ttaatgagatggtcactcccaccctacttgcgagttacgctgtagggtgctttgtttctggagacccatcatgcaaagtgtgacgttggttggaatcgatctgggcaaacactcgtttcacctccacggtcaggatcagctcggtcgagcggtgtttcgcaagaaggcaagccgcaagcagctcgtcgagttttttgccaccttccatgcgtgcaccgtcgtcatggaagcctgtgctggtgcgcatttcctggcacgcaaactgaccagttttgggcaccaggtcaaactcgtctctccgcaattcgtgcggccgttcgtcaagagcaacaagaacgacttcgtggacgccgaggcgatctgcgaggcggcatcgcgcccgtccatgcggttcgttacgccaaagaccgaatcacagcaaacgctagcggcattacatcggatgcgcgaatcactgatccgcgaccgcacgaagacgaccaaccagatacacggtttcctacttgaattcggcatcagcctaccggttggccacgccgttatcgcccgtctaccctcagtgcttgccgagcattcgttgcctgcacgcctgatctcgatccttgagagactacatgcgcacttcaattacctcagcgaacagatcggtgagatcgacagggaattggtccggcagctcgctgacgacgacctcggtcagcgcctgctgtcaattcccggtgtcggtcctgtcacggccagcgtactcgcggcagagatgggcgacggcaagcagtacgcctgcagccgggactttgctgcctccatcggactggtgcctcgccagtacagcacagggggccgggctaacctgctaggcatcagcaagcgaggtgacaagaacattcggcgtctactggtgcagtgcgccagagcctacatgatacggcttgagcggcaatccggccgcctggccgaatgggttcgcgccatgcttgcacgccgacattccaacgtggtggcctgtgcgttggccaacaagctggcacgaacggcctgggctctcgctacgcgccacaccacgttcaatgcgggagcgaattcgatggcaagctgagcatcggactccgcatatattttaccgcagtgcacccacctggttttgcgatcgctgaaatttgatgacgtgaatggcacaccggcctggcggacaacctgaacactaaattggcttccgaagccgaagattttttcaggatcaccaggcgcgattctcatcgtggcgcggggagctatctccacaacgacgccggatagatttacgcaagccaatccactacatcaaaaaccagccttgcaaaaatgggagtgaccataga

SEQ ID NO: 9470 - DNA, 1370 bp, unidentified
  source 1..1370: mol_type = unassigned DNA; note = element_ed7862b
  misc_feature 1..2: note = core
  misc_feature 3..36: note = LE
  misc_feature 37..1095: note = CDS
  misc_feature 1096..1370: note = RE
  misc_feature 1124..1367: note = bridgeRNA
tgatgatatggactcctctttcaccagcgttgtctaatgcaccaaagtattaattactgggtagaggagtttgcaatgaacaagagcataattgggttagatatagcaaagcgggtattccatatttatacgattcgagaagatggaaaagtttttaggaaaatgttgaggcgaaaacaggtattggaattttttgccaattatccaagtagcttaataggtattgaagcatgcggtagttcccattactgggcaagggaactctcagcactagatcatgatgtcaaactgttaaatgctcgccatgttaaagcgtttgttaaaggcaacaaaaatgacttcaacgatgcggaagctatttttgatacagtttctaggccaaataccagaaccattgcgattaaaacggtagcacaacaagatattcaattgattcaccgtttacgacaagatgctgtaaaaaggcgcacagccaaggttaatcaaatacgtgggttattgagtgagcgaggcattgtaatagacctaggtattaataaagtacgaaagcacttacctgaactattggaagatgctgaaaatgcattaaccacactcagtcgttcagcctttgctgaacaatatgaacgattattggcaatggataaggaaatcgaagggttcgataaaaagatcagtgaacttagtcgggctaacgaactttgccaacgattatcgaaagtaccaggaataggtcctatgactgccactatagttgctgcggatttaggtgaaggcagccactataaaaatgctcggcattattctgctagcttagggattgttcccaggcaatgcagcagtggaggaaagtcagtcttattaggtattagcaagcgggggaaccgttacataaggacactattgatccatggtgccagatctgtattacgaacatgccaaaacaaagaagacaagctaagtttatggtgtcaggaattaattaagagacgtggatttaatatagcagcagttgctttagccaataaaaatgcgcggattctttgggcattggcacataaagaagagtcatataaaaaggcggttattgtttaaaaatttccccctttaataactgagtaaaaaagattgcggaggtaatcattctaattgatgacgaaaacaggtcagaccgatgcttttataatccgtttcacacaaaggttcacagaaaccgtcagagtgttgagagaaaaaagcatgcgaatagattcatcaaggctaggatgcatagttatcccattgaaagccgaatatatgtcagcaatctagatctatgtttaaacatcaatcagtgatttttatcttgcaataaccgaggagtccatata

SEQ ID NO: 9471 - DNA, 1566 bp, unidentified
  source 1..1566: mol_type = unassigned DNA; note = element_ed81963
  misc_feature 1..2: note = core
  misc_feature 3..269: note = LE
  misc_feature 270..1436: note = CDS
  misc_feature 1437..1566: note = RE
  misc_feature 3..245: note = bridgeRNA
cttgtatgatccatttagaagctaaggatcacactttcctttctttttcatatcgtggttcaatacaactcagatactgtggacttttgatcttattttgtagctctgactactctacaggagtgtattgccgctaactttatctgaattgtttataactggatgttgccgtaagcattgcttatgagtacttatttcaatcaagtctacgatgataatcgttggtggatatcacggtatcagactttatgaaagggaggtacaacctcatgatctatgttggcgttgatattgccaaactcaaccacttcgcctctgcggtttcttccgagggcgacatactcatcgagccgtttaaattcacaaacgacaatgatggcttccaactgctgatctccaagctcgaatcactcgacaaggacagcatcatcattggtcttgaatcaacggcacactacggcgacaaccttgttagataccttgttgccagtaattacaaagtgtgtgttctcaaccctattaagacttctactatgcggaagaataacatccgcaaaacgaagactgacaaagtcgacacatacatcatttgtaaaacacttatgatgcaggattccctcagattcgtatctttttatgatcttgatctgatggacctcaaggctcttggccgatttcgccaaaagaccattaagcagcggaccagactaaagatccagctgacttcttatgtagatgaggtgtttcctgaattgcagtacttcttcaaatcaggactgcatcaaaaatctgtctacgctctccttgcggaggcgccaacaccggaagctgtagcttctatgcatatgactcatctggctcatcttctcaaagcgaactcgcacggacactttgataaagagacggctcagcagttaagagttcttgcaaagaagtctgtcggtgccagcgacagtgctctatctattcagataacccataccattgcacagattgagttactggatagccaattggatagagttgaatctgagatgactgaaatcatgaaatacaacgattctgtcatcatgaccattccgggtatcggatatataaatggcggaatgatacttggtgaaataggtgatgttcaccgtttctccaaccctagtaagctgcttgcatatgcaggacttgatccttctgtatatcagtctggaaacttccaggctagtaaaaccaggatgtcaaagcgtgggtctaaaaccctcagatatgcccttataaatgcagctcacaatgtagtaaagaataatgccaccttcaaaacttattatgacaaaaagatggctgaaggccggtctcactataatgccctgggacattgtgccggcaaacttgtcaggatcgtctggaagatgctcactgacgaattaacctttagcctcgaatagaggtctgtatacctatagataaccatttttgaaaggcaccttatgggagctttattaaggttacccatttataccacgaataacgaataggaatttccggctaatctagtcttgacttttcatagctggt

SEQ ID NO: 9472 - DNA, 1647 bp, unidentified
  source 1..1647: mol_type = unassigned DNA; note = element_ed8456f
  misc_feature 1..2: note = core
  misc_feature 3..245: note = LE
  misc_feature 246..1430: note = CDS
  misc_feature 1431..1647: note = RE
  misc_feature 11..214: note = bridgeRNA
ctcgtataataaagtagtagttattaaagtccctctccaaggactgtatgctatactgtaatggatgctgtggattggttacacctcctaccgcaagacggtttcagaaaggctccgaccacagacctttacgagtttgttaattagttagataccgcgcgacggtttatgtacaacgaggttacaagacgtaaagtgccctgtgggttcatacagtgtcaaataaactttacggaggtatccttatgatttatgttggaattgatgttgcaaaggataagcacgattgttttatcgcaaattctgacggcgaggttctgtacgatgtatttaccatacaaaacaacataacaggatttaaagatttactgttcaaaataaagaccgcagaacccaatccggataaagtaaaagtaggactcgaagccacgggacactacagctgcaatattctcggattcctgaaaaatatgggtctgacaaccattgtaatcaatccgctgtacaccagtctgagccggaagagcatcagtctgcgtaaaacaaaaacagacaaggttgatgctcgtacaattgcaagtatgataatgtctgacgtgagcttaaagccctactcagacaaattatatcataacgaagatctaaagtcactaacaagatacagatttgataaagtttctcaaagagccaagctcaaacaatctgtatcaagacttgttaatatacttttccctgagcttgaaacactcatatcaactctacacggtaaagcgatttacgcccttttatcggaatttccaagtgctcaacatattgcttctgcaaatttaaaacatcttacacatttgttggacaaagcttctaaaggtcgctttaaaagagcatccgcagaccaaatcagagaagctgcaagacaatctatcggttcatatcttccttcaaaatctcttgaattaaagcatacaattaggctcatcaatgaattaaatgatgaaattgcagagattgaatcggaaatcaagaaaattatggatgccattgattctccaattttatctataccgggaataggacttaaccttggtgcaattatcattgctgaaatcggtgatttttctcgctttagcaatcctgacaaaattcttgcttttgcaggttgttctccctctacatatcaatcaggacaactttattcttctcatgcaaagatggaaaaaagaggttcaaggtatttaagatgggcattactaaatgcagcgtcctatgtgtgcaactgggagcctacctttgctgcatatctttccaaaaagagagctgaaggaaaacactattatgttgcactttctcatgctgctaaaaaattagttcggcttctttaccatcttgaaataacaggtgaaacttatcagcctcaaataatgtcatcctgaacctgagcagaaaattcaatacaacacagtcggcatagcgtaccctttacaaaccgaagaaattaaatgttaaaattttttggcgaaggtggttatgtctttttcttatgccatccatcaccttcgcaggatttgaattccatttaatttctgtttgtcaagggcgacggtatttttttactttttttcttttgggtcttgactttttatagttagt

SEQ ID NO: 9473 - DNA, 1521 bp, unidentified
  source 1..1521: mol_type = unassigned DNA; note = element_ed88cae
  misc_feature 1..2: note = core
  misc_feature 3..254: note = LE
  misc_feature 255..1493: note = CDS
  misc_feature 1494..1521: note = RE
agtatctgcggcctggcggccgtcgtgggggtcgaagagttcgtgctggtcaccggcgcgtggggggttgatagtggaggggtgggatgcggtgaccttgaattcctcccttgtgccgaagagccagtacctcagtgtgaggcgcggggcctgccacgggaatcgtggattgttgctacgagcacgcggattagactcctgcatttgtttgccccgtccgcagcccacttccgaggactcgaaaggaaaccgagatggaagtgctgcatccccgatgcgccgggatggatgtctccaaaaaggatgtgaaagtctgtgtccgcctggctagtccgggccgaaagaccgtgcaagataccacgacctggtcgtcgatgagcggcgacattctgcggctgcgggactatctgatcgccgagcaagtgacgtgtgtggtcatggaagccaccggcgactactggaaaccgttctactacctcctcgaagacgccccgttcgaggtgatgctggtcaacgcccacgacgccaagaacctcccgggccgcaaaaccgatgtgtcggatgcggcgtggctggcgcagctggccgcccacgggctgttgcgggcctcgttcgtgccgcccgaaccgatccgacggttacgcgatctgacccgcacccgcaccgcgatcacccgcgaacgcggccgcgagatccaacggttggagaaagtcctcgaagacgccggcatcaaactgtcggtggtggtctccgatatcaacggggtctcgtcacgattcatgttgcaggcgctggtcaagggtgaacgcgatcccgccgtgttggcggagttgtcggtgaaacaactccgccgcaaaatccccgcgttgacccaggcgttgcagggccgcttcaccgaccaccacgcgttcctggtcgagttgcatctggatttcatcaccgaacacaccacccggatcgacgcgttgaccgagcgcatcgagaaggtgatggcgccgtttcaagccaaacgcgacctgatctgcacgatcccgggtatctccaccaccaccgccgatgtgatcatcgccgagaccggcggccagatggcccagttccccacaccaggccatttggcctcgtgggcgggagtctgccccggccagcaccaatccgccggacgggtcaaaaacgtcaaaacccgccccggtaaccgtcacctcaaaggtgctctcggtgctacagcgttatcgatcgccagccacaaaggcacgttcctcaacgccaagtaccggcgcctggtccgctctcgcggcaaacccaaagcgatcgtcgccctcgagcacaccctgctcaccgtggtctggatcatgctcaccgacaacgtcgtctacgacgaacccggccccgactaccaccagcaacgccaccccgaacgcaccaagaaccgcgccatttacgacctacacaaactcggatacgacgtcaccatcacaccccacggagcggcctgagcagccacctcacctaactcttcggatt

SEQ ID NO: 9474 - DNA, 1736 bp, unidentified
  source 1..1736: mol_type = unassigned DNA; note = element_ed8b621
  misc_feature 1..2: note = core
  misc_feature 3..320: note = LE
  misc_feature 321..1613: note = CDS
  misc_feature 1614..1736: note = RE
ctcgtataggtgtagggcatgaagtcaaatacttccattgcccatcttgatgggtagggaatcctggtgctacgatgaaagtaacatggaatagctcagaagacgaccaagtcatcctgcggttctaccgccagctcagtattctcgcctggctctttctcccattctgcctacttcagaatttgcggccccgggcggagcttcttccagtaaacgatttacctccacgggtgattgcctattaacgagattttagagggagtttgagatcaggattccttctcctatttcatgaatgttgccaggaaggaggtgcgattatgaaacaatatgaattactccattctttgtttgttggtatagacgtttcgatgaaagagaacgttgtgcatgcgatgcctttttcccctgaggaccatcctgggcacgcgcatctgcgtttttccgctcctaacactcctgctggatctgtaggaattgtcgaaaaagtcagtgacttcttgaaattctatcctgatgtcatacaggttgtcattgcgttagaggctacttcggtttattcttttcacctggcaacatttctgtccgttgcacattttaacggacacatcccagccatcgtctattccgttaatcccaaagagattcatgcttacaagaaaacttttacggatgtagggaaagacgactatgtcgatgccatggttattgccgattatgcgcgttccaacaaaatccggtcacgcccttggaaagggccagaactgcttggcttgcgggtacttacacgtttgagattccgcatcgccaaactcatgggaatagtgaagaactcgaccggaaacagcatctaccttgaatgcagcggacttatgacaggagagaatcccttttgtaatgtatggaccaccacctgccaggagttgctgacgacctttcagggccctgatgaaatcctcagtctgtcccatgaggaactgctcaatttcatcacagaaaaaggacacggaagattttcccatcctttagatgtcgtcgaaaaagtgaagaaggcagcccgcaattcctatcggttggacaaaagggtttatgagccactgacttcgggattatccgtgtcctttttcattatacactctcttgaggctgcaataaagaaattggacaagtccattgagacaatggccaaaagtttttcaagcgactcatatcagatcctgctgtcaatcgacggcgtcggaccagtcatagccggagggctcctagcggaaattggcgatatcaagcggttcaaaaccgatgatgccctagctaaatacataggattaacctggagaggaaagcaatccggtcaatcagaaagcccggttaagcatctgtcaaaagccggtgatgtgtatctccgctattatgtgctcttagctacaggacagatcataaactacagcgctaaatatcacgaggcatatgaacgtattcgcagtcgtaagaccctatttccatacagggccgcactcaatctcgttgctcgaaagatcgtccggctgatctttacattactggataaacatcagctgtattccgataacaaagtaatggtaacgttggaatagaaagatcgaacgccggaatatattcgaaaaaatcaatttacccggtggtgtgttaaggttacacttttttaagaaaaaacaataaatttcttcaaaaaaaagacttgacatatgaccagaata

SEQ ID NO: 9475 - DNA, 1366 bp, unidentified
  source 1..1366: mol_type = unassigned DNA; note = element_ed949f9
  misc_feature 1..2: note = core
  misc_feature 3..86: note = LE
  misc_feature 87..1112: note = CDS
  misc_feature 1113..1366: note = RE
  misc_feature 1089..1353: note = bridgeRNA
tgatggtgtggatacctcacccatgaaccggcatcgaagtgtgccatattggtgatgttgaaagcaccaaattggaggaggcatccatggacgaggttacaatcattggagtggacttggcaaagtcggttttccaggtccacggcgcgacggcatctggagaacctgtattccgcaaaaaactttcgcgcggccagttcttgcgatttatcagtgaccaacccgcttgtgtagtggcgatggaagcatgtgcctcttcgcactattggggccgtgagattatgaaactggggcaccaggtccgtttgatcccgccgatctacgtaaaaccttttgtgaagcggcagaaaaacgatgcgaatgatgcagaggctataacggaagcggcagtccggccgacgatgcggtttgtgcccgtgaagactgccgtacagcaatcccaatcaatggtgtttaagactcgtgatcttttggttcggcagcgcaatcaactgatcaatgcactccgtggtcatctgatggaatatgggatcatcgctccaccgggccggaactttgtgaagaagctggcggaacaaatcgaaaacccagagagcggcttgccccccatcgtcgttgaactgagccgcgtgcatttggatcagctcagcgtttgcacagataagatcgtggtgatggaacggcgcctcaaggatgaggccaagtctgatcctgaaacaattcggttgcagaccgcaccgggtattgggcctgtgagtgcaatggcaatcaaggccttcgccccgccgttggagggcttcaaacgcggtcgcgactttgcagcatggctcgggttggtgccggtgcaaaaatctacgggtgggcgtcaaatactgggccggacatcaaagatggggcagcgcgatatccggcgattgctgatcattggggccatgacccggatcagatgggcgatcaagaacggcccacccaagggctcgtggctggaacagatgttggaacgcaaaccgcgcatgctggtggcaatagccttggccaacaaaaccgctcggacgatctgggcgatgatgacaaagcacgaggattatcgagatccggtcgcggcagcgtaaaactgcaacgctcggtatgatgtgagaaggacattgaacagtaaggacaaatgatcgatcagatcgaggttgggaaaaccaggccttcccagagagcttcgcgctcgtgacattgatatggacccgaccttcgcatcgccataccggcccgcggcatgtgaaacgccgcaaactgaggcctgacacatgaccgtacccgatcacatgttcaaacggttcaagaaaatccttgcatcaaacggggtatccacaca

SEQ ID NO: 9476 - DNA, 1454 bp, unidentified
  source 1..1454: mol_type = unassigned DNA; note = element_ed9adb8
  misc_feature 1..3: note = core
  misc_feature 4..129: note = LE
  misc_feature 130..1155: note = CDS
  misc_feature 1156..1454: note = RE
  misc_feature 1201..1404: note = bridgeRNA
agatggggtattcggctttggcgccctgttcttcgctgctgtgacgggtggaggtgctgcgcttcgagctgatggataacgtggtctggatcggatcccagccacaggcatcagagagggaagcgcagcatgcggtactatgcgggtttggacgtctcggtaaaagagacgagtgtctgcattctggacgagacgggtcgggtctgcctggagcgcaaggtggcgagcgacccggccgatctggctctggtgcttcaggacccgcgctggccgctgcaccgggtcgggctggaagctggccccttgtcgcaatggctgcatgccggtctcggccaggttggcctacctgtcatctgcatcgaaacgcgtcatgccaaagcctttctgaaggcacgcgtgaacaagagcgatcgccacgatgcacgcggcatcgcgcagatgatgcgggttgatctgttccggcccgtgcatgtgaagacaccggcaagccagagccgccgggctttgctgtcggcccgacggatttgccaggagaaggccttggcgatcgagaacgacattcgcggtctcctgcgcaacttcggcctgaaggtcggtcttgtcggcaagccgcagttcgagacgcggatccgtgacctcgtcgtcgacgagcccgagcttcagccggtgatggagagcctcttatcggcacgcgccggtctgcgggcgagcgaggcggcgcttcatcgcaggctcctgcaactggttcggcaggacccggtgtgccgccggctgatgagcgttcccggcgtcggcccggtggtgtcgctggcctttgtcgccacgatcgacgatcccggccggttctcgaactcgaaggccgtcgggcccgctctggggctggtgccccggctcaaccagtccggggaaacggagcggatcggacgcatctcgcggtgtggcgacgcgatgatgcgcggccttctgttcgaggcggccaccgtgcttctgacccgtgttcgcacatggtcctggctgaaggcctgggcggtgaacctggccaagcggcgcggcatgaaacgggccatcgtcgcgctgtcccggcgcctggccgtcattcttcaccgcatctgggtcgatggaagcgagttccaatggacacgggcaacggcatgagcaggctctgaaggaggcaagccttcgggaatagaccgatcattgaaagatccgccctggcggagacgtgtcccttgcgggacggggaacgaggcaagctcgctacggctcttgaaccgatcgtaccactggcacggtcaggacgcgcaacagatcgagctgcctcgctcattccgatcccatcatgggagggcccacccgggtcgatcccgaagagaagcatgatccgcaagggatcacgcatcagccaggacgagacatcagctcggagcgcttgacctcaacacgccgaatagaga

SEQ ID NO: 9477 - DNA, 1394 bp, unidentified
  source 1..1394: mol_type = unassigned DNA; note = element_eda62de
  misc_feature 1: note = core
  misc_feature 2..93: note = LE
  misc_feature 94..1122: note = CDS
  misc_feature 1123..1394: note = RE
  misc_feature 1149..1392: note = bridgeRNA
taatggtatggactcctcccctccctaacggcatcgtgatgtgccaaagtggaggacgtaacgaccacttaaacagaagaggaggagtccggtatgaatgctacaaccatcggtttagacattgcaaaaaacgtgttccaggtacacggtgtggataaagggggcaaggtggtgctgcgcaagcaactgaagcgtgcgcaggtactgactttctttgccaatctctcgccctgcctgattgggctggaggcgtgtgccggggcgcattactgggcgcgggagctcgggaagcagggtcatgaggcgcggctcattagtccgcagttcgtcaagccctatgtaaagggcaacaagaacgaccggaacgacgccgaggcgatctgcgaggcggtgggtcgtccgaacatgcgctttgtgccggtcaaaagcgtcgagagccaagacattctggcactgcaccgggtacgccgtgggttggtaaaggagcgcacggccaaggtcaatcaattgcgggggttgctgggcgagtgcggtatcgtcatcggccaggggctggctcaggtgcgcaagcgcctgccggagatcttggaagacggtgagaatggtttgagttccctggggcgagagttgtttgccgatctctaccggcaggttctggagcttgaccggcaagtggacgcttacggggtgaagctccagaggctctatgcagccagtgcggtatgccgaaagatggggcgggtgcccggcgttgggccgatcacggcgagtgcgatggcggcctccctcggcggtggtcaggccttcgagagcgggcggcaggtttcggcctggctcggtctcgtgcctcggcaggagtcgagtggtggcaagcccaagctcctgggtatcagcaagcgtggggatacttacctgcgcaccttgctcatccatggggcacgtgcggtggtgaagacggcagccaggaagagcgatgcccaaagccgctggattaacgacctcgtgagacggcgcaacaagaacatcgcggcggtggcgctggccaacaagaatgcccgaacgctgtgggcgctcttgaggcggggtgaggactaccgcgcaccggtgttgcataacgcctagagcccaggcgagtttttatggagttactctccaccagttgcgaagcatttttcaaagcgatggcaaagcggtcggaccggtgttttcagtaatccgtttaacccaggggccttcgaggccggtagggtgattgagatgaaaacacgcggatattccatcagggccagaggcatagaagcctcatcaacaggccggatatatgggagcaactgcgctcaccgacaaacagccatcaacaagaaaagtgcttgcaaatcggaggagtccatata

SEQ ID NO: 9478 - DNA, 1456 bp, unidentified
  source 1..1456: mol_type = unassigned DNA; note = element_edab886
  misc_feature 1..2: note = core
  misc_feature 3..220: note = LE
  misc_feature 221..1435: note = CDS
  misc_feature 1436..1456: note = RE
  misc_feature 7..217: note = bridgeRNA
ctaatggcttccgagcagccagcaggtgagactgctctccgagccaccggcgggtgagcaccgagaggtccagggcctcgaaccctaaagctagatcgtgcccccgccggaaggcgaggagccgacggctggtgggatgtcgtgccgattgagcactgatccattagggcgccgcgtactcctccaggctcgaagcagtcgtcgaggggaaggaggaggagtgatcttcgtcgggatcgattggtcggagacccatcacgatgcctgcgtgttggacgtcgatgggcgcgtgctggccaaggggcgagtgcccgaaggcgtcgacggtgtggggaagctccacgagatgatgggggcgcacgccgaggatccatcagaggtcgtggtcggcatcgaactggaccggggactcctggtcggcgcgctcgtcgcagcgggctacgccgtccatgccatcaacccgctctcggtcgaccggtaccgggaccgccaccggacctcgggggcgaagtcggatccgggcgacgccaaggtcctggcagatctcgttcggaccgaccggcacctgcaccgaggggtggccggggacaccgagctcgccgaagcgatgaaggtgctggctcgggcccaccagagcctgatctggtcgcgccagcgtcagctgaaccagcttcgcaacgcccttcgggagttctaccctgctgccctcgaggcgttcgggaccgacctggcttcgacagacgccctggccgtgctcgaggtggcacccaccccggcggagggccaagcgctctccaccaccaggatcgtcgcggctttgaagcgaggaggccgaaggcggcgcatcaccgagcgggccgaggagatcaaagcagcgctgcggagctctcaactggaggcaccggcagtgctcgcccgagcctacggcgacgtcgtgcgctccatcgttcgcatcgtggccgagatgaccgcccagatcgagtcgctggccggccagctcgaagcgagttttgaggtacacccggacgccgagatccttcgcagtcttcccggactcggcgtggtcctcggcgcccgggtcctcgcggagttcggggatgaccccttccgctacggcgatcctaaggcccgcaagaactacgcggggacctcaccgatcaccaaggcctcggggagatcgaaggtggccctggcgaggttcgcccggaaccgtcggctcgccgacgcccttcagatgtgggcgttctgttcactcacctcgtcaccgggcgcccggcggtactacgacgcccaccgggccaaggggcacacccaccaacgggcgctgcgatcgctcgcaaaccgatgggtcggcatcctccacgggtgtctccaccatcgcgagaggtactcggaggccaccgcttggccggctaccatcgaggacgccgcttgacaggtagggcccgtgggatgt

SEQ ID NO: 9479 - DNA, 1378 bp, unidentified
  source 1..1378: mol_type = unassigned DNA; note = element_edafa22
  misc_feature 1..2: note = core
  misc_feature 3..83: note = LE
  misc_feature 84..1118: note = CDS
  misc_feature 1119..1378: note = RE
  misc_feature 1141..1366: note = bridgeRNA
tgatgctgtggacggctcctccgccggcatcgcaatgtgccatatttgcggtgttgtaaggaaccgcatgggaggagccatccatggaagagattaccacaattggactcgacattgctaagtcggtgttccaggtgcacgccatttccgcaaccggcacggtcgtcatccgtcgacaattgaagcgccgctatgttcttcagttcttcgccggcctcaacccctgcctggtgggtatagaagcgtgcgcaaccgcccatcactggggtcgggagttgaccaaactcggacatgaagtgcgactgatgccgccccgttatgtgaagccttacgtcaagcgcaacaagaacgatgcggctgacgctgaagccatatgcgaagcggtgacacggccgaacatgcgatttgttccgataaagaccttggagcagcaatcgatcctgatgcttcatcgaacccgcatgctgttcattcgccagcgcacgatgaccatcaatgctgttcgcgctcatctcgccgagttcggcattgttgcgggcgtcggccgcaatgggctgcttgagcttctccatctcattcgcaagggcgagaaacctgagataccggcggaggcatgtatatgtcttgccgccttggcggaccaaatcgacctcttaaagcagcggatactggaattggatcgacagatcatgaagtggcaccgcgccaatgaactcagccgtaagcttgaaggaattccaggtgtcggtcctttggtggctacagcactggctgccagcatccccgaccccagcgtcttccgttccggccgtgatctgagtgcctggatcggcctggttccgaaacagaactcaagtggcggtaaggagaagctcggcggtatcagcaaggccggtaaccgatacctaaggcagctattggtcgttggcgcgttggcggtgatcaagcgagcgaagctattaggctatactcgccatccttggctggtctcactgatggagcgccgtccggcaaaggttgcggcgatagcgctcgctaacaagatggcgcggatcgcctgggcgatgatgagccgcaacgaagcctatcgaataatgccggccaccgccgggaactgatacacggcgcacgcgtcgtgaacgtcgttggtaagagcaggagacttttaacgcacctacgccagtcggcccaaggaacgggacaacccactaagcgccaggcgcttcgagcgcgggcttttgaccgggacctgatccgcggagagcattatggccagcggcctgtttctgtgccgcatccaaaggccggacacatggcagctccgaccagcgacgtgcagaaagtcaaaacctcttgccaaaccggagccgtccacaca

SEQ ID NO: 9480 - DNA, 1352 bp, unidentified
  source 1..1352: mol_type = unassigned DNA; note = element_edb1c7d
  misc_feature 1..2: note = core
  misc_feature 3..80: note = LE
  misc_feature 81..1103: note = CDS
  misc_feature 1104..1352: note = RE
  misc_feature 1124..1339: note = bridgeRNA
tgatgaggtggacggcccccgcacccaacactgttgtggcatactgtggctgtcaaaggtcacaatcgggataaccgtccatgaaggaagttatcacagtcggcctggatatcgccaagcacttttttcaggtccacggcgtcgatcaaaagggcgatactgttctgcggaggaagctccggcgatcggagatcatcagctttttcgatcacctgccaccttgtttgattggggttgaggcgtgcgccacggctcatcactgggctcgggttctgattaatctcgggcatgaggttcggctgatgcccgcctcgtacgtcaagccgtatgtgaagcggcagaagaacgatgcgtctgatgcggaggcaatttgtgaggcggtcacgcgaccgacgatgcgtttcgttcccgtaaagagcgaagagcaacaaagcgtattgatgttacatcgcgcacgagagctgctcgtgcgccagcgcacaatgttgatcaacgctctgcgggcacatttagcggagctcggaatcgtcatgcgccaaggtccaacgggcgtcagcacactcattggtctgatcgaggatgatgagcacgatctcatccctgcattcacgcgacgggcattaaccccactcgtagaacagctaagggatttataccgtcgaattgcagaactggaccatgagattatccagtggcaccgaacgagcgaattgagccgccgtttagagacgattccgggtgtcggtccggtcaccgcgagcgcgctctctgcgacgatcgctgatgcgtcactctttaaatccggacggcaaatggcggcctggcttgggcttgtgccacgacagaattcgagtggcggcaaggagaggttgggacggatcagcaaacaaggcgatccctatgtgcgcaagcttcttgtcataggcgctcatgccgtgttgcgcttcagtcgcaaagaaggaacgggcccgaagaagtgggcggccgatttgctggtccgtaagccgtacaatgtcgtcgctgtggcgttagccaataagatggcaaggatcgcctgggcaatcatggtttcgggagagcggtttcgatcaatcccggcctgatacagggagctcgagcttttaaagattggtgaggtgcaaatggtgtgatgcgaacggtcgaaccggggtctgtaagcccgacattggggtgatgtgctcaccagctcgttggagtgtatgggaacagacttgcggaattcatcagggccagcggcatcgaaggccgcattcaaaggccgtatacatgcctgcacccgaccaagttgctaccacaccaaaagctcttgccaagcggaggtcgtccataca

SEQ ID NO: 9481 - DNA, 1371 bp, unidentified
  source 1..1371: mol_type = unassigned DNA; note = element_edc2b3a
  misc_feature 1: note = core
  misc_feature 2..68: note = LE
  misc_feature 69..1109: note = CDS
  misc_feature 1110..1371: note = RE
  misc_feature 1113..1361: note = bridgeRNA
tatggaatggcccgcccctccctccgaccgattaggttggagcacccagagggaggaggagcggagcgatgcagatagccgtgttggggatcgatctagggaagaacagctgcagcgtcgtgggtttggatgaagcgggccgggtcgttctgcgccggcggctgcaccgcgacagcgtggtgaagttggcgtcgcgcttgccagcctgcgtgatcgcgatggaggcttgctgcggcgcgcatcatctcggccgtcttctgcagacatgcggacacgaggtgcggttgatgtctccggaatatgtgcggccctacgtcaaggcgcagaagaacgacgagcgcgatgccgaagccatcgccgaagcggcgacccggccgacgatgcggtttgtcgaactcaagagcgagcaacaactcgacatgcagagtctgcaccgggcccgctcgcggttggtgggtgagcgtacggcgttgatcaatcaattgcgagccgtgctgctcgagcgcggcattgcggtcgcccaggggcgacgcaggctggagcagtatctcgccgcatcggacagtgacgacacaccacggccgttcagccaacgcatcggcatgctgatcgacgacatgcgggcgcaatggtccgaacttgaccggcggatcgccgcgttcgataccgaattcgtcgccgcggcccgcagcgacgcagccgcgcgagggctggcgaccattcctgggatcggcgttttgaatgcgaccgcgcttatcgccgctgtaggcgaggcacgaagctttgcccgcgctcgcgatctcgcggcctggctgggacttgtcccgcgacaagccactacgggaggcaggccgaggctgcttggcatcaccaagcgcggcaacaaatacctgcgcacgttgttgatccacggcgcacgggcggcgctaccatcgctcacaacggccgcgggcccgctcagtaattggctgcgcggcttgaaggcgcgagctcatcgcaacattgttatcgtcgcgctggccaacaaactggcgcgaattgcctgggcagtgctgcggtcgactgccccctacggcgccgcgatcggcagccaggcagcgtccgtttaaaggagacttagccgccgcgtcatttatccgttgctggcggttgctgagatctgcgggtggtaacagcgagatggcctgacggttgaaccggcgctctggaaccctggtttaaaaaatggcacgtcgatgccgtcgcctttatgaggactggggcgcgcggacctccatcttggccggggcgccgccccgaagaccgaatacgttgacgcagaccggtcagatcacctcgcacaaacctcttgcagacgggccgggccatacg

SEQ ID NO: 9482 - DNA, 1347 bp, unidentified
  source 1..1347: mol_type = unassigned DNA; note = element_edc3d97
  misc_feature 1: note = core
  misc_feature 2..64: note = LE
  misc_feature 65..1111: note = CDS
  misc_feature 1112..1347: note = RE
  misc_feature 1123..1341: note = bridgeRNA
taatgagatggtccgccccgtcctcccgccccactgtggggcaccggaaacaggaggactcgagatgattcgcaacaaaccccaggctgctgtctatggcgtcgatctcggcaagaatctctttcacgtggtcggcactgatgcgaccggcaatatcgtccagcgcgtaaagttccgacgcgagactcttatggccttcttcgaacgcgccgagccgtccctcgtcgggatggaggcatgccccggctcgcagtggctggcgaggaagcttcaggcgctcggccacaccgtgcgcatcattccagcccagttcgttaagccctatgtgaagtcgcacaagaacgatacgattgacgcagaggctatcgctgaggcggtcacccgccccacaatgcgttttgtcgaggtcaagcgggtcgaccaggttgacctgcaggcactccaccgcattcgcgaccagatggtcggacaccgaacgaagctgatttgccagatgcgcgcgttctgtcttgagtttggcatcccgatccgccagggggtaggcgcgttcaagatcacgttgccgacaatcctggccgacagctcgaacgatttgagcgcgaccatgcggcgcctgctcacggagctcttcaatgatcttaaggggttagaggcgcgaattgctgaaatcggccgagacatcgaagcagcggctgccgacagcgaactggcgaagcgattaatgacgatccccggcattgggccgctcggtgctaccgccctactcgccgccgccggcaatggccagcagttcaaaagggcgagagacttggctgcgtggctcggattggttccacagcagcactcgactgggggaaaatcgttgcttctcggcataagcaagcgaggcaatcgttacgttcgtcggctcttggtccacggtgcgcgatcatgcgccatgcacctcgaccgatcgaaggaccgcctcggcctttggatcaaccaacttcagtcgaggatgcacatcaacaaagtcgtcgtggcgcttgcagcaaagattgctcgcatcgcctgggtagtcatgaatcgaccaggagctctctaccagcagcgcggacacgcggtctcgtaggagctccggtcgtagattgcgaggttcgaggaggatgacgagacagccgatcggcgcaccgtaagctctggcaaaaaaacgtgcctgtgcacgaaccattatttgagaacgatgcgcgcggatctcatcatggcctggctgcaacagcagctcgctcgcgagaggccggatacatttacgcaactgtcttcgtcgtcacgcgccaagaaccttgcacggacggggcggaccataca

SEQ ID NO: 9483 - DNA, 1236 bp, unidentified
  source 1..1236: mol_type = unassigned DNA; note = element_edc4197
  misc_feature 1..3: note = core
  misc_feature 4..244: note = LE
  misc_feature 245..1210: note = CDS
  misc_feature 1211..1236: note = RE
  misc_feature 57..224: note = bridgeRNA
catcctatgtttgtaataaaaaaggatttctgtttttagtacatttatgtttagattttcaacagaagaaagggaaagataaaaactaaaaattgtcatttgtcataatagactgttcgaaatggtagttcctttccctctctgcttttgagcttggacagttcattaggcctggagcctgtatttaggattgataagtcaatagcagatttcttccgtttactttttacttaaaaacaaagttatgacaaaaaacaaaaattacatcggaattgacatatcaaaattaagttttgatgttgctattaaaatggagaatgagaaatattcacattttaagtttagcaatgacaatgcagggtttataaaattcaaagagttattaaatcaagattatgctatatgtgtaatggaagccagcggaccttattacttaaaattagctacatttctttttaataggaaggcctcggtttgtgtaataaaccctctagtaatcagacgttttagccaaatgcgaatgtcccgaacaaaaacagacaaaaaagatgctgtaatgattgctgaatatggaaagagtcaaactccaaatttatggaaaccagaagcagaatatgtattggagataaagcaaatgcatgcttatgttgagcaaatgaataaatccagaacaggtctgatcagacagcgagaagcttttaaatacaatgcggtagaatctttggcattaaaggaaagtttagaaaaaatgatattgttattagaaactgaaattgctcttattgagaataaaatgattgcaattataaaggatcaacataatgaactttttcagcaattaaaaagtatacctgggatcggaataaaaacagctatgttgttaattgtcataagtggtggttttacaaaatttgataatgcaagacaattgagttcttatgttggaataagtcctcgtattttcgaatctggaacaagtgtaaaagggaagtcgaaaatttgtaaaatgggcatgagtcgcattagggcaatgctatatgtttgctcttggtctgctaaaaaatgtaatgctgcttgtaaagaattatacgatagattagtcgaaaaaggaaaagctaaaaaaatagctttaatcgctgtagcaaacaaactacttaaacaagcatttgctttagcatcaaaaaatgaatattatttacaaaataattaaaaataaatttgcttttaaacacagtt

SEQ ID NO: 9484 - DNA, 1594 bp, unidentified
  source 1..1594: mol_type = unassigned DNA; note = element_edcb35f
  misc_feature 1..3: note = core
  misc_feature 4..269: note = LE
  misc_feature 270..1481: note = CDS
  misc_feature 1482..1594: note = RE
  misc_feature 12..289: note = bridgeRNA
tctactacaataatttatggataggatatggcagccagccatacgcctttccatcccatagtctaagctacaataaggggagtaattggtctgacgactcctttcttgggtctacacgcccgtacgtgagacagtcagccatcctcttgttgcagcgttcgttttgcaggtagagccaccactcgtgcgttcgtgtcactcagtagattgaataggcaatgggtaagagatgggcaccgattacaatacatcaatcaggaggaatacttatgaacgctgtcggtatcgacatttccaagggcaagtgcatggttgctatcctgcgtcccttcggtgaggtggttgcttcaccttttgaaattcagcacaccgctcatgaactcagacgtttggttgaacgtctgaaaagtttggacggtgaaacccgcattgttatggagcatactggcaattactatctgcctgtcgccaggcatctgcacgaagccggcctctatgtgtccgttgtcaatgctattcttgtacatgactacggtcaaaattcccttagacgggtcaaaacggacaagatagatgctgttaaaatcgccagctatgctctaagccattggcttgatcttccgcaatatgcgccggaagaagacgttcgccacatgcttaaaacctgcgcccgccagtgcaaccagtacgttaagcagagtgttatgcttaaaaacagcctcatcgctttgcttgaccaaacctttccgagtgtcaacatgctgttctccagcccgccccgcaagggggacggtcacgaaaaatggattgacttcgtgggtaaattttggcattttgaatgcgtcaacagcctttccaaaaacgtttttacccagcgctatcaaaaatggtgcaaaagaacaggttacaactttctttccactaaggccgctgccatctacgatttcgcctgcatacaagtcagtacactgcctcgaagcacctttgccaaacagcttattactcaagctgtgtcgcagcttaactccctatcggaaacgctggctctgattcggcagcagatgctttcccttgcctccggcttgccggaatttcctgttgtcatggctatgcaaggggtcggcaatgtgttaggacctcaactcatggctgaaattggcgatgtgcgacgtttcaaccgtaagcagtcgctggttgcttttgccggtatcgacgcaccgcctttccagtccggcgcctttgaagcacagagtaccggcatttccaaacgaggttcttcctcactcagaaagacgctttttcaggtcatggactgcctgctcaaacacgcgccctctcatgatgctgtattccaatatcttgacaaaaaacgcggcgagggtaagcattattacgtctacatgatggcaggagccaacaagttcctgcgtatctactacgcacgggttaaggagcatctaggcagtttggcggttcagtagcccacatattctttttgcttggcttaccagcttatttcagggtggttttatttgatgttccattttttacctttcattttttattcatttccggcttgacttttctttgcagg

SEQ ID NO: 9485 - DNA, 1370 bp, unidentified
  source 1..1370: mol_type = unassigned DNA; note = element_edce7b9
  misc_feature 1..2: note = core
  misc_feature 3..75: note = LE
  misc_feature 76..1110: note = CDS
  misc_feature 1111..1370: note = RE
  misc_feature 1083..1358: note = bridgeRNA
tgatggggtggacgccccccgacggcatcaatgtgccagagtggaggtgttgattcaccactgagggaggcgtccgtgtcgcaggttatcacaatcggtctggatatcgccaagaacgtttttcatgcgcacggcgcagacgagcgcggtgcgatggtcttcagtcggaagctgacgagaggcaagctgctcgacttcttcgccggtcagccgacgtgcgtggttgcgctcgaagcgtgcggcggcgcgcatcactgggcgcgcgagctgcaggcgatgggacacgaggtgcggctgatcccgccagcgtacgtgaagccgttcgtgaaacggcacaagaacgacgcgatcgacgcggaggcgatctgcgaagcggcgcagcgccccggcatgcgcttcgtcgcggtgaagagcgaggagcagcaagcggccgggctcgtgttccgcacccgcgatctggtggtgcgtcagcgcacccagctcatcaacgcgatccggggccacttggcggaatatggttgggtggcaccgcgcgggactgcgcacatgacgatgctggctgatcttctggaggatgaggagatgacctcgaccctgccggaggcggcacgaccgatgttcaagcttatggtcgacctgctgggcgagctcggcaagcagatcgccgcgctcgaccgcgagatcgcgcggcgggcgaaggaggatgaggcggctcgacggctgatgaccatcccgggtatcggacccattgcagcgacggcgattatcgcgctcgctccgccgctcgagacgttccgcaaaggccgcgacttcgcggcgtggcttggtcttgcgccgcgccagcactcgaccggtggcaagcagcggctcggcagcatatcgaagatgggtgagcgaacgatcagacggctgctgattatcggcggcagctccatggtgcgccaggcctctcgccacggtgcgccagcgggttcgtggctggagcggatgctggcacgcaagccgcgcatgctcgtctcggttgcgctggcgaacaagatggcgcgcatggtctgggcgctgctcaccaaaaaggaggattacagggctccggcagcggtcgcggcgtaagccgggacggcggtcagaggcgtcggggacgtaggcggtcgaaggagggtatggcacaacagtcggcgagacggggctggaagaaccagggaatggcagagcgccacccaagcgcgcaaagctgaaatggatccggtccgcgaactcccatactggcccgcagctatggcgctgctcatcgaggccggacagatgacagcatccgactacgtgccaacacaccccgatttaccgcttgcatccgaaggggcgtccacaga

SEQ ID NO: 9486 - DNA, 1355 bp, unidentified
  source 1..1355: mol_type = unassigned DNA; note = element_edd7b03
  misc_feature 1: note = core
  misc_feature 2..64: note = LE
  misc_feature 65..1114: note = CDS
  misc_feature 1115..1355: note = RE
  misc_feature 1127..1349: note = bridgeRNA
taatgggatggtccactccgtcctcccagtgcaacaatggcggtgcagacaaggaggagtggtcatggcaaatcgcgaaccaacgaacgtggcggtctatggagtcgatcttggcaagaacgtcttccacatcgcaggagccgatgccgatggcgcgattatcggcaactggaaattccgacgcgataagctgctgcagttctttagagaggctcaaccagcgctgattggtatggaggcctgccccggttcacaatggctggcacgtcacctgcagacatttgggcatcgtgttcgcatcattccggcccaatttgtgaagccctatgtcaagtcgaataagaacgacgtgatcgacgcggctgcgatcgccgaggctgtcacgcggccgaccatgcgctttgttgagatcaagacggagacgcaggcggagctgcaagcgcttcaccgtatccgcgaccgcatggtaaccgggcgaacccggctgatctgccagatgcgagcgctgtgtatcgagttcggcgtcgcaatccatcagggtgtgggtaaattcaaggcagacatgccgcgagtactggccaacgaggaaaacgacctgacgccgatgatgcgccggctgctgggagatctgttcggcgatctgcgccatctcgaagagcggatcaccgaagtcacccgtgagattgaagcaaatgctgcacaggacgagcgatctcgacggctgatgaccgtacccggcatcggcccactcatcgccaccgcaatcctggcttcggctggagacggtcggcagttccgcacggcacgagacatggcagcttggctgggcctcgtcccaagacagcattccactggcggaaagacgacactgctgggaatcagccgccgagggaaccgctacttgcggcgcttgctcatccacggcgcacgatcctgtgtcatccaccttgatcgcagccgagaccggctcggcgcctggatcgacaccttgcagaagcgcatgcacatcaacaaagtcacggttgcattggcagcaaagatcgctcgcgtcgcatgggtgattctcaatcggccgggagcaacctacgaacgccgtgatcccacggtggcgtagagttctaggtcgacagactgcgaggctcgaggaaacgatgacgagacagttgatcggcgcactgtaagccttcctgccgaaagcgtgctccagcacgacgaagctatccaggaacagcgcgcgcgtatctcatcttggcctggctgcaaccgcagctcactcgcgagaggccggatacatttaagcagactgtgctcgttacgagaccgaaaagccttgcacggacggagtggaccataca

SEQ ID NO: 9487 - DNA, 1408 bp, unidentified
  source 1..1408: mol_type = unassigned DNA; note = element_ede30ce
  misc_feature 1..2: note = core
  misc_feature 3..209: note = LE
  misc_feature 210..1028: note = CDS
  misc_feature 1029..1408: note = RE
  misc_feature 1181..1403: note = bridgeRNA
agatggggtcacgggccggcaaccgacctagttgcggcggcggccgtccctcagagtgatggagtttggaaaccccggagtcaggcgcagtctgctccaagcatcatcgagggacgaccacggagcattatgctggtatcggcgtgtcattggaaagcgcgagcctgtgcgttgtcgacgcaacagggcggatcatacgggaggccaaggtggccagcgagcccgacgttctgatcgcatggttccgcggtctggagtttgcggtgacacggatcgggctgcaggccggaccgctgtcgcagtggctgtatgcgagcatgcgggaggcggggctgacagtcgaactgctcgcgacccggcacgtgcgggccgcattcaaggcaatgccggtcaagaccgatcggaaggacgcgcgcggcatcgcgcagctgatgcggctcggctggttccgtccggtgcgctgcaagtcgttgctggcgcaagaagtgcgcgcgctgttgaccgcgcgcaagctgctgcagacgaagaaccacgacgtcgagatgagcctccgcggggtactgcacggctttggactgaaggtcggcccgacgacgccacgtaccttcgccacccggatccgggaactggtcgcgggccatcccacgctgtcgacggctgcggaagcgctgctcgcggcccgcagcacgcttttcgagcaatggcaacagctcgagaagcgcctgcgatccctagcccgggaggatcaccgcgttcggctgctgacaaccgtacccggcgtcggcgcgatcgtcgggcttacctatgtatcggcgattgacgatcccggtcgtttcagatcctccaaggcggtaggtgcgcattttggcttgaccccgaagaagtatcagtcgggcgagaccgacgtcaccggacgcatttccaagatcggcgacgggggcgtgcgcaccgccctctacgaggcggccaacgtcattctgacccgaccggtgaaaggttcgactctgaagagctggggatgcgtctagcggctcgcgccggcatgcgcaaggcgaaggttgcgctcgctcgcaagctcgccgtggtactgcaccgtatgctggccgacggcacggaattccttgccaacaaagcggctgcgggccgtagcccgctaacaaaggagattacagatccgggcggttcgggataccagccgcccggagcaaggtcccgtcgccgggacgatggatcaggtcagaccgatgacatttcagcagggcgttgccactgcgcatagttagattggtcgatctgctcctcatccgaccccatcaggtggcggccaagcgccgaccccggacagaagaaagacgccggcgacaggatcatggctcagagggattgaccaacaagggcccgtaacaga

SEQ ID NO: 9488 - DNA, 1376 bp, unidentified
  source 1..1376: mol_type = unassigned DNA; note = element_ede4bf5
  misc_feature 1..2: note = core
  misc_feature 3..86: note = LE
  misc_feature 87..1091: note = CDS
  misc_feature 1092..1376: note = RE
  misc_feature 1133..1323: note = bridgeRNA
gaatgtaagggacttccccgtcccgaggtagcaccgacgtgccaggattgggttgcgacatcaatcttttcaagaggggaagtcccatgagcttagtttctacggttggaatcgacttggcaaagaatgtgttttcggtgcatggcgtcgatgcgcgtggcgaggtcatgatacgtcgcacggtatcgcgtgcaaaactcagcgagctggtggcccagctgccgccgtgtctgatcggcatggaggcgtgttcgggcgcccacgattgggcgcgacgatttgttgtctttggccacgtcgtcaaactgatggcaccgaagttcgtgaccccgtatcgcatgagcgggaagaacgacagcaatgatgccgaggcgatctgtgaagcggtgaggcggccgaatatgcgtttcgttcccatcaaatcgatcgaacagcaaacggatctgagtctgcatcgcgtacgtcagggcttcgttgaggagcgaaccgcgatgttgaatcggattcgcgggctgctcgcggagttcggccacattttgccactgcgcgccgtcgaagtgcgtcgtcgtgttcccgagctattggagaaactccccacccgagtggccggctgcgtgcgcgatcttctcgatcacgccatgcgactcgaggccaaagccgttgagtatgagcgagagatccgggtacacgctcgcaccaacgctctcgctcaacgagcccagactcgccagggcatcggtccgatcaccgcttcggccctggttgccaccgtcggtaatgcacacgacttcaagaatggccgtcaatttgccgcctggcttgggctcgtgcctcgacaatattcaacgggcggcaaaactcggctcggacacatcaccaaacgcggcgatgcgtacctgcgctcgctgctcgtcatgggcgcgcgagctgtcttgcagagcgctgctcgactgaatgacccgttttcccgatgggcacttgccgttcagcagcggcgcggctatcaccgcgcctgcatcgccattgccgctaagaacgcccgcgtcgcctgggcgctactggcaaaggacgccgccactgccgccgcttgatcgtacggcaaaggaattggataacaacgtggaggaacacacgcactgcactcgttgagcaaacaggtcagaccggcgctcgtggaaccagatcaacctctgagcggaaatcgctgcctaacgatcgaggcgcgagcgcgcggcttacacgcgggcccgagtgcatagcactcaccagtggccgattagagttacgcagtctgtccttcttcgcttaatcgaatatccgcagacgaaagaaatagaaccaaacaaaattgttgacacaacggggaagtccttaga

SEQ ID NO: 9489 - DNA, 1350 bp, unidentified
  source 1..1350: mol_type = unassigned DNA; note = element_ede7a06
  misc_feature 1: note = core
  misc_feature 2..72: note = LE
  misc_feature 73..1098: note = CDS
  misc_feature 1099..1350: note = RE
  misc_feature 1118..1347: note = bridgeRNA
taatgagatggtcagcccgatccccacgaagcggtacgctgagtggggattgttctttttgggagacctctcatgagcaccgtcacgctgattggcatcgatctgggcaaacacagcttccatctgcatgggcaggacgcggccggcaggatgatgtttcgcaagaagtgctcgcgccaggatctgttcaagttactgggcaacacaccgcgcagcacagtggtgatggaggcctgcgccggcgcgcactggatggcgcgccgcatcgaagaactgggccaccaggccaagctcatttccccccagttcgtgcgccccttcgtacagggcaacaagaatgacttcgccgatgcccaggcgatctgcgaggcggcctcgcgcccgagcatgcggttcgtgagcgtgcgcaatcaggctcagcagaccgtctctgccctgcatcgggtgcgtgaatcactggtcgctcagcgcacgggcgtgatcaaccaggtgcacgcctttttgctggagtttggcatcagcctgcctcgtggtcaggcgatcctgcgacgcttgccagcggttctggccgaacacgcgctgccgccccaactaggcgcgctgctggagcggctgcgatcgcactttcagtatctggatgagcaggtaggccagattgagcgtgagctgtgtctacagctgcgcgaggatgaacgcagccagcggctgcttcagatccccggcatcgggccaatcactgctagcgtgctgatgactgagctgggcgatgcgcggcaatttggttcggcgcgccagttcgccgcttcggtaggcttggtgcctcgccagtacagcacgggcggcaaacccacgctcctgggcatcagcaaacggggcgacaagaaccttagacgattgttggtacagggcgctcgcgcgatcatgcgacacgtggagcgacgaaccgaccggctaggcgcctgggtgcgcgagctgcaggcccgacgtcactcgaacgtggtcgcttgtgcgctggccaataaattggcgaggatcgcctgggccatcctcgccaatggaacgaactaccgaagtgagcagactgtagcgccagcctgaccttcatcaccgttttacgcagtcacttcctggttttgcgacgcgagtacgtgaagacataaacggctcaacggcctggcaagaaacctgacatgaaatccagcaccgcgatgctgaggggctttttaggtttgccgggcgcgactctcatcatggagcggggggcctagccccaactgactccgaatagatttgagcaagcccaatttacgcctacaccgcctcgcttgcaaaaatcgggctgaccataga

SEQ ID NO: 9490 - DNA, 1222 bp, unidentified
  source 1..1222: mol_type = unassigned DNA; note = element_edec787
  misc_feature 1..2: note = core
  misc_feature 3..210: note = LE
  misc_feature 211..1212: note = CDS
  misc_feature 1213..1222: note = RE
taccttagatttgatcagttgtattaaaccaagaacggtggtataattgaaaacctgtcagcgatccatcgatggcctgagtagagcactatcgcgatatttggaactgacaggtttaaagaaccaagacctgtataagatattagtcttacatctgttaaggttattaggtaacggttcttatcatttaatatatctaaacgctaaagtatgaaattcaaaacatttattggaattgatgtcagtaaattgacattagacatttgccttattaccgctgatggggtaattgaacacttcaaaattgaaaacaaagaactttccataaagaagtttttcaagaacttggaaaagagctgtctatgggaagatattcttgtctgtgctgaatttacaggccattattccaatcctttgaaagtgttttgcataagtcaaaatattgcattatggttggaaagcggagcagaaatcaagcttagatcaggtgtccagagaagaaaaaatgataaaattgatgccgaaaggatagttgattatgcgatacggtatgttgacaaagccaggcttcagaatctcgatgataaggtcattgaaacagtcaaatcacttagtaatgagagggatatgtatataagggaccgggctaaatacaaatcccaggtaaaggattttgaaggatacattgattcagatatttataaagccaaaagcaaaaggcttaaaaaacagatcctttcattaaccaaattaattgattctatcgacaaacagatagaccaacagttcgcctccagtgagaaactcaccattcaaaaagagatattgttgtcagttggaggtgtaggagataaagtagcaactgagacgatcatagccacacgaggcttcaccaagtttggtaacggtagggaattttcctgtcatgtaggcgttgctccattttcctttgaatcaggtacaagtcagagatctaggaaaaaggtgtccaacagagccaataaggagcttaaaaaactcttccatatggctgcactctctgcaatcaagatgaaaggagagcttagagaatattttgaaaggaaggttgctgagggaaagaataaaatgactgtaataaatgccgttagagccaaaatcataaacaggatttttgccctgataagggataatagaaaatatgaaaaatcttatattccttctgttgtttaatccataagaa

SEQ ID NO: 9491 - DNA, 1285 bp, unidentified
  source 1..1285: mol_type = unassigned DNA; note = element_edf014a
  misc_feature 1..2: note = core
  misc_feature 3..310: note = LE
  misc_feature 311..1273: note = CDS
  misc_feature 1274..1285: note = RE
  misc_feature 18..241: note = bridgeRNA
ctgacttgttgaatcgagcccagatgctcggtctgcagccgtagcgtccagggtgtcggtcggcacgggcccgcagtgccccttgccgccctcgggctggctcaccaatagcgtgccgtcgccggccgacacccgcgcggtgtggctcgacagaggcatgaaggtgacacggtgacttcaagtcagggtgcccaccgcactccccttcctgactcatcgagtgcgaaagcagcagcctgtgatcctgatcggtgtcgatccccataagtcgtcccacaccgccgtcgcagttgacgccgcaggccatcaggtggcccagcgccggttcgtcgtcaatgccggaaccttccgccagctgatgggctggtgcgagcagtggcccgaccgtcgtttcgcgatcgagggtgccggcggcctgggccgctcgctcgcccagcagctggccgccgcgggcgagaacgtggtcgacgtgccctccaccctgtcggcccgggcccggctgctggccaccggaggagaccgcaagaccgacgccaaggacgctctccacgtcgcccaggtcgccctcttccgccccgacctgcgtcctgtgactcgggaggaccagacgaccatcctgcggctgctgaccgagcgtcgagacgacctggtccacgagcgcacccgcgtcctcaaccgactccacgccgtcctgcgtgatctcctgcccggcggtgcccccaccgcgctgtcggccgacaaggctgccgctttgatgaaggggatccggccgctcacggccaccgacaactgccgccgggacatagcccgtgacctgctggccgacctgcgcagactggaccggcaggtcaaggacaacgaagcggagatgcgcgaagccgtcgccgcgactcgcaccacgctcaccgccctgccgggcctgggcaccgtgctggccgcgaaggtcatcggtcacatcggggacatcagtcggttccccaccgagcaccacttcgccagctacaccggcagcgcacccctggacgcctccagtggcaacaacgtccgccaccggctcaacaccggcggcaaccgcgcgctgaactctgtgttgcacacgatcgccgtctgccagatccgcggcggcgggcgcgggcaggactactacctccgcaagatcagtgaggggaagacaccttcggaagcccgaagggccctcaaacgacgtctgtccaacgtggtctaccggatcatgaaacgagaccaccggaaccaccttgctcaagccgcttgacacacagaggcg

SEQ ID NO: 9492 - DNA, 1280 bp, unidentified
  source 1..1280: mol_type = unassigned DNA; note = element_edf0310
  misc_feature 1: note = core
  misc_feature 2..189: note = LE
  misc_feature 190..1158: note = CDS
  misc_feature 1159..1280: note = RE
  misc_feature 28..199: note = bridgeRNA
ttgtatgacgcgaaaagagcattgtcaggggtgacgggggctgggtcatgaccgaacccccgtcgcgaccggaagcccgcaggcgtttcggactcgaatccgcgaatgagcttggagctccggtcgcttcttccatacccgaacagttgcccgggcatgagcccgcatcagcaagaaagggatacgaagatggcaatgctctcgtttggcggtatcgatgtgtcgaagaatcgtttggacgtcatggttttgcccgaggagcaatgctcttcggtgccgaacgacgcagccggctgggcaaatctcgttgaacagctgcgcggttgctcgatcgccgcgatcggcatcgaggcaagcggtggctacgagcgcggtgtgatgcgtgccttgctcgcggccggcatacccgcgcgccaagtcaacccgttcaagcttcggcaattcgccagggccagcggggtgctcgcgaagaacgatccactcgatgcccgaatgatcgcgtcgttcgtcgccatcatgccgacgcgtccagcgcagctgcaggcgccggcagcggaacggctggccgagatgctcgccgtccgccgccagctcagcgccgagaaagtcgccgccgagaatgcctccagactgctggaagatgcgatgctgcagcgcctttctcgccgccgcatcggaaggctcaccgccgacatcgacgtgctcgacgagcgcatggtcgagattgttgcggccgatgccgcgctcgctcatcgctatcggctgctcacctccatgcccggcgtcggcgccgtgctggcatgcacgctgcttgcgctgttgcctgagctgggccgcatgagccgcaagcaagttgctgcgctggtcggcgttgcgccctacgccttcgagagcggtacgctcaagggaagacgctgcatctggggcggtcgtgcgcatgtccgccacgtgctctacatggcggcgatgagcgccagtaattggaatcctgtgctcaaagccttccacgatcgcctgaaagccgctggcaaactgccaaaggtcacgatcgtggcggtgatgcgtaagatgatcactattctcaacgcaatggttcgcgacgacgtcacttgggccgaccgttacatcggtcggcacagcgtgccgaccgcacggtagccgttgcgctgatcgatttggccgagtcaaggccgtagccgcgcgcagcgcgggggcgcgaagcgccagccttgacgcggcccaatcgatcagcgatctgcctgcgacaaggtgacagttgc

SEQ ID NO: 9493 - DNA, 1536 bp, unidentified
  source 1..1536: mol_type = unassigned DNA; note = element_edfd375
  misc_feature 1..2: note = core
  misc_feature 3..243: note = LE
  misc_feature 244..1422: note = CDS
  misc_feature 1423..1536: note = RE
  misc_feature 3..221: note = bridgeRNA
ctcgtataataaagtagtagttattaaagtccctctccaaggacaatatgctacactgtaaaaggtgctgtggattggtttgtttctcctaccgcaagacggtttatgaaaggctccaaccacagacctttgcagtattgttaatcagttagataccgcccgacggtttatttagaacgaggttacaagagcaaagagccctgtggataacagcatcaaaataaatctatcggaggtaaaaaaatgattttcgttggaattgatgttgcaaaggacaagcacgattgcttcatcataagttccgaaggtgaggttcttgccgatgtctttaccattaccaacagtaaagaagggtttgaacatcttctccaaacaatccatacctgtacaggtattggcggctcaaaaataaaggtaggacttgaggccacgggacattacagttacaacattcttggatttcttctcgacaatggcctgccaacctatgtcattaaccctttgcataccaacctttaccgtaaaagccaaacacttagaaaaactaagactgaccgtgtggatgcaagaacaattgcttctatgctaatgtctgatgtgagcctcaagccctacacaaacatagcataccacaattccgaactaaagtcactaacaagatacagattcgacaaggttaaggaacgagccacattaaaatcttcggttgcaaggttagtgaatattctgtttcccgaattagaaaaactgttgccaactttgcatacagcctcgtcttatgcattgttaagcgagttaccaagtgcaaagcacattgccgaagttcatctcactcatcttacaaatttactgtatacagcttccaaaggtcgttacaacaaagataaggctattcaaatccgtgaaaccgcaagaaattccatcggcacatatatgcccgctaaagctttggaacttaaacataccattaaactcattaaagaatttgataacgaaattgctgaaattgaatcggttattcaatccataatggataagattaattctcctattactacaattccgggtatcagtctccgtatgggagcaatgattattgctgagattggagattttaacaactttgattcccctgacaaaattttggcttttgcaggactttcgccgtctacataccaatccggtcagcttaacaactgctatgcccatatggagaaacgtggctctcgttatttgagatatgctcttttcaacgcaacaaaatttgtttgcaattggtgtcctttatttgctgattatcttgctaaaaagcgttccgagggtaagcattacaatgttgctatctctcacgctgccaagaagttagttcgccttatttttgctttgcaaaagtcaggtcaaccttacatcgccaaatcataactttttctattttttaaaactcggcgtctttgacgtctgtttcgttatgcctttttctaccgtctctcaattcacaacattttttcttttttgacttgacttttaatagttagt

SEQ ID NO: 9494 - DNA, 1374 bp, unidentified
  source 1..1374: mol_type = unassigned DNA; note = element_edff2c6
  misc_feature 1..2: note = core
  misc_feature 3..92: note = LE
  misc_feature 93..1115: note = CDS
  misc_feature 1116..1374: note = RE
  misc_feature 1140..1360: note = bridgeRNA
gatggagtggatggctcctgctccccggcgtcaaagtgcgccataatacgcagtcaccgtcaaaagtgctgcaacaaagaggagccacccacatgcaagttaccacaatcggattagatttggccaagaacattttccaagttcatggcgtgagagaagatggatctgttgccttcaaccggccggtccgaagagcgcagttactgaacttcttcaagaagcaaacagcatgtcttgtcggcatggaagcttgcggatcaagccattactgggggcgtgagcttacaaagctgggccatgatgtccggctcatggcgccggtctatgtcaaaccttatgtaaaacgcggtaagtcagacgcagcagatgcagaagcgatctgcgaagccgtaacccgccccacaatgcggtttgttccgattaagtctgtcgagcaacaaggcgttctaactcagcatcgcgtgcgtgagcttttgatccgtcagcgcactcagctgtcgaataccattcgagcactggttggagagtttggctacataatccgcaaaggcgtcaattatatccgcgacttcgcagttgaaatgcgggctggtggtgccgaaggaatacctgcaatggcgcgaagcgcaatcacagcgctgtgtcgccagttcctggggcttaatgagaagctgatcatagtggagaaggaaatcgttcgtgtcgctcgcaaggacaaacgcgtccagcttcttcaaactatccctggcatcgggccgatcaatgcgtcggcaatcgttgcgaccatcggaagtggtgagcagttcaggacggggcgtgactttgccgcctgggtcggactgacgccgatcaacaaatcatccggcgggaaagaacgcctcgggcgaatatccagaatgggaaataagtatctgcgaaagctgttggtgatcgcgatgacgtcacgcgttagcgcggccatctcgcgtcccgaccgcgttgacccgtggactgcatctatactggcgaagaagccggttcggctggcgactgtcgcaatggccaacaagaccgcacggattatctgggccgtgctctctcgaggcgagccatttagacacgctgccgctgcctaacgaacgaaggaaccaaacagaacatgagacttgcaaggacgaattgagtttatggtaatccgggtcagcccgggagctgaacgaacccacgagcgtcatggacatgaaaagtccgcaaaacggtttgggactcagctcacggaatccataagggccagcggagtagattcgcgcaaacaggccggacacaggtcagtaccagaccaaggtgcaccgaaaactcaaaaaagaccttgcaatgcaggagccatccacacag

SEQ ID NO: 9495 - DNA, 1600 bp, unidentified
  source 1..1600: mol_type = unassigned DNA; note = element_ee0c5f4
  misc_feature 1..5: note = core
  misc_feature 6..297: note = LE
  misc_feature 298..1485: note = CDS
  misc_feature 1486..1600: note = RE
  misc_feature 53..267: note = bridgeRNA
ctgctataaataagatgtgttgaatctctcaataattatccattttccttgcgcatttaccgtatgctatcctcgtccaacggtgacgatgatataatttcctcatgcagacagaggttccctgctttatccctgcggcaccgtccgctttacagcagtatgggacctctcccttatgggatttcatgaatgagccggatgcgggagtgatctttccgcagatttctatgcaggatatgactcataaggacatgaggaactgtctgtacatcaacaggaaaggcaggtgccaacactatgttcattgtcgggatcgacattgccaaacggagtcacgaagccatcatcatcactgaggatggccaggttgtccgcaaggcattcagcttccggaataactgtaccggctacaatttgttactggaacaggtacggaggctgacccttgtaaagagccagatcgtattcgccatggaatccaccgcccactattggctggcactctacgccagacttttgaaagacggatacacagtcatggttctgaatcctatccaatcccattccctgcgggagctttacatccgcaaggccaaaaccgatgccagagactcactcatcattgcggaccttgttcgcttcgaccgctgcaaagccagcaatgtgcctcaggacaaaattctggctctgcgagaactgtgccgaagccgcgcctatctggtagacatggccgctgatctgaagcggaagctgattgccttattggacagaatatttccggagtacgaatccctgtttgattctgttttcagcaaggcttctattgccgtactgcgcaaatactctacaccccaaaaagtgaaaaatgcaaatctcaggaaactgacggatatccttatggaaagcagcaacggacattttggcgagtggaaggcccatcaactgaaagaggccgcctgcagcagctttgggatcgatgacagcgacggtgtgtattccacgttgcttgggatgttccttgagcagatcctgtctttaactgcacaggcagattctttggaaaaacagatatccgtattcttccaagagtttaataaccctttaacctctataccgggagttgggactgttctcgccgcaacaagtttaagcgagatcggtgacattactcgcttttcttctgccgataagctgttggcttacgcaggacttgatccatccgtgaagcagtccggcgaatttaagagcaaccagaatcgtatgtccaagcggggctctccttatttacgccgtgccatttggttggcgtccacggtagcagtgcatcgtgatccgatgtttcaaacctataacgaaaagaaattatccgaaggtctgcattacatgaatgtgattggccatgtcagcagaaagatgaccgctgtgatcttcgctgtcctccgggatggacaaccgtaccaacccattttgcaatctgccggttaaccgagctgcatccttttcatccggcccgcaaagggtctggttctttgcgcccttttccgatataccccttatacacgcgaactgtaattttatcccttgacaaacccatagccga

SEQ ID NO: 9496 - DNA, 1358 bp, unidentified
  source 1..1358: mol_type = unassigned DNA; note = element_ee0cc80
  misc_feature 1..2: note = core
  misc_feature 3..74: note = LE
  misc_feature 75..1103: note = CDS
  misc_feature 1104..1358: note = RE
  misc_feature 1079..1346: note = bridgeRNA
tgatggtgtgaccgccgcccgacggcatctggtgtgccagggtgggtcagcgacgatctacgaggagggcggtcatgtcggagattaccacggttgggctcgatctggcgaagaacgtgtttcagctgcacggagcggacgcgtccgggcgggcggtgcttcggcgcaagctgcggcgtggacaggtgctcgaggtgctggccggattgccgcgctgcacggtggcgatggaagcctgcggcggggctcacttctggggccgggagattgggaaactgggtcatgatgtgcggctgatcccgccggcctacgtgaagccgttcgtgcgcaggcagaagaacgacgcggccgacgcggaggcgatctgcgaagcggcgcagcggccaaacatgcgcttcgtgccggtgaagagcgaggagaagcaaggcgcggcagctgtcttccgggtgcgcgaactgctgatccggcagcgcacgcagacgatcaacgcgctgcgcgggcacctgaccgagtttggggaggtcgtgccgcagggggcgtggaacgcacggcgcctggccgagcgggtcgaggccgaggacgatgcgctgcccgcgacggcgcgcgcgaccttgcaggtcctcgtggacggcttgcgcgacctcgacaaggggatcgccgggctcgatgcggagatcgcccgccgcgcacgggaggacgaggtcgcacggcggctgatgacgatccccggaatcggcccgctggtcgccaccgcactggcgacgctcgcgccgccaacggagcacttccaccgggcgcgcgacttcgcggcgtggctcggtctcacgccccggcagcattcgaccgggggcaaacagcggctcggcgcgacgacgaggatgggggagcgatcactcaggcggctcttgatcctcggagccaacagcgtcgtcatcaagcggcgcacgaacccgatggcgcgggagggaacctggctcgaagggctgctcgcgcgcaagcccggcatgctggtgcgggtggcgctggccaacaagatggcgcggatcgtctgggcgctcacggcccgcggcggcgtctacaaggctccggtcgcggcggcgtaggccgttcgcgatcggtgacgtcggagcgaaagagggcaaggagacgtatggcgcagcagtcgtgagacgggaacgggacacccagggtgcaacaaagtgccttcgagcacgcggctttgatctggacccgatcctcgaccaccacacgggcccgcggcatccacggccgcatcacgaggccggatacatgtcagcacccgacagcgcgtcagacgaagctccgaaatctcctcttgcgcatggggcggttataca

SEQ ID NO: 9497 - DNA, 1408 bp, unidentified
  source 1..1408: mol_type = unassigned DNA; note = element_ee0f916
  misc_feature 1: note = core
  misc_feature 2..301: note = LE
  misc_feature 302..1177: note = CDS
  misc_feature 1178..1408: note = RE
  misc_feature 14..242: note = bridgeRNA
ctacttagagacttggcgcaggatcggtgtccggccagactcggtccaggtgctcggcgagacgctcccacattgcggctgcccaccggcgtctttggtgtggctctctcatggcttgcgtcctcgccgggcgccgcgcgaggagaggctcaaaaggggtttgttctgctcgaagtagcggtgccctccttgctggaacatccaccgtggtgcagacaagggagacgctgatgggtgtgatcattgggatggaccgcataagcgctcgacgactatcgaggtcgtcgatgagcgggcggtcgtgcaggctcggggccggtacggcacagacaaggccgggtacgcggccatgctgggcgcgggccgcaagttcgccgaccgagtctgggcggtggaagggtgcaacggcatcggtaagcacatcgcgcaccggctggtccacgacggggagacggtgctcgacgtgccggcgaagctgtcggcgcaggtgcgggtgttcgccaccggcaacggccgcaagaccgacccggtggacgcgcactcggtggcgatggtcgccctgcgcaccccaggcctggtcaccgttcgggtcgatgatgatctgctggtgatggggatgctggctgaccgccgcgacgagttgggccaggctcggactcgcacggtcaaccggctgcatcgcctgctgctcgagctgtttcccggtggggccaagcagttcctctccgcacgccaagcccggacgatgatcgccaccatccggccgcgggacctggtcggcaagacccgccgccggctcgccgtcgaactgatcggcgaggtcgaacagatcgacgccaagatgaagactttgaagaaggagctcaccgcgctggtcaccgcccgcggatcgacgctgctggaggtgaccgggatcggcccgtccggcgcggcccggctcctcgccgacgtcggcgacatccaccgcttcgccgaccgggaccggttcgcctcgtggaacgacaccgcaccgctggacgcatcctcgggcaaccagcaacgccaccggctgtcccgagctgggaaccggcggatcaaccggaccctgcacatcatggccatcgtccaactgcgacaccgcacaccgagggccgcgcctactacgacgcccgcaaagctggcggcatgccgtccatgatggccatgcgcgccctgaaacggcgtctgtccaacgtcgtcttcgcccgcatgctcgccgaccaaaagcgacgcgagaaagcgggcccgggtgggcaatcggggacgactaccaacgccagcgtgaccgacctgaccccggggatcggctcttcggacaagccacatcccggacccgccatcacccagcctagaacggccatcccagcggcgttttgacacaaaggggtgc

SEQ ID NO: 9498 - DNA, 1630 bp, unidentified
  source 1..1630: mol_type = unassigned DNA; note = element_ee1108b
  misc_feature 1..2: note = core
  misc_feature 3..284: note = LE
  misc_feature 285..1502: note = CDS
  misc_feature 1503..1630: note = RE
  misc_feature 13..310: note = bridgeRNA
ctactacaatatatttatggttaatctcccttacagccagtaaggaattacccatcttgttgcttaagctgttagaatgtagagagcaatcggtataatcggatcctttcttggacttcgcgtccgtaaaacagtctgataaccagctcctcattcgcagcattcgttttatgcaggttgaaccacccacaaaggtgcgtccgcgtcacaccacagtagattgaataggcaatgagtaaaactggtccttaccattgcttacaaaagaaggagtgacataacatatgaatatgaacgctatcggtattgatgtttccaaacgtaaaagcatggttgccatcctccgcccaggcggtgaagtcgtggccaaaccttttgaagtatctcatttatccaaggatctccgatcattgattcatcggatcagatcccttgatggagaatcacgtatcgtcatggagtgtaccggacattactatgagaccattgcccatgagcttgtctctgccggtctgtttgttagcgctgtaaatccacagcttatacgtcattatcaggacgaagacaactccctgcggaaagtagagtccgacaaagcagattcccttaaaatcgcacgctatacacttgacagatggtcaaaattgaaacaatatggtcttatggatgaattacgcaatcaattaaagaccatgaaccgccagtttggcttctacatgaagcacaagactgccatgaaaaacaatctgatcggccttcttgaccaaacttatcccggtgtaaacacctattttgacagccccgcccgcgaagacggaagccagaaatgggttgactttgcggactgctactggcatgcagactgtgtccgtaagatatctgtggacgcttttgttgaccactatcagaagtggtgtcaccgcaagaagtacaacttcagcaaaacaaaagctgaagaaatctatgaaacagccaaggaaccggtttctgtacttccaaaagatgtctttaccaaacgtatcatcaaacaggcggttgagcagttaaatactgcatcccgaactgttgaacagctccgttccctaatgaacgaaaccgcagcccaacttccagaatactctgtcgttatggcgatgaaaggcgtaggcccctccctgggtccacagctaatagcggaaatcggagatgtgtcacgctttacccatcggaacgctattaccgcatttgccggtgttgacccaggtgtaaatgaatccggggattactctcaaaaaagtatccatgcatcaaaacatggttctcccgcgctccgtaagaccctatttcaggtcatggacgttctaattaagaccaagccacaagatgaccccgtgtatttgttcatggataagaaacgtgcgcaaggcaaagcttactatgtctacatgacagccggggcaaataaatttctccggatttattacggaagagtcaaagaatatttggcttcccttccacaatagcagaaattacataactctagcaattcacaaaaccagcgttctacggtggtctggttgttgtacgcatttttcctacataaaattttttcaaaaaatattcaattttctattgactttttatttgcagg

SEQ ID NO: 9499 - DNA, 1418 bp, unidentified
  source 1..1418: mol_type = unassigned DNA; note = element_ee17c62
  misc_feature 1..4: note = core
  misc_feature 5..201: note = LE
  misc_feature 202..1404: note = CDS
  misc_feature 1405..1418: note = RE
  misc_feature 1..192: note = bridgeRNA
ctccgtaagttgtttggcggcccgggagggccggatgtggcttatgggttcttgccttcagtggctgacaaggagtggccgtccggttctccggggcgccctggctgctgattgagatgtgcgtttcggtcgctgattacggagatgacagcggggtgttcctcgggccgacggcatgttgtgggatgcgaggaggggcgagtgagcaagcgacaggaccgggtctgggccgggatcgacgcgggtaaggggcaccactgggcggcggtggtcgaccagaccggcgcgaccctgtggtcgaagaaggtcgacaacgacgaatcggcgatcctggccgcgctcggggagatcctggacctggcggacgaggtccgctgggcggtggacatctccggcacgtcgtccgcgctgctgctggccctgctcgcggctcacggccagcacgccgtctacgtgccgggacgcacggtcaaccgtatgtccggcgcctaccggggcgaggcgaagaccgatgcccgcgacgcctacgtcatcgccgagaccgcccgccaccgccaggacttcgccgcgatcgacgtgcccgcccagctggccgccgacctcgcgctgctgaccgcccaccgcgccgacctcgtggccgaccgggtgaggatgatcaaccgcctccgcgacgtgctgaccggtatcttccccgcgctggaacgggcctttgacttcagcggccacaagggcgcgctcgtcctgctgaccggttaccagaccccggccgccatccggcgccgcggccgggcccggctcaccgcctggctggccaaccgtagtgtccggggtgccgacgcggtcgcgaccacggccctggaagcggctcaggcccagcagaccgcgctgcccggcgaggacatcgccgcacagatcatcgccgacctggcagcgcagatcctggccctggacaaccggctgaggcgcatcgaccagcagatccgcgacaccttccgcagccacccgcagtcggagatcatcgagtccctgcccggcatgggcccgatactcggcgcggagttcgtcgtcgccgccggagacctgtccgcctacgcggacggcggtcacctggcctcggctgccgggctggtgcccgttccgcgtgactccggccgccggaccggcaacctgcaccggcccaagcgctacagccgccgtctgcgacgggtgttctacctgtccgcgcagaccagcatcatccgcgacgggccgaaccgggacttctacctcaagaagcgaggcgagggctgcaagcacgtccaggccgtcatcgccctggcccgccgacgggccggcgtcctgtgggcgctcctgcgcgacaaccgcctcttcacctccgtcccgccggacgcgcagacgacttgactcggtcattgaga

SEQ ID NO: 9500 - DNA, 1350 bp, unidentified
  source 1..1350: mol_type = unassigned DNA; note = element_ee18e8a
  misc_feature 1: note = core
  misc_feature 2..65: note = LE
  misc_feature 66..1091: note = CDS
  misc_feature 1092..1350: note = RE
  misc_feature 1119..1347: note = bridgeRNA
taatgggatggtcaccccctccccgcagcaggggtactctgcggggattccttgggagatctgccatgcaagacgtcacattggtcggtattgatctgggtaagcacgcttttcaccttcatggtcaggatgcggcgggtaaagcggtgtttcgcagaaaggtatcgcgcaagcagctgattgagttcttcgccacgctccatccatgcacggtggtcatggaggcgtgtgctggtgcgcactgcatggcacgcaagatcgccgaactcgggcacgaggcaaagctgatctcgccgcagttcgtacgcccgttcgtgaagagcaacaagaacgatttcgtcgatgccgaggcaatctgcgaagcagcttcccgaccgtcaatgcgcttcgtaacgccgaagactgtatcgcggcagacactgtctgccctgcaccgggtacgcgactcactcgttcgggacaaggtttgcacgaccaatcagatgcatggattcctgcttgaattcggcgtcacgctacctgtcggcaatgccgttgtcaggcgcctgcccgccttgctggccgagcactccctcccgccacgtctcgtcgcgattcttgagcgcctgcatgcgcatttcaaatatctttcggagcagattggcgagatcgagaaggggctcaaccggcagcttgcggatgacgctatagcccagcgactgcttaccattccgggagttggaacgattaccgcaagcttacttacctcagaactcggcgatggaaagcagtatcgatgcggccgcgactttgccgctgccgtcggactggtcccccgccagtacagtacgggaggccggggcgaacctgttgggaatttccaagcggggggacaagaacattcgccggttgctcgtccagtgtgcccgtgccttcatgctgcatctgaacaggcacaccggcaagatggccgactgggtgcgctcaatgctcgcacgacgacactcaaacgagtggcctgtgcgctcgctaacaagttcgcgcgaatagcctgggccattgcgagtcgcgacgctgtattcgacccatgcacgcgaaccgcccctcgatgagccacctcccgccgaattgctttaccgaagtcgacccatctggttttgcgattgctgaatactgatgacgtgaacggcaaaccggcctgacggaaaccttgagaggttaaccagcttctgaagctgcccctgctatcaggaccatcaggcgagattctcatcgaggcgcgacggctcatcccgccccgacgccggatagatttacgcaaacccaacgcgccaaaaaattcagcattgcaaaaacgggggtgaccataga

SEQ ID NO: 9501 - DNA, 1354 bp, unidentified
  source 1..1354: mol_type = unassigned DNA; note = element_ee27b5d
  misc_feature 1: note = core
  misc_feature 2..78: note = LE
  misc_feature 79..1095: note = CDS
  misc_feature 1096..1354: note = RE
  misc_feature 1096..1341: note = bridgeRNA
tgatggtgtggacgacctccacctaaccgggttcgctggacgtgtcgtcgatgaggacgtcacgtctaggagcggatcatgcaagaggtcgccgttgtcggactggatctggcaaagaacgttttccaagtgcacggggtggccagcgacggcgccgtgctggttcgaaggcagctgcggcggacgcaggttctggacttcttccgtgcgctctcgccgtgcctggtcggcatcgaagcctgcgcgtctgctcatcactggggtcgagagctgatcgctctgggccacgaggtacggttgatgccgcctgcgtacgtgaaggcctatttgaagcggggcaagacagacgccgcagacgccgaagccatcgccgaggccgtgacccgaccgaccatgcggttcgtcgccgtgaagagccgcgatcaacaggcggtgctgatgcttcacaaggcgcgagacctgctggtacgccagcgtacgatgctgatcaatgccctgcgtggccacctcggtgagttcggaatcatcgccgcccaaggcgcggccggcgtcgaggcggccaagcgggctttgcgggaggatcccggccagttgccggagctcgctcaactcgcgctgatgggcctggcggatcagctcgaccgtttgacggcggagatcgccaacctcgagcgccggatcctgacctggcatcgccaggatgcggtcagccagcggttggcctcgatccccgggatcggacccattacggccagcgccatggctgcgagcgccccagatccagcgctcttcaggtccggccgccagttcgccgcctggctcggattgacgcccagggcccatagcagcggcggcaaggaacggcaggcgggcatcagcaaaatgggggacagctacttgcgccggctgctggtggtcggcgccaccgcggtgctgcgccagtctcgccagaaggcgtccggcggaacctggatccaggggctcctcgatcgcaagaagccgaaggtcgccgcagtggcgctcgccaacaagacggcgcgtatcgcctgggtgctgatgtcgcgaggggagagctaccgcccggcgacggcttagagatcggcgaagcccatatctgggccgtgccgaggacgtgagagtggtgagacgtgatgacgaaccggccgcagccggggattggtgaaacccagggggtcagagcgcctcgagcgcgttgacgtgattagggagccggtccgcggacttcatcaaggccagcagcttcgaccgctgcagcaacaggccgcatacatgactgcactcgaccgagcgccgcacgcagttgccaccttgcatccaggaggtcgtccataca

SEQ ID NO: 9502 - DNA, 1354 bp, unidentified
  source 1..1354: mol_type = unassigned DNA; note = element_ee2b582
  misc_feature 1..2: note = core
  misc_feature 3..73: note = LE
  misc_feature 74..1099: note = CDS
  misc_feature 1100..1354: note = RE
  misc_feature 1122..1351: note = bridgeRNA
ttaatgagatggtcacccccgcaccctgcgagcactacgcttcgtagggtgttctgttcaggaggccatcgtcatgacaactgccactctcgtgggtatcgatctcggtaagcactcatttcacttgcacggccaggatgctgcgggtcgggaagtgttccgcaagaaggcgacgcgccaacagatgatgcgatggctgggtaacctgccggcctgcaccgtcgtgatggaagcctgtgccggcgcccattatctggcacggcagctggtcgccatgggacatgaggctcggctgatctctccgcagttcgtgcgccccttcgtcaagggcaacaagaacgacttcatcgatgccgaagcgatctgcgaggcggcctgtcgcccctccatgcggttcgtcacgccgaaaaccgagacccagcaaaccctgtcggttctgcatcgtatgcgggattccctggtgcgggaccggacaaaaaccgccaatcaggcacatggtttcctgctggagtttggcatcagcctgcccaagggggtcgcgctcatgcgtcgcctgccggataccttggcggaccgtgagctgtctcatcggttgctggtgctgctgatgcggctgcatgcccacttctgctacctggacgaccggatcaaggagctggatcgggagatcaccgaccagcttgccgcagacgagttgggtagccgtttgctgaccatcccgtgtgtggggcccatgacggccagtgtcctgaccgctgaaatgggggacggcaaacagtaccgatgcagtcgcgacttcgcggcttccgtcggcctggtgccacggcaatacagcacgggaggaagatcccacctcctggggatcagcaaacgcggcgacaagcatctacgacgactgctggtccagtgcgccagggtttacctgcagcggctggaccaccagcagggcccgcttgccgagtgggtgcgtgccttgcgcttgcgccgccactcgaatgtggtggtctgtgcgctggccaacaagtttgctcgaattgcctgggccatcgcgacccggcattcggcgttcaatgcaggaccgcgtgtgatgacggcttgaagcgtcaggttctgattgttttattcacccttttctggttttgcgatagctgaaacatgatgatgtgaacggccaagcggcctggcgaagagcctgtcacaaaaatcggctgattgaagccgccgggtttttcaggatcgccaggcgcgactctcatcgaggcgcggggccatgccccatcgagacgccggatagatttaagcaagccaaccactcatcacatctcagcattgcaaaagcgggggtgaccataga

SEQ ID NO: 9503 - DNA, 1439 bp, unidentified
  source 1..1439: mol_type = unassigned DNA; note = element_ee3213b
  misc_feature 1..2: note = core
  misc_feature 3..233: note = LE
  misc_feature 234..1424: note = CDS
  misc_feature 1425..1439: note = RE
  misc_feature 16..207: note = bridgeRNA
gtcctacctttcaggcgtgggtctgacccggtcattcgtaggatcgggaggcccgggggctccaggtatggctgtaagggttgagccgttcgatggcttacgggacttggccgcctggagccccgcgacgactcgaccgctaattgggagatgcgactccatcgctgctgtaggacaacgtcggcgtggtcgtctgcggggtcagtgtgagacggcgagctgcggaggcgagcgtgcccgaaatctgggccggggtggacatcggcaaggaacatcaccactgcgtggtgatcaatgcagagggcgaacggctgctgtcccgccgggtcctcaacgacgaggctgagctgctggaactgctcggggatgtgctggagatatccgacgatgccctgtgggcagtcgacctcaaccatggtggtgccgccctgctgatcggcttgctggtgacccacggacagtcggtcgcctacctcaccggcctcgcggtccaccgggcctcggccacctaccggggcgagggaaagaccgatgcgaaggacgccttcgtcatcgcggatcaggcccgcatccgccgggatctggggctgctcaggcccggggacgagatcgccgtcgacctgcgcaccctgacgacccgacgcctggacttggtcttcgaccgcacccggcagatcaaccgtcttcgagcccagctgcttgagatcttcccggcgttggaacggtccctggacttgaccaacaagggtccggcgttgctgctgacgggctaccagacgccggcggcaatccgccgcacaggtatgaaacgcatcgagacctggctgaagaaccgcaaggtcaaaggtgccgccgcactcgctcgcaccgtggtggaagccgcgcaggcccagcacactgtgttgccaggggagaagctggctgccgccatggtggtccgcctcgccaagacggtgatagccctggacgaggagatcgcggaacttgacgccctcatcgaggcacggcttcacgaacatccacacgcccaggtgatccgcagcctgcctggcatgggcacaaggctcaccgccgagttcatcgccgcaacaggcggggacatggaaatttttgcaagtgccgaccgcctggccggcttcgccggcctggccccgcagccacgcgactctggtcgcgtcaacggcaacatgcgcaggccgcaccgctaccaccgcggattactcaggaccatgtacttgtcggcgatggccagtctcaagtcctgtcccgcttccaagacgtattaccaacggaaacggagcgaggggaaaggccacaaacaggctctcctcgcgctggcccgtcgtcgcatcaacgtcttgtgggcaatgatccgtgacagtcagtgctaccacgtcgcacccccagtgacatccgccgcttgacatcagcattgggaa

SEQ ID NO: 9504 - DNA, 1361 bp, unidentified
  source 1..1361: mol_type = unassigned DNA; note = element_ee3397c
  misc_feature 1..2: note = core
  misc_feature 3..72: note = LE
  misc_feature 73..1101: note = CDS
  misc_feature 1102..1361: note = RE
  misc_feature 1103..1351: note = bridgeRNA
ttatggaatggcccgccccacctctccggcatcggaatacgatgtcggtgcttgaacagagaggagcgagccatgggcattgttatgatcggcatcgatttaggcaagaacagctgcagcctcgcggggctggatgaacgcggcagcgtggtgctgaggcgacggatgcagccgggcacagtggtaggcttcgcatcgaagctggcgccctgcacgatcgcgatggaggcatgttgcggggcgcatcatctgggtcggcttctggccgcccaaggacacacgatcaagccgatggcgccggagtatgttcgtccgtacgtgaaggcgcagaagaacgatgatcgtgacgccgaagcgattgctgaggcggcgactcgtccgacgatgcgttctgtcgagctcaagtcgcaagatcagctcgacatccagtcgctgcaccgggtgcgctcgcgactggtgggcgcgcgcacgacgttgatcaaccagctgcgggcgcttctgctcgagcgcggcgcgaccttcccccaaggccgccgcaagttcgagatcgggctcgacgcgatgctcgccgacgccgaaggcttgccgcagggccggatccgccagctgctcttcgatatgcgcgacgaatggtcggcgctggacgggcggatcgatgccctagatcaagagttctccgcgctcgcacgcaccgatgaagcggcgcgacggctgacctcgataccgggcgtcggcgctctgaatgcgacggccctcgtcgccgcggtcgggcgagcggagagcttcagccatgcccgcgatctgggcgccttccttggcctggttccgcgccaacacaccaccggcggcaagcctcggctgctggggatcagcaagcgcggaaacgcctatctgcgcaccttgttgatccacggcgccagggcggcgctgccgtcattggccaaaagcgagaccccgctcggcgcgtggctgcgcggtctgctggcgcgatgccgtcgcaacacggtggtcgtggcgctcgccaacaagctggccaggatcgcctgggccttgttgcgtcgggaaggaaccttcttgatcggccaggcggcgaaggtctgatgtcatcggtcgccggcatccaacgcgctgtgtgacccaaggaatgtctgcgggaggactttgaaagatggcctgacggttaccgacgtcccgacagcctggtttaaaagatggcacatcgatgccgaggtttttatgaggcctggggcgtgcggctctccatcttggcggcggcctatgccgacacgccgtatacgttgatgcagatcggtcagacgccaccatcaataaatccccttgcggacggggcgggccatacg

SEQ ID NO: 9505 - DNA, 1325 bp, unidentified
  source 1..1325: mol_type = unassigned DNA; note = element_ee39ab2
  misc_feature 1: note = core
  misc_feature 2..269: note = LE
  misc_feature 270..1310: note = CDS
  misc_feature 1311..1325: note = RE
  misc_feature 30..262: note = bridgeRNA
ctgtgagagtgcgggtggttccgtctggagctttggccaggctggcgtcgaccgtgctcgcgtgtgactcgttatctgactgaccttgctggtgtcttcctcacgatctgtccgcgtgagcaggtcggcgccggtctgttgcccgcttgctggcctgatcagaagcctgtccgcccgttgagggcgtgacccgtcacagtcctgccgtttgcggttcgcatgctccagaccggcaccgacgcgttacccccgggatggaggtggaagggatgcttgcagatgagctggaccacgtgatcggcgtcgacacgcaccgcgaccggcacgcgctcgcgctggtggccgcccgcagcggcggcgtggtcggggggttggagctgccggcgtctgctgggggctaccggcaggcgctcgcgttcgcgagacggcatgcgcccggccgcaggctgtgggcgatcgaggggacgggctgttacggggcggggctcgcccgctacctggctagccgcggcgagcgggtcgtcgaggtcgagcggccagcacgtaccggcggtcgcagccgcgggaaaagcgacgcgctcgacgcggtcagggccgcccgcagcgctctcgccgatgagaagccgatcagtccgcgccgaggcgacactcgcgagtcgctgcgggcgctggtgacgacgcgggctggtgctgtcgcgaccaagcagacagcgctgcgccagctgcggtcgctgctcgtctgcgtgcacgaaccgctgcgcgccgagctgcgaccgctctcccgcagcctgctgctccgccgctgcgccggtcttcgaccacgggcgggaagcgaccaccgcggcgtcctggtcgctctccgctgctgcgcgcagcgtgtcctcgtggccgagcgagaagccaacgagctcgaacgggagatccaagccctcgtcgcacggctcgcaccaacactgctcgaggagccgggcgtcggaccgatctcggccgcgcaactactgatctcctggtcacacccgggacggctccacagcgaagccgccttcgcccgcctcgccggcgccgcaccgatccccgcctcctccggccaaaccatccgacatcgcctcgaccgcggcggcgaccgccaactcaaccgcgccctacacacgatcatcacctccagacgcaaacaccacccagcgacgatcgcctacatcaaccgccgcaccagcgagggcaaaaacacccgcgaagcaatccgctgcctcaagcgctacctcgcccgccacctctaccgactcctcgaaacgatgccaacacccacttgacacccatagaagcat

SEQ ID NO: 9506 - DNA, 1623 bp, unidentified
  source 1..1623: mol_type = unassigned DNA; note = element_ee3d81c
  misc_feature 1..3: note = core
  misc_feature 4..256: note = LE
  misc_feature 257..1492: note = CDS
  misc_feature 1493..1623: note = RE
  misc_feature 8..232: note = bridgeRNA
gttcgtattataaggtcatccagatatgcaaatatttctggttgacctttttttatatggtcttattataacggtaggcggggttaaacgtaactgcccgtgggacttggataccgtcagctaaacagtttgccccctacttgtagaaacatgattgaggctggttgggacatagatctcgtataacaagcgaaactgtgacactgcaagaaggacaaggggtaccggcaaataagagattaggagatgatacaggatgaatccagtcgttggtctggatatttcaaagggggaaagtcaggttcaagcttttgtagataaaggcaaaccattcggtaagagctttaaagtagctcatacactacagggtcttgatttacttgtagagtttttagaggtagtacaaaaagaatccggtctaaaacctccagttattcttgaagctactggacactatcaaaaatcagtagtccaatatttagaggaacgtgggtatttattaatcattattaaccctttgatttcctataaggcgaaaagttcaagtttaaggaaagtaaagacagatgccatcgatgcttaccacctctgcgagttgttttacaaggaggagttagagccatataaaaagcgtggggttcagcttttaaaccttcgtaatcttacaagacaacacgaaaatattacaggagtcatgattcagacaaagcttcagttccaggctattctagttcaagtatttcctgaatatagaagagtcttcggtgatttatattctgtggtatccctcttaacattaaaggcgtttccgtcatctgaggacatattagaggcaagtgatgacacactctcaaataggatcaaggaattatgtaaaagccgctcaatcagatgggccaatgaaaaagccttacaactaaaagtggtggcagctcgtaatccctttgaaaagacagtctatcagagtcatattttaagcttaggtttgtacattgacattattcttcaatacaaagagcacctatccacgttggagtttgagatagatgccctcgctaaagaagttgaagaatataatatcatcaaatctatccctggtatcggtgaaaagatcgcggcaacgattatttccgaaattggtgagatagatcgatttactgaccctaaaaagctcgtggctttcgctggagtagaccctagtgttttcgaatctggcaagtttactgccaccaaaaaccgaatcaccaaaagaggttccagcgggctgcgccacgctttatatatggctgttcgttgtgctatacgcgactgtcgcaagagtaaaacaagcgatgaaatcattcctcgaaataagaaattacgacagttctatgataagaaacgcgaggaaggaaaaccatttaaagtagcagtcattgcttgtgtaaataagctcttacactggatatttgccctattaaaaaacagaacaactttccaagatatagcatagaaacaacatctaactaaataacgaaaaaccttccagttcaaagaatacgaaggttatttggtatacacttttttagtatatcacgatgaatttcgatattttaatgaaaaatattgacaaactattagctg

SEQ ID NO: 9507 - DNA, 1214 bp, unidentified
  source 1..1214: mol_type = unassigned DNA; note = element_ee408aa
  misc_feature 1..2: note = core
  misc_feature 3..208: note = LE
  misc_feature 209..1054: note = CDS
  misc_feature 1055..1214: note = RE
  misc_feature 12..190: note = bridgeRNA
cttatctgattggaatctggcaccgtaggtgtcgagagccggcgtgggccgccgtgtaagcctggatctcaacgatcgccatgtagcttggcgcccacgccggaatctcccttgatccgcccgaacagttgctggagctgacactcgcagtgataagactgggcaagcggggagctctcgacccttccagactatacggagtccggtgatgaacgggatcgggattgatgtcagcaagcgccagctggacgttggcacgacagacggaaagaccctgcaggtcagcaatagccgctccggctttgctgaattggacctctggctgcaagggcatccggccgtccagatcgtgctggaggccactggtggctacgaacagcctgtgctggacttcctgcacaacgctggtcatccggtggtccgcgccaatgccctgcgggcgcggaaactggcccaggggcttggccacatggccaagaccgaccgcttggatgcctatgccttggccaagatggccgcgctggtgaagctgcgttcctatcagccactggagccttggcagcgggaaatgcgtgacttcgtgcgggcacgccgacaggcgatgcacgcgctgaccgtcgcgcggcagcagcaggaaatggtgggtaatcgtaaattacgccgactgcttcaggccaacatcacttgcttgcagagaacggtggaacgtttgggaaagcggatttccgaacaggtttccaagcagcctcaactggctgtcctgaagtcgatgaaaggtgttggcccgggcctgcaggccgtgttggccagctatcttcccgagctgggcaagatcagtggcaaggccgtggccagcctggtcggtgtggcaccgatgtcccatgacagcgggaccatgcgtggcaaacgaagcatccatggcggcagggctgagatccgtcaggtgctctacatggccagcatgtcggccatgcggcatgaacctcgcctgcgggacttttaccagtcgctgcgagcgcgggcaaggaaggcaaagtggccatcgtggcggtgatgcggaagatgctggtgattctcaacgcccgtatgcgtgacggcggatcgatccccgcctgagcgcaccagagggcgttgctcctgaggctgccggccagcggccggcactaccgtgcccgtttaccggaagggctggcgctcctccagcaacacagttg

SEQ ID NO: 9508 - DNA, 1193 bp, unidentified
  source 1..1193: mol_type = unassigned DNA; note = element_ee42ea6
  misc_feature 1..2: note = core
  misc_feature 3..183: note = LE
  misc_feature 184..1185: note = CDS
  misc_feature 1186..1193: note = RE
  misc_feature 24..189: note = bridgeRNA
ctcgtatgatgatcacgtcgaactttggcagaatatagctgagtgtacggccaggcagagagacatcggtggtgcctgaggcgcataagcctgtgtgacagagtggtgcctctgcctgtttatcatttcagagtccggacggtatcttaggcttcaagcctgcatacgagggaggtcggttaaatgattgtggtaggttcgccagttgtagggattgatgtcagcaaaaagaagctcgatgcagcgttgctggcaggcggaaagttgaagtacaaagttgtagagaattcgcgcaagggctacgcggaactggcgacgtggctaggtaagcagggtgtcgtcatcgaagacgttcatgcctgtatggagtccaccggggtctacagcgagcccgtcgcactggggttgtcggacttaggactgaaggtaagtatggtcaacccgacgctcgtgaagggattcgggcagtgcgagaacatgcgcaacaagaatgaccgagccgacgctggcgtgattgcacgctactgcgcagcgatgcatcctccgctctgggaggcgccatcgccggagcttcggcatctgcgatcgttgactgaccgcgtcgcggccatgaaggatatgcggcagcaggaggagaacaggctcgaagcctatacgtttgcgagcgatacggcgatgcaggcaaacgcgaaaaaccttatcgcctacctcgacgaggagatcaaacggctagcaaaggagattgatgaccatatcgacggccatcctggcctcaagcgagacgtggacctcatgacttccatcccaggccttggccgcgttaccgcggccaaggtgatcagtcgcgtgggcgacatacggcgctttaccgatgcgaagaagctcgcagcgtatctgggggtgacaccgaagcagcgtcagtccggtagctctgtaaggggccgctcgacgataagccgcatgggtagcggtgaagtgcgaaccgctatgtacatgcctgctatcacggccatcaaacacaacccgctgatcgctgccttcgcgcagcgtcttagcgcaaatggcatggccaagatggcagtcgtcgtcgctgccatgcgcaagctcgtgcaccaaatatatggtgtcatccgctcgggccagccgtttgactccaactatctacagaaaccgcttgcgagctaagacggtat

SEQ ID NO: 9509 - DNA, 1167 bp, unidentified
  source 1..1167: mol_type = unassigned DNA; note = element_ee4799f
  misc_feature 1..2: note = core
  misc_feature 3..177: note = LE
  misc_feature 178..1146: note = CDS
  misc_feature 1147..1167: note = RE
  misc_feature 34..198: note = bridgeRNA
cttgtatcttgaaagcggtttacaatcgctacgtttggatttggcaaggcgtatgcagcccgataccatctggggttcatagcccgtcgtcaagcgaatggcgcatacgctgagccactcatctgaaacccgaacagttgtccgtactccataacgtatttgcaaggaagggtaataatgagtctgccaaatcaactttgtgcgggaattgatgtttctaaagcgacactggacattgctgccagcagtgattttgcacagtttactgctggtaacaacgctgatggttttgatgccattattgtagaactgagaaaacattcggtagctctggttctgatggaagctactggcggtcttgaaactgccgtggcctgtgcgctccaggccgaaggtttttctgtcgccgtagtcaatcccagacaagctcgcgactttgcccgcgctatgggctatctggtaaaaactgaccgcattgatgccagagtgcttgcacaaatggcaggggtcattaatcaacatccggagagaaagcgattcattcgggaactgcctgatacggaacgccgggctcttgctgcaatggtggtgcgcagacgtcagctggttactatgtgggtagccgggcgtaatcggcttcatccctctcacccgcagagcagggagagtattgatatcatcatcaatgcactggaagatgagattgccagagttgatgaaaatatgaacaaccacatccgtacttactttaaagaacttgctgagcgactgagcagtattaaaggggttggtcccatgacgactgcggcattattagccgaagttcctgagcctgggcacctctcaagacgagagattagtgcgttggtaggggtcgcccctgcaaacagggattctggaaccatgcgaggacggagaaccatttttggcggacgtgctggagtccgaacagcgttatatatggccgtgcttgtcgcgaccagattcaacccggtaataaaagccttttacacgcgtctactttccatgggaaaacctaaaaaagttgctctcgttgcatgtatgcgaaagctcctgactatcctgaatgcgatgctccgtaagagcgaagaatgggatgagtcgtatcatcacgttacaccataatttttatacgtaagacagttg

SEQ ID NO: 9510 - DNA, 1461 bp, unidentified
  source 1..1461: mol_type = unassigned DNA; note = element_ee54db2
  misc_feature 1..2: note = core
  misc_feature 3..263: note = LE
  misc_feature 264..1424: note = CDS
  misc_feature 1425..1461: note = RE
  misc_feature 31..243: note = bridgeRNA
ctcatatctttgacatagtttaaaatggtatgaaaatgtatctttgatatacaacaattaataggcaaaacgaaatggccaaattctgtcggggcgaaatacatcagtagatgatattgtacacaataggttaatccatttcgtttttattacatttcgagtcacaatagtacttaaagaccaatttattaatttggatcttgtataaaaaatgatcaaagattgatgtgatattttgtttattgatactaaatcaaagcgttatgaacttaaagtattcggttggattagatgtttcaagcaaaaaaattaatgcttgtatgagtgttattgatgaaaagcaaaaggtagttgtaaaatcaagtaccataatttgtaacacattaaaaggttttgcaaccttggaagagtggattataaagcaaaaaaaggaagctattccagtagttgtttgtatggaagccacaggaatttatcacgagaattgtgcgtattatttgcatggaaaagattttaatgtttctataattttgcctaacaaggcaaagaagtacttggaagctatcggattaaagtccaagaatgacagcattgatgccaaaggtttgtctcaaatgggagctgaacaatgtttggagttttgggaaccaatgggaacatttttttatgaattgcgattgctaactcgacaacatcaaaatgtcacagaactcaaaacagtgttaaagaatcaattaagtgctttgagttatgcaatgcatcatttagacgccgtaaataatcagttagagcagaccataattttatttgaaacgcaacttaaagagctagataaagaaataaaagcacatttgaaatcgaataacgaggttcatgaaaaggctgaaaacatattaaaaatgaaaggattaggtattttgacattgagtactgttctggcagaaacgaacggatttaccttgtttaataactataaacaattggtgtcttatgcaggttacgatgttgtagaagcacaatcaggaacacgtgttggtaaaacaaaaatatcaaagcgaggaaactcacgaataagacgtgccttgcacatgccatctttggtagttattcaatgcaaagtcaaaccatttaaagacctatacgatagaacttatgaaaaacatgcaataaaaatgaaaagttacgttgcagttcaaaagaaacttctaataatgatttatcatttatggaataaaaatgaagtttacgacgcaaattatcaattaaatatccaagaagaggagcaaaagttttctctcgggcaattggcttcggagaagacacaattgcaaaaaaatagccccaatttagaaattgaggctacacaaggtaaacatccagtgaattatcgcaagaagcttcctctcggtgctgcaaatatataaaaattcacaaaaataaattaggtattaaagatagtac

SEQ ID NO: 9511 - DNA, 1420 bp, unidentified
  source 1..1420: mol_type = unassigned DNA; note = element_ee61864
  misc_feature 1..2: note = core
  misc_feature 3..140: note = LE
  misc_feature 141..1163: note = CDS
  misc_feature 1164..1420: note = RE
  misc_feature 1177..1384: note = bridgeRNA
acatggggtaatcgcgggagcgagtcgccctaaggccggaagcgctcacatgattgcagagcgggtggttgttccccgataggatggaagtgcgggttcacgactggacgccgggcccaagcatcgaacggagaacaaccatgagcgaatatatcggtctcgacgtgtcgttgaaagagacggcgatttctgtgcggcgtggcggcaaaaggatctggcgcggcaaatgtccctctgatccgagcttggtcgcggacgttctccgcaagcgggcgccagcggccaagcgggtggtgttcgagaccggacccttgtcggtgtggttctatcatgccttgagcgccgaaggacttccggcgatctgcatcgacgcccggcatgccaaggccgcgctggacatggcaccgaacaaaacggacgccaacgatgccgacggcttggcgcatctggccgaggtcggcttctaccgcgaggtgcgggtgaagggctatgacagcatgctgagccgcacgctggtggccgcgcggagccggctggttaagatcacgaccgagctctccaaccagatccgcgggctcatgaagacgttcgggctgatcattccgcgaagcaagggcggcaagttcgaagccgacgtccagcgcctgctggccgatcaggaagagcttggccggattgtcctgccacttctcgaagcttggctcagcatgcgcgcccgcgctgctgaactcggacagcagctcgtcgccaacgcccggcacaatgacgcatgccagctattgatgtcgatccccggcgtcggcaccatcactgcgacttcattcatcggtgccatcgagtatacatcgaatttcaagacatcgcgcgctgtcggcgcgtggctgggcttgacaacccgacgctatcaatccggcgaagtcgattatgatggtcatatctcgcggcgtggggatcctcatctgagagggcttctctatgaggccgcagtcgtgatcctgacgcgccgggctgacagcagtctgcgcacatgggggttgaagctgcgtgacaagatcggcttcaagcgggcagctgtcgctgtcgcccgcaagctcgctgtcatcatgcatgcgatgctgaaatccggtgagttgttcaatcgggaagaagccgccatggcctgatccataaggaagttcgaatgcgcctacccgaggcgtaacgagacgtccctgccaggacgtgggccgagccattccgctgtgtcagttgcatcgttggcgtcacaacgctcgcgattgcgtttcaaaccttggaaggctccatccctcgcgaagcccatcatgcggcggcttcatgtcgaccgcaaagacgacccgtgctcccggcaaacgacacctcaatacaaatttgggctagcattttggtctgcgattagacg

SEQ ID NO: 9512 - DNA, 1166 bp, unidentified
  source 1..1166: mol_type = unassigned DNA; note = element_ee63b73
  misc_feature 1..2: note = core
  misc_feature 3..206: note = LE
  misc_feature 207..1154: note = CDS
  misc_feature 1155..1166: note = RE
  misc_feature 12..212: note = bridgeRNA
cttgtctcatgatcccggcgctcatcgaggccatgatgggctgccgccggcgagtctgaagctcgccggcggcgggaggggacggatcgttattacgctggccgtaatgggccgagctagagtgtgatcgcccctctcttttccttgcggcctgaatggatacccgggcgtcgtggcccggatgacaagcataggactcggaaaagatgcctcatcctacctcgcaaagtgcgggcgtcgatatctcgaaagatcatctcgacgtcaacatctacccggacggcgccgccaagcgtttcgccaatgacgccaaaggctttcgcgcgctcatcgtctggctggcgccatttgcgccggcacggatcgtgttcgagccgaccggaccctatcaccgcaacttcgagcgcaccctcggcgctgcgggctttccgctcgcaaaggtcaatccgcgccaagcgcgccgcttcgccgaggcgctcggtcagctcgccaagactgatcgcgccgacgcattcgcgcttgctcgtttcggcatggcgctcgaaccgaccgttcgagcgatagccggcgaaacacttgatgacatgcgcgaattacatgtcgcgcggcgcgcgctcgtcaaggatcggaccgccacactcaaccgcgcccacacgtgtcggtcgccgctcctgaaacgccaggccgcccagcggctcaagcagatcgagacgcagatcgcctcgatcgaactcgccctcaaatcgctgatgtctgctgatccggcattggccgcgcgcttcgacattctcatgagcattccggcagtcggcgaaattaccgccatggcgatgctgatcgagatgcccgagctcggcgcgatcgagaacaagcaggtggcaagcctcgctggcttggcgcctgtcgcgcgcgagtccggcaattggaagggcaagagatcaatccgaggcggtcgggcgacgctcagacaagcgctatatatgccggccctcgtcgccatccgcttcaacgacgacttcaagacaaaatatcaggcgctcatcgccgccggaaaggcgccaaaggtcgctataaccgccgtcatgcgcaagctgctcatccttgcaaacgcgttgctcagggccgagcgaaagtgggctcctaagtcggcttgaccaagacggata

SEQ ID NO: 9513 - DNA, 1251 bp, unidentified
  source 1..1251: mol_type = unassigned DNA; note = element_ee63e30
  misc_feature 1..2: note = core
  misc_feature 3..249: note = LE
  misc_feature 250..1107: note = CDS
  misc_feature 1108..1251: note = RE
  misc_feature 3..225: note = bridgeRNA
ctcgtataataaagtagtagtatttatagaccctctccaaggtctgtgtgctataatgatagagatactgtggattgtttacaatctcctaccacttgatggtttttgaaaggctacaaccacagtctctttgtatatttgttaattagttagataccgcatgacggtttatttagaacgaggttacaatcgcaaggagtaccagtggtctaaacagtatcaaaaatacactcacaaggagttttcattatgatttatattggaattgatgttgctaaagataaacacgactgttttattaccaattcagatggtgaagtcttatttaaatcttttactatctctaacaatcgtgaaggctttgaaaccttatttcaaaaagtacaatccatttcagatgatttaacaaaagtaaaagtaggacttgaagctaccggacactatagttacaatcttctgggatttcttcttgataaaggtttgccgacctacattatcaatccattacatacaaatctatacagaaaaagtttaagtcttagaaagacgaaaacagataaagttgatgcccgtacaattgcttctatgattatgtctgatgtgaacttaaagtcctacacaaatacatcataccacaatgaggagctaaagtcactaactagataccgttttgataaagtaaaagaaagagcaaaattaaaatcttctatttctagacttgtatgtatcctttttcctgaattagaaaaactcgttcctacacttcatatggcttcagtttatgccttattaggagatttcaatcgctttgattcagctgataaaatacttgcatatgcaggtatgtcaccttctacctaccaatccggtcaattagagaactgtcattctcatatggaaaagcgtggttcaaggtacttacgatacgctctgtacaatgcaacaaaatatgtttgttactgggatgaatctttcggtgtatatcttggtaagaaacgctcagaaggcaaacattacaatgttgcattatcccatgcaacaaagaaacttgttcgcttaatttttgcaatggagaaatctaaacaaccataccaaccaacagtttaattcttttcataaatatcttatttttgagcaccatttatgatgctcttttttgtcatgctatttttacgattccaatacgatctaaaggatttttttgattaattcaaaatatcttcattatagccttgacttttaatagttagt

SEQ ID NO: 9514 - DNA, 1149 bp, unidentified
  source 1..1149: mol_type = unassigned DNA; note = element_ee69b30
  misc_feature 1..2: note = core
  misc_feature 3..178: note = LE
  misc_feature 179..1141: note = CDS
  misc_feature 1142..1149: note = RE
  misc_feature 4..188: note = bridgeRNA
cttgtatgtagcaaagtagaccctggccgccacaggccgatcctcccagggtaggcgctgaggcgtcatgccgagggagagcgagggtcgtggcggcctatctcggtcgccgtgacggatagcccgaacggttgtgaggtccatcgaggccgtatcgaacacaaggaagggcactgtcatgagcgacgagatcttcgttggcgtcgacgtttgcaaggcttggctggatacggcccaggtgtgcagctcaagcgccgctgtgccaggcgagctgactgcgagagtgaacaacgatgaggccgggcgcgcagagctggtgaatcagctcaagcgcctgtcgccgacgttggtggtgttggaagccaccggcggtttcgaggcagcgttggccagcgagttgtgcgcggcaggcattgcggtagccgtggtcaatcccaagcgagtgcgcgacttcgcccgatcaatgggcgttcttgccaagacagaccggctggacgcacgggtgttggccaagtttgctctggccgcccgtccccaggtgtacgcgctacccgacgagactcagcaggagatcaccgagctcgtggatcgacgcgcgcagctggtgacgatgcgcgcgcaggagaagaaccgcttggccacggtcaagcaagtggcgcgtacgagcgtgcgacaccacatcgagtggctggacaagaggatcaaggagatcgacaaggatctggacggtcgcttgaaggactcgacgatctaccagcccaagtacgagctgttggacagcgtgccgggcatcggccgagtcacgatctctacgctgctgggacgcctgcctgagttggggactctgaaccgcaagcgcctggcggcgctggtggggctggcgccgatggccgatgacagcggcagacggcacggtcagcgctacatccagggcggacgggcagacgtgcgcgcggtgctgtacatggctgcactctccgccagaaggtgcgacgggccgatcaaggacctgtactcgcgcctacgcgcctcaggcaagccctacaaggtcgccatgaccgcgtgcatgcgcaagctgctgatcatcctcaacgccatcctcaagtccggccaaccatggaggctcatcgagagcgcttgacacggttg

SEQ ID NO: 9515 - DNA, 1362 bp, unidentified
  source 1..1362: mol_type = unassigned DNA; note = element_ee69c5b
  misc_feature 1..2: note = core
  misc_feature 3..75: note = LE
  misc_feature 76..1101: note = CDS
  misc_feature 1102..1362: note = RE
  misc_feature 1077..1349: note = bridgeRNA
cgatggggtggacgcccccgacggcatcgatgtgccaaggtagaggtgtcattaaccgctacgagggggcgtcctatggaaaaggctatcatcatcggcgtcgacttggcgaagcatgtgtttcaggtccacggcgccggcgccgatgggtctgtggcatttcgaaagaagatttccagggttaagcttcttccttttctgtcgtcccagtcgaggtgtgtggtggcgatggaggcttgtgccggggcacatggttgggcgcgcgacattcaagcccaaggccacgaggtccgtttgatcgcgccggtctacgtgaagccgttcgtgaagcggcagaagaacgacatggccgacgccgaggcgattaccgaagcggcagcgcggccgacgatgcgcttcgtcgcggtgaagagcgccgagaagcaggcctctggcatggtgttcaagacccgggaccttctggtccggcaaaggacgcagacgatcaacgccttgcgcggtcacctgacggagcacggcatcattgcgcctcaagggatatttcatatcggccggcttgccgccgaggtcgagaacgtcaacagccatctgccggtcatcgttactgagttgtgcacgctgctgctccggcacatcgccacgctcgacgagcagatcgcattactcgaccggcggattcgcgaccgcgcacgagaggatgagacagcgcggcgcctcatgagcattcccggcatcggcccggtctgtgcgacagcgttggaggctttggcaccgccgcccgagacctttgccagaggacgcgacttcgcggcctggctcggcctcaccccgcgacagaactcctccggcggcaaagtgcggctcgggcgcatctcaaggatggggcagcgagacctgagacggctgcttattatcggcgcgacggctgtcgtgcgatgggccgccaggcggggcgctcctacaggatcatggctcgcacgcatgatggcgcgaaagcccagaatgcttgtagcggttgcgctcgccaacaagattgctcgcatcgcctgggcgttgatggcgaaaggcggaatttaccggagtctggtcgctgccgcttaagggcgcagacggcgagggccgtgtggatgtggtggggtcaacggaggattatggacaaacggtcagaagacgggatcgggcaaaccagcacaccgccgagcgtctttgagcgcgcgtaagcgtaatggtcccggtccgcggacttccataagggcccgcggcgtgcaggagccgcattttgaggccggacacacgtcagcacctgaccacatgccatagccgatgaacgattctgcttgcatccacgggggcgtccacaca

SEQ ID NO: 9516 - DNA, 1362 bp, unidentified
  source 1..1362: mol_type = unassigned DNA; note = element_ee6b95f
  misc_feature 1..2: note = core
  misc_feature 3..77: note = LE
  misc_feature 78..1112: note = CDS
  misc_feature 1113..1362: note = RE
  misc_feature 1114..1352: note = bridgeRNA
ttatggaatggtggcctgcccctttccccagcgtctgttaggatgctgtcgtgtgcgaagaagaaaggaacgagccaatgactattgtgatcctcggagttgatctgggcaagacatcttgcagcgtcgtgggtgttgatgcaactggcgcggtagttgctcgcaggacgatgcgtcgtcagacactaattgattacgtaacaaaactcccgacttgcgttgtagcgatggaagcgtgctgtggagctcatcatctgggtcggctgtttgcggcacaaggccacgaggtccggctgatgtcgccggaatatgttcgcccgtacgtcaaggcccagaaaaacgatgatcgggacgctgagggtattgccgaagctgcatctcgaccgacaatgcggtttgtcgaccttaagagccacgagaaactggacattcaaacattacatcgggtgcgttctcgccttgtggcagaacgaaggaacctgatcaatcagcttcgcgcaattctactggaacgtgggattatcttcccagtcggacggcgtaaactcgaacttggcgtggatagcttgcttgccgaggctgtagaggtaatgtcaccgcgtgtgtatcagctggttggcgatttgcgcacggaatggaaggtactcgatacaaagattgaggccctgaataccgagtttatccagttggcgcgcaacgatgctgccatgcgcagactgacgtcgatccccggtataggcgtacttaacgcgacggctctggttgcagcagtgggggatgcgagcagctttgccaaagcgcgcgatctgggtgcctggctcggattggtccccaggcaatacagcactggcggtaaaccccggctgcttgggatatcgaaacgtggcaacacttatttgcgcactctgcttattcatggcgctcgcgcggcgttaccatcgctttcaacgagtgacacgcctctcggacggtggttgaaggccatgatagagcgaggcgtacaccgtaacgccgtgattgtagcgctggcaaacaagttggcgcgaatagcatgggctgccttgcgcaaggaaacaggctttgaccgcagttacccggtagcttgcgcgtagtcagatcggctacgcaccatcaaaagcgtagcccaacgaggtttgcaggaaggatcgtgaagatggcctgacagtcgaacggcgtttggaaagcccggtcaaaaaaatggcacttgttgccgaagtctttattggggctctgaacgtgcggatgtccatcttggccatgagctggctcatgagaccgtatacgttgacgcagactgatcagtacaccgtaaaatcctcttgcaacggggcaggccatacg

SEQ ID NO: 9517 - DNA, 1630 bp, unidentified
  source 1..1630: mol_type = unassigned DNA; note = element_ee6dc4f
  misc_feature 1..3: note = core
  misc_feature 4..260: note = LE
  misc_feature 261..1499: note = CDS
  misc_feature 1500..1630: note = RE
  misc_feature 8..236: note = bridgeRNA
gttcgtaatataaggttagccagataagaaaatatttctggttgaccttattttttatggtcatatgatagcggtagtcggggtagaacgtcgcacccgtgggactcgatcccgttagctaaactgttcgccccctacttgtatgaacatgtttcaggctggttgggacatagaaatgatcccgtttaacaagcgaacctatgacactacaagaagctctaggggttaccgactaatttatttctaggagttgataaacaatgaatccagtcatcggtctggatgtctcaaaaggagaaagtcaggttcaagccttcttggacaagggaaagccttatcgtaagagtttcagtattaaacataatcgtgagggtctcgagacattcttggcatttcttcaagaagtcgaacaagcagcacaaggacaaccaccttctgtggttttagagtcgacaggtcattatcatctacctgtgattcagtttctggaggaccaaaagtatgtgtatattgtcatcaacccactcatttcgcatcgagcgaaaagttcgagcttacgcaaggtaaaaacagatgccgttgatgcgtatcatttgtgcgagctttactacaaggaggagcttgaaccctataaaaaacgagggattcaactcttaaatcttcgtaatttaaccagacaacaagagacgatcgctgaagtatcggcgaatacgaaactacaactccattccttattggatcaggtgtttcctgaatacagaggcgtatttggtagtttgtattcgaaggtatcgttattaaccctgcaggcttttccaacttcagaggctgtcttacaagtggatgagtctgaattggtcgaaaagatcgcttcgttatgtaaaagtcgttctgagaggtgggccatagaaaaagcacaaaagctgcgagaggctgccttgcgtaacccgtttcaaaagaatttgtatgagagtcatatttttaatttggagatgttaacgaacatcgttcttcaataccaagagcacctatccaacatcgcaactgaaatagatgcccttgcgaaagaaattgaagaatatcagattatccaatctattcccggaattggagaaaagatcgccgccacgattacttctgagatcggtgagatagatcggtttaatcacccaaagaagttggttgcattcgctggagtcgaccctagtgtttactcttcaggaaagtttacagcttccgttaatcggataactaaaagaggctcttccagactgagacatgccttatttatggccgttcaatgcgggattagagattctcgtaagcaaaagacaaccgacgaaattattgcacggaacaagagactcagagagttttacgataaaaaacgcgaagaaggtaaaccatttagagtcgctgtcattgcttgtgtcaataaactcttacattggatttatgctttactgaaaagcaaaacacctttccaagatgtagcttgatagctatatctaactagatagaccaagaccttccaaaaagtacagattggtaggttatttggtatactcatttttagtatagcatgtgtaatttcatttttttattgaaaatgttgacaaactattagctg

SEQ ID NO: 9518 - DNA, 1457 bp, unidentified
  source 1..1457: mol_type = unassigned DNA; note = element_ee6f13e
  misc_feature 1: note = core
  misc_feature 2..154: note = LE
  misc_feature 155..1201: note = CDS
  misc_feature 1202..1457: note = RE
  misc_feature 1226..1455: note = bridgeRNA
gaatgaaatggacgcctcccacctggggattggtagcaagagcagcggcaaaaggcggtaaaggatgagtgatggatcctcacgcggccagcggcatcaaagtgccctagagtgaaagtgcattactttcgaggcatggcggaggatccacatcatgaatgctactaccaaacccgtggtcggggtagatacggccaagagcgtgttccaactgtacaccgttgacatggagacaggcgaagtgttctgcaaacagctcaagcgtgcgcaattcctgcagtggttcacgaaccgcgcgccgtgcctggtcggtatggaggcatgtggcggttcgcagcactgggcgcggcaattgcaggcgctggggcatgagatcaagctgatgtcgggcaagatggtcaaggcgtttgtaagcggcaataagaatgatgctgccgatgcacgggccatctggctggcaacacagcaggccggggtgaaagcagttgccgtgaaaactgaggcgcaacaagcggtgttggcgatgcaccgggtgcgacagcaattggtaaaagtacgcacggcgcagcgtaatgaaatgcggggcttgctggcggagtatggcgaagtgttcggcttaggcaaggccgccttcaacgccggcatgcagggcgcgctggcccggttggcggagcgtctgccgagggcgctgatcgacactttgcgcgagcaatggaacgaactggccaggttggacgagcgggttggcgccattgaggcaagattgctggcctggttccgccaggaccgggcgacgcaggccattgccgccatcccgggcgttggcctgctgacggcgacggcggcggtggcgaccctgggccaagccaacgccttccgctctgggcgtgagttcgctgcctggatcggtctggtgccggcccagagtggaaccggtgggcacgtcaggctgctgggcatcagcaagcggggcgacacctatctgcgtactttgctgatccacggcgcgcgagcggtgcagctacacgcgaagacgccgacccggtggctggaggggattggccggcgccggccgccgaacgtcgtgacggtggcgctggccaacaagatggcgcgcaccatctgggcggtattggcccacgagcgcgcctatgacaaggaacacgtcagcatccggccgcaagccgccatgccgacgtgaagatcaacctaccttatgaaaggatggcacgctaacagttgcgttaggtattaacagcgatgacggacaggtcagaccgggacccactaaacctgaatggcaaccggggcatgaagcccgtcggaggaatgaggcgtgggtcagcggatttcatcggggccagcggcggtgccgcacacaaggccggatatagaactgcgactttcctcgtctatctattgctgaaaataccttgcaaaagggaggcgtccatata

SEQ ID NO: 9519 - DNA, 1941 bp, unidentified
  source 1..1941: mol_type = unassigned DNA; note = element_ee72847
  misc_feature 1..5: note = core
  misc_feature 6..278: note = LE
  misc_feature 279..1292: note = CDS
  misc_feature 1293..1941: note = RE
  misc_feature 32..294: note = bridgeRNA
ttgctacaatatgcttgaccccaaaagcagcatgttaaagaatgtgctgttcagcggttcttaccaaagctacaatgagagggtaatcggcctttcgaagcattgcttgagctaaccacgctcgatggtgcaaactgtcagccggccctttcattgcagcgttcgattgatgcaggttgagttatcggagtgatccgtacattcgtgtaacaaagcaagctgaacaggtaatgaactgcggcggtcgccgattatgaatctgattgggaggactgcctatgaacacaggaacgatcactgccgttggaatcgatgtatcaaaacacaaaagcacggtcgctgcccgccgtccgggaggggaagtcgttcttctgccgtttgatgttgagcatactgcagaaggccttaaaaagttgatcacgaagctcagagaacttgacggagagatcaggatcgttatggaacacaccgggatgtactggcggccaattgcgatgactctgaaagaagccgggttctatgtaagtgttgtgaacgcaattctgatccacaattttagcgacaactctattcgtaaggtcaaaacagaccgtgcggacgcgatgaaaattgcgaactacggtcttaccttctggagcgacttacaggaatacactggagaggacgagaatcgtcagctgttaaaaatccagagccgactctatgaaaggaccgcgacaactgcagggatgctgcgaaacggattgatctcacttctggaccagaccttccccggagccaacaaactgtttcgggatgacagccgtaactccaggggccatgtgaagtggatagattttgttcttcgcttctggcataaagaatgcgtggcagctttgtccctggcagcttttacagacaccttccaaaaatggtgtaaaagaaccggctacaagttcagcgcttccgacgccgaacggatccatgccattgccaggaacgcagttgccacgctacccaaaaatgatagtacaaagcttcttataacgcaagcgacaaatagcctgaatgcgatctatgactccctccaagcgattagaacagagatggatcgccttgcttcaatgctgcccgaatatgaattggtaatgggcatggagggcatcggaaaggttacaggccctcagcttatggcagaggtcggtgatgtgcgtcgattctcgcacaaaggggcgctggttgagcgtgggcggcataacccggacccgccctgtgagccgcctgccagcgcccggctgcgttttcctccttgaagggcacaaagcccgtctgcgtcgtcaagccttgccggacacagacaggcggcccacagggtcggagatttttgagcgcgcccgccgtctcagggcgatgacggcggcgtgcagacgggctttgtgcccttcaagcggcgacggcgatgccatggggcggcgggcacgttcaaaaacgggcccgggttatgccgcccacgctatgcaggcgttgacgcttctccataccagtcaggaagcttcgattcgaaaagccgtcatgtgtccaaacgcggctctccacatcttagaagagtgctgtttgtgatcatgtcaatgacgctcattcgtgcgaatactgctaatcccgtattctgttttatggataagaagcgagccgaaggaaagcacttttacgtttatactgtcgccggctccgccaaatttctgcgcatatattatgcaaaggtcaaagaatacctgaacgctttagaagataccgcctgatacagaacaacgatggccatgctgctccgcagcacagccatcatcatatgtgacggggcatatcctctcaggcctgcagccggaaaatgttgcaggtccttttgttatgcctatttcttatcctgtacttttcttcttttgtacttgacacacattagcaggt

SEQ ID NO: 9520 - DNA, 1358 bp, unidentified
  source 1..1358: mol_type = unassigned DNA; note = element_ee7e924
  misc_feature 1..2: note = core
  misc_feature 3..82: note = LE
  misc_feature 83..1069: note = CDS
  misc_feature 1070..1358: note = RE
  misc_feature 1130..1345: note = bridgeRNA
tgatgtggtggacggcctccgctcccggcatcacaatgtgccaaagtgtggctgtcgaaagtcacatgagggagaaccgtccatggagaagattaccacaattgggctggatatcaccaagcaagtgttccaggtccacgggatcaatggtgctggctcgatcgtgagccgccgcaagctgcgccgcgacgatgtcgttggattcttcagggcattgccgccgtgcctcatcggcatcgaggcttgcgcgacaggacaccactgggctcgggttcttatggcactcggccacgaggttcggctgatgccggcgtcttacgttaagccgtacgtgaagcggcagaagaatgatgcgacggatgccgaggcgatatgcgaggcagtagcgcggccgacgatgcgctttgttccggtgaagagcgaggagcaacagagcgtgctgatgctgcatcgagtccgcgagcttttgatccggcagcggactatgctggtgaacgccttgcgtggccacctggcggagttcggcatcgtgacgcgacagggcattgcgggcgtcggaatgctgatcgcgttggtagaaggcgatgatcacgatctcatcccggcgcttgcacggtccgcacttcttccgctgatcgggcagttgcgagaggtacaccagaaggtcagtgagatggatcgccagattcttgcgtggcatcgctcgaatgaactgagccggcggctcgagacgacccccggaatcggaccgatcaccgccagcgcgatcaccgcgaccgtgacggatgcgtcgctgttcaaatccggccggcaactggcggcatggataggcttggcgccgcggcagaactcatcgggcggcaaggaccgcctcggcaggatcagcaagcagggcgatccctatttgcgtcgccttctcgtggtcggtacccatgccgtgctccgcttcagccgaaagggcaaagcggcatctacccgctgggcagccgagcttctggcgaagaagccgtacaatgttgtcgccgttgccctggcgaacaagatagcaaggatcgtttttgggcgatgatgatgaccgaccgacgctttgaggcttccgccgccctttaaggcaggtcgcggatgctcctgaaattggtgaggtgctgatggtgtgatggcgaacggtcgagccgggatcggacaaacccgatcagtgggtggcgcttgaaagcgcgttgacctgtccgggatccgatcagcggactacatcagggccagcggcatgaacgcgccgcgatcaaaggtatacatgcctgcacccgaccaactcgtcagaagcgccaaaaagcccttgccacgcggaggccgtccataca

SEQ ID NO: 9521 - DNA, 1366 bp, unidentified
  source 1..1366: mol_type = unassigned DNA; note = element_ee80c4e
  misc_feature 1..2: note = core
  misc_feature 3..56: note = LE
  misc_feature 57..1112: note = CDS
  misc_feature 1113..1366: note = RE
  misc_feature 1089..1353: note = bridgeRNA
tgatggtgtggatacctcaccccgcaacgggatcgcaatgtgccaggatggtgaggttgaaacgcaccagcatggaggaggtatccgtggaagaggttacagtcatcggcatcgacttggcaaagtcggtttttcaactccacggcgcggatgcgtcaggacggcccgtgttccgcaagaagctctcgcgggcgcagttcacccggttcgtggccgagcacccgccctgccttgtcgccatggaggcttgcgcgtcgtcgcactattgggagcgggagttcatgaaactcggccatgaggtacggctcatcccaccgatctacgtgaagcccttcgtgaagcggcagaaaaacgatgcgaatgacgccgaggccatcgcggaggccgtggtgcgtccgaccatgcggtttgtgcccgtgaaatccgccgagcagcaggccagatccatggtcttcaagacgcgcgatctcctcgttcgacaacgcaacgccctcatcaacgcgctgcgcgggcaccttatggaatatggcttcatcgcgcctcccggacggacattcgtcaggaaactcgaggcgcagctcgatgctccagagagcatgctcccatccggcgtcaccgagctttgtcgcctgcacctcgagcagattggcagtctcgacgtcaggatcataagaatagagaagcgcctcaaagaagaagccaagaacgatcctgagacgatccgcctgcagacagccccgggtgtcggccccgtcagcgccatggcaattcaagccttcgccccgccgatggaagggttccgaagggggcgtgattttgcggcctggctgggtctcgtccctgttcagaaatcgacaggtggccggcagattctggggcgcacttcaaagatgggacaacgggacattcgcagactgttgatcatcggcgcgatgacgcgggtcagatgggcggtcaagaacggccctcccaaagggtcctggttggagcagatgctggggcgcaagccccggatgctggtcgccatcgccctggcaaacaaaaccgcccgcgcgatctgggcgatgatgacgaaacaggaggactatcgagaccccgtccttgccgcgtgacacggtgagggttggcaggtgtgagacggacagtgaacagtaaggacaaacgatcgaccagatcgaggttgtggaaaccaggcactcccagagagcttgcaactcgggcgcattgatatgcacccaaccttcgcatcgccataccggcccgcggcattgtcaaagccgcacatcgaggcctgacacatgaccgtacccgatcacatgttcgacccgttcaaaagaatgcttgcaccgaccgaggtatccacaca

SEQ ID NO: 9522 - DNA, 1635 bp, unidentified
  source 1..1635: mol_type = unassigned DNA; note = element_ee84766
  misc_feature 1: note = core
  misc_feature 2..115: note = LE
  misc_feature 116..1315: note = CDS
  misc_feature 1316..1635: note = RE
agtaattatgtaagaaaagcatagtgcagtatgtgcagtcatcctaagtaggagctgacgttttaatttagtatgcgatctatgtcgccattattaacaattaaaaaactgcactatgccaagtacaaatttgcaaaattctattgactttaagggtcaaaaattttatgtgggacttgatgtccacaaaaactcatgggctgtaaccattcgcagcatgggtattgaggttggccggtttacacagccgccatgcgctgcaacattagcggcacacttgcaaaagaactatccgggtgggcggtatttctcagcatatgaggctggtttttgcggaactggtatccatgagcagctatgtaaattggggataaccaacatcattgtgcatgctgccgatataccagctactgacaaacaaaaaaagaataaaacagatgtgcatgatagccgttccattgccgattacctggaaaaaggcaaactaactggcatttatgtaatgactcgagaacagcaggaactacggagcctgtttcgtctgcgggaaagcaaggttaaagacgtaactatagttaataacaagctcaaaagttttcttatgttttttagcatagaattaccggacgccatattaaaaaaacagcatttatcagtaaaagcattgcaatggttaagcaatcttgaaatggcaagcaccgcaggtgccattactttacggcagcatattgaagagctaaaatatcagcgtaaacaattgtaccagataacaaagctcttacgggaacaaatacaagcaactgatccccagacctaccgttgcttgctttccgttcccggtatcggaggagtaacagctatgggcttgattgctgagattgccgatttcagccgttttgatgacccagaccagtacagcagctttcttgggttatacccatgggaagacagttcgggagatacaattaagactaagggaatgcaaccaaggtgtaacaggcatttacggccattgcttgttgaagcatcctggatggccatcagaaaatctcctgcattgttcgcttattatagcaaacatgcagtccgaaactccaaacaagcaatagtcaaagtggcccgaagattagcaatgattgcaaaaggggtggcaacaacacaacaactttatcaggcagattatttacaaaatataagacagaaacaacaagaacaaaaacaagcccagaaaaataaaaggttttcttcaggcataacgcaacagcatataaataagcaaccggacaacaatatactaatatcattgcccggctgatatgcatatgcggctgtaatatccctggcaggttgctcctcagcagagccggcttctgtttcttacagcatagtaaatttaagaatgattgttaacttttcagtgtacaaatagtatctcaataatttttaaagagaaaaacgcattcaggagatggtcaaaaatgacatttaagaagtaggcgtacctcttttacctcatacaattaccggcggcatgaccgcatatagcagtctgagattattttgttatactgaataaaaaaactaattttatgtgatactatccccacatattagcactctgcttttctacatagc

SEQ ID NO: 9523 - DNA, 1558 bp, unidentified
  source 1..1558: mol_type = unassigned DNA; note = element_ee88c12
  misc_feature 1..2: note = core
  misc_feature 3..269: note = LE
  misc_feature 270..1448: note = CDS
  misc_feature 1449..1558: note = RE
  misc_feature 3..250: note = bridgeRNA
cttgtataatgtaaaccatagggaggatcattatacttttcctttcttcaaaaattttgtataatgctattagacgctgtggattagttttatcacctatagctggttgccctatgcagctagactatttcatttgaggctataaccacagctctatgcttatttgttaatgagttagataacgctttgacgttttatatatagcaaggttacattcggcatagagttcgtggatatcatagcgtactacattttaaggagttgtttctatgatctttgttggtattgatgttgccaaaagtaaacatgactgctgtattattagttccgacggtgaagttctttccaattctttacgtatccaaaattctaaagaaggctttgatctacttttctctagtattgtttcttcactaccttctaacgattttagtaaagtaaaaataggactcgaatcaacaggtcactatagcattaacattactaattatctcttatctaagggatttcaggtcactaccctgaatccactgtctacgaatctttttcgtaaggctcacactcttcgaaagactaagacagataaaacagatgctttagttattgcttctatgctctttactgatgaatcaaaatcctattcaccagtattatatcagattcaggagttaaagtcactaactagacacaggcatcgtttaattggttatcgctcaaaacttaaagtatctgttactaggcttattgatatcatttttcccgaattacctaactatgtttggtctatacaccaaaattcttcttataagttacttcttgagtttcctactacagaggatttgcgtaacgctcacctcaccaaacttaccaaccttttgtcttcatcttctaatggcaaatacggtaaagacaaggcattaatattaaaaaaccttgctgtttcatctattggctcaagtaatcgttctttagcttttgagcttagacaaacaattcgcttaatacagtctgttcaagctgaaattgatgaactggataaacagattaagcttgttgttgatgaacttgattctccacttatgtctattcctggagtttcttatacattagcttcaatcattattgccgagattggagatataaatcgtttcgatactcctgccaaacttttagcttttgctggtatggaaccatcaacttatcaatctggcaactataatgcctctaaaactcctatggttaaacgtggttctacatatcttagatgggccgttatgcaagcatctaggttagttgctattagagatactacattcaacttataccttaagaaaaagcgttcggaaggcaagcactatctagttgcaattaaccatgtgggtaaaaaattaatgcgtgtaatgtattacttacttagatcagatactaaattttcagttcaagcttaattgttattatattttctaaagcaacattgttgctctgtttgccatgcaaatcttttagcctagaaatttataaacttttttcaaaaatcacttgacttcatatagttagt

SEQ ID NO: 9524 - DNA, 1153 bp, unidentified
  source 1..1153: mol_type = unassigned DNA; note = element_ee89b09
  misc_feature 1..2: note = core
  misc_feature 3..190: note = LE
  misc_feature 191..1138: note = CDS
  misc_feature 1139..1153: note = RE
  misc_feature 48..198: note = bridgeRNA
cttgtatattaacaatagtgctttttatcatttaaataaatatctttcaaacagtcagtcgagatcgtcccaccctagggtttagtagcccgtaagtagccggatccgacagactgtttattctcaaaagtccgaacagtcgattgggacattgtaattttaatgaacccgcattgcaaggaaggataacatgagaaattgtattggtgtagatatttcaaaacgttcctttgatgtttatgtactcgaaacaaacaaagcctttcagatgcaaaatagttctgaaggaatcactcgctgtgctaagctctgtcatgaaatcctaccggagttgattgtgatggaagcaaccggcggttacgaaatgctcctggcgagccatctccaagcagagggctttcctgtagcgatcgtaaatccaagacgcatcagagattttgctaaggctttggggcaaatggctaaaactgataaaatcgatgctaagattattgccaagtttgcagctacattagaaccaatgcctcatgaattcatcgatgataactccagaaaattaaaagccttaatctcacgtagaaaacaacttcttcaaatgcatactgctgaagtcaaccgcagagaacatgcacttgagaaggaaatcaaacaaagcattaaagctattattacggctattgaaactcagcttcaaaacgttgacaaagagatagatgatgcaataaaagaagcacccgaactaaaacaaaaaactgaatttcttcaatccgttccaggtattggcaaaaccaccgctcacatgcttgtcgcagaattacccgaattgggcattctaaaccgtagacaaattgcagccctggttggtgtcgcacccatcaatcgcgatagcggcgttttccgtggaaaacgcatgaccggaggcggcagaaaacaagtccgaacgaagttatatatgccaacgttggtcgcgacacagttcaacccggtaatcaaaaaatactatcgaaacctggtcgatgagcgtggtaaatgcaagatggttgcacttaccgctgctatgagaaaattgctgtgcatcatgaacaccatgctgaaaaacagtcaatattggcagccaaatttggctgaaaacgcttgacttttaagacagtcg

SEQ ID NO: 9525 - DNA, 1432 bp, unidentified
  source 1..1432: mol_type = unassigned DNA; note = element_ee8c044
  misc_feature 1..2: note = core
  misc_feature 3..121: note = LE
  misc_feature 122..1159: note = CDS
  misc_feature 1160..1432: note = RE
  misc_feature 1186..1379: note = bridgeRNA
agatggggtattcggcttgcgccccttcttcaacggtgatgcaagaaggtgctgcgcttcgagctgatgatagaacgtggtctgtccaaacagccacaagcatcaggaaaggaagcgcagcatgaaacactttatcggcctcgatgtcgcggtgaaagagaccgcggtttgcattgtcgatgaatccggtgggatctgccgcgaggtgaaggtcgtcagccactgcgacgatctcctcgccgtcctgaaggatcctgccttgaacattgaacgggtcggtctcgaggccgggcccttgtcgcaatggcttttcgaggggctggcgtgcgccgggttgccggtcatctgcatcgagacgcgtcatgtgaaagcgttcctgaaggcgcagccgaacaaaacggatcgcaatgacgcgcgcggcatcgcgcagatgatgcgggtcaacttgtatcgcccggtgcatgtgaagacgcttatgagccagaagcggcgggcactcttgacggcccgcaagctgctgcagggaaaggcgatcgccatcgagaacgacatccgcggtcttctgcgcaacttcggcctcaaggtcggtgttgtgggaacggtgaagttcgaggagcggatttgcgagcttgtcgaaggcatgcccgatctcgaagagatcatggagccgctgctggccgcccggcggaagctgcgtgccgaatttgctcgcctgcacaaaaaagtgctcacgatcaccgggaatgacgcgacctgccggcgcttgatgacggttcccggtgtcggccccgtggtggcgctcgcctatgccgcgacaatcgacattccgcagcggttcagaagctccaaggcggtgggacctatcctgggactgacgccgaagctcaacgagtctggggaaagcaagcgcgttggatgcatatccctgtgcggcgacggcatgatgcggacgttgctctatgaggctgcacaaacgctgatgacccgcgtgacgaaatggtcgtggctcaaggcctgggcgatgaacgtcgccaagcggcgcgggatgcgcaaagcaattgtcgcgctcgcacgtcgcctggcagtcgtcatgcatcgcatgtggctggacggcaccgagttccgctggacgagggaaaccatggcgtcagccacctgatccagaaggccggaaaggagagagacagagttccgctcgctggcggacggacgtccttcgcaggacgatggatgaggcgagttcgttgtcgcgctagtgccggtcgcaccccgaccaggacgatgtgtagattgtgccgcctcattctcctgaccccatactgggagggcgaaacgccgatcccgaagagaagcaaggccctgcgaaagacctcagaacgccggagacacggaaaagctcgatagcgcttgacctcaacacgccgaatagaga

SEQ ID NO: 9526 - DNA, 1155 bp, unidentified
  source 1..1155: mol_type = unassigned DNA; note = element_ee9c911
  misc_feature 1: note = core
  misc_feature 2..169: note = LE
  misc_feature 170..1123: note = CDS
  misc_feature 1124..1155: note = RE
  misc_feature 1..154: note = bridgeRNA
atgataataaagaggacacggcaggccacttgtcattaggtccagtagaccgactcgcagtacgaccgccgtgtcctttatccaagaaagcccgaacagttgagtggccgatagaggccgaatccttgctagtgtgggctcatcacgattatacggaggaatcgtaccaatgacaacaccgaatgacgcatatgttgggatcgatgtcggcaagacctggctggatgttgctttatggggcaacaatgcagtctggcgggtgtcgaatgacgatgaaggcgtagccgaaatcatggcacgtgtagcggcgctgggtctgcagctgattgccgtcgaagccaccggtggatatgagcagttggtggtccagaccatgctcttgaacagtctgccagttgcggtggtcaatcctacccgggtgagggcattatccaaagcgaccggtaaactggccaaaacggatgtgatcgatgcacgtttgatagccgaatatgccttcaagatccagcctgaagcccttgcaccgaaagaagcccaggaaatccgtcttaatgcgctggttaccagacgtgaacaactggtggagatgcgcaccgccgaacaaaatcgcctggggacggcccataatagcatgcaagtcgatattcgagagcatattgagtggatgaacgcccgcatccaggagctcgaagtagagatcaatgggctggttgacagcctgcctgaatggcgaaaacaagctgagcgtcttgacagcatcccaggtgtggggaagatcaccgccgttacggttttggcagaaatgcctgaattaggccagctgaaccgccagaagatcgccgccctggctgggctggcacccttcaaccgagatagcggccagaaacgcggcaagcggcggatatttggtggtcgcaaaggaatccgccgagtactgtatatggcctgcttatcagccacaaagtgcaatcctgtcattcgttccctgtatctccgcttgacgaagaaaggtaagttatttaaggttgccattaccgcttgtatgcgtaagatgctcaccattatgaatgccatgacccgcgatcaggtcaattggaggccaccagaaccaattccgaattaatttaagcctttactttttacacagttactgcg

SEQ ID NO: 9527 - DNA, 1331 bp, unidentified
  source 1..1331: mol_type = unassigned DNA; note = element_ee9f636
  misc_feature 1..2: note = core
  misc_feature 3..255: note = LE
  misc_feature 256..1317: note = CDS
  misc_feature 1318..1331: note = RE
ccgacttgtatgagtgtcagcggtccgtggtcgggtcagctgcccgtagcgttccgtagcagaccggaagggctgactcgcgtaattcctgtcacccgcccgttgggttgaccctggtaggggtgtgtccaccccttccggtctgcgttcgcggagtgactgaagagaggcgtgaccccaagctgctgtgagaggtacttgaagtcggattgtcctccgcggatcccatcctgacagagaagggaaccgtcttccatgatcgtcatcggtatcgatccccacaagtccacccacaccgcaaccgcggtcgacccggccaccaacaccgacctcggctcgatccgcatcgacgccaccctcaccggatacaagaagctgatcgcctgggccaagtcctggccgcaacgccagtgggcggtcgagaatgcctacggtctcggacatcaccttgcgcagtggctgctcgtcctcggggaggtcaccctcgacgttccgaccacggccaccgcccgggtccggggactctcccgcggcggccgacgcaagaacgaccgcattgatgcggcggcagcggcgtgcgtcgccgccgcacagggcgacgcccgcccggttgatccggagggtcccaccgacatcctgtccctactcgacgagcgacgaacaaacttgtcgggcagcagaactcgcatcgtgaatcaactccacgcgctgctgcgtcagctgctcgccgggggtgccccgacctcgctcaccgctgctgcagcgaccgcgctgttgcggggcttccgcgcccgcagcgaggtggaccgggtgcgggtcggtctgtgtcgggatctgatcgccgacgtccggcgcctcgacgaccagctcgcggcgaacgagaagcagatgacccatgcgctcgacgagcacggcacccgcctgcgcgaggtcgacggcatcggtgcggtgaccgcggcccggctgatcggccgcaccggccggcccgatcggttcccgaccgcggcggcctttgcgaactacaacggctcggcgccggtgcagatcgccagtgccgacaccgaccggcaccgactctcccgctacggcgaccgacaactcaacagcgcgctctataccgtcgctgtggttcagatccggatgcccgcgagtgccgggcgcgcgtattacgacaagaagatcgccgagggaagaaagcccgctgcggcgaggcgcgccctcaaacgtcacctgtccgatcacgtctggcggatcatgctcgccgatgaaaagcttcgtcttcgaccagaaaggaatcaatccgccagggcggcttgacaaacagagaggca

SEQ ID NO: 9528 - DNA, 1476 bp, unidentified
  source 1..1476: mol_type = unassigned DNA; note = element_eeab081
  misc_feature 1..4: note = core
  misc_feature 5..238: note = LE
  misc_feature 239..1459: note = CDS
  misc_feature 1460..1476: note = RE
  misc_feature 1..233: note = bridgeRNA
ccccgttaccttgctggtgaccccgtaaggcggggttacggtcgccgggcccggcatgacttactgcccctgtctcaccaatgatccggggggtgttgtcaccgggcctggtggcgccagccgaccgctgatagggacacggcctgcttcaaaggtctcaacgtaggcgtgggtgccggcagctgacgcatcaccagtgatcgacgaccgttccttcgatgcaaggatggtgggcgtcatgagcgagaacaccggtttcgacatctggtgcgggttggacgtgggcaagcaggcccaccatgcctgcgccctcgaagctgccgggaagagggtcttcgacaaggccttgccccaagaccagaagcgactcgaggaactgttcaccgggctccaatcccatggcagggtcctggtgatcgttgaccagccgaacacgatcggcgccctgccgatcgccgtggcccggtcgatgggcatcaccgtggcctacctgcccgggttggcgatgcgccgcgccgccgacctctacccgggaaacgcgaagaccgacgccaaggatgcgttcgtcatcgccgatgccgcaaggaccatgccccacaccctgcgccgagtcgacgccggcgaggaaaccctcgccgaactcaaggtgttggtcgggttcgacgaggacctcgcagccgaggccaccaggttgtcgaaccgcatccgcggcctgctcacccagatccatcccgccttggaacgcgttgtcggacccaggttgaccaccaaacagggcttggccgtgatcgagcagctcggtggaccccaaggcatcgctggcgtgaccaggtccaagctgctgcgggtcatcagcaaggcctacccgcgcggcgcgcaagcattcgccgatgccatcaccacagctctgggcgagcagaccgtcatcgttgccgacaccgccgcagccgagcaggtgctgccgaagctggcggcgtcgttgcgtcaggtcctggaccagcgcgctgagctcgccgtccaggtcgagaaagtggttgatgctcaccctcttgccgaggtcctgacctcgatgccaggcgtcggggtcaggaccgcaggacggatcctgctcgacgtcggcgacgcctcagccttccccaccgccgggcacctggccgcctacgccggcctcgcaccagtcacccgacgatccggcaccagcatccgcggcgagttccccgcacggtcaggcaacaagcacctcaaacgagccctgttcctgtccgccttcgccgccctcaaatccgacccgaccagccgggcctactacgaccgcaaacgagcccagggcaagaaacacaacgccgccctcatctgtctgtcccgccgtcgctgtgatgtcctgttcgcgatgatcaagaaccaggaaccctaccgggcacccgccccaacaccctcacccatgcccctcgccgcttgacgaggaacatagggaca

SEQ ID NO: 9529 - DNA, 1352 bp, unidentified
  source 1..1352: mol_type = unassigned DNA; note = element_eeb39ec
  misc_feature 1..3: note = core
  misc_feature 4..87: note = LE
  misc_feature 88..1107: note = CDS
  misc_feature 1108..1352: note = RE
  misc_feature 1125..1339: note = bridgeRNA
ggatggggtggatggctcctgcatcaatcggcgtcgcaatgcgccatagtgcagttgctatgaactgcttatgagaggagccagccaatgcatgttacaacaatcggcctagatttggctaagaacgtttttcaggtccacggtattgatgatcatggagagattgcattcaaccgcgctttacggcgggcgcaagtgttggcattttttgaacgtcttgagccatgtttagtcggtattgaagcttgtggaacgagccaccactgggcacgcgaactgatcaagttgggtcataatgttaagttgatcccaccggcctacgtgaagccttacgtcaaacggggcaaatcagatgctgttgatgcagcggctatttgtgaggcggtcacgcgacctacaatgcggtttgtcgaagtgaagaccccggaacaacaggcgatactcgcggttcaccgaacccgtgatcttatcgtccggcagcgaactcaaacgatcaacatgctgcgggcacagttggcagagtttggtctcgtcttgccgcaaggcgtttatcatccgctgcggtttgccaaggattgcgtagatggagaacaaccagacctgccacaggatgctcaagaggttgtcttcgatctgtgcgacgaattgctgttcctacacgccaagatcctgcggcattctcgacatatgacgcggattgccaaaagcgagaaacgcgtggccttgctgagaacgatacctggtgtcggaccaattacagcgtcagcaatcgttgcgacggtcggtagtggcaagcagttcaacaacggccgggaattcgccgcttggctgggactgacaccgctcaatagatcaagtggtggaaaggaacgtctgggtcaaatctccaagatgggcgatcaatacatacgccgattattggttctcggtatgacctcccgcatccgatccatcaggttggaaccggaaaagtttgatccatggttcgctgacatcctgtcacgcaagccaagcagggtagctgccgttgccatggccaacaaaaccgcccgtatgatctgggctgtgctgacaaggaatgaaccctacaaagtgagaaccgtttaatagaccaacgaaacaacaggagtttgcaagaccaatgaagtgatggaactttgtcagcccaaaaaccaagacaccccgagctttgtccagaacgcttgctgttcgatgtgcggaatgggacttggttggtggaaaccatcagggccagcggccatgtgcgtcgcgctaacaggccgaacacaagactgcttctgacgaaataccatgcgcgaaaaaggacttgcaaaaagggagccatccacaca

SEQ ID NO: 9530 - DNA, 1369 bp, unidentified
  source 1..1369: mol_type = unassigned DNA; note = element_eeb93d2
  misc_feature 1: note = core
  misc_feature 2..70: note = LE
  misc_feature 71..1105: note = CDS
  misc_feature 1106..1369: note = RE
  misc_feature 1137..1360: note = bridgeRNA
tactgggatgatccgccgcttgatcatcaccatgaagatcttgtaggcagattgaaggaggattatcgacatggagattcgatcagttggtatcgaccttggcaagacgagctttcatctggtggcacttggcgagaagggcaaggtgctgctgaagaagaagttcactcagaagcagctgatagctttcactgcgaacctgcagacctgcctgatcgggatggagtcctgttccggggcgcacttcctgggccgtgctctacgcgaacagggccatgatgcgaggttgatggcagcccagttcgtgaagccgtacgtgaagtcgcacaagaacgatttcgtcgacgcggaagcgattgccgaggctgtggaacgcgagaacatgcgcttcgtgccgatcaagaccgatgaccagctggatctgcagtctctgcatcgcgtgcgggagcggctcgtcacgcgcagaactgctctgatcaatcagattcgcgggttcctgctggagcgaggtatcgtgttcgccaagaagccgagccgattgagggcagccatacctgaggtgcttgagaactccgacgagaacctcacccctaggatgcggaacctgattgccatgctgtggagtgagtggaaggatctggaagtacagatcgacgaaatgaacagcgaaatggaacggattgcttcgagcgatgctgcgtgtcgaagactgcagcagatccctggcatcggaccgctggttgcgaccgcgatcgtagcctcgatcggcaacggcgcagccttcagcaagggacgagagttcgccgcctggctggggctgctgccgaaccagcattcgaccggcggcaaggcgaggctcggtgcaatcagcaagcgcggtaacagttacctgcgcaagatcttgattcatggagcacgcgcggttgtatttcgatcgaagagagatcgaatagcatggggcgcctggatgacctcgctagagagcagagcgccaaagaatgtattgatcgtggcgaccgcacacaaactggcccggatcgcgtgggcagttctctcgaccggccaggactatcgagcagccttgcccgacgcactggcagcttagacggattcaataaccagcatcatcaagttttccccaccgaggtctgcactgaataagtgaagatgaaagaacagtcaaaacggcgtacctgaaacctgattgctcaaaaggcccttacgaggccgtcggaattctaaggacaggtacgcggcgtatccccatcaaggccaggagaacactctccacctaaaggccgaatacattgacgtagacctatctttcattcagaaacttatcccttgcattcacgcggcggatcataca

SEQ ID NO: 9531 - DNA, 1360 bp, unidentified
  source 1..1360: mol_type = unassigned DNA; note = element_eec1cf2
  misc_feature 1..2: note = core
  misc_feature 3..78: note = LE
  misc_feature 79..1101: note = CDS
  misc_feature 1102..1360: note = RE
  misc_feature 1080..1347: note = bridgeRNA
cgatggggtggacgcccctccgacggcatcgatgtgccaaactggtggtgtgatcaccatgttgaagaggagacgtccatggaaaagattagcatagtcggcgtagatttggccaaaaacatattccaggttcacggagcgacagccgatggcagaccggtattcagcaagaaggtacggcggtcaaagctgctgtctctactggctggcattccgacctgcaccgtggccatggaggcgtgtgccagttctcatcattgggggcgcgagatcggaaagcttgggcataccgttaagatgatccctccgatctacgtgaagccttacgtcaagcgacagaagaacgatgccaatgatgcggaagcgatcgctgaggcggcatctcgtcccacaatgcgttttgtcaccgtgaagagtgcggagaaacaggcatcaggcatggcgttgcgaacccgtgacctgctcgtaaggcagaagacccaaacgattaacgcgctgcgtgggcatctggcagaatacgggctggtagcaccttctggcacagttcatctcaatcggttacaggccgcgatcagtgatccggaaacagaactgccagccgcagtcattgaccatgctcaactgcttttggatcatatcgagatgcttgcatgcaagatcgacaaattgggtgctgagctacgtgctggtgcccggcaggatccagcggcaaagcgcttgatgacgatcccaggtatcgggccgatcacggccatggcccttaccgctctctctccagacccaagcactttccgcaaagggcgggacttcgccgcctggaccgggctcacgcccaagcaattctcatcgggcggcaaagaacgtatcgggcccacgtcgaaaatgggccagcgcgacctgcgccgccttcttatcatcggtgcggcgtctgtcgtgcgatgggccattcgacggggtgcggatcagggtggttggctcgggcagatgctggcacgtaaaccaaggatgctcgtgaccgtcgcactggccaacaagatggcgcgcactgcatgggctctgatgacgaagaatgagaactacaagaacccggctttggcctaacccagtagggtggcttttgccggtcatgtgagaaggtcggaggtgaagtaaggacaaacggtcaatgagacgggatcaggaaaaccaggcactaggccgtgcgccttagagcgcgcgtatccgagttggacctgatccgcgcatctccatacgggcccgtggcgtgtcaaagccacattcagaggccgaacacacgacagcacctgaccacatgttcatacctgccaaaacttcttgcattcaccggggcgtccacaca

SEQ ID NO: 9532 - DNA, 1565 bp, unidentified
  source 1..1565: mol_type = unassigned DNA; note = element_eec513a
  misc_feature 1: note = core
  misc_feature 2..98: note = LE
  misc_feature 99..1217: note = CDS
  misc_feature 1218..1565: note = RE
  misc_feature 1309..1515: note = bridgeRNA
agtcattatggtgtgaccggctcgatgcgctagccgtgggttaggctgggtttgattgaggaaccacagtccagagccacaagcggagggaaccggtcatgagagagaagttacgatgtttgggtttggatgtccacgccgaaacgatagccgtcgccgtagccgagccggatggcgaggtacgcagcctgggtacgatagccaaccgcgaagagtcgatccgcaagttgatcaggaagcttggcccggccgaccagctgcgggcctgttacgaagcgggccccacggggtttgtactctactggcaactgacgcagctaggagtagagtgcgcagtcatagcaccgacgctggttccgaagaaggctggtgaccgcgtgaaaacggaccggcgggacgcgttgaagcttgcacgcagtcatcgctccgacgatctgacagcggtctgggttccggacggggactcggaatcattgcgcgatcttgtccgggcacgagaggcagccaagcaggatcagttgcgagcgcggcaccggctaaccaagtttctgctccgcacaggccagcgtcctccactgggactgaaggcgtggacggaaaaatacgtcgagtggatccagcaggtccactacacgcatcctgcgcgggaagccactctgctggattgtctgaacgaagtgcagcacatggaacaacgagtcaagcgtctggagcagtcgattctcgaagtggtgaagctggctccggcgccagtgcaggcagtgatccagggcctgcaggcattacgcggcgtggctcatatttcggcggtcacgattgcagccgagttgggcaacatctcctcccgcttcgagaacgcacggaagctgatgggctacagcagagtatttccgagcgaagactccagcggccagcgcatccgacgaggaagcataaccaaatcaggcaacgctcacctcagacgaatcgtggtcgaatcagcgtggagctatcgccaccggccatccatcggagcacgattgcgcaagcgccaggaaggagttcctgcgcagatcacggagatcgcctggaaagctcagaatcgcctgcacaagcgatacatgaagttgatggccgcgggcaaggaccagagaaaggtcatgactgcggttggacgcgagctgatgggcttcatctgggcaataggggtcaaggctgaagcggcttgcatgcaatagaaagcggcatgacgagaaccgaaaagacaaaaacaaaagctttccaaataagaaaaaagcaaagacaaagacaccgatgaacaatgctatccaattcgaggacagagtcagcagcagccggagcaagcacgaaggagaatcctcggcgtcagtttgcgacaggctcagccggactcgcgtcagtagtcagaggcagctcccgacggatcatgattatgcggttccgacccgcgaatatcagcttgatcaatcgtcgcctatacctgccacggctgctgctgaccctgtcctcggaaagacaaaaaacaacccagcgattcgcagatgttgacagggtcacaccatatc

SEQ ID NO: 9533 - DNA, 1209 bp, unidentified
  source 1..1209: mol_type = unassigned DNA; note = element_eed1f28
  misc_feature 1..2: note = core
  misc_feature 3..267: note = LE
  misc_feature 268..1194: note = CDS
  misc_feature 1195..1209: note = RE
  misc_feature 12..190: note = bridgeRNA
cttgtatctttcctccggtggtgattagctatcaccaccgcacgccgatgaccgcgagttggtgcccaaagcgaggactttgtgggacagatagcggctcggcagcgcactgctgggccggcgagacactggacggtatcgtagggcgaggaccctgtatgtacaaggcaagtgggcgcagtggctgacagcagtttgttatctgcaggaggccaagtccatgttttcataggtattgatgtatcaaaggccaagctggattgcacgttgctgacggctgaggctgacaagtgtaagaccaaggtggtggtcaacaccgccgcgggcgtacaagccctgctggcgtggtgcgccaaacacggcgcacagccggcgcagttgcacgccatcctggagcctacgggtctgtatcacgagcaagcggccacggcgctgccccaggtccgggtctctttggtcaatcccgcccaggcccgggactttgccaaggccttggcgctgcgctccaaaaatgatgcgctcgacagctacgtgctggctcgctatggacagacgctgagcccggcgctgtggcacccggcgcccttgcatgcgcgtcaactgcgcgccttgttgacgcgacgcgaggcgctgagcaaggatctgttgcgtgagctcaatcgcaaagagaagagccagttcagcccctcggcgcccttggtcgatggttccatcgacaaggccatcgcgttcttgcgcgaacagatcaaacaaatcgagcgggcgatcgatcagcacatcgacaaccaccccgacctcaagcaagactgcgagctgctgaactccatccccgccatcgggcctcaggccggcaacgccatcctggccgtcatgcacaatcggcatatcgactccgcccagagcctggccgcctatctcggggtggtccctgtgcagcgccaatccggcagcagtctgaacagctgcgcacacctgtccaaagccggcccctcccaggtgcgcgccacgttatacatggcggccctggttgggacccgccacaaccccacatccgcgccctttaccagcgcctgctcaaagcaggaaaaagcaaaaggccgcgctgggcgcggccatgagaaaactggtgcatctgtgcttcgggtcctcaaaaaccgcatcccctaccagcccaattacgccatgaacggttgactgccaagacggtat

SEQ ID NO: 9534 - DNA, 1598 bp, unidentified
  source 1..1598: mol_type = unassigned DNA; note = element_eed87e9
  misc_feature 1..2: note = core
  misc_feature 3..279: note = LE
  misc_feature 280..1479: note = CDS
  misc_feature 1480..1598: note = RE
  misc_feature 12..299: note = bridgeRNA
ctactacaatatatttatgggtaatccccttacttccagtaaggatttatccatctcattacttaaactgttagaatgtaggatgcaatggtatatcgacttcatcacttggacctcgcgtccgtactttagactgataaccggctcctcattcacagtgttcgttttatgcaggttgaatcacattaggtgcattcgtgtcacacacagtagtttgaacaggtaatgagtaaaactggtatttatccattgtaatattttttaaggagtgataaatttatgaacgcagtaggtatcgatgtttcaaaaggtaaaagtatggttacaattctgagaccatttggggagattgtatcctctccttttgagattaagcacacatccagtgatatccattcacttattaaacttattcattctatcgaaggtgaatcccgggttgtaatggaacataccggccgctactacgaagcacttgctcaccagctttcagcagcagatctctttgtcagtgctgttaatcccaagttggtcaaagattttaataacgattctcttcgcaaaatcaagtccgacaaagctgattctgtcaagattgcccgctacgctcttgacaaatggcaaagtcttgaaccgtatagtattacagatgaattacgcgctcagctaaaggtcatgaatcgtcagttccatttctatgtgaaacaaaaaacggctatgaaaaataatcttattggcctcattgaccagacctatccaaatgcaaatacttatttcaatagtcccacccgcagtgatggttcccagaaatgggttgattttgtctctacatactggcatgtagattgcattcgtaaaatgtctctaaacgcttttgttgaacattatcagaactggtgcaagcgcaaaaaatatgccttcaataaatcaaaagcggaagaaatttacaccaaaacaaaggaacttgttccagtatttcctaagaatgaaataaccaaacatatcatcagacaagctatcgatcagctcaacagtacttccgttactgtcgaaacaatacgcactctcatgaacgagactgcctcaaagcttcctgaatactcaattgtcatgcagtttaaagggattggtccacagcttatggctgagatcggtgatgtaaccagattcacgcataaaggagcccttactgcattcgccggagttgatcctggggtaaacgaatctggttcctatgcacaaaaaagcgtcccaacatccaaacgtggatcttcacatttaagaaagactctttttcaagtaatggatgttcttatcaaaaccatgcctcaggatgatcctgtatatcaattcatggacagaaaacgcacccagggtaagccttactatgtttatatgactgcaggtgctaataaatttctcagaatatactatggacgagtgaaagaatatctttctgttcttcctgatccaagctaattcaaaacttttactttcagaccagcactggttgtggtggccttattttaatgcctaatttttaacctgtaaagttttttaactttcttcaattttagtattgactttttatttgcagg

SEQ ID NO: 9535 - DNA, 1640 bp, unidentified
  source 1..1640: mol_type = unassigned DNA; note = element_eedbb47
  misc_feature 1..2: note = core
  misc_feature 3..263: note = LE
  misc_feature 264..1442: note = CDS
  misc_feature 1443..1640: note = RE
  misc_feature 11..238: note = bridgeRNA
ctcgtataataaagtcatagtttaaaaactatattttcttttctatctcactattcttgtgagataataattgtacagatagaggtcgtagttaacctccttgaagcctagtctttctttttaagggttacgcctcttctttacatccatatgcgaatgagctggatagtacaaaagttactgaatatctaacgaggttgtattgttgtaaagtagagaggtcctagactttatctgtaaatatattaaaagctgttgattttatgttttatgttggtattgatattgctaaacaaaactacgaagcttctattattgattctaatggtaagcttcttgataaaagtatatccttttcaaattctcaagtaggttgcaataaattaattgccttgcttgaaagatttgaagctaatacttccaatactgttattggtatggaagctactggtcattattgggttagcctttattcttatctattggatcttgggttttctgtaaatgttattaaccccattcaatcagatgcatttcgaaaaatgtatattaggcaaactaaaaacgactctaaagattcctttatcattgctcaaattatgcgtttcggtgaattttccactacttctttagctgatgaggacattatggccttacgtcaattatccaggtaccgtctcgctttagtagatgaatgctctgattggaaacgcaagtgtattgctcttttggatcaagttttccctgaatactctaagcttttttctgatacctttggagtaacttctagacagctactctctaaatatcctactccagaggatatgttatccatcgatacagagactctttccaagcttctatccgaagctagtagaggacgttttggtatttcaaaagcttctgaaatacaagagtctgctactaatacttttagtgttaactttgcaaaagatgcatttgcatttcaaattaaacaaattattgcccaaattaattttatcgaagaacagctaaaagaacttgaaactgaaatttctacactccttcaccaaaccaattcagttattactactattacaggtattggtgatgttcttggtgctattattatcggagaaattggtgatatttcccgttttgaatctgcgccccaacttgttgcctatgcaggtcttgatgtagccgtaaaacaatctggtgattttgtggggacacagactaaaatttctaaacgtggttctccatatcttcgtagagcaatttggttagctgctactgttgcagccttcaaagacccagctctgtcagtctattatcaatcacttagggcaagagggaaacatcatttaactgccattgaggctgtcgctagaaaaatgtgtaatattatttttgctgttctacgtgataacaaaccttatgtgcctaatattaagtaggattgacaaaaactaacctgtttttctaacctaaatttttccttatatatttaggtctatttgttttgcctaattttacataagtatttatggcaggttctgtcaagggatgcttttcaccttgacgggttctgacagaaattctataatcacaaaggcaaaataaattaaattatcttttaacttttaataactggt

SEQ ID NO: 9536 - DNA, 1428 bp, unidentified
  source 1..1428: mol_type = unassigned DNA; note = element_eedffe3
  misc_feature 1: note = core
  misc_feature 2..77: note = LE
  misc_feature 78..1109: note = CDS
  misc_feature 1110..1428: note = RE
  misc_feature 1204..1422: note = bridgeRNA
taatgggatggtccgccgcttgattactcagcaagcatgagcaatcttgatggaaactcgacagggggatcatcgccatgcagattcgttccattggtatcgacctgggcaagacaacctttcatctggttgcgttggatcagcaaggaaaggtggttctgaagaagaagttctcccgaaaagaactgctgctctacacctccaatcttgcagcatcattgatcggcatggaagcctgctgcggagcgcacttccttggcacggcgctgcgaaagcaagggcatgatgtgcgcttgattcccgcacagtttgtgaaaccgttcgttaagtcgaacaagaacgattatctggatgccgaagcgattgccgaagccgtgcaacgcgacaacatgcgttttgtgcccatcaaaacggacgatcaactcgatctccaagcgctacatcgggtgcgggatcgtcttgtttcccggcgaactgccgttatcaaccaactacgggcctttctgctagagcgcggcattaccttccgccaaggacgagctcatctgcggcaacaaatccctgcaatcctcgaagacgatatgctgaacctcactccactcatgcgccgcttgctcgatcatctctgggaggagtggaagtctctggaattgcagatcgaggcggagagtggcaagatcgaacgcattgcgcatgccgacgcggcatgccagcgactaagggagatccccggcattggcccactggtcgccaccgccatagtggccgccatcggcaacggatcggccttccgcaagggacgtgagttcgccgcatggcttgggctggttccgcgacagcattccaccggcggcaagtcgcgactcttgggtatcagtaaacgcggaaacccctatctgcgtcgcgtcttcattcacggggcacgttctgtcgtatcaagcacgaagcgcgaaaagcatgccatcggagactggatgaacaggcttgaatcgagagctccccacaatgtactggtggtcgcccttgccaataaactggcccggatcgcctgggcggtattagcccaaggcgagaattaccgcgccacctcagagacactcgtggcttaaagaacgtgccgtggaaaagacgcctgacggcttggaaagcgctacgcgcttcccacttcttccaccgcacctacgacgacttttacactttccaccaggtctgctcagagaaaattagcgatgaaataacagtcacaacggcgtgccagaaaacctgaaccagacgatggttctcaaaaaccgtcctttttatgaggactggcgcgcgcggattctcatcatggccaggagacactctccatcaaaggccggatacatttgtgcaggctgcttctttcatcttgaacttttctcttgcagggaaacgccggaccataca

SEQ ID NO: 9537 - DNA, 1568 bp, unidentified
  source 1..1568: mol_type = unassigned DNA; note = element_eef58fc
  misc_feature 1..2: note = core
  misc_feature 3..268: note = LE
  misc_feature 269..1477: note = CDS
  misc_feature 1478..1568: note = RE
  misc_feature 15..241: note = bridgeRNA
ctcgtataatattagtagttcattaattatcaatgaacttatatattcaaaccactttgtggtttagaattacagtaagcagatagaggtcatccatcacccccctgaagcctcgtcttcctttgaaagactgatgcctcttctcttgcgactagtatatgaatgagctagatagaacttgtttctgaatatctaacgaggctatatcgtccaagagtagagaggataaccattatctgacaaaaccttagtgaaaggatttgattttatgttttttattggaattgatattggaaaacgaaaccatgaaattgctttaattaacaatgatggtattcccatagggaatacacttcgaatttctaataccaaactagggagtgaacatctccttgcatttatcaataaacatcagttactacccgaaaataccagaattggaatggaggcaactgggcattattggctatcgatttattcttttctaaataaactaggttttcatgtaacagcttttaatcctattcaatcagatgttttacgagatttttacattaggaaaacaaaaacggattcaattgatgctgttttaattgctcaagttattcggatggatctcccagataaaacggttttacctacggaagatgtgtttcgattgaagcaattagaacgttttcgttatagtctcgtggacaatacttctgatttaaaacggaaaatagtaacctgcttagaccaagttttcccagaatatgacaaaatattctccgatgtttttggctgttcatctacgcaaattcttttacagtcaccgcttccagaagacttacttcgactagacactcacttgcttattgaaacgattaatcttgctagtgaaaagcgtttaggtttgtcacgttcagaaaagaaaattcaaaaactgaaagaacttgctactaattcctttggaatttctattgcttccgatgtctttaaactagaaatacagaccatgctagaacaaatccaattacttgaaaatcacatattaagagtggaagaagaaattcaagaattagtttcaaatcaacaaaactatttaactactattactggcataggtgaaataactgctgctgttatcatgggtgagattggagatatccagcggtttgaacgggccaatcagcttcttgcatttgctggtttggatgcttctgtacatcaatctggagacttcacaggaacaagaaataaactatcaaaacgtggttctccctacttaagaagagctatttggcaagccgcttttgttgcctccttcaaagaccctgccctatcggcgtactatcaaaaattacgaaaccgcggaaaatcccatggtaccgccgtaggcgctgttgccagaaagcttgtaaatatcatttttgcggtttggactcaaaataaaccatacgaagtacgcttacctaataattcttctgaaaattaatcaaaattttaactgattcagaagtttttttgctatgcaataaaataattaatattaactatttattttcatttgacttttttatagctag

SEQ ID NO: 9538 - DNA, 1381 bp, unidentified
  source 1..1381: mol_type = unassigned DNA; note = element_eef7ed0
  misc_feature 1: note = core
  misc_feature 2..81: note = LE
  misc_feature 82..1128: note = CDS
  misc_feature 1129..1381: note = RE
  misc_feature 1159..1378: note = bridgeRNA
caatgaaagggactcctcccctcctaatgcctcatcgggcagaatggagttgttaaccagccattgagaagaggaggagtcatggctaagcatacggcgataggtatcgatttggcaaagcgtgtttttcaggtctgtgcggtgaatatcaagaccggcaagagcggcttcaacaaagcgctcaggcgttcggagctgttggactttatgcgccgccagagcccttgtcgggtgttcatggaggcttgtggcggcgcccactactgggcacgacaattatcggccttgggtcacgaggtctctttgattgccccgcagtttgtcaccccctttcgaaaggggcacaagaccgatgccaatgatgcattggcgattgttgaggcggggctacgccccgacatgcgctttgtgccggtaaaggggctggagcagcaggatatccagagcctgcaccgcatccgtgagcgcctcatcaagcagcgcacgcagcttatcaaccagagccacgggctgttgcacgaatacggtattgccagcgggcgcggacagaaagcactacgggagacgatggcgttggcgctggaagatgccgagaatgagctggggcccatgctgcgggagctgttggccgagcaggtggaggagctgactcgcctcaacgagcgcctgagcgcgctggacaaacgtgtggcgcagctggctcgaagcgtcgaggcgtgtcggcagttgcaggcgctcgagggagtggggccggtggtcgccacccagctttacagtgcattgggggatggcaaggcctttgacaaaggccgccaggcctctgcctacttggggctgacgcccagacagtacagcagcggcggcaaggtcaagctcagcggcattggcagcactggccacatccagctcaaggcggcgctcattcgcggagcccatgcggttatcaaaatgctgggcaacaaggaagaccccaagagccgctggttgcgggcgctggttgctcgctctggagcgaacaaggcggcggtggccctggccaacaagacggtgcgcaccgcctgggcggtgctgcacagcggccaggcgtactgccgagagtatcaacaggcactgtcaccaacagcctgagcagtagctcaggccgggcgatagggcaaaccgtgttgccgagcaacagtggatgaaaaaccggtcagaccgacccactcaaaacctgttcattgcgatggccgccatatggccttgtcctcgctgaggagagtgggtgcgcgacgttcattagggtcaggggatagcgaccccgctaaaagaccgactatacgcacgcatcggccttcgtttttccaacactggggcttgcaaacggggaggagtccctata

SEQ ID NO: 9539 - DNA, 1594 bp, unidentified
  source 1..1594: mol_type = unassigned DNA; note = element_ef03ac5
  misc_feature 1..2: note = core
  misc_feature 3..261: note = LE
  misc_feature 262..1470: note = CDS
  misc_feature 1471..1594: note = RE
  misc_feature 12..281: note = bridgeRNA
ctattacaataagttttggttggaagcccagcatccagttgggctttttcccatctcgtgcctcagctacaataaggggagcaactggctgaccaattcctccttgggcttgtatgcccgcccgaaagactgtccgccatccccttgttgcagcgttcgatttaagcaggttgagccatagagttcgtgtcacccaatagattgaatcggcagcgagaaaaagatggattccggttgcaaatttgtatgggaggtagatgcatgaactctgttggcatcgacgtttccaaaggcagaagcacggttgcagccatgcgtccctttggagaagtcgccatctcaccctttgaagtaagtcacaccgacagtgaactgagcgaactggcaaggcagctcaaaagtctggacggtgagacgcgcgtggtcatggaggccacagggaattaccatttgccggtggcacaggcactccgtgatgcaggactatatgtttccgtcgtcaatgcaaagctggtgcatggctacgggaacaacgaattaaggcgtgtcaagaccgacaggaaggatgccgtaaagctggcgaactacggccttgaccgttggctctccttgccgagatatatccctgaggagaatacccggttgctgctgaagaactgctatcggcagtaccagcagggatgcaaggtgcagaccatgcagaaaaacaacctggtttcgctgctggataccacatttccgaatgcgaaccgcttgtttcacggccctgtccgtgcagacggaagcgaaaagtgggtggacttcgtggccgagttctggcactgtgagtgcatccgcgaacgctctgaaaaggtgttcacgaccaagtatcagcgttggtgtaaaaagaatggctataatttcagcgaggaaaaagcccgcaacatttacaacgaagcctgtgggtgcgttggcgttatgccgaagtccagcacggcaaggctgcttgtagaacaagccgtatctcagctcaaagcgacatcctctgcactcgctgcgctcaagcaggagatgcagacgctggcggctcaactgccggagtacccagtcgttatgggaatgttcggcgttggtccaacactcggcccgcagcttatggccgaaattggcgatgtgcggcgtttctactccaagaaagccctcgtagcctacgccggtattgacgccccgccgaatgattccggcgacgtaacaggccggcacaaagccatgagcaaggttggcgcatcctccctgcggcggacgctttttcttgtcatgagcgtctatttacagaactcgccacttgatgaaccggtctaccagttcatggacaggaaacgctccgaaggcaagccgtaccgtgtttacatgatggcctccgctaataagttcctgcggatctactacgccacggtgaaagcctatttgaacacgctggaacaagtctgacctcgtcacataccgttggctggccgccgttttcaattttgagatgcgaagcggcttgatttagtgcggcctttttcacctactcaaaacttttgaattttactcttgacaaaacttagcaggt

SEQ ID NO: 9540 - DNA, 1227 bp, unidentified
  source 1..1227: mol_type = unassigned DNA; note = element_ef05db9
  misc_feature 1..2: note = core
  misc_feature 3..237: note = LE
  misc_feature 238..1215: note = CDS
  misc_feature 1216..1227: note = RE
  misc_feature 6..209: note = bridgeRNA
cttgtatgtcgacgccccgccagattggtgggtagtctccggctgatccccggaaggaaggccaggaagacgaattcgcccttaagcctcgagcttgcaatgtagatggtctcctgccttcccaccccactcacgaatccgaacggtatctagagcccaccgcaggtgagagctcgcataagcaaggttggatggagtggtgttctgggacagcggctacatcgggggtaatcgaatatgaccatcgtcgttggcgtggatatcgccaagaaaacgttcgacatcgcggtactgcaaagcaatggcaagtaccgcaccaaagggaatctgagcaacgattcctcgggctttagggcctttgagcaatggttgcagcagtatgccgagccaggggcctggatcgtggtggaggcgaccaacatctaccacgaagcgttgggcgacttcctgctggccagggggtaccgggtttgcgtgatgaacccggcgcgcattgccagctacgcgcagagccagatgcagcgcgtgaagaccgacaaggtcgacgccaagctaattgcactgtacggcgcccggcatgtcggcgacctccagccctggcagccggagccgctgagtgtgcgccaactgcaagccctggtgcgccgctacgaggagctcaaagagctgttccagatggaggttaatcggctggaaacggcgaagaccgacccggtcaaggaatcgatcctgtcggtagcggcacatctggaacggcagatcgaacagactgcgaaggccatccgagatcacatcgacgatgacccggatttgcgcggcaagcgtgatctgctcaaaagcatcgacggcatcagtgaccagactgccgcgctactgttggccgagctcggaacgatcagccgcttcgacagtgctcgtgccgtcgtggcctttgccgggctcaacccaaggttgcgcgagtccggccagcacaagggccagacgagcatttccaagatgggttcacggctcctgcgagccggcctgttcatgcccgccatcagcgccatgcgccacaacgcgccgattcgagcactgcggatacggctgaaaaagaacggcaaagtcggtaagcaaatcatctgcgcggcgatgcgcaagctgctgcagatcgcctacggcgtcctcaagtcgggccagcccttcaatccggaactggcccttgctcgggggtagatgacacggtat

SEQ ID NO: 9541 - DNA, 1352 bp, unidentified
  source 1..1352: mol_type = unassigned DNA; note = element_ef05f18
  misc_feature 1: note = core
  misc_feature 2..70: note = LE
  misc_feature 71..1117: note = CDS
  misc_feature 1118..1352: note = RE
  misc_feature 1117..1349: note = bridgeRNA
taatgagatggtccccctccaccctacggtctaggcttacagggtgtgttcattttgaacggaggccatcatggaagacgtaacgctcatcggcatcgaccttggcaagcacagctttcatgtgcatggccaggatcggcacggcaaagcactgctgcgcaagaagttcagccgcaagcagctgatcgaattctttgttaagttccacgcctgcacagtcgtaatggaagcttgcgccggtgctcaccacatggcacggcaactggccggcttcggccacgaggtcaagctgatctcaccgcaattcgtgcgcccgttcgtcaaaagcaacaagaacgatttcgtcgacgccgaggcgatctgcgaggcggccggccgtccatcaatgcggtttgtgacacccaagaacgaagcccagcaaacgctgtcggccctgcaccgtgtgcgtgaatcactggtgcgcgaccggatcaagacgggcaaccagatccacgctttcctgctcgaattcggcatcagccttccgatcggacatgctgcagtccgacgtctgccaaccatcctggccgagcagtccttgccgcctcgactggtgcaggtgctggagcggctgcacgcccactacaagtacctggacgggcagatcgccgaaatcgaaaaggatctggcggcccaactgaccgacgatgacctgggacagcgtctgatgacgatacccggcatcggaccgattacggcaagcgtactggcaagcgaaatgggcgatggcaagcagtaccgctgcggccgcgatttcgccgcatccctgggcctggtcccacgccagtacagcacaggcggcaggaacaacctgctcggcatcagcaagcgcggcgacaagaatctgaggcgcctgctcgtgctgggcgcacgctcctacatgcggctactggagcgacagacaggacagctcgcatcctgggtacgcgcgatgctgatgcgcaggcactcaaacgtcgtcgcatgcgtgctggccaacaagctcgcgaggatcgtctgggccatcgcggcgcaccacaccagtttcgaaatgaaggaagcccatgtgcgcatgagggcttccttggactcactgtagtaccacccaccggttttgcgactgctgactttggatgacgtgaacggcacactggcctgtcgggcaccctgataacaaaactggctgaacaagccgccggggtttttagggccaacaggcgcgactctcatcgtggcgcggagcaagtctccaacagacgccggatagattcgagcaagcctactcacatcatagtcagggaaaagcagcttgcaaaaaggagggggaccataga

SEQ ID NO: 9542 - DNA, 1435 bp, unidentified
  source 1..1435: mol_type = unassigned DNA; note = element_ef087ef
  misc_feature 1..2: note = core
  misc_feature 3..121: note = LE
  misc_feature 122..1156: note = CDS
  misc_feature 1157..1435: note = RE
  misc_feature 1188..1388: note = bridgeRNA
agatggggtaatcggcctagcgttcttgtggatagctgaagattttgggtgctgcgcttcaggctgatggtgaaacgaggtccgtggtcacggcctcaaacatcagaaggagaagcgcagcatggagcattttgccggactggacgtgtcagtcaatgagacgagcatctgcattgtggacgatgcgggcaggatcgttcgcgaaacaaaggtggcgagcgaaccggacgctctgctggcggtactgaaaaacactgcctaccacttcaagcgcattggactggaagccggaccgctgtcgcagtggctctacagcgctcttgctgaagtgaacttaccggttatttgtgtcgagacccggcacatgcgggcagtattgaaggcgcagatcaacaagaccgaccgcaacgatgcccgcggcatcgcgcagatgatgcgagcggggctttatcgcccggtgcatgtgaagacgctgcgcagtcagaagctgcggatgttgctgacccatcgcaagctgctgcagtcgaaggcgatcgccatcgagaatgacctgcgtggaaccctgcgcaactttggcctcaaggtgggcgtggtcggagcagccaagttcgaggcgcgcatcagggagctggtcgagaaacttcccgatctggcggttctggttgaaccacttcttattgtccggcgaacacttcgtgagcaactcggtattttgcatcgtcacttgctggaccttgcccgcgacgatgaggtgtgccggcggctgatgacggttcccgggatcggtccggtggtggcgctgacctaccgcgccagcatcgatgtgcctgcccgctttcgcaactccagggcggtcggggcggtgttgggcctgacaccctgcaaatatcaatcgggcgagcgcgatcacactggcgcgatatcaaaatgcggcgacgagatgatgcgggtcatgctctacgaagcggcccagatcctgctgatgcgctcaacaaaatggtcctggctcaaagcttgggcgatgcagatcgccaggcgtcgcggcgtgaaaaaggcgatcgtggcactggcgcgtcgattggccgtggtcatgcatcgaatctgggtcgacggcaccgagtttcgctggagccggcaagcggccaccgcagcatgacaacgcaagatcacactcgataggagatactggggctccaccgcgtggtggaatgatgtccctcgcgggacgatggatgaggcgagatcgcatgtccgcttggacctgccatcactctgatgacaaggccgactgaaagattgttccgcctcgttctcgaaccccatgatggaagggccctggtgccgattccgaagagaagcaagagcccgtgagcgacatcgacattacactggtggacagtccgaaagcgcttgacccaaaccggccgattagaga

SEQ ID NO: 9543 - DNA, 1210 bp, unidentified
  source 1..1210: mol_type = unassigned DNA; note = element_ef0c2f5
  misc_feature 1..4: note = core
  misc_feature 5..243: note = LE
  misc_feature 244..1197: note = CDS
  misc_feature 1198..1210: note = RE
  misc_feature 85..254: note = bridgeRNA
agtcctagtatcttggatacgagcactgtttaaccaggcttacagaaatgatgtggctggttatattgataagagctcatccctgatggccatcagggatgagctgcgactttgtagatcgtcgagtccttggtgctgatagacaccgtgggtcagctggatcgcagagccgcatcgttttcaacccgaacagtcgctagagccactcaggtgagctcgtattttactaggatgggacactcgatgaaagactcctcttccatttctctcactggcattgacgtttcgaaagatacgcttgatgtctattttacgaaaaatggtcggcaacagaaaatcgattatcggaacgaatcactcaagctgcttgcccgacagatcatcaaactcaaggcaaccgtcgtcatggaagccaccggcggctatgagaagaagctggtcaggtatctgcaggaccagggaattgcctgtgccgtggtgaatccgaagcaggttcgtgactttgccagggcctgtggaaagctggaaaaaaacgatgccattgacgccagaatcattgccgcgtttggacagacaatgcagccgcggacgacagaacggatcgataaaaacagagagaagcttaaagtactgacaacccgccgcgagcaggttcagagtatgatcaaccaggaatcgaatcgacgacaacaagtcgaagatcggcaaatgcgggctttcattcaacgggcgattcagttctatgaaagccagttgaaagagctggattctgaaatgctgcagatcattgaagccgaccagactatgaaacagaaatccaaaattctgctttcagcgaaaggcgtcggcccgacggtaaccgccaacctgattgccggtctgcctgaactcggacagctgaaccggcaacagatcgccaagctcgttggcctggccccgctcgttcgcgacagcggcaagttcaaagagcaaaggatgacgtgtgccggaaggggccacatacggcgtgtactttacatggcggcgttagtcgcaacccgctggaacagtcggatcagggcattttatctgtcactgctggaaagaggaaaaccgaagaagctggccctcaccgcctgcatgcgaaagttgctcacgatcctgaattccatggtgaaaaataatcagacatgggagcaaaatctttactctgcttgacatactccaagac

SEQ ID NO: 9544 - DNA, 1386 bp, unidentified
  source 1..1386: mol_type = unassigned DNA; note = element_ef1d9b1
  misc_feature 1: note = core
  misc_feature 2..70: note = LE
  misc_feature 71..1102: note = CDS
  misc_feature 1103..1386: note = RE
  misc_feature 1144..1381: note = bridgeRNA
caatggtatggaccccgccgcccaagaccggcgaaccttcggatatctaatcgggagaaggagacataccatgaagatcgtacgaattggcttggatctggctaagaacgtgtttgaagtccatggcgtcgatgcagaggacagtgcggttctccaaaagacactgaggcgggatgtggttcctcagtttttctcggagttgccgccttgcctggttggcatggaagcctgcagtggggcgcattactgggcgcgggttctgacggatctcggccacgacgtgcgcctgatctcgccgcagttcgtaaccccatacgtaaaatcgaacaagaacgaccggaacgacgccgaggcgatttgcgaagccgtcggccggccatcgatgcgctttgtgccgcagaaaacttccgagcaactggagatccaggccgttcaccgtatccgccagcggctggtctcggaccggacgaggttggtgaaccagatccgcggccttctggccgaacatggcgttgtgataggccgggacatctctcgcctgcggcgtggtcttcaacagatcgtggacggggccgcagatggccttggtgagctgatccgggacctggtgcgcgatgtgcatcaggagttggaggaactcgatcagcgtattgccacatataatcgacggatccggcatctctttcgaaccaatgaagattgccagcgtatcggcaagattgagggcatcgggccgattaccgcgacggcgctggtggcggcggtcggtgaccgaagctgcttcaagaacggacgccagtttgccgcctggcttggactggttcccaggcaaagatcgagtggcgggaagtcccgtatgttcgggatcagcaaacgcggcgaccgatatctgcgcaccatgatgatccatggtgcgagggccgttctcggcaaagccggaggcaaggaggatcccagaagccaatggatcggcaggatgcgggagcggcggcatccgaatatcgtcgctgtcgcacttgccaacaagaatgccaggatcgtgtggtcgatcttgtcacgaggcgagtcctatcgctcggtcgaaactgtgtcgcagaactgacgccagcagctaaataaccagaacgaggaggactttccccagaatattgcagcaccttggcaggagatggtgaagggtacgacccactgcttcttgaacctgatgtgtggaccggcaaggccgatgcctatgccttggagccgatgagggagaagcgcgcggaaatccatcggggctcgcggcgacgatgtatcgggccgctcagagaagccggatatacgtcagcaatcgtgatcaccaaacctgacccaaccagaccgttgcaatcaggcggggtccatata

SEQ ID NO: 9545 - DNA, 1400 bp, unidentified
  source 1..1400: mol_type = unassigned DNA; note = element_ef2052b
  misc_feature 1..2: note = core
  misc_feature 3..173: note = LE
  misc_feature 174..1274: note = CDS
  misc_feature 1275..1400: note = RE
agatggggtaacgggcctcgcccgagccgccaagccaactgcgggctcgctacggcgcggtaatggggcgctttgcgtgcggctgacttggcggtcgggcggtcgtccctcaaactgatggtgtcaaaccggagtcgggatggccccgctccaagcatcatcgagggacgaccatggaccattatgcaggaatcgacgtgtcattggaatgctcgagcgtgtgcgttgtcgacaccaacggcaagatcgttagcgaggacaagatcgcaagtgagccggaggcgctgatcgcctggttcgcttcgttgggacacgagctggcccggatcgggctggaggctggtccgttgtcgcaatggctctacgccacaatgaagcaagccggacttgcggttgagcttctggagacgcggcgcgtgcgggatgcattcagtgcgatgccggcgaagtctgaccgcaacgatgcgcgcgggattgcccagctgatacggcttggctggttccggccggtgcactgcaagtcgatcggcgcgcaagaggtgcgggccatgctgacggcgcgcaagctcgtgcaatcgaagcttcaggacgtcgagaatagcctgcgcgggatcttgcgcggttttggcttgaaagtcggcaaaacgacgccgcgcagctttgccgggcgaatccgggagctcgtggctggccatgcgaacctgcactcgattgcgcaggcgctgctttcggtgcgcgcggtcttgctgcgcgagctcggtgcttttgagaagcgcgtgcggtacatggcccgcgcggatgcaaagtccaagctgttaatgtcgacgccggcggtggggccgatcgtggcactcacctatgcatccgcgatcgacgatccggcgcggtttaaatcgtcgaaacaggctggtgcgcatttcgggctcaccccgaagcggtatcagtccggcacgatcgaccgcacaggccgcatcagcaagatcggggacgcctcggtgcgcaccgcgctctaccaggccgcccacgtcatgctgaccaagccgatcaaggactgctcggagctcaagagctgggcgatgcgcatcgccagacgagggggccacaacaaggcaaaagtggcgctcgcgcgcaaactcgcggtggtcatgcatcgcatgctcgccgatgcaacaaccttcaaccccaccgctaagttcccgaagcgaagtcccttcgccgggacgatggatcaggtcaggccgccatccgggatgtggcatcgaccacgccattagtagattggccgaccatcctctgcgaaccccatcaggtggcggccgcgcgcgccgaccccgtacagaagcaagtccccggcgagtggatgacgaaaaagggattgactcgtcgaggcccgttacaga

SEQ ID NO: 9546 - DNA, 1156 bp, unidentified
  source 1..1156: mol_type = unassigned DNA; note = element_ef2501a
  misc_feature 1..2: note = core
  misc_feature 3..179: note = LE
  misc_feature 180..1136: note = CDS
  misc_feature 1137..1156: note = RE
  misc_feature 33..200: note = bridgeRNA
cttgtatctcgaaagtggattactatgaactggcttagatttggcaaggtgtgtgtagtccgattcctcccggggttattgaagcccgtagcatagcgattgacgcacaggctgagccgttcatctgaagcccgaacagttgtccgaacttcaaatcgtatttgcaaggaggggtatagatgagcgtgtcaaatcaacgttgtgcaggcatagatgtttcaaaaggtactctggatattgcaatcagcaatattgccagccagctcgctgtaccaaatggaactgacgggtttactcaaattatcggagaattaaagagaaatgagacaagattgatcctcatggaagcaacaggagggctggagtcaggtgtggcttgttatcttcaatcagaaggctttgacgttgtcgtcattaacccccgtcaggctcgagattttgcccgtgcaatgggctatctggcgaagactgatcgtatagatgccagagtattgcttcagatgtcggaagttattaaccagcacccggagcgggaaaaatacattagtcccttgcctgatgcccacaggcagattctggctgcgatggtggtcagacgcagacagcttacagccgaacgaaaccgattacatccctcgcatcctctgagccatgcaagcattagatcaattatttcggctctaaagggcgagttggcgcgtattgaaagtgaaatggcgattcacatcaaggagcatttctgtgaattatccgagcttctgaacgcagttaaaggcattggaactgcgacagtcgccgtgctactggcagaagttccggaacttggctcactgtcacgacgagaaattagcgcccttattggggttgctccagtaaacagggattccggtacgatgcgcggtcgccgaacagtattcggagggcgagcttcagtccgtacagcgctctatatgtcagccctggttgggacgaggcacaacccgataattaaagagttctatacacgcctggttgccgcaggaaaacccaaaaaagttgcactgacagcctgcatcagaaaattgttgaccatcctgaacgcaatgctgaaaaggaatgaagtatgggatccaatgtatcaccaacatgcttcgtaaacgggcgctaaagacagttg

SEQ ID NO: 9547 - DNA, 1443 bp, unidentified
  source 1..1443: mol_type = unassigned DNA; note = element_ef2e00d
  misc_feature 1: note = core
  misc_feature 2..301: note = LE
  misc_feature 302..1339: note = CDS
  misc_feature 1340..1443: note = RE
  misc_feature 78..282: note = bridgeRNA
ctctaagtttgcaatatgaattgcaaaaaaataaagagattgcatcgaataataagtttatctatttagaaaagtaaacttttattccgggattaatttcttacctttgttgtaaaaaggagaaaaattaacctgacaaggaataagacaagaacccaaaatgggcttcaaagccctatgaccgtatttgtccccttgtcaaagctgcatagaccagatagaatgcttagtcttcgagactatttagagttgttgagtcaagctgcttccggttaatctctccacttatacctacaaagatatgaaaaaaattattattggaattgatttttcgaaagaaactttcgatgcgacattatttgactgtcgcaactcagaactttcagaagcagtgcaatctgctgttcatgaaaagttcactaacaagaaagagggttttcaaacatttgtcacgtggataaagtcatctgtaaagaagataaaccttgatgaactactcttgtgtggagaaaagaccggtaaatactccttgcctttaagtaacttcctgtatgctaaaggctattcaatatggctcgatagcggacttcgtatcaagagatccttgggtatcagtagaggtaagagtgacaaggctgactcgttaaagatagccctctatgcttatcgttatcaagatatggcagtatgttacgttcctttatcaaagaatgtttctcgactcaaggagttgtttctgtaccgccagcatctggtatctcaaatgaaagcaatggctgttcgtaaaaatgtcacagatgacttcaataaagaattaggtgatgtaagattcattgttaacagttcaactaagataattcaacagataaaagccaccattaaaaaatgcgaggaaaagatgcaggaacttatcgaagaggatgaagaactcaagacaacccacgatagcattacctctgtcaaaggaatatctttgattaatgccgcagcctttatcgcttacacaaataactttaaggactttggaggtaatgcaaagaagatagccacgtattggggagtagccgcatttgcacaagagtccggaacaagtgtacataaggtggcaagagtgagtaagatagcaaacaaaatgctcaaatccttactcacacaggctgcaagaattgctgttagatgggaacctaagttcaggcaatattttgaacatcttatcagcagaggaaaacatcaaggggtagcactgaataatgtaaagaacaaactcatacacctcataacggcattagctgtatcacaggaaaagtataatccggcatacaaatgtatcaatagataaatgtaataaaaaatgaatggatagagaataatcggaattcttggaacgcaactgttaaaagtaacgttaaaaataaaattttatttggtgggaaacatagaatg

SEQ ID NO: 9548 - DNA, 1413 bp, unidentified
  source 1..1413: mol_type = unassigned DNA; note = element_ef31afd
  misc_feature 1: note = core
  misc_feature 2..75: note = LE
  misc_feature 76..1140: note = CDS
  misc_feature 1141..1413: note = RE
  misc_feature 1176..1404: note = bridgeRNA
taatgggatggtccggccgtgctcctggccggtcagcaagtaagctggcgagggcaccgaaccaaggagcacgccatgtttgagacagtgaagaccgcagtcaccgtgatcggcatcgatatcgggaagaactcgttccacgttgttggcctggatcagcgcggcgcgatcgtgctgcgacagaaatggtcacgtggtcagatagaatcacggttcgcgaacatgccgccttgcctgatcgggatggaggcctgcgtcggcgctcatcatctcagtcgccggctcaaggcactcggtcacgatgcccggttgatgccggcgaaatacgttcgcccctattcgaaggggcagaagaacgacttccgcgacgcggaggcgattgccgaggcggtgcagcgcccgacgatgaagttcgtcgcgacgaagaccgttgaacagctcgacttgcaggcgctgcaccgcgtgcgtgagcggttggtcggtcagcgcaccggcatcgtcaatcagattcgcgccttcctgttggaccgcggcattgcggtacggcaggggccacgcttcttgcgcaccgagttgccgcgcatcctagccgccccctccgacgtcgtgtcgccacgcatggtgcgtatcatcgaggacctcgccagcgactggcgtcggctcgatgaacgcattgagggtttgtcgggcgagatcgaagccattgcgcgccaggacgtcggttgcgggcgcctgatgagtgtgccggggatcgggccgatcatctccagcgcgacggtcgccgcgatcggcaccggggatacgttctctaaaggccgcgacttcgccgcctggctggggctcgtccccaggcaaatctcgacgggcgaccgcacaatccttggcaagatatcgaagcgcggcaatcgctacctgcgcgtcttgttcgttcaggcggcgtgggtggtgttgatcaggtcaaagagctgggagcggcacgggctcaaggcttggctcgagacagccagaaagcgactgcaccgtaacgtgctggccatcgcgcttgccaataagctggcccgcattgcctggagcgttcttgctcgtgaccgggccttcgaggcgaggaggatcgatcaggcgaccgtccagccggcctgatcgtcgagcacacgctgacgtagctagacaccgttacccgccgaggtctgcgagaggatgagaagagatggaggatcggtcttcccggcgcatgcgagcactggtgacccgaatggcccattgaggcctatccgctaatgagatcgcacgcgcgctgatatccatgatggcccggagcacaacgagctccaaacaaaggccggatacattgatgcaagaccgctcaccgccagctcgacgaagacctcttgcgacgcacggccggaccataca

SEQ ID NO: 9549 - DNA, 1156 bp, unidentified
  source 1..1156: mol_type = unassigned DNA; note = element_ef36ce2
  misc_feature 1..2: note = core
  misc_feature 3..208: note = LE
  misc_feature 209..1144: note = CDS
  misc_feature 1145..1156: note = RE
  misc_feature 38..214: note = bridgeRNA
cttgtcttatgactttcgttgccgaactggcgagaaagggaaccgctgtgagagggttgccgccctccctcagcggcgagggtcggatcgttgacatgcggaccgtttgacgggtcgagctagagtaggatcgccctcgtctttctcttgaggcctgaacggatacccggagttcggctccgaacgacaagcacaggacaagcgaaagatgaccaacgataccatcggcgtcgacatctcgaaagatcatctcgacgcccaccgcatgagcgacagcgcgagccgccgcttcgccaatgacagtgtcggccacagagctttcatcggctggctgggacagcccgacgcgcgcatcgtctatgagccgactggtccctatcatcgggccttcgagcagaggctggcagaggcgggattggcgctggtcaaggtcaacccgcgtcaggcaaggcgatttgccgaagccaccggcacgctcgccaagaccgataggctggacgcggccatgctggcgcgtatggccgccctcctcgacctcgaggcacggccggcgcgcagcccggttctcaacgatctcaaggacatgcacatggcccgcgaggcgctggtgaagaaccgcacggcagcgaggaaccgggcaaagaacctgaccctggccatcctcaagcgccacaatggcgaacaactcaggcgaatcgaacgtcagattgccgcgatcgagaaggagatcatggcgctcataaagacctatccggacctcgcccgccgcttcgccatcctcgtgacaatcccaggcgtctcggctatcaccgccttcgccctcctcatcgacatgcccgaactcggcacgctccagagcggccaggccgcctccctcgcgggccttgctcccgtcgcccggcaatccgggaactggaccggccgcgccttcatccgcggcggccgggccaatgtccggcaggcgctgtacatgccggctctcgttgccatgcgtttcaaccccgacctcaaggcaaaatacaaccagctcaaagcagcaggaaaagcctcaaaactcgcaatcaccgcaatcatgcgaaaactcatcgtcctcgctaacgctctgctcagggaccgtcggaaatggaccgcatcacttacttgaccaacacggata

SEQ ID NO: 9550 - DNA, 1396 bp, unidentified
  source 1..1396: mol_type = unassigned DNA; note = element_ef3cadc
  misc_feature 1..2: note = core
  misc_feature 3..89: note = LE
  misc_feature 90..1124: note = CDS
  misc_feature 1125..1396: note = RE
  misc_feature 1164..1382: note = bridgeRNA
gatgaggtggatggctcccgctcacggcatctaggtgccaaggtgtgaacgccgtcaggcgttcacgagcaaaatgggagccatccgctatgcagattaccacgatcggcctcgacttggccaagagcgtttttcaagtccacggcgttgatgcgaccggtcaggttgtggttcgcaagtcgcttcgtcggtcgcagatgctgccattttttacgaagttgcctccttgcctggtcggcatcgaggcgtgcagcacgtcccaccactgggcgcgcgagcttatcaagctcggccacgaggtgcggctgatgccaccggcttacgtcaaaccgtatgtgaagcgcgggaagactgacgctgccgatgcggaagcggtttgcgaggcggtggcgcgaccgacaatgcggttcgtccccgtcaagtcaccccagcagcaggcggcactgtcgatgcaccggacgcgcgatctgctggtcaagcagcgtacgcagttgatcaacatgatccgcggtctacttgccgagtttggggtcgacatccccaaagggttggaacgagcgcttctgatggcgcgacagatcgttgatggtaaagcaccggatgtgccgattgaagctgcgaagatccttggcacattgtcacagcaggtactcaccacccacgtccggctccgcgagatcgatcgcgatctggccgtttggctacgaggcaacgaggctgcacgtcgacttatgaccatccctggcatcgggccggtcggcgcgacggcacttgccgcatcggtcaccgatccgcatcaattccgctcggggcggcagttcgctgcctggctgggactgacgccacttcagaagtcgagcggtggcaaagagcggctcggtcgtatcaccaagatgggcgacaagtacctacgcaagctactcattgtcggcatgacgtcactcgtgcgccgcgcaaaatacaatcccggcaagatcgatccacgtctggcggatctgctcacccgcaagcccacgagggtcgccaccgtcgcgatggcgaacaagaccgcgcggatcatctgggcgatcatgacacgtggcgagacctatcgtgccggccaccggccaacgttggccgcatagacaacgatagaaaatttggctgaaaaggagatcagcttcacgaggttgcgagcgcgatgcgatgtgatggcagaccggtcagaccgggaacagggacaacccaagcgatgtctaaggcgtcatagcctgataagcagaatgggaccttgttcgcggactccatcagggccagcagtctaaaccgactgcatctaaaggccggacagaagactgcacccgaccaatgccaatacgtcaatttagctcttgcaacgcgggggccatccacagaa

SEQ ID NO: 9551 - DNA, 1546 bp, unidentified
  source 1..1546: mol_type = unassigned DNA; note = element_ef41e0e
  misc_feature 1..2: note = core
  misc_feature 3..245: note = LE
  misc_feature 246..1247: note = CDS
  misc_feature 1248..1546: note = RE
  misc_feature 33..220: note = bridgeRNA
cttgtatggtttttcctggctcctctccgattagagtggaggggccggggtggagggactttgggggagatctgccctgcatacagggacagaccgatagagaaattccccactcacactaccgagcgtcgatgaggaatctagcggcagaggctctcgaagtcgctgaccgccgatttgatcgcaagttcacgttgggtgcgtggccaccccggcaggttgaagtctaaccccaggagggctgcatgatgaacacccgcattccagatgtgctgcacgttggtgccgacgtcgccaaagatgaagtcgtagtcgcctgcgaggaggaggcttttcctccacgctcgctggttaacgagcgcgctgcattgctcgtctggctcaagacgctgcctgcgggcagctgcgttgggatggaggccactggcaagtatcaccggctgctggcgagcctggcctttgagctgggattggcggtctatgtgctcaatcccagggactgtcggcactatgccaagggggtgggactgcgcggcaagaccgaccgcgtggatgctcggttgattgcgcgcattatcgcgcgcgaggccggcaaggcgcgccgctggtctccgccaagcgcgcagcagcaggagttggaccaattgctccgtcggcgtgctagcgtcagccgtatgagggcggggctggtgcaatccttggaggacctgaccggctttggtcccgagcggcagcggccgttgctgcagcagttgactgaactgatcgcttgcttcgatcggcgcatcaaggcgctgatcgagacttcagctgagcgcatggccgcctaccggcgactgctgggcatctgcggagtgggagccgtggtcgccgcggcgttgctcaacgtcctcgagcggatggcttttgctcgcgccgatgccttcatcgccttcaccgggttcgatccacgtcccgatgactcgggtcgccgtcgcggccggcgccggcttaccaagcgcggtcccagcgaactgcgcaggttgctatatctggctgcgatggccgcggcgcgcaccgaggcttggaagccgcgctacgagcacgaacgggccaaggggctgtccagcacggaggcgctggtggtgctggcgcgctgcatcgcccgcacagcctggtcgatctacacccacaagaccagctttgatcgtgagcgcgtcggtccgagcggctgcgcatcgtctgtaccttcggctcgatctctttgatgcgcttcgatctaaggccgcctctcatgcactcgtgctaaaacctttggcgattcgacgcacttcggcggcgcccgcccggtaagctgctcctgcaccgtagagagggcgcgggtggttgtggcctttggccgcctcggcgtggggtcggctcgttgagcccaccccgcacctcggggctttgagcgatcgtgcatgatgccgcaccatcgcgccgactttgttcccgcccgcgttccgagtggtcgccggcctcgatgtgcggaccaggatggagagattgacaagaatcatagaat

SEQ ID NO: 9552 - DNA, 1327 bp, unidentified
  source 1..1327: mol_type = unassigned DNA; note = element_ef42674
  misc_feature 1..2: note = core
  misc_feature 3..73: note = LE
  misc_feature 74..1108: note = CDS
  misc_feature 1109..1327: note = RE
  misc_feature 1086..1312: note = bridgeRNA
agatgtatggactccctctccttgaggagctacggtcttaatccgactaaagattagccaaaggagcccatacatgactaagcctaatctattagctattgatttagcaaagaatgtattccaagtttgcaaactctgccctaacggaaaagtcatttacaaccgcgaagtcagtcgagcaaaactcaaagaaattctgataaatgaaaaacaagccctcgtggctatggaagcctgtggcagtgcacactactgggctcgattcgcaattagcgcaggccacattgtaaaagtcatcaacgccagagccgtaaaagcatttcaaaccaagcaaaagacagataggaatgatgctttagccattggtgttgcagcacagcaagagcacatccatggtactcatattcactcaactgaggagcaggcacttcaatcgttagagcgtatgcgacacttggctaaggttcaactagtcgcacaaagtaaccagatgcgaggagtattagctgagttcggagttattctaccgcaaggcctatctaagttaagaaaggaaatccctttcatcctagaagatgctgataactctttacctgatagttttagaacggcgctacacaggtcatggtcacatttattgtgccaaattgaacacttgcaagaactagataggcagctcgaatctttggttaagtcgcatcatatttgcaaaaagctgatgaagctagaaggggtcggtccgttaggggcgctagggttagcgttacgattagggcgaggtgaaaacttttctaatggccgagaagcatccgctaatatagggctaacacctaaacagaacagttccggcgggaaagagcgtattggacatatatctaagtacagtgcggataagcgacttcgttcaattttatttcaaggagcgctttccgttatcactcatgtattaaaccgtccagcgacaacaaacaaagagcagtggttacaagcgctagtcgaacggcgaggaaaaaagatcgctgcaattgctttagcgaacaaaaccgttcgaaccgcttatgctttattaaagaatgattcggactatcagccaattaaattgtcatgatagaccgagcattgtcaacgaagagcgatgtaagacaggtaagaccgaccagtatgagctagataagattcgaggcagtagacttgccgatatcgagaaatagcctactggtgcgactacattttagggcgaggtagctcctcaataaagcccgtatataagtgcgcatctatacttgttttccaaattctttgttgatttaccgagggggtccatata

SEQ ID NO: 9553 - DNA, 1585 bp, unidentified
  source 1..1585: mol_type = unassigned DNA; note = element_ef447d7
  misc_feature 1: note = core
  misc_feature 2..75: note = LE
  misc_feature 76..1146: note = CDS
  misc_feature 1147..1585: note = RE
  misc_feature 1348..1576: note = bridgeRNA
taatgggatggtccggccgtgctccacccccgctgctaggaagctagcagggggcgccaacccaaggaggacgccatgtcacagaaactcaacagcacaattgctgtgatcgggatcgatatcggaaagaactcgttccacgtcgtaggccatgacaagcgcggtgcgattgtgctgcgacagaagtggtcgcgcggccaggtggaagcgcggcttgccaacatgcagccttgcctcgtcggcatggaggcctgcgtcggcgcgcatcatcttagtcggaagctgcaggtgctaggccatgacgcaaggctaatgccagcaaaatacgtgcgcccgtattcaaaaggacagaagaacgacttccgagatgctgaggccattgcggaggcggtgcaacggccgacgatgaaattcgtcggcaccaagaccgtggatcagctcgatttgcaggcactccatcgcgtccgtgagcgattggtcagccagcgcaccggcgtcataaatcagatccgcgcgtttctgctggagcgtggggtcgcggtgcggcagggctttcgttttctgcgcgccgaactgccgagcattctggcgaaacgcactgacgtgctctcgccacgcatgtctcaccttctcgaggacctggcaggagactggcgacggctggatgagcgtatcgagcatctgttccgcgagatcgaagggttggctcggcaagaccagggctgcgcgcgtctgatgagcgtgcccggcatcgggcccattatcgcgagcgcgacggtggccgcgatcggcatgggcgatgccttctcgaaaggccgcgacttcggggcctggcttggactcgtgccgaaacaaatctcgacgggcgaccgcacgatcctgggcagcatatcaaagcgcggcaatcgctatctgcgcgcactgtttgttcaggcggcctgggttgtcttggtcaaggttgggccaaagcattgggagcgctatgggctcaagtcctggattgaagcggccaaaaaacgtctgcatcacaacgtgctggcaattgcgctcgccaacaagctcgctcgtatcgcctgggcggttctcaacaaaggacgcgcgttcgaatgcacaaaaacctatgcggtggcgccccaagctgcttaatcctcgcgccgtgctcacgcccatcaaggcgtggcccggtaacctggagcatgcggcaagccaagtgcgacggccagccttgacggtcgctgcgcgcggcgcatctcacctacctgcaggtcgggacgaaggaacgatctccaggcgcaaacaaaggaacagcgcaaagcaaggaggttattaatcacatagacaacccgctaccgccgaggtctgcgagaggattgaaacgatgatggaggatcggtcttcccggcgcatgcgaacactggtgaccctgatggcccgtttgaggccggtccgctaatcagatcgcacgcgcgctgatacccatgatggctcggagcaaaacgctccaatcagaagccggatacattgatgcaagaccgcagctaccggaatcgtggaaacctcttgcaccgcacggccggaccataca

SEQ ID NO: 9554 - DNA, 1404 bp, unidentified
  source 1..1404: mol_type = unassigned DNA; note = element_ef45347
  misc_feature 1: note = core
  misc_feature 2..224: note = LE
  misc_feature 225..1391: note = CDS
  misc_feature 1392..1404: note = RE
  misc_feature 14..239: note = bridgeRNA
ctacttgttgacttgcggtaggaccggcgcctggccaggctccggtccaggcatccggttcgtcgctctcacatcggctgcccgcgatggcgtggctctcatttggcctgcgcgggccgggtgccgtcatgagctgggagaggctcaagaggggtttgctctgctcgaagtagcgttgccctcctggctcggcaggcattcgcgagggcgagcaggaggaccggatgggccgggtagtcatcggaatggatccgcacaagcattccgccacgatcgaggtgatggacgaccaggagattttcctgggcggtggccggttcggcacggatgcggccgggtaccgggccatgctgggttgtgcccggcagtggccggaacgcatctgggcggtcgagggatgccagggcattggcggccacatcgccagcacgctgatcgccgacggcgagcaggtgctggatgtgccgcccaagctgtcggcccggacccgaatgttcgccaccgggcagggccgcaagaccgacgccaccgacgcgcactcggtcgcgctggtcgcgacccggatgagcgggctgcgcccggtcgctgaggaccagcaactggcggtgctgcgggtgctggccgaccggcgccggtcactgggcgaagaccacacccgcatgatctcccagctgcaccggctgctgctcgagctcatccccggcggggcgaagaaggcgctgtccgcggcccaggcgaaggcattactggccagggtcgggccgcgagatgccccgggcaaggctcggcggcgggtcgccgccgagctgatcagcgacctggagcggatccaccagcgcaagaaggccgccgacaaggaactccgcgaactgctgaaagccaccggcagcacgctgacacagctaaacggcatcggcccctccggcgctgcccggctgctcggcgaagtcggcgacatcacccggttcccgaaccgtgcccatttcgcctcctggaacggcaccgcgcctatcgacgcatcctccggccagcaagtgcgccaccggctgtcacgcgccggcaaccggcagattaaccgcgtgctgcacatcatggccgtcgtgcaactccgccatcgtgacagcaagggccgcgcctactacgaccgcaaggtcgcggccggcaagacaccaatggaagccatgcgctgcctgaaacgaaagctgtccgacgtcgtctaccgccagatgatcgccgacgccaaggcagcagcgacgggtccgggagggcactcggggacgactctgcaatccagcgtgaccggcttgaccccggtagccggctcttcggataagccacttcccggacccgccagccaacagcctagaacgctctcgctaacggcaccttgacacagaggggagc

SEQ ID NO: 9555 - DNA, 1440 bp, unidentified
  source 1..1440: mol_type = unassigned DNA; note = element_ef4de79
  misc_feature 1: note = core
  misc_feature 2..131: note = LE
  misc_feature 132..1160: note = CDS
  misc_feature 1161..1440: note = RE
  misc_feature 1196..1437: note = bridgeRNA
taatggaatggacgcctcccgtcctacccaaacgcttgctacgggacgcgggcgattcgcctggctcaaggacatggatcctttccgggtgtaatacatccctctcaaccggaaccgctggagggtacgccatgaaattcatcactcagcccgttatcggcgtggatatcgccaaacaggtgttccaggttcacgaagtgaacaccacaacaggcgagatcacgagcgtgaagctcaagcgtgcgaagttcttggaatatttcgccaatcggtcaagctgcctgattggcatggaggcttgcggcggtgcccagcactgggcgcgccggctgacagccttgggacacaacgtcagactgctgccggcgcagcaggtacggccctttgcggtaggcaacaagaacgacgtcgccgacgcgcgtgcgatttggatggcggtgcagcaacctggtatccgggcggtggtcgtgaagaccgagactcagcaggcggtactggcgctgcatcggatgcgtcagcagctggtgaagttccgcaccgcgcaaatgaatgggctacgtggtctgttggccgagtacggcgaggtgatgccgagaggtcgcttcgcactggccaaagcgattcccctggtgcttgaacgactcatcgatcggttgcctgccgtgctgatcgaaacattgcgcgagcagtacgcacgcatcggtcagatgggaagccagatcaccgatatcgagcgcaggctacatctatggcatcgcagcgatgaagactgtcagaggatcgccgccatccctggtgtgggattgcttaccgccacagccgcggtcgccaccatgggcgacccgcatgctttccgttccggccgggaattcgctgcctggctcggcctggtgcctaggcaggtaggtacggggggacaggtaagactcctgggcatcagcaaacgaggtgacacctacttacgaaccttgctgatccacggggcacgctcggtgctggtgcatagccaaaaaccatcaccgtggatatcggccatccttcagcgtcgatcactcaacgtggcgtcggtggcattggccaacaaaatcgcacgcacgttatgggcgctcattgcccatcatcgcctctatcaatccggatacgtgagtcagccaacctagagcgtcgccacgtcatcttcctctttcaccgtgggacgttcttttaaagtttgcgcaaggttcgtagcgacgtgatggtcaacaggtcggaccgtgatccgccaaacctgaatacggtacaggactttcgagtccttacaagtaatgaggcgtggatcagctcattccatcagggccagcaggcataggcctgcacgacaggccgaatacataactgcaaccgtgccctgtggcttcatcgcatctcgaagagccttgccaaatgggaggcgtccataca

SEQ ID NO: 9556 - DNA, 1479 bp, unidentified
  source 1..1479: mol_type = unassigned DNA; note = element_ef52a3e
  misc_feature 1..2: note = core
  misc_feature 3..134: note = LE
  misc_feature 135..1142: note = CDS
  misc_feature 1143..1479: note = RE
  misc_feature 1178..1360: note = bridgeRNA
acatggggtaatcgcggcgcggttcaccccaggccatttcctctgtgcaattgctggcacgagtggctgcccccgataagatggaattacgggctcacgattgaaccgggcccacacatcaaatggaggcaacgatggtcgaatatatcggactggacgtttctttgaaagacaccgcgatctcgattcgagaagacgggaagcgaatatggcgcgggaagtatccctctgacccacagcttttggcgcaaattatccgcaagcacgctccgcacgcaaagcgcgtcgtattcgagacgggaccattatcaacgtggttttatcatgcgctgaccgcccaggggattcctgcgatctgcatcgaagctcggcacgcgcaaaaggtcctgaacgagactgacgccaatgatgcggatggtctagcccagttggccgaagccggcttttacaagtccgttcgggtagaggctttcgatagcatgctgacccgtgcactggtggccgcgcgcaatcagcttctgagcatctcaacccagctcagcaaccagatccgcggcctaatgaagacgttcggtctcatcgtacctaagggaagagatggcaatgtcagggagctgctggatgaaaacgacggcttggccagtatcatagtgcctctgcttgaagcgtggcgcgacatacgcaagcgcgcggccgatcttgatcaccagttgctcgcagcggcgcgagagagccaggctacgaagcttctaatgacgatcccgggcgttggtgccgtcaccgctgtctcctatgtcgcagccattgaagatccagagaacttccgaacgtcgcgctccgttggcgcttggctagggctgacaacgcggcgctatcagtcaggcgaggttgactatgatgcccacatttcgcggcgaggcgacaatcacctacggggactgctttacgaagcggcaaccgtgctcctcacgagaaccagtgccgagaccgagtgcagtctcaaaagctggggacttaaattgcgggagcggttgggcttcaagcgcgcagctgttgccgtcgcgcgtaagctcgctgtcgttatgcacagcatgctcaaaacagggaaagtgttcaacgcattggctggtgctcccgcataagcgaaagatccagcctccccacctcagcgcgtcaaactcgatttgagacactgagcgtccctgctgtggacgtggattgggtcattccgccagtttggccgcagctcgatcgagactgcgccttaaacataggaagatccaccctgcgaaaacccattatgcggcgaccatctgtcgaccgcggagacaaccctgctcccggcatcggacagcattgagtaaaacaatgaggtagagcgtcgaaccaatcaaactatgatgtcgcgttgcgtggtccgcaatacggcgacgatgtacgatgcccaagccaccttgactaactggatgcgattagaca

SEQ ID NO: 9557 - DNA, 1166 bp, unidentified
  source 1..1166: mol_type = unassigned DNA; note = element_ef553ce
  misc_feature 1..2: note = core
  misc_feature 3..206: note = LE
  misc_feature 207..1154: note = CDS
  misc_feature 1155..1166: note = RE
  misc_feature 36..212: note = bridgeRNA
cttgtcttatgacttttgctgtcgaaggagcgaatatgaaccgctgcgagagggttgccgccctctcacagcggcgagggtaggatcgttgaattgctgaccgtttgacgggtcgagctagagtgtgatcgccctcgtctttctctttggtcctgaacggatacccggagtttggcttcggatgacaagcagaggacaagcgaaagatgacgaaggataccatcggtgtcgatatctcgaaagaccacctcgacgcgcaccggatgagcgacggcgcagcccgccgttttgccaacgacactgccggtcacagctctttcatcgactggctcggtcaagccgggcccgcccatgacattcgtgtcgtctacgaaccgacaggtccctatcaccgggcgttcgagcgccaggtcgacagggcgggcgctgcactggtcaaagtcaatccgcggcaaggacggcgttttgcggaagccacaggcaagttggccaagacggaccggacagatgccgccatgctcgcacgcatgggagcaatcctggaactcgaagcacggccggtacgaggcccgctcctcaacgatctcaaggatttgcatatggcccgagaagcgctggtcaagaaccgcactgccgccaggaacagggcaaagaacctgaccttggctattctcaagcgtcacaacgctgagcaactcaggcagatcgagcgtcagatgatcgcggtcgaaaaggagatcatgctgatcatcaagcatgatccagacctcgtaggtcgtttcgacatccttgtctctatcccgggcgtgtctgccgtcaccgccttcgcgctcctgatcgacatgcccgaactcggcacactcgagcacgggcaagtagcctcgctggcaggtctcgcacccgtcgcaaggcaatctgggacatggacaggccgtgccttcatccgaggcggccgggccaatgtccgccacgcgctatacatgccggcactcgtcgccatgcgcttcaatcccgatctcaagacaaaatacgaccagctcaaagctgcaggaaaagcaccaaaggttgccatcaccgcgatcatgcgaaaactcatcgtcctcgccaatgcactgctcaagcacggcagaaaatggctgccatctctggcttgaccaacacggata

SEQ ID NO: 9558 - DNA, 1646 bp, unidentified
  source 1..1646: mol_type = unassigned DNA; note = element_ef5b71d
  misc_feature 1..2: note = core
  misc_feature 3..278: note = LE
  misc_feature 279..1481: note = CDS
  misc_feature 1482..1646: note = RE
  misc_feature 58..272: note = bridgeRNA
ctggtatattgtaattgacccatctaagtagtcatctacaatatacgttcctttctatcaatcttatttatccgtgattgattacggtttgtgtattctgtaatattgaaatatgtgaatgtggatttgtattttcttccttgtggctcgactactttagaaaggatcttaccacaccttattcctaaacagtgattagttagatgagtctttgaattcctattttgaaccaggttttgtggtttaagtgttgtgggtaccatttcacataatttactttgaaaggatttttacatatgaaattaattggcatcgacattggaaaaaacaaacatttcttttgtatcatggatcaacaaactggtgagatcatctctcagcctgtttctttttctaatgacaaagaaggttttgattttctagtacaaaaaatcaaatcttatccaaaagattctattcttattggtatggaagatacgggacattatcattttgctttgttgaaataccttctaaacttgcaatatactgttgctttaattaatcctaaaacaactgatttcaatcgtaagatgcaaggtggtattactaaaaatgataagctcgatacaatcaatatctgtgatgttcttgatactcctgaacgtaaaaaacaatatcgtatcactaaagtcaacagttttgatctttatgaacaaaaacagctaacaagacatcatcacaacttgaaagaagaagaaaatgtctataagaatcgtcttcaaaaatgtatcgatatcgtgtttcctgaattcaataaactgttcaattctaaatatggcattgtttatatgaatattcttaaaatgtttggaagtgctgaaaatatcgccaatacggatatcagaaccatccgtaaatgctttgaaatcgaaggtagaggcaatcgtatttctttaactcctgaaagacttaaagaatgtgccagatcttctattggtatttcttcatcagcagaagttattcaaataaaacatttaaccgctcaaatagaacttattgaagaacagttaactgaaatagataaaaaaatagaagagttctccatccaaaataactctcctatcctatccataccaggaatatctcacttctctggtacttctattctagcggaattaggagatataagcaactattctaagccttctcaaatcattaaatttgcaggagttgctcctttacactatgaatcaagtcagttcaatgcacaacatacatctattaccaagaaaggatccaaatatttaagaaagaccttatatcagataatacttcctgtaataagacacaatcctgtgttcactaagtattatcagttaaagatttctcaaggaaaaggtcatcgttgtgctcaaggacattgtgtaagaaagctgattagaatcatctatcatcttttaaaaacgaatcaacaatttgatcctcaactgttaagataacactttaaaattttaaaaaatggcctttcgaggtctttttcagcatgtccaaaattacaaatcactattcacttttcaatgttctcttacatttctaactgaaaattcaaatttttaaatattttcaaactttttcataaaatcacttgaattttatatagttag

SEQ ID NO: 9559 - DNA, 1366 bp, unidentified
  source 1..1366: mol_type = unassigned DNA; note = element_ef5bf53
  misc_feature 1..2: note = core
  misc_feature 3..84: note = LE
  misc_feature 85..1110: note = CDS
  misc_feature 1111..1366: note = RE
  misc_feature 1084..1353: note = bridgeRNA
tgatggagtggatgcccccacccgacggcatcgcaatgtgccaagatggtgatgttgaagtcaccatagaaagaggaggcatccatggatgaggttagcatcgttggcgttgatctggcaaaacaggtcttccaggttcacggagctgcggcggatgggagggtcctgtttcgcaagaagttatcacggccgcagtttctgaagtttatggcgggtttgccgcagtgcgtcgtggcaatggaggcctgcgggaccgcacattactggggccgggaactgacacggcacggccatgaggttcggcttattccgccaatctatgtgaagcccttcgtaaaacgccaaaagaacgatgcggctgatgccgaggctatcgccgaggccgcgcagcgcccgacgatgcgcggtgtcacggtgaaaactgccgaacagcaagcgcaggcaatgctcttccgcacccgcgatctgcttgtcggacagcgcacccagttggtgaatgcactccgggggcaccttgccgaacatggtatcgttctgggaaaaggtatcggcaatgtccatcacctcgccgtgcgcatcgaagaagataaaagccttccaggccttgtcagagacatggcgcggctctacctcgaccggatcgccggactaagcgccgaaatcgacaatctgaacacccgcattgcggctgcggcgaaggaaagcgatgtcgcgcgcaagcttcagacgatgccgggggttggaccgatttgcgccatggcgatcacaaccttcgcgcccgacttgcgcgagttccgccgggctcgcgatttctcggcctggctcggtcttgttccccggcagcactcaagcggcggaaagcagaaacttggccgcacgtcgaagatgggccagcgcgacatcaggcgcttgctgatcgtgggcgccatgtccgtcgtgcattggcggggccgagatggaggtcggccaggttcgtggctttctcgaatgctggctcgtaaaccacgaatgctggtcgccatcgccctggccaacaagatggctcgaatggtctgggccatgcttgttcgaaatgaagaataccgagatccggctggcgcggtttgctgaccaagactgccggagtgtcggcgatgtgaggaggacgacgatctgtatgggcaaatgatcgactagatccggaacggggaagcctgtggcgtgcaacgagctcgagctcggaattttgatgaggcctccgatccgcgcatcaccataccggcccgcggcatgtcatggccgcaccagagaggcctgaaacatgaccgcacccgatcacacgctcagaaagtcagagaatccttgcattgaagggggcatccaaaca

SEQ ID NO: 9560 - DNA, 1396 bp, unidentified
  source 1..1396: mol_type = unassigned DNA; note = element_ef5d2ed
  misc_feature 1..3: note = core
  misc_feature 4..79: note = LE
  misc_feature 80..1153: note = CDS
  misc_feature 1154..1396: note = RE
  misc_feature 1142..1385: note = bridgeRNA
tgatgatgtggacgccgctgcgggcgaagcaccagataggttgctgagaacgaagcaaaagcaggaaaggagcgttccgatgaacattgcgacaattggattggacctggcgaagagtgtctttcaggcacatggcgtggatgaggctgggaagaccgttctggtgaagaagctgcatcgcaaacagatgctcccgttcttctcgaagctgccctgcctgatcggtgtggaagcttgtgccacggcgcatcattgggcaaggacgttgatcgccatgggccatgacgtgcggatcattccgccgtcctacgtcaagggatacgtgaagcgcggcaagagcgacgctttggatactgaggcgatctccgaggccgttgcgcgtccgagttcaagatggtccgcgccagcggatggaacgatctgggggatcgttccaaggcgcagaacgcggttcgttccagtgaagacggtggaacaacagagtatcctgatggcacaccggacccgatcgctactcgtgcgccaacgcaccatgtccgcgaatgcgcttcgtgcacatctggcggaaaatggccttgtcgcaaacccgggaatcgccaatttggtgaaactggcggatcgggcatttgccgatgaggccctgccagcctacgcccaccgggcgctcgagatcctgatccgccggatcgctgaactgaccgaagaaatcggtacattggaccaggacctgaaggcctggcatgccgggaacgaggcaagccgcaggctcgcggccattccgggtgtcggggtgatcaccgcaaccgccctcgcggcgaccgttacggacccggatcaattccgctccggcaggcagttcgctgcctggcttgggctcacgccgcagcagcactcaacaggtggcaagacccggcttggcggcatttcgaaacagggcgaccgctatctcaggcgattgctggtcgtcggggccacggcagtcatgcggcacgccaagcgcaacccgacaccgatgacggactgggtgaacggattgctggagaagaagccgttccgtattgtctcagccgctctcgcgaacaagctcgcccgcatagcatgggtgctgctcacgcgcggcgagacctacaggccctacggacggcccgtctgacagcatcggccgagaccacattggcaaaggcagtcgatgatgcgtaacgatcgagccaatggtggagcaaacccgtctgattcaacgcgcctccaaagcgcgccaggttgatcagggcccccaccggcggatttccatcagggccagcggcagatgacagtcgcacaaacaggccggacaaatgaaagcaaccgatcaccgcaaccgactaaatcaacccttgccataggcggcgtccacata

SEQ ID NO: 9561 - DNA, 1538 bp, unidentified
  source 1..1538: mol_type = unassigned DNA; note = element_ef5d909
  misc_feature 1..3: note = core
  misc_feature 4..242: note = LE
  misc_feature 243..1421: note = CDS
  misc_feature 1422..1538: note = RE
  misc_feature 8..220: note = bridgeRNA
tttcgtattatcaggtcagcaagtgatttctggttggccttttttcttaggcactataagatggcggtagccgggagaacgtatactttattggggtcaaccccgtagtgaaaacagttctcccactgcccccaatgaccatgtttgggctggttgagacagggatctcgcatcacaagcgaagctatggctttggaaccatcgtgggagtgccggcaatattttgagtgagggagagtgttatggaaccagtcgtaggagtagatgtatcaaaaggatctagcatcgttcagggttttgtaggaagaaatgaaccctacgggaagttggagagcatttcgcacgaggagagcggttttgaacgattgggagaattacttgatgaattgaaagtactttcgggaatggaaccagtcgttattttggaagctaccggccattaccatagaggggtggtcgcctatcttatgcgtggggagtacaaacattttgttataaatcctcttcaatctaaacgcgcgaggagcacgcaactgcgaaaagtaaaaacagacgcggcagatgcatggcacttagccgacatgtattatcggggcgatgttacgccacatcgtacttgggatgaattgtataccgagctgcaacatgtgacgagacaacatgaatttataacctcgatgtatgttcaggcaaagctaaattcgagagccctactggatcaggtatttcccgcgtttgagaaggtatttagcaactctttttccactacggcgcttaaggttctgaagtgttgtctgagcgacagagcggaagagatagaagcgatcattcaggaacaagccgggaaatctcattcgaaagaatggatcgaagagaagaccgatcagttgagacaagcaatgcttgaatggtccaacacaaaaagaagcaaatcgcaaagcttagccctggaagagatggtatccctcttacttgagtttcaaaaccaattaagtaggttggaaaagcacatggaggaaatctcggcgacattaccggaggtagaactactgaagaccattccaggaataggtgacaaacttgcggcgacgatcatagcggagatcggggatgctcgtcaatttacgagtgctaagcaacttgttgcctacgcaggtcttgatactggtgtctacagttcgggtaagtttacagctactagtaaccggataatgaaacgaggatcaaaaagacttcgaagagctctatatttagcggttcaatgtggacttcggcgcggtataaatagcagaataaagcattactacgataagaaaagaaaagagggcaagtcctacaaggtggttgtgatcgcttgcgccaacaagcttctccatcacatctactctatccttaataaagaccaaccctaccaagtctaatactaaaattatccataatccttcacgccaatgaaggattattcgtcatgctcaaaaaacagtataccagtgtttaaaactttgtctacactgaaaagcttgacaaacattagctgg

SEQ ID NO: 9562 - DNA, 1406 bp, unidentified
  source 1..1406: mol_type = unassigned DNA; note = element_ef69efb
  misc_feature 1: note = core
  misc_feature 2..90: note = LE
  misc_feature 91..1149: note = CDS
  misc_feature 1150..1406: note = RE
  misc_feature 1177..1398: note = bridgeRNA
taatggtatggacgcccccactctgcgcggcatcgtgtgtgccaaagtggaagtgctgagttaccactaaaacaggcaggagcgtccgagatgaacattacgacggtcggcattgatttggcaaaaagcgtattccaagtccacggagtggatgagcgcggtaaagtggggctacgcaagcagctcaagcgctcccaggtcatgggcttttttgcgaacctaccgcggtgtctgatcggcatggaagcttgcggcagcgcgcacttctgggcccgaacgttcacggagttggggcacacggtcaagctgatggccccccagttcgtgaagccttacgtgaagaccaacaagaacgatgcggccgatgctgaggcgatctgcgaggcagtgggtcgagaaaacatgcgctttgtaccgatcaagaacgccgagcaacaggcgttactcgcattgcaccgggcgcgacaaggctttgtcggagctcgcaccgcacaagtcaatcagatccgggggcttctggctgagtttggcattgtgattcctgcgggcattcgtcgcatagcggagcatatgccagagattttggaagatgccgagaatgggttgccgggtatcagccgcgaactcttcggtcgcttattcagccactttcgcgagctcgatcgccaggtccggcagatggaagtgcagatccacgcgtggcatcgtgatgagccggtcagccggcggctgcagggtattcctggaatcggaccgattactgcgagcgcgctggtgggcagcatcgggaatgcaagctcgttcaagaacggtcgacagctggcggcgtggttgggcttggtgccgcgccaaaattcctcaggcggcaaagagcaattgctgggaatcagcaaacgcggtgatacgtacctgcgcacgctgttgatccacggggcgcgctcggttgtacggcaactaaagctgagggccggagggtcgcaaggatggcttgcgcgtctggcactacggcgcaacctcaacattgccgccgtcgccttggccaacaagaacgcccggatcgtctgggcgctgctggcacatgatcgagattaccaggcagggtacatgtcgcaacgcggccgcgcgacactggccgtcgcagcgccgtaaatgaaattttagaaaatctctcccaccacagattgctcaggcgttactcaaagtgatggcatcccaggtcagaccggggccggctcaacctgcttcatccaggggacctcaacagtccgcactactgatcaggcgtcgacccgcatattccatcagggcccgcggccaagagccgcaccaaaggccggatgtatggctgcaatctcctcctgtgatccagaacgaagaaagcgcttggcatagggggcgtccatgta

SEQ ID NO: 9563 - DNA, 1364 bp, unidentified
  source 1..1364: mol_type = unassigned DNA; note = element_ef760bf
  misc_feature 1..2: note = core
  misc_feature 3..86: note = LE
  misc_feature 87..1118: note = CDS
  misc_feature 1119..1364: note = RE
  misc_feature 1097..1350: note = bridgeRNA
tgatggggtggacggcccccgctcccggcatcggagtgcctaaagtggctgttgctgaacgccacgaatgagaggagccgcccgccatggagattgccacaattggtctggacctcgccaagcattggtttcaggtccacggtatcgacgggcacgggcagacggttgtacggcgcaagctgcggcgcagtgaggtgattgcctacttcgaatccctggcgccgtgcctggtcggcatggaggcctgcgcaacggcgcaccactgggcccgcgagttggccgcattgggccatgaagtcaggctgatgccgccgagctatgtgaaggcctacgtcaagcgcaacaagaacgacgcggccgacgctgaggcgatctgcgaggcagtgacgcgcccgtcaatgcgctttgtgccggtaaagaccgccgaccagcaatcggttctgatgctgcaccgcgcccgcaacctgctcgtccgtcagcgtacgatgctggtcaacgcgttgcgcgcccacatggccgagtttggcatcgtcgccgcgcagggcctgcgacatgtcgatgatctcacgaaggaacttgctcatgaacaagagcggcttcccgagcttgcccggtcgatccttcagctcgtcgtcgagcagctgaacggtacgatggcccgggtgcatgagattgaggtccagctggtcaagtggcaccgcaacagctccgtcagccggcggctggcgaccgttccggggatcgggatcatcggcgcgaccgccatcgcggccacggtcaccgacccctcgttgttccgatccggcagggagttcgcggcgtggctgggaatgacgccgcggcagaactcgagtggcggcaaagagcgcttggggcgcaccagcaagcgcggcgacaaatacatccgctgcctgttggtcgccggcgccgtcgcgatactgcgccacacgcgcaatcgaacgacgaaagacgccgcctgggttcagggcctgctggcgcgacgacccgccaaggtcgcggcagtggcgctggccaacaagaccgcgcgcatcgcctgggcggtcatggcacgcggcgaaggctaccgctgccgagacgtgatcgggcgggcggcgtagccgccgcccgcccgtatgcgagggtgaaggggatgtgatggcgaaacggtcgcgagccgtggaccgggaagacccgggtaattcaaggcgcatcgcagcgcgtagtcttgatagggacccgatccgcgaactccatcagggcccgcggtcataggcaccgcatcgcgaggccggacatatgactgcacctgaccataccgccaaagccgccgccaaaaacccttgcacgcgggggccgtccacata

SEQ ID NO: 9564 - DNA, 1339 bp, unidentified
  source 1..1339: mol_type = unassigned DNA; note = element_ef7c37c
  misc_feature 1..3: note = core
  misc_feature 4..7: note = LE
  misc_feature 8..1096: note = CDS
  misc_feature 1097..1339: note = RE
  misc_feature 1107..1337: note = bridgeRNA
tgatgtgatggtctcctcccaaattcggcatccaagtgccatgattgaatttgaacttacaatcaaaccggagaaaaccaaaatgaagattacaacaatcgggttagatatagcaaaaagagtctttcatgtggtgtgctgcaacaaggaaggcaggttgctgaaaaagaaaatgttaaagcgagcagaggtgcttgctttctttcattctcatcctgaatgccttgttgctatagagtcttgtgcaacttcttcttattgggcgagggaaattcaaaggtgtggtcatgaagtaaaactgattccgccacagcatgttaaagcgtttttagtcggcaacaaaaacgattataacgatgccttagctatcgctattgccgcccgtcagccccatatcagagctgttggtataaaatcagtcgaacaacaagataatcaagctcagcataaggccagagcattagctgttgggcagcgcacagcattgtgcaatcaaataagaggactggtggcagagtatggaatatgcgtacctcaaggtgtccatacactacgcaagcatatttcaatatggttggaggatggcaaccagcaattatctatacagtttaaggcacttctgttacagcttaataaacaacttcatacgctagatagcagtatcgaggtatatgacaaggcaataatgcaatacgcaaaaaacaatgcaatttgtcagcgtttgctatctgttcccggtattggcccgatgatatcaagtgcctactttaatgaagttggtaatggcagagcgtatcgaaaggggcgtgatgtgtcagcgtcattaggtttggtccccaagcaacatagtagtggcggaaaagatgtattattgggtatcagtaaaaaaggtaatcgttacttacgatgtttactcgtccaaggtgccaaagccgttgtttctagagctaaatccaaagatgacaaactcagtctatggattaaccatctggtttttacaggagggcataatcgggcatgtgtagcgtatgccaataagatggccagaatggcatgggcaatcacggtatcaggtgaggaatattcaccagtataataagaacaaacacttcaacgaattgcgaaggcgtaacagatagatgacataataggtcaaaccggcatatttaaaacctgtcgaattcagaggtaataaaataccgataatctgataaggacgatatgcgcgaaatacatcaaggtcatagcttttacggctaattaaagaccgaatatatgacagcaaccctgtccctgttatctagatgataaaccttgcaatacgggaggagaccatata

SEQ ID NO: 9565 - DNA, 1499 bp, unidentified
  source 1..1499: mol_type = unassigned DNA; note = element_ef8ba2d
  misc_feature 1..2: note = core
  misc_feature 3..246: note = LE
  misc_feature 247..1479: note = CDS
  misc_feature 1480..1499: note = RE
ctaatgagagttagcgggtctgcggcggcagactcgttgactggtggccgccggtgggtgagcactcgacctgactgggccgtggagcccgttagccacaagaccgtgcccccgccggttgcccgggagagttgatcgctgctgggatgtcgtgcccgcctatggcgtgagcactgttcattagtctgctgatggttctcccgctggctgctgacggtattggcgcggtgtgcgggagagggtgcgatgcggctgtgcgtgggtgatgactgggcgcaggaccatcacgacgtcgaggtgatggacgagtccggcaaggtgctggccaagaagcggctgccggaaggggtcgccgggatcgggcagctgcacgagctcatcggccggttgctgcccgccgatggcgatgcgcaggtgcaggtcgggatcgagaccgaccgcggcccctgggtgacggcgctgatcgccgccggctacgtggtgttcgcggtgaacccgctgcaggcgtcccggtaccggggccggcacggtgtatccggggccaagagcgatggcggcgacgcgcacatgctggccgacgtgatgcgcaccgatgctcaccagctgcgcccggcggccggcgacagcgcggaggcggagggcatcaaggtactggcccgcacgcacaagacactgatctgggagcggaccgcggtgacccagcggctgcgggcccagctgctggagtacttcccggctgcggtggccgcgtttgaggacctggacgcccccgacgcgctggagctgctgggcaaggcgccggacccggcccgcgccgcaaagctgacccgggcccaggtctcggcggtgctcaagcggaacgggcgctacaagatcaaggagcggaccgatgcgatcctgggcgcgctgcgcagcccgcagctgggccagccgcccgccttgactgccgcctacgccgcgaccgtgcggtccctgatcgcggtcatcaccacgctcaacgagcaggtcagcagcctgcaggggcaggtggaggcacattttggccagcacccggacgctgagatctacctgtcccagcccggcttgggcgccatcaccggcgcccgggtgctcggcgaattcggcgacgacccgcaccggtacgcctccgccaaggcccgcaggaactatgccggcacgtccccgatcacccgcgcctcgggcaagaggaagatcgtcgccgcccggttcgtgcgcaacgaccggctgatcgacgcgctgatgatccaggccttcgcctcgctgagggtctcgtccggcgcccgcgcgttctacgacgcccagcgcgctaagggacttgagcacaacgacgccctcagaagactggcgagccgcctggtcggcatcctgcacggctgcctcaagacccgcacccgctatgacgaggccaccgcgtggggccaccggcaaagcatccctcaatccaactccgccgcttgacatccaaactcctgggatgt

SEQ ID NO: 9566 - DNA, 1380 bp, unidentified
  source 1..1380: mol_type = unassigned DNA; note = element_ef8c15a
  misc_feature 1..2: note = core
  misc_feature 3..87: note = LE
  misc_feature 88..1119: note = CDS
  misc_feature 1120..1380: note = RE
  misc_feature 1151..1368: note = bridgeRNA
tgatgctgtggacggctcctccaccggcacgagagtgccaaggtgtgggcgccgtttgaggctcccacgattcggaggagcagccctatgcagccaatttcgaccatcggtctggatatcgcgaagtcagtcttccaagtgcacggcgttgatgcagctggccaggtgatcatccgccgtcagttgaagcgccggcaagtcctgacgtttttccagaagctgccgccctgcctggtagggatcgaggcttgcgcatcatcacaccattggtcccgcgagttgcaggcattggggcatgcggtgcgattgatgcctccggcctatgtgaagccctacgtcaagcggcagaagaacgacagcgctgatgcggaggcgatttgcgaggcggtgacgaggcccaacatggggttcgtgccgaccaagacggttgaacaacagagctgtctgatgcttcaccgagcgcgccacctcttcatccgccagcagactgccgtgatcaattcaatccgcgcctatctcgccgagtccgggattgtcgcccctgtcgggcgcgggggtgtcgagcaactgctggaagtcgtcgccgatacagccgaagaccgagtcccggagggcgcccggatgtgtcttgctgctctcggtgggcaattgcgcgcgctgaaggcccagatcctggagttcgaccggcgcatcatcgcctggcatcgatcaagcgcgacgagcaaacggctggacgcgatccccggcgttgggccggcgctggcaacagctctggtcgcgagcattgctgatcctagagcttttcgatcgggacgagacttctcggcctgggttgggcttgtaccgaagcagagctcgagcgggggcaaagacaagcttggcagcatcagcaagcagggcgatcgctatttgcgtagcctgtttacggctggcgcgctcgccgtaatccgctacgccaagatccatggcaccgatcatcggccatggctcacgcgattgttggcccgccggcccaccaaggtcgcggccatcgcgcttgccaacaagctcgccaggatggcctgggcgatgatggcgaggaacgaacgctaccaggagccggccgcgctggcggcctaaacgagatcgcgccgacatcgccggcgtgacgtaacggttgggagggcgaacagcacgtaatgcagcgccggtcgatccggcgatcaggacaacccatacgggccacggcatcttcgaatgcgtgcttttgatcgggacctgatccgcggagggcattatggccagcggtcatgtgaaccgcacaaacaggccgaacacatggctgctccgaccaatctgcgacgtgaggattctccttgccaacccggagccgtccacaca

SEQ ID NO: 9567 - DNA, 1348 bp, unidentified
  source 1..1348: mol_type = unassigned DNA; note = element_ef9a553
  misc_feature 1: note = core
  misc_feature 2..77: note = LE
  misc_feature 78..1103: note = CDS
  misc_feature 1104..1348: note = RE
  misc_feature 1106..1345: note = bridgeRNA
taatgagatggtcagcctgaccgaaatggcccgatcggcttacgctgatcgggccatttcctttttcggaggccatcatgacgaacgcgacgctcatcggtattgatctgggcaagcattgctttttcgtgcatgcgcaggacgcacgcggcacgcagatctggcgcaagaagatgacgcgcaagcagctctacgcacgcctggccacctgtcccgtcgccgttttagcgatggaagcttgcgctggcgcgcattggctggcgcgcaaatttcagttgtatggacatcaggttcgcttgattgcgccgcatttcgtcaggccgttcgttaagggcaacaagaccgacttcgccgacgcagaagcaatttgcgaagccgcctctcgccccgctatgcgctttgtcgtagtcaagacagccgagcagcagacgtggctcgcgttacatcgggtgcgcgaatcgcttgtcggcgaacgcacggcaaccagcaatcagattcacgcttttctgctcgaattcggcatcgatctgccaatcggcgcgctggccatcacgcgcttgccggtgcttctggatgagtccaggcacgcattgccgcccacgatggtgaccttgttgctgcgcttgcatcagcgctacgcaaggttgagtcaggaaatcgtcgagcttgagacgcaaatcaagcagcagacgctcgaagatgaagccggccagcgcctcctcacaattccgggaatcggtcctatcaccgccagcagcttgttggcaatggccggcgacgcgcgtgcgttcaaatgtagtcgtgacttcgctgcttccttgggactagtgccgcgccagcattcgaccggaggccgagcggccctcctggggatctccaagcgcggcaacaagcagttgcgcagcctgctcgtccaaggcgcacgtgcggtgatgcgatttgccgagcagcgaacggatgcgctcggtcgctggctgcaagccctgctgcgccgccgtcacagcaatgtcgtcgcctgcgcacttgccaacaaaatggccagaatcgcttgggcgattctggccaagggtggcgagtaccgggcgcaaccggctatcgcctgaacagctttcccgcctgcttttgcgaccactgacccgtgatgaagataaacggctcacggcccaactgaaaccctgaaataaaatccagtcctgcagactgagggccttttgaggacagttgggtgcggcttctcatcgagggccgggcgctctgatccgcgcccatttcgagcccggatacatttgcgcaagcccttttatcttaggtcacagatcgaggttgcagaaatcaggctgaccataca

SEQ ID NO: 9568 - DNA, 1385 bp, unidentified
  source 1..1385: mol_type = unassigned DNA; note = element_ef9d5e7
  misc_feature 1..2: note = core
  misc_feature 3..80: note = LE
  misc_feature 81..1112: note = CDS
  misc_feature 1113..1385: note = RE
  misc_feature 1083..1372: note = bridgeRNA
agatggggcggttgccgcccccccggacagcatcgcattatgccaggaagtgctcaagcttagcggagaggacggcgaccatgatgaacgagacgatgattggcgtggatctggcaaaggctgtttttcaggttcacggggcatcgatgaccggagagccaaggttccgcaaaaagctgtcacgccaaagcttctccgagttcatggccaaacagcctcccgccttggtcgtgatggaagcttgtggcagcgctcatcactgggctcgagagatgatcaggcttggtcatgaggtgaagctgattgcgccgcgctatgtgaagccattcgtaaagcgacagaagaacgatgcggccgatgcggaggccatcgtgatcgcggcccggcagcctgaaatgcgcttcgtcgaggtcaaaggtgccgagcaacaaagccgagcgatcctgtttcgcgctcgcgaacggctcgtccaccagcgtaccgagctcatcaacgcactcagggcagccctttacgaatacggccatgtcgtgccgcaaggcatccgtcagatcggacggatcgaggagatccttgaggcgccacacagtgacttgcctgatctgatgcgggacgaatgccgcgatctgctggaacagatcgctgaacagacggtccgtatcaatgcgcggacggaaaagatcaaagctctagcggccgaggctgacaccgcccgtcgcttgcaaacaatccccggagtcggcccgatgacggctctggcggtcgaggcatttgcgccaccgatggagagtttcaattgcggccgtgcctttgcagcctggctaggccttgttccgcgccagttctcctcaggcggcaaagagcggctcggtcgcacttcaaaggcaggacaggccgatatccgccgattgctgattatcggtgcaatgtcgcggttgaactggatgggacgcaaatccattccagaagactcgtggctagcacgaattacatcgcggaagccgcggatgctcgtggcgatcgccttagccaacaagatggcacggacgatgtgggcgatgctgacgaaaaatgaggattatcgagttccggcacaggcaggagcagcataacattatactgcaaattctgcctgaggccggataaacgggagtgtgagaaggcgacgacccgaatgggcaaaacgatcgaacagatctggatcagaaaaaccagttcaggactcagagcgctacagctcgccaatgagatttggatctgatccgcggatcaccataccggccagcggcttctgaatgccgtcttaaaaggccttacagaagaccgcactcgatcactaacccacacggtcagaaacctcttgcatcacgggcggcaaccacaga

SEQ ID NO: 9569 - DNA, 1522 bp, unidentified
  source 1..1522: mol_type = unassigned DNA; note = element_efa15d6
  misc_feature 1..3: note = core
  misc_feature 4..201: note = LE
  misc_feature 202..1392: note = CDS
  misc_feature 1393..1522: note = RE
  misc_feature 3..221: note = bridgeRNA
cttatattatatttagtgcagttagctactgccaaagcccaagtgttatacttggaaaaagccactgtggattagtttctaccctccaatcgctttgacgatttcggaaaggctctaaccatagctttttgtttcaattggtaatgagtttgataacgcagcgacgttttatctcgtgtaaggtaacaagacaaaaagttcgtggataaccaagtgcgcttgaataacctatatggaggtacacatatgattttcgttggcattgatgtcgctaaaaacaaacacgatgtagctgtcttaaacgacaaaggaaaacttattcttaaaccactcactttctcaaatactagagctggttttaacttgttcataaataccctcagtcagttaaaacaagactatctcatcgcacttgaagatacaggacattatgcctttaatcttttagattttcttcatgaacatggagcaactgtctatacctacaaccctctactcatcaaggaattcgccaagtcattatcacttcgtaaaaccaagacagacaagaaggacgcccgtaccattgcccttaagctactatccgaccctaatcgggaacagtttcgtcatgataatagaaaagaagaactgaaaattctaacgagacacattcaccgtctcaagaagaagcagtctgattggaaagtacaatacactcggtgtttggacatcatcttccctgagatagataaaatcattggaaagcattctgactacgcctatgaactcctatcacactatcccagccctcagaaaatgagtgaggctggatttgagaagcttctagaaatcaaacgattaacaatgccaaaaatacaagatattctcaaggtcgctccaaactctatcggaacaacttcagaagctcgggagttcgaactcatcgaaatcattgaaaatatcaagcattacaaaagactcatctctaaagctgaaaacaaagtcgatgagctgatggctgagttcacctcggtcatcacaactgtggctggaattggaaatcgtcttggatctatcattttagcggaaattaggaatatccatacctttgacaaaccagcccaacttcaagcttttgcagggttagaaccatctatctaccaatctggacaactagatactcaaggtaaaatggtcaagcgtgggtctccacatcttcgatgggctttaatacaagctgccaaatcagtggctcgcttttcccctgcttttaaagcttacctaagaatcaagttagaccaaggaaaacattataacgtcgctgttgcccatgtcgctaaaaagctggtacgagtattgttccatcttctcaagaacaatactccctttgatgaaagcaaggtgagataaatacttaaaacacaatacttatccttgaaaaaatttcagttatttcaaggtgttttcgtcgtactctcaaataagaaaatcgaaacaaaaataaatttaaagtaaactattgacttttcttatagtttgt

SEQ ID NO: 9570 - DNA, 1530 bp, unidentified
  source 1..1530: mol_type = unassigned DNA; note = element_efabd76
  misc_feature 1..2: note = core
  misc_feature 3..75: note = LE
  misc_feature 76..1242: note = CDS
  misc_feature 1243..1530: note = RE
  misc_feature 1255..1462: note = bridgeRNA
agattccatggggaggtggatagcgaccggcgctctggcagagtgaggttgcgaccacccactctggagacggccatgcaagttagagctgatcgccccgaaacgccgggcgccatccataccgatcttggcgcgatttttatctctttggaactcagccgctcgacttggttgatcacgtcgcttttgccgggcggcggcggaaagatgtcgaagcacactctgcctgccggggacatcggtgcgctgctggcgcgctttttggaatttaagcagaaggcgttggcgcggactgggaaatcgttctcgatcatcgtcattcaagaggccggactggacggcttctggattcatcgggcgctggagaatgaagggattgagagccacgtcgtcgatccggcctcgattgcgacatcacgccggcggcgacgcgcgaagaccgacaggatcgacggtgaggcgctgcttcgcgcgctcttggcgtacaagcgcggcgaacctcgcgtgtgtgcaatggtcaaagcgccggctcccgaggaagaagaccgccgtcgactttgccgcgagcgcaaagtgctgatcgctgagcgggtcaagcacgtaaatcgcatcaaaggactgctgttttcccaaggcgtgttcggctacgagccgttgcgtcgtgatcgtcgggaacaactcgacttgctgagcacgggcgatggccgtcggcttccgctgcatctcaagactcagatatgccgtgaactcgatcggctcgaactgctgctcgagcaggtcaaggcggtggaggccgagcgggacgcgctgctaatcccacaaggagtcggcgcgccagaaccggccgcgatgttgctcgccatcaagggcatcgggcccgagttcgctgccgtcctctgggcggaagggctgttccgacacttcgacaatcgccgccaggtcgctgcttacgcgggtttggcgccgacgccctggcaaagcggatcagtggatcgcgagcagggcgtttctaaatcgggcaacccacggctgcgaacaacgcttatccaactcgcctggctttggctgcgccatcagccgcaatcggccttggctctgtggttcgaagaacgagtcaagcacaacggcggtcgtctgaagaagacaaccatcgtggcgctggcgcgaaagctactggtggcgttgtggaaatatgtgacggccggcgtcgtcatcgatggagccgtgatgaaggccgcctgacaaggaacattgaccgaatccgcctattgcggatccaggtagacgaaccgcactttcgcatggcttgaaaagccgctttcaagaatggtttcgtcttcctgagcccaggcccgccgcaagcgggatcttggtgcagccgtcgcgaacggcgaccgaatgtgaggttgatcgtgctcggaaacgggcagcgtcatgcagtcgggctcagaccttggataccgaaacagccactggagttttattcatgcgccattgacgcagcccacttgacccgaacttccccatgtg

SEQ ID NO: 9571 - DNA, 1419 bp, unidentified
  source 1..1419: mol_type = unassigned DNA; note = element_efafc15
  misc_feature 1: note = core
  misc_feature 2..65: note = LE
  misc_feature 66..1100: note = CDS
  misc_feature 1101..1419: note = RE
  misc_feature 1187..1410: note = bridgeRNA
taatgagatggtccgccgccgaataggataacggcgcggtagtttacatcaggaggatcatcacaatgcatatcgcatctattggcatcgatctgggcaagaccacctttcacctggttgcattgggagagcgtaacaaggttctggttcgcaagaagttctcacgtgcgcagctattggcctataccgcgaacctgccttcatcgctcatcggccttgaagcctgtgcgggagcgcacttcatgggggccgcattacgagaacaagggcacgaagtgcgactcatccccgcccagttcgtcaaaccctaccgcaaatcaaacaagaacgacttcatcgatgccgaatccatcgccgaagcggtcacgaaagagaatatgcggtttgtgcagatcaaaacccaggagcagctcgatgtgcaagccatgcaccgcgttcgggatcgactggtgcagcgtcgcacggcactcatcaacgagattggtggattcttgctggaacgcggcatcaccttcgcggcccagcccatatacctccgcaagaacctacccacagtgattgaagatgccgagcagaacctgagcccgcgcctgcgctggctgctccagcgcatgtggcaggagtggaaacaggtggagatcgacatcaaagcgatgacggacgaaatcgagcgcatcagcaatgagaatgcgctttgccggcgcctacgccagatccccggtttcggcccgctggtctccaccgcaaccgtggccgccatcggcaacggggctgcctttcgccggggacgcgacttcgccgcctgggttggcgtggtgccacggcagtactccaccgggggcaagcagaagctgttcggcatcagcaagcgtggcaacgtctatctgcgtcgcatgctgatccacggtgcccgcgcggtactgcttcgcgtcaagtacgacaccgaagggttcgggcagtgggtgcaccggctggcccagcgtgctccgcgcaacaaagttgttgtcgcaatcgccaacaaactagctcgcatcgcctgggccgtgctgtccagtggcaaggactatcaacaccagccgctgcagatcaccgcagcctgatgctggccgtggaaaagacgctgcgcttggaaagcacaaaacgctttccactttcccaccgccacgacgacgaagattgaaggaagttccaccaaggtctgctgaggagagaaggagacgaaagaacagtcaaacggcgtgccggaaaacctggtgttgataatgcgtccttagtgaccgagcgatttataaggaccgacacgcgcgaatcatcattaagtgcccggagagcgattctccactaagaggccggatacatttacgcagactgtctcttcgccaacctcaaacctcttgcagtccggcggcggaccataca

SEQ ID NO: 9572 - DNA, 1344 bp, unidentified
  source 1..1344: mol_type = unassigned DNA; note = element_efbaba7
  misc_feature 1..2: note = core
  misc_feature 3..81: note = LE
  misc_feature 82..1092: note = CDS
  misc_feature 1093..1344: note = RE
  misc_feature 1085..1331: note = bridgeRNA
tgttggggtggacggccccctacggcatcgaatgtgccaggctgtgattgtgtaacaacgcagccaaggggagccgtccgaatgacgattatcaggattggattggacacgtccaaacatgtctttcagattcatggggttggcgagaacgagaagccggtgttgcggcggcagctgcggcgcagcgaggtggaaaaattctttgccaagctgccgccgacacgaatcggcatcgaggcgtgcggcgcctcgcatcactgggcgcggctgttgcgcggcttggggcacgaggtagtgctgatgccgccgcaatacatcaaggcctacgtcaagcgcggcaagagcgacgcgattgatgccgcggcgatttgcgaagcgatgagccggccgacgatgcggtttgtgccggtcaaaaccgccgagcagcaagcggcgctggcgatgctcggggtgcgcgatctcttggtcaagcaacgcaccatgctgatcaatgcgatccgcggccacgcggcggagtttggcgtcacggtcgccaaaggaccccagcagatgcgcgagctgctgaggcgtttggcgaccggggaaggggtgccggtactggcgcgcgagatgctcggcgtgctggcgggccagctcgaggcgctgaacgccaaactgaaggcgatcgagacgcggctgatggcgtggcatcgccaggatcagaccagccagtgcctggcgacggcccccggcatcgggccgatcggcggcgtcagctttacgctcaaggtgccggacgcaaaagcctttcgctcgggccggcactttgccgcctgggtcggcatcacgccgcgcgagaattccacggcgggcaaacaccggcccggcaagatcagccgcgagggtgacgagagcctgcgccggctgctcgtgctcggcgccaccgcggtcatccagcaggccaagagcggccgcgccgcgccgtggctcttgggattgctggcacgcaagccaaagaagctggtggcggtcgcgctggccaacaagatggcccgcatcatctgggccatgatggtgagcggcgagacctaccggcgtccacaggaggcctgagcccgccggccaccgacacctggcgcgagcaaggacagcgacagcaagatggcaatcggtcgatccgaggatcgggacaacccggggaacccattggtgctcagacatcacgttcatgtttgggacccgatccgcgcaacccatctgggccagcggtcaaaccgaccgcactgcaaaggccggacatatgaccgcaaccgaccagacccgtcacagctgccaacaccttgcaagccgggggccgtccacata

SEQ ID NO: 9573 - DNA, 1356 bp, unidentified
  source 1..1356: mol_type = unassigned DNA; note = element_efbc462
  misc_feature 1..2: note = core
  misc_feature 3..68: note = LE
  misc_feature 69..1091: note = CDS
  misc_feature 1092..1356: note = RE
  misc_feature 1120..1342: note = bridgeRNA
tgatgacgtggacggctctccaccccttccgcaggatggtctgcggatgagccggaaggagagccatgatggggaacgtcacgacgattggtttggacctcgcgaagagcgtgttccaggtgcacggtgttgatgcggatggcgaggcggtgcttcgccagcggctgacgcgagggcggatgctgaagttcttcgcgaagctgccacggtgcctggtgggcatcgaggcatgtgcgtcgtcgcatttctgggcgcgcgagcttgtggcgctggggcacgacgtgaagctgatgccggcgcaatatgtgaagccgtacgtcaagcgcagcaagaacgatgctgccgatgccgaggcgatctgtgaggcggtgacgcggccgacgatggggttcgtcgggatcaagtcgccggagcagcaaagtgcgatgatgctgcatcgtgtgcgactgatcctcagtcgccagcggacccagctctcgaacgcgctacgcgcgcatctggccgagttcggcatcgtcgcgccgatcggccgcaacgggattgatcggctgcttggcgttgttgccgatgcgaccgatgaccgggtgccgaccacggcgcggatctgcctggagatgctggttgcccaactgagcatcgtgaaggagcagatcctggcgaacgatcgcaggatcatggcgagcgcgcgggagaccgagcttggccggcgcctgatggagataccaggcgttgggccgctacttgccagtgcagtcgtggcgagcgtgcctgatccagcggtgttccgctcggggcgcgatctctcggcatggatcgggctcgtgcctcgacaaaactccagcggcggcaaggagcggctcggcagcatatccaaggctggccacggctatctgcgccagatgctcatcgtcggcgcgatggcggtcgtgcgctatgccgaacgcaacggaacgaagcgcccttggctggtgcagctcctggcacgtcgtaaggccaaggtcgctgcggtcgcgctcgcgaacaagactgcgcgaacgatctgggcgatgatgaacagcggcgagcgctaccgcgagccgcagaccgcttgaagaatacggcacgggcaaccgcgctgcacgatgttggaaagggcggatacgagctgatgcacaaagccggttgaaaccgccggatcgggaaaacccactacgacccaagcacctcaagtgcgagcaattgatcgggacccgagacgcgcgaatggcatcaagaccagcggcactatacgccgcaccaacaggtcggacacatggccgcaccaaccagcaatgcgaagctcacaacgccacttgccaacggagggccgtccacaca

SEQ ID NO: 9574 - DNA, 1439 bp, unidentified
  source 1..1439: mol_type = unassigned DNA; note = element_efbe2e2
  misc_feature 1: note = core
  misc_feature 2..76: note = LE
  misc_feature 77..1114: note = CDS
  misc_feature 1115..1439: note = RE
  misc_feature 1216..1433: note = bridgeRNA
taatgggatggtccgccgcttttacccagccaaccagcagctgaggtataaaaagcgtacggaggaggcacgtcccatggagctatccacagtcggtatcgatcttgcaaagacagtttttcatctcgtcggtcttaacctgctcggtgaagttgtggtgcgcaagaaggtttcgcgtgcacagctgttgcgtttcaccgcaaacctgagcgtcaaactgattgggatggaagcctgcggcggagctcattttctagggcgggcactgcgcgaccaggggcacgaagtgcgattgatgccagcgcagtatgtgaagccatacgtcaaaacaaacaagaacgactacatcgatgccgaagcgatcgccgaggcggtttcgcgtccgaggatgcgcttcgttccgatcaagactgatgatcagttagatatgcagtcgctgcaccgggtgcgtgaacgttgggtagtgcggcgtacagccatagtcaatcaggttcgcggattactcctcgaacgtggaataacgttgcagaaggggcggtcacatgtggatgcattgttgccccgaatcctggaggatgccgatttaaagttatccggtgcactccgcaatctgttggcgcagttgaagctggaactcgatcaaatggcgatgcggattaatgaggccgatatgatgctcaacaggactgcacgtgaaaacgcaagctgccgacggctggtggcgattcccggcatcgggccagtcacggcaaccgcacttatcgcggccatcggcaacggagcagccttccgaaaggggcgagagtttgccgcttggatgggggtagttcccggcgaatactcaaccggtggaaagcagaagctgctcggcatcagcaaacgcggtaactcctacctacgaaggctcttcatacaaggtgcgcgcgcagtcttacaacaaagcacgaagcaaacgtccggtttgagtgcgtggctagcgaacctaaaagctcgcacacacaccaacgtcgctgccgttgcgttagccaacaagctggcccgcatggcttgggccgtgctcgcgaaggatgagccatatcggcctccgatgttggctaatctggtgacggtttgactggcctgcagatgacgcctggctgaagccaggcttggaaatcgcatgcgcgattcccacatccgcaacccagcgactactacggaatatacgattcttgccaaggtctgctggcgaacaatgtgatggcttaacggtcgaacccggcgttctcaaaacctgaaaaacaaagcagtcttcatgagactgaggcggttattgaggagagagagcagcgcattccatcaaggcccggaataacacactccaataaaggccgtatacatttgcgcagaccaacctgtcaccatcatttttcgcttgcgacaaagcggcggaccataca

SEQ ID NO: 9575 - DNA, 1540 bp, unidentified
  source 1..1540: mol_type = unassigned DNA; note = element_efca7b4
  misc_feature 1: note = core
  misc_feature 2..226: note = LE
  misc_feature 227..1261: note = CDS
  misc_feature 1262..1540: note = RE
  misc_feature 13..241: note = bridgeRNA
ctacttgttgtatggaggtacggctcgggcctggccaggcttgggtcgaggtgtccggcgggtcgctctctcatcggctgcccgcggctggttggcgtggctctctcatggcgtgcgcaccgccgggcactgtgacgaggtgaggctcaagaggggtctgcccagctcgaagtagcgctgccctcctcgtcgacatcagccggtttcgagggtgaggagagtaccgatgggacgtgtggtgattgggatggacccgcataagcggtctgccacgatagaggtcctcgatgagcgggagaaggtcatatcgaccggccggttcggcaccgaccgtgatggctaccgcaatctgctggccgctgggcggaggtggccggagcgagtctgggcggtcgaaggatgccagggcgtcggccggcatctcgcgcagcgcctggtcgccgacaacgagcctgtcctggacgtgccagccaagttgtctgcgcgtgttcgagtgttctccaccgggcagggacgcaagaccgatgccaccgacgcgcattccatcgcggtcgtggcgctgcgcacccccggtctgcgggccgtgcaggtcgatgacgccaccgtcgcgctgcgcctgctggtcgaccgccgtgacgagctgggcgcagcccgcacgttgacggtgaaccggctgcaccgactgctggccgagctgatcccgggtgcggcgaagacgttcctgtcagcgatgcaggcgaaggcgctgttggcgaccgtgcgaccccgtgatgtcgtgggcaagacgcgccgcaagctggccgccgagctcatcgtcgagctcgaaggaatcgaccggaagatcaaggttgccaccaaagagctccgcgagcttgtcgccgccaccggcagcaccctgctcgagctcaacggcatcggcccctcgggcgcggcacggctgctcggagacatcggcgacgtgtcccgcttccccacccgcgggcacttcgcctcctggaacggcaccgccccgatcgacgcctcctccggggagcagaaccgccaccggctctcccgggcaggcaaccggcggatcaaccggctcctgcacatcatggcgatcgtccaactgcgcaagacaccgaaggccgtgcctactatcggcgcaagctcgccgccggcaagaccccgatggaagctatccgcgccctcaaacgccggctgtccgacatcgtctaccgccagctcgtcaccgaccagaagcggctgcggcagaaagtgaacgagacggacccgggaggacaagcgggggcggctactggctccagcgcggccgactccaaccccaacgtcgacgcttcggagaagtcacttcccgggcccgccggcttcgaggctacgcccgcagctaccgctggcccagaccgttcttcgtcccgttcccgacgccctgtcacagcgccgacccgcagcggtcgtctagcgcagtttgcttgacgaccgtgaggaccggtgcaccatcgacaggcgggaacgggacgcccttgacacagaggggagc

SEQ ID NO: 9576 - DNA, 1469 bp, unidentified
  source 1..1469: mol_type = unassigned DNA; note = element_efd0c4e
  misc_feature 1..2: note = core
  misc_feature 3..230: note = LE
  misc_feature 231..1448: note = CDS
  misc_feature 1449..1469: note = RE
  misc_feature 7..232: note = bridgeRNA
ctaatgggggtcgaccatctcgttcgctttgcgggtgaggctggttccgagccgtcggcgggtcagcactcgcgggaccagggcgttgagccctacgtctagatcgtgcgcctgctggtcggtggggtcgaccgcggatggctgctgggatgacgtgcttcgagcactgaaccattaggacgctgctggtcgcctccggctctgatgttccggacgacgaggagggtgcgatggcgagggtgttcgttggtcatgactgggccgaggcccatcacgacgtgcacgttgaggacgagacgggccggaagctcgcggctgctcgtctgcccgagggcatcgagggggtgcgccgcttccacgagctggttgccgctcatgccgaggagcccgatgaggtgacggtggcgaccgagaccgaccgtggcctgttcgtcgggtcgctcgtcgcggcgggctatcgggtgttggcggtgaacccgatgtcgacgtctcgctatcgggagcggcactcgacgtcaggtgcgaagtccgacccgggtgatgccaatgtcctcgccgagctcgctcgactcgacggccacaaccatcgcccgatcgccggggacagcgatcttgccgaggcagtgaagatgctggcccgggcgcatcactcgatgatctggtcccgacaacggcagcagaaccagctccgatccacgctccgggagttcttcccggccgcgctcgccgcgttcgacgacctgtcatccggcgacgcgctggcggtgctcgccatggcgccgaccccggcgcagagccgatccttgtcacgttcgaagatcgcggctgcgctcaggcgtggtggccgccaacgacgcatcgatgaacgagccgccgagatccaggccacgcttcgctccgaccagctcgaagcgccctcgatcgtcgctgacgcgatgggggcgtcggtcgctgcactcgtcgccgtgatcgccgagctcgtcgcccagacggccaacctcgagcgggagctcgaagaccgttttgagcagcacccggacgccaagatcatccgttccctgccaggactggggatggtcttgggcgcccgggcgctgggcgagttcggggacgacccgaaccgctatgccgacgccaagtctcgcaagaacagcgccggcacgtcgcccatcacccgggcgtccggcaaacagcgggtcgtgctcgcccgctacgcacgcaaccgccacctcgccgacctctgccgcatgtgggccttcgccgccatcaccgccagcccgggcgcacgagccttctacgacgaacgacgagcagcaggcgacacccacaaccgcgccctacgagccctcgccaaccgcctcgtcgggatcctccacggctgcctccgacacggcaccacctacgacgagcacaccgcctgggcacaccgcgcccaactagccgcttgacgagatcgacccctgggatgt

SEQ ID NO: 9577 - DNA, 1346 bp, unidentified
  source 1..1346: mol_type = unassigned DNA; note = element_efd2047
  misc_feature 1: note = core
  misc_feature 2..69: note = LE
  misc_feature 70..1095: note = CDS
  misc_feature 1096..1346: note = RE
  misc_feature 1115..1343: note = bridgeRNA
taatgagatggtcacccccacacccaagagggctacgctctcgcagggttcatctcggaggccatcgccatgaacaacgttgcactggtgggtatcgatctcggcaagcacaacttccatctgcatggtcaggatggggcaggccgggcggtctttcgcaagaagctctcgcggctgcagatgatgcggctcttcggcaatctgccggcctgcacggtggtcatggaggcctgtgccggagcccacttcacggcgcgggagctcaacaagctcggacacgttgctaagctgatctcaccgcaatttgtcagaccgatcgtgaagagcaacaagaacgacttcgtggatgccgaggccatctgcgaggccgcgtgcagaccttccatgcgttttgtcgcacccaagaccgaggcacaacagacgctgtctgttttgcatcgtatgcgtgaagccttggtccgtgagcgcacgcaggccaccaaccaggcacatggtttcctgctggagttcggcatctgcctgcccaagggcctggcaaccatgaagcgactctcgagcactttgtcagagcactcgttgccgccgcaactaacgcagttgttgatgcgactgcatcagcgcttcctctacttggatcagcagctcaaggagctggagagtcagctggagactcaagtagtcgaggatgacttaggcagtcggttgctcagcatgccgggggtcggcccgatcacagccagcttgctggcggtcaagatgggagatggctggcaatacgccagtagccgcgacttttccgcatcactcgggctggtgccccggcagtacagcacaggcggtcgcaacactctgttgggcatcagcaagcggggtgacaagcacctcagacgtttgctggttcagtgcgctcgcgtctatctaatgcgacttgagcatcagcgtggggcattggcgacttgggcgcggggcttgctcattcgacgccactcgaacgtggtggcttgcgccctggcgaacaaactggcccgtattgcctgggcgattgccgttaagcacactcgatatgaagccgagccagacggcttgaccgcctgaccctactgactgagcagtacgacgaccttttccggttttgcgatagctgaacagacgatgacgtgaacggccaaccggcctgatgaagaacctgatgtaaaaactggctttcgaagccgccagcgttttcaggatcgtcaggcgcgactctcatcgaggcgcggagcttgctccaccaagacgccggatagatttaggcaagcctaacgctcatcgctgatcagtattgcaaaagtgggggtgaccataga

SEQ ID NO: 9578 - DNA, 1451 bp, unidentified
  source 1..1451: mol_type = unassigned DNA; note = element_efd2955
  misc_feature 1..2: note = core
  misc_feature 3..171: note = LE
  misc_feature 172..1200: note = CDS
  misc_feature 1201..1451: note = RE
  misc_feature 1236..1421: note = bridgeRNA
agatggagtaacgggcccggtctgccctccaagccagccgcgcttgctactgcgcgattgggtggcgcgcttcgcgcggctggcttggagggcgggcggtcgtccctcacatggatggtgtgacggagtcggagggattagccccgctccaagcatcgaggagagacgaccatggagcattatgcaggaatcgacgtgtcattggaatgctcaagcgtgtgcgttgtggatgcaagcggcaagattttgcgcgaggccaaggtggtcagcgagccgcaggccctgatcgcctggttccgttcatccggcttcgagcttgaacggatcgggctggaggctggaccgctgtcgcaatggctgtttgcggcgatgaaggcgggcggctttgcggtggagctgctggagacgcggcacgtgcgcaaggcgttcgaggcgatgccggtgaagtcggatcgcaacgatgcccgcgggattgcacatctgatgcggctgggctggttccggccggtgcactgcaaatcgatgagcgcgcaagagacacgatcgctgctgacggcgcggaagctggtgcaatcgaagcttcgcgacgtcgagaacagcctgcgcgggatcctgcgcggctttgggctgaaggttggcaaggcgacggaacgggagttcgcggcacggatcgaggaactggtggtgagccatccccaccttcaggtgatcgccaatgcgctgttggcggtgcgtgcggtgctgcggaaggagtttgcagctttcgagaagcaggtacgcaagctggcgcgatccgatgcacggacccggctgctgatgtcgaccccggcggtcggcccgatcgtggcgctcacctatgccagtgcgatcgacgatccgacccggttcaaatcgtcgaagcaggcaggagcccatttcgggttgaccccgaagaagcatcaatccggcgagactgactataccggccggatcagcaagatcggtgatgcgtcagtgcgcaccgcgctctacgaggccgcccacatcatgttgaccaagccgctcaagggctgttcgcaactgaagagctgggcgatgaggatcgcaaggcgcgccggcatgagcaaggccaaggtggcgctggcgcgccggctcgcggtgatcatgcaccgcatgctcgccgacgcaactcccttcaacgctgccgctgcggcggcctaacaggagacgcgcaacagttttcgggcgggtcacgacaccaggccttctcgaagcgaagtcccttcgccgggacgatggatcaggtcaggccgttgcccaccaggtcgcttcgtgagcacgcgaacgtagattggtcgacctatcctcttccaaccccatcaggtggcggccttgcgccgaccccgtacagaagcgagaccccggcaagcggacaacgcaaaagggattgactaatcgaggcccgttacaga

SEQ ID NO: 9579 - DNA, 1336 bp, unidentified
  source 1..1336: mol_type = unassigned DNA; note = element_efd64e0
  misc_feature 1..2: note = core
  misc_feature 3..73: note = LE
  misc_feature 74..1105: note = CDS
  misc_feature 1106..1336: note = RE
  misc_feature 1120..1324: note = bridgeRNA
cgtgatgtatggaatccactccctccttagcaatctagacttaggagtgtgagaaaaaaccgagggttccaatatgttgactaaaaatgttatcgctatcgacttagcaaaaaatgttcttcaagcctgccatatcagcattcatggtgagctaatgtccaataaacctctgagtcgccagaagatgaaagagttcttggcaaaggctaagccttcgattgtcgccatggaaggttgttgcggttgccattactgggggcaattagcagaaaaacttgggcatgaagtccgaatcattaaccctaagaaggtgaaaggatacctagaaggtcataaaacggatcataatgatgctctcgccatcgctaacgccgctatacaaattggtatcaagtacagtcgtccaaagtcattggaacaacaagctatgcattctttagaaactagccgtagattcttatctcgtagtgttgtttccctagctcttcacattagagggacaattttgggctacgggatagcaaaccctagaggtgaaaaaggcttaaaagcgtcggttcaaaccgtgcttgatggcgatacaccaataccctccaatgtcgtatccgttctgtcgatgctttgggagcaatataaagaacttaaagcaaaactcatcgcattcgaaaaagagaaaaatgctttaacccgtcagatagagccgtgccaacgattaatgggcattgaaggggttggtgaaacaactgctgcgatgctctatacaactcttggtgatggaaagcagttcaagaatggaagacaagcttcagcatttgttggtcttacacctaaacagcacagttcaggaggcaaagtttttatgattgggatcgataaatgcggtggtgtgaaggagctacgctcgcttctttatcttggcgcaatgtcatacgttgggcgactacccgaaaaaccgaagactcagaaggacgcttggttgaggagcatcatagatcgtatcggcttcaagaaggcctgcattgcactggctaacaaagtggtacgtactgcgtgggcaatgcttcggtatgagactgaatataaaccagtattactcactcattaatcactaccaaatttttaaattttacaaaatgatgatgcataaaaggtaagaccaacctactgagaacctggccattctgtcatgctgtaaaaagctgctagcgcgataaggacagtaggtgcgcaaaacatcaaaggctagagggtagctccttcaataagaagccgaatatacgaccgcatcttaacttttattgccaaaatcactttgtaaatacgtggattccatata

SEQ ID NO: 9580 - DNA, 1139 bp, unidentified
  source 1..1139: mol_type = unassigned DNA; note = element_efdb680
  misc_feature 1..2: note = core
  misc_feature 3..171: note = LE
  misc_feature 172..1131: note = CDS
  misc_feature 1132..1139: note = RE
  misc_feature 1..181: note = bridgeRNA
cctgtatctgcgaggtgctggtgcatagtcagcacgacggaggccgctcggtggattcccggccgatcatctcgccgtaacccggtgcgggcgcctctgtcggtgttgcttgatcgaacagtcgcacgggcattgccgttgcggtgatcgcccgcatacaggaccgatcccatgacgattgcagtgccgcttgcggttgcggccggcgtcgatgccggccaacgtttcctcgatgtcgcgctggctccgtcgggccagaccttccggatgcctaatctggccgagggcatcgccgagatcatcgcccgcctcgaacgctccggcgtcaggcgggtggttctggaggcgatcggcccctgtgccgaaccgctggtcaaagcgctttcggtcgccggcttcgaagtcggtatcgtcaatccgcgccggatcaaggcgttccgcgaggccgaaggcagtcgcgccaagaccgacaggctagacgcgcggctgattgcgcgcttcgctctgactatgcccgagaccctgcgccccctgccgaccgacacccaactcgagctgaaggcgttgtcgctgcgacgccgccagctcaccgagatgatcgcgatggagaagacccggatgaagcaggtccgcggcacgctcctgctcgatagtcatcgggccgcgatcgccgcgttgtcggcgcagtgccaagccatcgaggccgaactcgccaagcgcatcggcgacgacgccgaactccgccgcgtccttcacatcctcaaatcgatccccggcatcggcgaacgggtggctacgctcctcattaccgacctccccgaactcggccagcgcgatcgcaaggccatcgccagcctcgcagggctcgcgccccacgtcagccaatccggcgcagcgccacctcgcgccgccatcgccggcgggcgtccttgcgttcgggccgcgctctacatggccgccctggtcgccgcccgccaccaccccaagctccgcgacgactacaacgcccttcgcctgcaaggaaaacccggaaaggtcgcgctcatcgcaatcgcccgaaaactgctcgtcacagccaacgcactcgtcaaagccgacacgccatatcaaggtaagacccttgacacatgagacagtcg

SEQ ID NO: 9581 - DNA, 1656 bp, unidentified
  source 1..1656: mol_type = unassigned DNA; note = element_efe2eab
  misc_feature 1: note = core
  misc_feature 2..274: note = LE
  misc_feature 275..1525: note = CDS
  misc_feature 1526..1656: note = RE
  misc_feature 13..294: note = bridgeRNA
cctgttactatatatttgccccttgatttatggcaaccagccataggcatgggacatctcgttgcctaagctgttagaatgggaaggtaatggtctgaccttcacctccaagggctttcatgtccgtcagaaagtcagtcagccatcctctcattcgcagcgttcgatttgtgcaggtagagcctgagtgttcgtgtcagcaaacagatagaatcggcaatgggtaaagatggcttctgtccattgcataatatttctatcaggagagatgagcatgaacgcagcaggaattgatatttccagtagaaagagcaccgtcgcagttctccgtccctttggtgaggtcgttgaagtaccctttgatgtgcagcacaacgccgaggctctgacagctcttgcagagcagttgaagtccattgacggcgaaacacgggtagtcatggagcacaccggacgctactatgagagcgtagccaagactctccatgaagccggacttttcgtttcagcagtcaaccctttgctcatcaaggaatacggcaacaactccctccgcagggtcaagaccgacaaggcagacgccatgaagatcgccagatacgctcttgacaactgggtggaattaagagactatactcctatggacacgattcgatatgacctgaaaactctgaaccgtcagttccagttggcctccaagcagaaaactgctaccgcaaacaatctgattgccctccaggaacagtcttttcccggtatacgcaagctctttgacagccctgtacgcagcgatggcacgcagaagtgggtggatttcacccatgacttctatcatgttgactgtgtccgtagtggcagccagaataccttcacagaacgttaccgcaagtggtgcaaacgcaaccactacaacttcaatgcaggaaaagccgccgagatctacgctctggcaaagtctgctgttgtattggtacagaaaacacctcttacaaaaacgcttctacaggaagctgccaaccaacttacggcaatctctcgttctgtggaaacctaccgcagcgagatgaataagcttgcatcccagttgccggaatatccggtcatcatggagatgtacggtgttggggaatctctcggcccgcagctcatggctgagattggggatgtgcgccgttttgagcgcaagcagtctctcgttgcctttgccggcattgaccccatgccgaaccagtccggcgaaaagaatgttcgcagcaacaaatcctcaaagcgtggctctccctatttgcgaaagaccttatttaacatcatgggaatctacctgaaatgctcgccacaggatgagcctgtataccagttccttgatcgtaagcgagccgaaggaaaaccttactatgtctacatgactgctgctggaaacaagttcctgcgacggtattacgccacagttatgaactactttgccaccttggagaatctgccgcctgtggacacggattctaccggcttacagcacacggagtaaccaactgttatctgacctcttaggtcggcgcttttgcggcggcttttttgtcttaccctttttctctacctgctgactgcaaaattttcttccgtcaagtcctgtttcgggcttgactttttatttgcagg

SEQ ID NO: 9582 - DNA, 1361 bp, unidentified
  source 1..1361: mol_type = unassigned DNA; note = element_efeae75
  misc_feature 1..4: note = core
  misc_feature 5..83: note = LE
  misc_feature 84..1106: note = CDS
  misc_feature 1107..1361: note = RE
  misc_feature 1085..1349: note = bridgeRNA
atgatggggtggatggcccccttgcggcatctaggtgccaaaatgctggtggtcagagaccacgagcgaacagggagccatccatgggcgagattacgacagttggattggatttggcgaagaatgtttttcaagtgcacggggtcgatgcagagggaatgacggttctgcgcaagcagcttcggcgagcgcaggtgctggtgttcttcagccgattgccgcgctgtctggttgggttggaagcgtgcgcgacatcgcactactgggcgcgggagctgcgtgcgctcggccatgaggtacggctgatgccggcgcaatacgtgaaagcctatgtgaagaggaacaagaatgatgccgcggatgcggaagccatctgcgaggccgttgttcggccgagcatgcgtttcgtgccggtcaaaacggctgaacagcagtctgctgtgctgttgcaccgaggccgagaacgcctggtgcgccagcgcacgatgctggtgaacgccctgcgcgcgcatctcgctgaatttggtgtgatcggggcgcagggcttacgcaatgttggcaagttgatcaccgtcatccgcgatgaggaagacgcccgtctgccggatatggcgcgtcgggtgctgcaagtgctggccgtgcagattgagcagaccgaagcagcaattgcggtgctcgagaagcaactgatggattggcacaagagcaaccctcttagtcagcgcctcgcgacaattccgggcattgggccaattatcggcacggccattgccgcgatggtggcagagccaagcggcttccgcagtggccgtgagttcgcagcttggctgggtttagtgccgcggcaaaactcgacaggcggcaaaaaccggctaggcgggatatcgaagcgcggcaatcaatatttgcgacgactgctaatcaacggggccagcgccaatctgctacgctccaaggctaccaatgctgatccatgggtgatcggcttgcgacggcggcggccgagtatggtcgtagcggtcgcgctggcgaataagacagcacgcatcgcctgggcagtgatgcaccggaatgaggattaccggcgcatggcagtggcggcttaggccgacgaggctacgctctggagcttgcgagagagcaatgacgcgtgatggtacagtcggtcgatccgacgcaaccgagacaaacctggcgcttcatcgggacatcgatcccgttagaatgatgaggactcggttcgcggaccccatcagggccagcagtctattcgggctgcatcaacaggccggacacatgactgcaagcgatcgctgtggcgcgcgtcaaaatatctcttgccaggcgggggccatccacac

SEQ ID NO: 9583 - DNA, 1586 bp, unidentified
  source 1..1586: mol_type = unassigned DNA; note = element_eff4ef5
  misc_feature 1: note = core
  misc_feature 2..79: note = LE
  misc_feature 80..1150: note = CDS
  misc_feature 1151..1586: note = RE
  misc_feature 1349..1577: note = bridgeRNA
taatgggatggtccggccgtgctccagccccgccagtgacagaagctggctcgggggcagcgaagacaaggagcacgccatgtctcagaaatctagcagcgcaatcgccgtggttggcatcgatatcggcaagaactcattccacgtcgtgggacacgatcgccgtggtgcgatcgtgctgcggcagaaatggtcgcgtggccaggtcgacgcgcgacttgccaacctgccaccgtgcctggtcggcatggaggcttgcgtcggcgcacatcatctcagccgcaagctgcagctactcggccacaatgctcggctgatgccagccaaatacgtgcggccgtattcgaagggacagaagaacgacttccgcgatgcggaggcgattgccgaggcggtgcaacgcccgaccatgaagttcgttgcgaccaagaccgcggaccaacttgacctgcaggccctgcaccgcgtccgcgagcgcttggtcagtcagcgtaccggcatcatcaatcagatccgcgccttcctgctggagcgaggcgttgcggtgcggcaagggttgcgtttcctgcggtccgagttgccggggatcctcgcaacgtgcaccgatgtgctctcgcctcgcattgtgcgcatcctcgaagatctgtcagcagactggcgccacctggatgcacgcatcgaaggcctctccggcgagattgaaacgctcgcccatcaggatcagcactgcgagcggctgatgacggtgcccggcatcggtccgatcatctcgagcgcgatggtggccgcgatcggcaccggagaggtgttctccaaaggccgtgacttcggcgcctggctcgggctggtaccgaaacaaatctcgacgggagaccggactatcctcggcagcatatcaaggcgaggcaatcgctatctgcgcactctgttcgttcaggcagcctgggtcgtgctggtcaagctcggaccaaaacattgggagcgctatgggctcaaatcctggatcgaggcggcgaagaagcgactgcaccacaacgtgcttgccattgcgctggccaacaagctcgcccgcatcgcttgggtggttctccacaaggggcgcgccttcacgtgcgacaagaccgatgcgatggcgtcccgtccagcgtaaccctcgcgccgtgctcggtcccgtcaaggcgtggcctggcatcacgacgcaagaggcgaggcctgcgcgacggccagccttgacaagacattccgcgcggcgcgtctccacgcgcgcaggccgggacgaaggaacggccgccaggcacgaacaaaggaacagcacaaatgaggagctatcgatgatgtagtttagtctgcccgccgaggtctgcgagaggatgagacgacgatggaggatcggtcttcccggcgcatgcgaacactggtggcccgaatggcccggtcgaggcctgtcgcatgataagatcgcatgcgcgctgatatccatgatggcccggagcacaacgcgctccaagcagaggccggatacattgatgcaagaccacatctgccaggttgacgaaacctcttgcaacgcacggccggaccataca

SEQ ID NO: 9584 - DNA, 1595 bp, unidentified
  source 1..1595: mol_type = unassigned DNA; note = element_eff7310
  misc_feature 1: note = core
  misc_feature 2..341: note = LE
  misc_feature 342..1448: note = CDS
  misc_feature 1449..1595: note = RE
  misc_feature 41..295: note = bridgeRNA
cattacgttgttagcagttccaccccagggcaccgaagatacatagccagtccacccgagtgaacgggctatgtttatgtccgttcccgccatccgaaaggacagtggaactagtcgctggcttcggtatggcttattcctgtccctgtctgaaaatgatccggggggtgatgtcgccgaaggcagtgacatactcaaacagctcaataggaacctgacccagcccaggcggcatgaggtctcacagtaatgtggatgccagcacgaagtatgtccgaccaaccccagcgatgaaacctaaataatccaacttctcattcatcgctaggaggcacacactcatggcctatgactgcgtcattggcatggacgtcggcaaatacttccaccacgcctgcgtcctcgatccccaaggcagacaagtcctatcccaacgcatcaaccagcatgaagggtcgctgcgtaaactgttcggcacttacctcgccgacaacgcctcagtccttgtcgtcgtcgatcagcccaacaacatcggcaggctcaccgtcacagtcgcccaagcaatcggagccgacgttcactacctccccggccttgccatgcggcagctatcacgcatccacgtcggcaactccaagaccgatgtacgcgacgcctacgtcatcacccatgcctacacacgcctaatcaaccagatgcgatccgcactcgtagaaacccaccccgcattcgaacatgtcctgcatggacagatgattcaccgcaagtggatcctccacctacttgcgaaatacggtggccccaccaagattcgacgcgtcggcaaagcacgcctggcagccttcgcacgcagtcacagggcacgcaatcctgagcccgtcatcgatgccatgcttgcggccatccacagccagaccgtgaccatcgccggcgcagaatacgccgaacttggcgtagcaatgtccgccaaagatgcactagccaagctagaacatcgtaaggaaatcgaggcccaagtactcgagctcattcaggacattcctcaaaccgagattcttttgtccatgcccggcatcggcccgcgtagtgccgcacagatcctcatgactgttggcgatatgtccgacttcccagatgcagcacacctagcatcctatgcaggcctgtcgccgcggaccaatcagtcgggaacgtccattatgtcgaattcgcccaaccgggctggcaacaaaaaattgaagaacgccctatggcaatcgtcttgtgcatcgattagattccacgagcgttcccggcaattctatgaacgaaaacgcaaagaaggcaaaagacacaacgccgcagtcgttgcactcgcacgccgacgtcttaacgttctcttcgccatgatgcgtagcggcgagctctaccgagacatctccacagtccaggaggccgcagcagcctagagcaaacagaacctcgccttaaaccgattgcgcaggccgcccagtcggctcctcagcgtgcccgaaaacaacatcgccgaagtaaaacagaaacccttcacacccccaacagtctcacccacggagttgacaacctatataggaaca

SEQ ID NO: 9585 - DNA, 1455 bp, unidentified
  source 1..1455: mol_type = unassigned DNA; note = element_eff9974
  misc_feature 1: note = core
  misc_feature 2..237: note = LE
  misc_feature 238..1440: note = CDS
  misc_feature 1441..1455: note = RE
  misc_feature 12..236: note = bridgeRNA
ccccattaccgtcttgttggccccgcaacggggtcgcccggccttcggagttggcatgactttctccccctgtcgagtcaatggctcggggggtggtgtcaccggctccggaggcatcgacagaccgctgattaggggcatgaccaccggcttcttcgcgggtcgggaggctttcgtaatgcggatgtggcgatcggtgccgtgggacggccgggcgaggacgaccggaggacgagcgtgatcgacgtcagtggcaccggcgccttcctcggcctggacgtcggcaagggcgaacaccacgccaccgccgtcaccccggccgggaagaaggccttcgacaagcgactgcccgacagcgaacccaagctccgcgaggtcttcgggaaactgcaggccaagcacggaacggtgctggtcgtggttgaccagccggcctccatcggagccctgcctctggcgatggcccgggacatggggtgcccggtcgcccatctgcccggtctgacgatgcggcggatcgctgatctctatccgggcgaggccaagaccgatgcccgcgacgcgttcgtcatcgccgatgccgcccgcgtcatgccgcacacgctccgatcggtcgatcttgaggacgaaaccatcgccgagctggagatgatcgtccgcttcgacaacgatctgaccggcgacgccacccgcatcagcaaccgcctgcgtggcctgctgacgcagatccatccgtcgctggaacgcgtctatgggccgcgagtgcagcacccggccgtgctcaagctcctcgaccagttcgggtcccccgcccagatacgcaaggccgggcggcgtcggctcgtgacgccgacccgtccgaaggcaccgcggatggccgagcgtctcgtcgatgacatcttcaccgagctggacaagcagaccgtcgtcgttccgtgcacggacgcggcagcactgatcgtccccagccttgccagcgcgctccaggcagtgcttgaccagcggaaactcctcgccgcacggatcgaggaactgctggagaaccaccctccttccaaggtcctgacgtccatgccggggatcggcgtcaggatcggagccaggatcctcatcgatgtcggcgacggccgttggtttccgtccgcggcacaccttgccgcatacgccggccttgcctcagcaacccgcagctcgggctcgtcaaaccgtggcgagcaaccatcccggaaaggaaacaagcagctcgaacgggctttcttcctctccgcgttcgcggccctggccgactcggtctccagggcctactacgacaagaagatcagccagggcaagcaccacacccaagctctcctctgcctcgcaagacgacgagccgacgtgctcttcgcggtgctccgcgacggcaccttttacgagccccaacccgccccttcagcttgaccaaacccatagggg

SEQ ID NO: 9586 - DNA, 1386 bp, unidentified
  source 1..1386: mol_type = unassigned DNA; note = element_effeb0b
  misc_feature 1..2: note = core
  misc_feature 3..84: note = LE
  misc_feature 85..1113: note = CDS
  misc_feature 1114..1386: note = RE
  misc_feature 1087..1373: note = bridgeRNA
tgatggcgtggatgccccctcccgacggcatcgcaatgtgccactgtgatgtgtgtgaagccatcacggaaggagagagcatccatgtccgaagctaccctcatcggtatcgatctggcaaagcgtgtcttccaattgcacggagcacgcgacgacgggtcgttcgttttccgcaagaagctttcgcgtcctcaattgatggccttcgtgtcacggcatccaaggtgcgtcatcgccatggaggcttgcgcgacggcgcatggctggggtcgcgagttcgagaagctgggacatgaaatccgcctgatcccactgatctacgtgaaaccgttcgtcaagcgtcagaaaaacgatgcagccgacgccgaagcgatcgtagaggcggccacgcgccccaccatgcgctttgtcgcgttgaagtcggaagcgcagcaggcacgagcgatgctgttccgcacccggcagatgttcgtcggccagcgcacccaattgatcaacgctctacgcgggcatcttgccgagcatggcctggttgctgccagagggcctgcgcacttcaaacgcctcgccgatgcgatcgaggatgatgacacggcgctgctccaagacgttcgcgaactcggccggatgtatttggaacagatcgagggcctgaatgctcggattgcggatatagacgggaaggtaaagagcgcggccaaagaggacggcttggcgcgacgcgcccaaaccatgccgggcgtcggcccggtgacagctcttgccatcgaaaccttcgctcccgacttggcgacgtttcggcggggtcgcgattttgccgcctggctcggcctcgtgccgaagcagcattcgaccggcggcaagcaacgactgggcaagacgtcgaagatgggccagcgcgacatccgcacgcttctggtctccggcgccatggcggttctccaggcggtcgaacgatttgatacctcgagcaatggctggctgaagcgcctgctgacccgcaagccgcgcctggtcgccgcgatcgcgctggccaacaagatggcgcgtggcctctgggctatgatgacaaaacaagaggattaccggaacccggcggcgatgattgcgtgagcgctcgacgcttgccacgtcgtcccggcacgtcgggggtgtgaggaggtcactgaacagtaagggcaaaggatcgatcagatccgggtcagagaaagcagtctttgtgcaggagccatcgagctcggtttgttgatatgcttctgatccgcgcatcgccataccggcccgcggccacatcagcgccgcatagataggcctgatacatgaccgcacccgatcacacgcttgagccgttcaaacatcgcttgcatcaacgggggcatccataca

SEQ ID NO: 9587 - DNA, 1352 bp, unidentified
  source 1..1352: mol_type = unassigned DNA; note = element_f00384c
  misc_feature 1..3: note = core
  misc_feature 4..85: note = LE
  misc_feature 86..1117: note = CDS
  misc_feature 1118..1352: note = RE
  misc_feature 1121..1339: note = bridgeRNA
tgatgctgtggacggcgcccactctgcggcatcaaagtgccaaagggtggttgcgtgaagcgaaccacgttgaggggagccgtccatgggcgagattagcacgattggccttgatatcgcgaagtcagtctttcaggtacacggcgttgatggcactggcgcggtagtaatgcgcaagcgcattagtcgctcgaagttattagagttctttggcggcttgtcgccgtgcttggtcgggatcgaagcatgcccatccgcacattattggagccgcgagttgcaggtgctcggccacacagtgaagttgatgccgccgagctatgtgaaggcctatcttaagcgcaacaagaatgacgccaacgacgcggcggcaatctgcgaggccgtgacgcggccatcgatgcggtttgttccgataaagtccgaacggcagcaatgcggcctgatgctccatcggacccgacaattgttgatacggcagcgcacgatgctgtcgaatgcgatccgcgggcatatggccgagctgggcgttatcgcggccaagggccgcaatggcacggctgagctgctgcagattattggcgatctgacggacgatcggatcccgccggttgcgcgattttgcctcgatcttcttgctcgccaatatctgaccctcaacgcagaggtctcatccatcgacaagcgcatccattcttggcatcgatcatgtgaacagagccgacgactcgaggagatcccgggcgttggtccgatcgtcgccaccgccctggtcgctgaaatcggcgactggagagcgttccgctcaggtcgcagtcttgcagcctggatcggtttggtgcccaaacagcactcgagcggcggcaaggaacggctcggcagcatcaccaagcagggcaatcgctatttgcgctggttactcgttgccggcgccatggccgtcattcgctatgcacgacagcacggcaccaagcgagcttggctcacacgaataatggatcgccgaccggtgaaggtcgcggccgttgccttcgccaacaagatcgcacggatggcgtgggcgatcatggttcacggcgagcggtaccgagagccgaagctattgctggcggcgtgaatacaccaattggcgagggcataacgacgtaatgcagatacggtcgttccggggatcgggagaacccgcttgggtcatcgcatttacaaagtgcgtgctaacgattgggatccgatccgcgcagagcattagggccagcggctacatcggccgcatcaacaggccggacacgtgaccgcacccgaccaatgctgcagaagcgtcagaaagttcttgccaaggcgccgtccacacg

SEQ ID NO: 9588 - DNA, 1174 bp, unidentified
  source 1..1174: mol_type = unassigned DNA; note = element_f006039
  misc_feature 1..2: note = core
  misc_feature 3..208: note = LE
  misc_feature 209..1159: note = CDS
  misc_feature 1160..1174: note = RE
  misc_feature 3..180: note = bridgeRNA
cttgtatggttgaggggttggggtggagggcctgatatctggagatcggcctggaccgactggcgaagattgcccccaccccgcctgccagcgtcgatagagaactgcgcggccgccgaacaagacagaccgccgatctgagtgcaagccaacgcggctggcgggttccaccccaacgactgtcattgtcgataggggagacctgaccatgcaagatcaagctgtatttgtcggcgtcgacgcgtccaaggccgaattggtgagcggcattcatggccagccgggctgcgctgcgttgcccaaccaggacgcgccggttgcagcctggttgcagaccttgcccccaggggccaaggtcgccgtggagtccacgggcgagtgccatctgacgctggtgcgccaagccgttcgcctgggcgtcacggtgtatgtcctgaacgcgcgtgacgtgtacttctacgccaaggcgttgggcatgcgagccaagaccgaccgggtggacgcccgtgtgattgcacggtacctggccgagcatcacgctcagctgcgcccgtaccagccgccctcgccagtgcaggccgagatcgagcggctactgggtcagcgctgggtggccgtgaccaagcgcaccgcactgcgccaagcgctgcgaggcagctcggccattgagcagcagatccagcaactagatgccagcttcgacagcctgctgcagacgatcgaccagcgcatcgagcaattgatcgacaccgatcccaccctcaaggcgagccagcgacagctgctgaccatcgttggtgtgggctcgcaagccagcgcgctgctgagcagcctgttggcacggttgcaattcgccagtgccgacgccctggtcgccttcagtgggctggacccgcgagcgcaggactctgggcgcagccatggcaagcgaagaccgtccaagcgcggatcgcctgacctgcgccgccagatgtacatggtggccatgtcagcctgtcacagcaaggtgttcggccctgtgtaccaacagcttcgcagccgtggcttcaagaccaccgaggcgctggtcatcctggccagaaagcttctacgggtcgcctacgccgtttggcgcagcggcaagcccttcgagccggagagattcaccgtgccggcttgacgaaaaccatagaac

SEQ ID NO: 9589 - DNA, 1302 bp, unidentified
  source 1..1302: mol_type = unassigned DNA; note = element_f017d2f
  misc_feature 1..2: note = core
  misc_feature 3..226: note = LE
  misc_feature 227..1252: note = CDS
  misc_feature 1253..1302: note = RE
  misc_feature 24..229: note = bridgeRNA
ccaacttgtttgattggtggcggtgatcgcggtctgcagccatgatcaccgaggccgtggcaggggtcgctcgagttacacctgccgcctgtgggctggctgccgaacggcatgcgtcccggccacggccgccggcgagagtggctcgagagaggtctgtgaaacctgaagttggtctgccctcctcgccggatccaccccgttccggctctcatgaggagactgcgtgccctccgcacctgcattgacgtcgagccaagtggtcatcgcgatcgatccgcacaaggcctcctggacggcggtcgtggtcgacgcccgcctgcaggccgtggcttcgatccgcgtgccggtcaaccgcgatggctaccggcaactgcggcgattctcccgccgctggccggatgcgagctgggcgatcgaaggcgccgcaggactcggcgccccgctgaccacccggctagccgccgacgacgtccacgtagtcaacgtgcccgccaagctcgcccggcgggtccggttgctgtccacgggccacggccgcaagaccgatgaagccgacgccctgtcggttggcatcgccgcactgaccgccacccgcttgaacaccgcggtgatcgacgaagccctggcagcgctgcgagcagtgaccgaacaccgcgatgacctggtccgcacccgcacccaaaccgtcaaccgcctgcacgtcctcctggcccatctcatcgcatccggcctaccacgcaagctcaccgccgaggccgcagccgcagcgctgcgcaccatccggccccgaaccctgctggcccgcaccgtgcgaaggctggcagtcgaactgctggccgagctgcgccggctcgaccggcgcatcaccgacgccaccgccgccctcggcgccgcggtcgccgccagcggcacaaccctgaccgagctacacggcatcggtgacgtcatggccgccaaaatccttgcccggaccggtcccgtcagccggttccgatccgagtccgcgttcgcgtcattctgcggcgtggcgccgatagaagtctcctccggcgacgtccagcggcatcgcctctcgcgagctggcgaccgccagctcaactacgcgctgcatgtcatggccatgacccaacccagcgacccactccgggcagggactactaccagcgcaaacgagccgccgggaagactcacaaggaagccatgcgctgcctcaagcggcggctcgccgacgtcgtcttccgaaccatgatcaaggacacggaagcctctctgttgccgacgccttgacacagagaggtg

SEQ ID NO: 9590 - DNA, 1394 bp, unidentified
  source 1..1394: mol_type = unassigned DNA; note = element_f0194ec
  misc_feature 1..2: note = core
  misc_feature 3..88: note = LE
  misc_feature 89..1120: note = CDS
  misc_feature 1121..1394: note = RE
  misc_feature 1091..1381: note = bridgeRNA
agatggggtggttgccgccctcccagacggcatcgcaatgtgccaagaaggtggtgttcacagccactgagcggaaaggacggcaaccgtgacgaaagatacaatgattggggtggatctggcaaagactgtcttggtgctgcacggcgcgtcaatgacggggcagctcaagtttcgcaagaagctgtcgcggcagagttttggcaagttcatggccgagcaccctcccgcaatggtcgtgatggaggcgtgtggcagcgcgcattactgggcccgcgagatgatcaggcttggccatgaggtgaagttgattgcaccgcattacgtgaagccgtttgtgaagcggcagaagaatgatgcagcagacgccgaggccatcgtaattgcggcgcagcggccggaaatgcgcttcgtcgatacgaagtccgcagaacaacaaggtttggcaattttgtttcgcgcccgagaacggctcgtccaccaacgcaccgaactggtcaacgcacttagagcgtgcctttacgaatacggcttcgtcattccacaaggaattcaccagatcaagcggatcaaggagattctggacgcaccaaacagcgacttgcctgatttgatgcgcgaggaatgctgcgatctattggaacagattggcgagaagacggtacgcattgatgcgcggactgtgaagatcaaggtactagcggctgaagctgacacagcgcgccgcttgaaaacaattcctgggatcggcccactcaccgccctggcagtcgaagcctttgccccacctatgaggaattttcgacgggggcgggacttcgccgcttggctcggccttgttccacgtcaattctcctcaggtggcaaagaacggctcgggcgcatttccaaggctgggcagcccgacatccgaaggctgctgattatcggcgcgatgtcgcgtctgaactggctgggccgcaaatcaattccggaaggttcatggctggcgcgcttggcagcgcggaagccgaggatgcttgtggcgatcgctttggccaataagatggcacgggtgatctgggccgtgctcacgaaaaatgaggattaccgaggtccggcacaggctatcacggcgtgatcgacatgccgcagaatctgcctgacgtcggataaagggggtgtgagaaggcgacgacccgaatgggcagatgatcgaacagatctggattaggaaaaccagttgagaaacgtgagcaaggaagctcgagggtcagatttggacctaatccgcagatcaccataccggccagcggcctctgaaaatgccgcgttcaaaggccttacagaagaccgcactcgatcagctgcgcacgtagtcggaaacctcttgcatcacgggcggcaaccacaga

SEQ ID NO: 9591 - DNA, 1401 bp, unidentified
  source 1..1401: mol_type = unassigned DNA; note = element_f026421
  misc_feature 1..2: note = core
  misc_feature 3..84: note = LE
  misc_feature 85..1128: note = CDS
  misc_feature 1129..1401: note = RE
  misc_feature 1146..1383: note = bridgeRNA
tgatgtggtggaacggcccgctccttcagcgcctacgtgctaggatcgtggtcgtatcgcaaacgccacaaggagggacatgaagtgaataatgttgctactattgggttggacttggcgaagcaggtttttcaggtgcatggcgctgacgtcgaaggcacaccgctgttcaatcgaaagctacggcgcaacgaggttttgcgcttcttcgcgaaacttccgccgtgccttgtcggaatggaggcttgcgggagtgcgcaccattgggcgcgcgaaatcgccgctttcggccacgacgttcgcttgatccccgcacaatatgtgaagccattcgtcaaacgcggcaagaccgatgcggccgatgctgaagcaatcagcgaagccgtgactcgcaaaactatgcggtttgtgccgataaagtcggcagagcagcaagcctctgtcatggttttccgcacccgcgccctgctcgtgcgccaaagaacacaggcgattaatgccttgcgcgctcacatgggcgagcttggcatcattgcgacaacgggaatcgcgaacataaagccgctggcggcgatcgttcgggatgaaagtgacgcccgcctgcctcctgccgcacgttttgctcttgaagagattgttgatcaaattgaccgtctggcagcaaggatcgagaagctggagcgcgagatcatagttgtcgccaagcaggatgaggatatgcggcgcctcgccactatccctggtgtcggtgccattaccgcgatggcgataaaagcctttattccggacccggctggcttcaagtctgcccgtcatttcgcggcatggattgggctgacgccgaaatcgcattcaagtggcggaaagcagcgtcttggccgcatctcaaaaatgggcaactcacaattaagatccctattggtggttggagcagcctccatccttcgccatgtacgaagtgatgacaaaacgcggccctggttgcgggagctgatggcacgacggccttacaaggtcgtttctgttgcactcgctagcaagacagcgaggatgatctgggctctcctggtccgaggaggaacataccggggtcctacaagattggcggcggaaagcgttccttcgtgaggagcaaaaccgcgcgcaagagctgaccggcggaggccggcaggtcgaggtgcataaaagccgatgaatcaacgggacaacatcccgaagcaagccaggccgaaacccgcgacgtgcatcacagcacgaacccctgataaagccacttgcttcgcgaacctcatcgaggccagcggtcataggccgcacaagaaggccggacatatgaccgcaccgttcccgggtgatgaaatcggaaaaatgcatcttggcaaccgcgggccgttccacata

SEQ ID NO: 9592 - DNA, 1432 bp, unidentified
  source 1..1432: mol_type = unassigned DNA; note = element_f02d1d4
  misc_feature 1: note = core
  misc_feature 2..132: note = LE
  misc_feature 133..1152: note = CDS
  misc_feature 1153..1432: note = RE
  misc_feature 1192..1432: note = bridgeRNA
taatggaatgaacgcgtcccaccccgtgaatgagtcagagaacattggaccctcgcgggccaacggcatcggagactccaaattggaagatcatggaggtgtctccatcggcaaaccttaggggcggccaccatgaatcgtacagcggtaggtgtggatattgcgaagcacgtcttccaggtgcactttgtcgatcaggcaactggagaaatcgtgaacaaaccgatcaagcgcgcgaagttcctcgagttcttcataaaccgtccaccctgcctaatcggaatggaagcatgtggaggtgcacatcactgggcgagacaactgatgaagatggggcatcaagtcagactcatggcgggcgaatacgtaaaagcattcaacatcggaaacaagaaagatgctgccgacgctcgcgcgatatggctggcagtccagcagccaggtaagccagtggcagtgaagacggaaatacaacaggcgatgcttgcgctacaccggatgcgtgagcaactcgtgaagtttcgcacaatgcaaatcaacagcctacgcgggctgctgacggagtacggcgaagtgatgggcaaggggcgctccgctctcaatacgaccataccggaagtgctcgggcgcgttgccgagcgactgccagccgtggtagtcgatacgttgcgtgagcaatggagcgggctcacgaagctcgatgaacagattgccagtattgagcgtcggatgcgcgagtggaaaaaggaggatcagactgtgagagccatcagcgagatccctggtgtcgggttgctgacggcaacggcagccgtcgcgatgattggcaacgcggcgacgtttaagtctggacgcgaatttgcagcgtgggctggactagtgcctaagcagactggatctggcggcagagtcaacctgcacggcatatcgaaacgcggagacatatatctgcgcaagctactgatccacggtgcgcgaagcgtcttgacgcacgcaaaagagccgggaccctgggttgaacagatgaagaagcgacgcccgccaaatgtggtgatcgtggcgttagcgaacaagatggcgcgaacgatctgggcggtgctcgcccatgaacaaccgtatcagaagaattacgtgagcgcaaagccggtctgaccgacgaatgcaacgtagaagttcacgtttgacacaaaaacaagcgtcgaaagcttgcgttggcaagcggatgtagtgacaagacaggtaggaccgggactcgctaaacctggatggccagtagagcttcgagctcgtatctgtaatgaggcgcgagtcagcggatttcataggggcccgcagcggacgtattggctgcaataaggccggatacatagctgcaacccatcctgtcgatgttggaacaccgagagcttgcgcaatgggacgcgttcataca

SEQ ID NO: 9593 - DNA, 1397 bp, unidentified
  source 1..1397: mol_type = unassigned DNA; note = element_f034bdb
  misc_feature 1: note = core
  misc_feature 2..88: note = LE
  misc_feature 89..1114: note = CDS
  misc_feature 1115..1397: note = RE
  misc_feature 1170..1392: note = bridgeRNA
caatgggatggacacctcccacctatcggcatcgaggtgccagactgatagaattaaactatcagacaacttagaggaggcgtccatcatgaatattaaacgaataggcatagacttagcaaagcaagtttttcaacttcacggcgtagatcatcaaggaaaaccggtattacgcaaacagctacgccggaatcaaatgttaagttatttcgccaaactatcgccctgcttgataggcatagaggcttgcagcagttcccactactgggcgagagaattacagaaactagggcataccgttaaattagtggcaccacagtttgtaaaaccgtatgttaaaggcaacaaaaatgatgccaacgatgccgaagcgatttgtgaagctgttgcccgtcctaacatgcgttttgtagcgattaaaacgattgagcaacaagatattcaagctgtacatcgcatccgcagcggactggtgcaacagcgaacggctaaagtgaaccaaattcgcggtttactggctgaatatggcatcgtcgttgagcgtcgagtggagaaattacgcaaggcactgccgttgttacttgaagatgctgaaaatggactcagttttgattttagggctttattgcaaagtttacagcaagatttaatcgccctggatgaccgagccagtgaaatggataaaaaaatccaacaactagcaaacagcaatagtacagccaaaaggctacaacaaatcccgggtattggcccaattacctctacagccttagtttgtgctattggtgatggtaaacaatttaaacgcgggcgcgatttagcggcatggttaggattaaccccaagacaacacagcagtggtggtaaagaccgcttattaggcatcagcaaacggggcgacacctacataagaaccttactgatacatggtgccagggcggtacttaaagtcgccgataaaaaagatgatccacgtagccgctggatacaaagtttatgcagccgccgcaataaaaatattgcggctgttgccctggctaacaagaacgcacgtatcgtgtgggccttgttgactcaagaaacagatttcctgccggaaggcaaacctgcttgagttcgaaagcaagctttcaaactccagcaggttgagataaaaggaagtattcacccacgattgttaagcaacaactactgatggtaaacaggtcgaaccggcgtttacaaaccctgacgaatccgtggtgccaaagagcacgataaggcgattaggtgtaaacgcgcgaatagcccattatggcccgggcaaatgcgctcaactgagaggtcggatatacgtgtgcagtcgtaccctaaaaccaaaagtaattaatgcttgcaaaccgggaggtgtccatata

SEQ ID NO: 9594 - DNA, 1428 bp, unidentified
  source 1..1428: mol_type = unassigned DNA; note = element_f0398ad
  misc_feature 1..2: note = core
  misc_feature 3..221: note = LE
  misc_feature 222..1412: note = CDS
  misc_feature 1413..1428: note = RE
ctgatataccccgttgtggaggccgatgatggcatcgaccttgcggggagaccggcgctccgctatccggcggatgactgttgagcctagtgtccggcccccgacctccggccgtgaacggtgatcgggatccggcggctttgaccggtgatcggacccatcagctgacgtcgaccggggcgagcgggcgcccccggggtccgcggaaggaggctgcccggatgacgacgatcgggatcgacatcgggggacggacgcatgtggcggcccgctgtcgggatggccaggctcgggccgatcgggagatcttccgggtgagtcagagccgaggtggcttcgccgccctcgatgcctggctcaggtggcagccggagccggtgacgctcgtgacgatggagtcgtccggccactactggatgccgctcgcctcgcacctgcggcggcgggacgtcccggtcgccgtggtcaacccgctcgcggcgaagtactttaccaagagccgccttggccggacgaagtccgacccggccgacgcccggagcctcgccgagatggccatgcgcgacacgcccccagctcgtgacccgctcgccggcgtcgagctccgccaggccgtccgcttcgcgatgaccctagtgacggagcaggcgacggtctgccagcgcctcatccgcctggtcgagctcggcttcccggagctcggcgagctgttcgacgacccgacctgccgaacggcccgggaggtcctccgggtcgccccgacggcacgggcggccagccatcgacggacagccaccctcgcgaatgccaacgccgggccgggtcgccgccggcttggcccagcgaaggccgagcggctccaggccgccgcgctcgactcgatcgccgtccccgagctcgacgccgaggtcgccttcgaggtcggcctcctgctcgaccagttcgatctgctcgagcgccagatcgaggaagccgaccggcgcgtcgcgacgctcctcgacggcgagatcgcccgtcggctccggacgatcccgggggtcgggccctcgatcgccgcgacgctcatcgccgagatcggcgacatcgagcgcttcagcgacttcgaccaactcctcgcgtatgccggcgtccatcccgccgagcgcagttcgggcaggaagggatccaaccccgagaccgcctggcacatgagcaaggccggcaacagccacctccgggcggccgcctatcggatggccgtcgtcggcgtccagcacaacccggtcatcgccgcccactacgcgcgcaagcgggcggccggtaagagcaagatgaacgccctcgggcactgcatgcacaaggccctcagcatcgtctggggcgtgtggcgcaacggggccgacttcgaccccaagtgggggctcgagacttgacaagaccctatgggat

SEQ ID NO: 9595 - DNA, 1343 bp, unidentified
  source 1..1343: mol_type = unassigned DNA; note = element_f03f721
  misc_feature 1: note = core
  misc_feature 2..84: note = LE
  misc_feature 85..1113: note = CDS
  misc_feature 1114..1343: note = RE
  misc_feature 1123..1337: note = bridgeRNA
taatgatatggtccgccccaacctcacccctagcgacgtcagtggctaagcttgaggaaaccgaaaccactgaggtgtgccatcatggacaatttacatattcttggtatcgatctaggcagacatacttttcactgtatcgggcatgatcagtacgggcatgaggtgtttcgtaagaaattcaatcgggctcaactgcttttatggctctctaatttaccgcagacaactgtggcatttgagtcttgcggcggcgcgcattggttagcccgaaaatgtgaaagttacgggcacgaagcaaagctcatcccacctcaatatgtaaagccctatgtgaaatcgaataaaaacgatttcattgatgcagcggcgattgctgaagctgcatcccgcccatcaatgcgctttgctgccgtgaaatcagagagtgctcaagttatcagtatcatcaaccgggcaagagatgcctatatcaaagaacgtacggcgaccatgctcagaattggtgggattcttgttgaattcggactcagtcttcccaacggtcattcaacgatgaaaaagttattccaatggattgcagagcaaaaccaatcactacctcaagctttactcttggaattaaaagaacttcacgagcactacctgtacctcactgagcacgttcagctgcaagaacagaaattaatcaaaatgacatctgaaaatgaaattggtgaattgcttatgtcgatccctggtgttgctcatatcacagcgagttcatgcttggctgagattgcctctccgggaaatttcaagtgtggccgtgatatggcagcatggataggattggttccgagacagtactctacaggtgggaaaaccacattattggggataagcaagcggggtaataaaaggctcagaacattatttattcattgcgcccgtgctgtcttatcaaagccagaaacaacgggaaaatgcttcgaaccctggctcagtaatctgagggcaagcaagccttttaatgttgttgttgtcgcactggctaacaagctagtgcggatcgcctgggctgtgatgcactcacatcgagcgttcaacgccaacaaacttgcttgccaataaactcattcacccattttgcaatgacaatgatgacgataacggtacatcggccagatagataacctgacggtccaaatagcactgagatgcttgcactcttttaaggattatctggcgcagatatcatcgtggagctggaatgcgagagagcttccaagagagactccgaatacattagcgcaaaccactcccgttaaaattgtagttgcaaaaacggggcggaccataca

SEQ ID NO: 9596 - DNA, 1495 bp, unidentified
  source 1..1495: mol_type = unassigned DNA; note = element_f04740e
  misc_feature 1..3: note = core
  misc_feature 4..234: note = LE
  misc_feature 235..1449: note = CDS
  misc_feature 1450..1495: note = RE
  misc_feature 13..197: note = bridgeRNA
atccatacctttctacgtgggtccgttcgggtcattcgtaagatcgggacgcccaggggcgcttggtatggctttcaccgcattgccgctgtcgtggttcaggaggattggccgccggcgccccgcgacgactcggccgctgattgggatgcgcgaaatgaatcgcttgtatggacgcgtcggcgaggtcgtctgctgggactgtgagcacgtgcgtcgatggaggaggacctggtgcccgaactgtgggccgggacggatgcgggcaaggccgagcaccactgcacggtgatcgacacagacgggaacaagctcctctctcgtcgagtgccgaacaacgagcctgaactgctggaactactcggcgatgtcctggagctggccgaggacggccccgtcacgtgggcggtcgacctcagctccggcggagccgcgctctggatcgcgatcctggtcagccacaggcagaagctcctgtacatcccgggccggactgtgcaccacgcctcggccgcctaccggggcagcgggaagacggacgcgaaggacgccttcgtcatcgccgacaccgcccgcatgcgccgtgacctgcagccgctgaccgagaccagcgagatcgcggtggacctgcggatcctgaccgcccgacgcatcgacctgtccgccgaccgcacccgtgcgatcaaccggctccgtgcccagctgctggagtactttcccgccctggaacgggccttcgactacagcacctccaagaccgcgctcatcctgctgaccggctaccagacccccaccacgctgcggcgcatcggccgaacgcggctggcgacatggctgaagaaccacggcgtccgcaccatcgccatcgccacgagcgccgctcaggccgcggtgaccgccgccgaggcccagcacaccgccgtccccggagagaagaccgccgcgaaaatggtccacaccctgtccagggaggtgatggccctcgacgaggagatcgaccagctcaacaccctcatcgaggaccggtttcgcgagcaccccgacgccgaggtgatcaccagcatgcccggcatcggcgacacgctcggcgccgagttcatcgccgccaccggcggcgacatgtccgccttcggcagtcccgaccggctcgccggcgtcgccggcctcgctcccgtcccccgcgactcgggcaaggtcagcggaaacctccaacgcccacgccgctacagtcgtcgcctgctgcggatgttctacctctccgcccaggtcgccgccatccactgccccgaatcccaacgcttctaccagcgtaaacgcaccgaggggaagtcccacaagcaagccgtgctggccctggcccggcgccgcctcaacgtgctctgggccctcatacgcgaccaccgtaccttcgaagcaaccaccggccagccggctactaccgcagcatgacaccatcactcggcgtcaccgctccggcttgacagcatcattggga

SEQ ID NO: 9597 - DNA, 1508 bp, unidentified
  source 1..1508: mol_type = unassigned DNA; note = element_f04895f
  misc_feature 1..4: note = core
  misc_feature 5..241: note = LE
  misc_feature 242..1498: note = CDS
  misc_feature 1499..1508: note = RE
gtcactagggcaccatctttctcatgggcaccgctagggtgcttgctgttgggacccggcgggagccggggtgacggcctggtccggtcgcctgtgaagggcccgtatgacaccgccgcccccggctttcccggggctgcagaccggcaacagtgggacgcgccgcagagcgccagttagtgaccgcccgggagtcagcctcgccgccgccgggccgtcgctgccgtcttgaggagttgccgtgtctcttgcgctgcctgaagcgctgtttttcaccgggctcgactgggccgcccagactcacgcggtgtgcgtgatggacgccgggggcaagatcgccgccgagttcacgatcgagcattccgcggacgggatcgccacgatgatccgccgcctggccaggtacggcctccccggcgatatgccggtcgccatcgagcgcccgaacggccgcctggtggacctgctgctggaagccgggcacccggtggtaccggtcagcccgaacgcgatcaagacctggagggaaggcgaggtgctgtccggggccaagtccgacgccggcgatgccgcggtgatcgcggagtacctgcggctgcgccagcacaggctcaggaccgccgccccctactccgatgagaccctggcgctgcgcaccgtggtgcgcagccgcggcgacctggtggagatgcgggtcgcggccatcaaccagctgtcggcgctgctggaggcgcactggcccggtgccaaagcgatcttcgccgacgtcgagtccccgatcagcctggagttcctgacccgctacccgaccccggccgccgccgcgcacctgggcgagaagcggatggcggccttcctggtcaagcacggctactccggccgccggccggccgccgagctgctcgcccgcctgcgcgccgccccggcgggcaccagccgcgaatcgctcaccgaggcgctccgcgacgccgtgctcgccgccgtcggcgtgctcaccgcgctgaacgcggcggtcaagaacctcgaccgctccgtcaccgcccacctcggtgaacacccggacggcgcgatcttcacgtcgctgccaaggtcgggtcaggtcaacgccgcccaggtgctcgccgagtggggcgactgccgccaagcctacgacgggcccgactccgtcgccgccctcgccggctgcacccccgtcaccaaccaatccggcaagcaccgcgccgtccacttccgctgggcctgcaacaagcgcttccgcgtcgcgatgaccaccttcgccgacaacagccgccacgccagcccctgggccgcgacgatctacagcgacgcccgcgccagcggcaaggaccacccccacgccgtccgcatcctcgcccgcgcctggatccgcgtcatctggccctgctggctccagggcatcccctgcgaccccgccaggcacggcgccgccgccgcactcgccaggcaaaccgcacagccagtcacggcacgaggttgacacagggggt

SEQ ID NO: 9598 - DNA, 1432 bp, unidentified
  source 1..1432: mol_type = unassigned DNA; note = element_f04be0a
  misc_feature 1..3: note = core
  misc_feature 4..84: note = LE
  misc_feature 85..1152: note = CDS
  misc_feature 1153..1432: note = RE
  misc_feature 1188..1388: note = bridgeRNA
agatggggtaatcggccggcggcttgtggatagctgaagattttgggtgctgcgcttcaggctgatggtggaaacgaggtccgtgtgtacggcctcaagcatcagaaggagaagcgcagcatggactattttgctggactggacatttcggtcaaggacacaagcgtctgcattgtggatgacacaggcaagatcgtacgggaagtgaaggtggcgagcgaacctgactcactgctggcggtgctgacaaaccccgcctaccgcttcaaacgggttggattggaagccgggccgctatcgcaatggctgttcagtggtatcgccgaagcgggcttgccggtgatctgcgttgagacgcggcacatgagagcggtgttgaaggcgcagatcaacaagacggaccgcaatgatgcgcgcggcatcgcgcagatgatgcgggttggactttaccgtccggtgcacgtgaagacgctacgtagccagaagctgcggatgctgctgactcatcgcaagctgctgcagtcgaaggctatcgctatcgagaacgacctgcgcgctacgttgcgcaacttcggcctcaaggtgggcgtggtgggaacgataaagttcgaggcgcggattaaggaccttgtcgagaacgtctccgacctggccatgctggtcgaaccgctgctcattgtccggcgggcgcttcgcgaacagatcggcatcctgcaccgccgcctgctggccatcgtccgggacgatgatgtttgccggcgcctgatgacggtgcccggtgtcggcccggtggtggcgctgacctatcgcgcaactgtcgatgtgcccgcccgctttcggaactccaaggcggtgggggcggtatttggactgacgccctcaaagtatcaatcgggcgaggtcgaccgaaccggtgcgatatcaaagtgcggggacgagatgatgcggatgatgctctacgaagcggcccaaagcatgctgacccgcactatcaagtggtcctggctcaaggcctgggcgatgaagatcgccaggcaccgcggaatgaaaaaggcgatcgtggcgctggcacgtcggttggccgtgatcatgcatcgcatatgggtcgacggcaccgagttccggtggagccgggaagtcgaaccagcgtgagagccatgcaggataaaatgcgataggagaaaattcgagatccaccaagcggtggaatggtgtccctcgcgggacgatggatgaggtgagttcgtcaaatctcttggccctccgttaagtccgacggcaaggccgctcaatagattgttccacctcgtcctcgaatcccatgctggaagagccttggtgctgattccgaagagaagcgcgagcccgtgagcgacatcgacactgtggtggatagtctgaaagcgcttgaccccgaacggccgattagaga

SEQ ID NO: 9599 - DNA, 1417 bp, unidentified
  source 1..1417: mol_type = unassigned DNA; note = element_f04c798
  misc_feature 1..2: note = core
  misc_feature 3..232: note = LE
  misc_feature 233..1417: note = CDS
ctcctaccattaattcctgtataaatattctgtaagcaggtaagagttgccccaagaaaggcaggaggacttatagcttcctgggtcgtgcgaacccttatttttcagtctgtcccctgcctcttggagccatgataagttgattgggccttggatgagcccttgttaccttaggaggattggccggaggcacttcctgcttttcttatactacagttagggggtgcatgtcatgaaatattttgtcggcctcgatgtatcaaaagagaagtttgatgcctgctgtataggggagaaaggagagaaggtcttcagtctcacctgttctatggaccgggaagggtttgaaaaactcattgtccgattgcccaaggacaagacgtcttttctcctaggtatggaatccaccgcatcgtatcacatccccctttttagctatctcgctgctgaggattacaaggtggtcgtaatcaatcctcttcttattaatgggttctcaaaacggtctttaagaaaaactaagaccgacaagaaggacgctcttactattgcccagttcatactgcaagagaaagagatcctctcggtgaagacccccgattacctgataacggagcttaaagaccttgcaaggagaagagaaaagcttgccgatcacatgacgtcgcttaagggcgacatgaagaggattctctctgtcacgttcccggagcttgaacacataaccggagtctttacaaaagcaacccttcgcctcttaatggaatatccttccgcgcatacgataagaggggctgattcctccgccattacagacgtttttaagggcaagggccgaggcaacaaacctcgtgtcaccatcaaagcactcatggatgccgccacatcgtcagttggtgtagcaagtccagcaaaagagcttacactcaggcaggaggcatctctccttatgcatgttgaggaacaaatggaggagaccgcaaaagcgctcatggacaccttaaacgaaaggatgaaacaggatatggagattctctgctccatgaaagggataggagcaagtacggcaatgaacttcttgattgagatgggcggcgcaatagagatttacgaaaatgacaagaagcttatcgccgcctccggtctcgatccctcaacctatgaatcgggtaaatacgcaggaaagagtagaataagcaagaggggaaaccggcacttgagaagggtgatctggctcatggcgacaaaagtcattatcaataatgatttgtttaaggcatacttcaaaaaacgaaagcaagacggactgccttataaaaaagcggtcctggccacagctcataaactaattcgtaccatttttgtcatgctgagccgtaaaacatgttttattgagggaggaattaaatatagttga

SEQ ID NO: 9600 - DNA, 1309 bp, unidentified
  source 1..1309: mol_type = unassigned DNA; note = element_f058212
  misc_feature 1..2: note = core
  misc_feature 3..209: note = LE
  misc_feature 210..1235: note = CDS
  misc_feature 1236..1309: note = RE
  misc_feature 1..170: note = bridgeRNA
ctcgtatatttggagtgtccgattcctgggtgatggtgaggacgcggtgacagctgcggcaccgaccgcgtagcgaagattgtcccccatcatcccgggtcggccagagcgtgaaccgtatcgtgtggcttcgaccacgtatcacgagcgcacgtcacggccgcccgtggaatcgctctcgtccttcgccgcgtggaaaggagccccctgtgaccgatgcatctcccaccctcttcgtcgggatcgatatcgccgcgaaaacgctcgctgccgcttggctccgccccggtgaggcggtcagtcgcctgatcaccctcgcgcaatcgccgcaagggtttgccacgctgcatgagcggctcggtcagacgggctgtgtgcctgcggaagtccatgtcgtgatggaagcaactggctcatactggatcgccttggccaccacgctggctcacacgggctaccgggtgagcgtcatcaatccggcgcaggcgcaccatttcgccaaggcgctgctcaagcgcgcgaagaccgacgccattgacgcacagacgctcgctcacttggcagcgttgctcaaacccgcgctctggacaccgcctcccgccgtctattacgaagtgcagcagcgtctcgcccagcgcgatgccctcctcgatgtgcagcggcagctcatgaatcagttgcacgcgctgctgttcgctcccctcgtcgtcgcttcggtcaaggcacgcatggaggaactgatcgaaatactggggcagcagatcacggcgctcgacgctgaggtgcgtgaggcgctcgctgccgatgccgcctgggctgcctcggcggcacgcctgcagagcatcaaaggtgtcggattgatcacggctgcatggctcctcgtcacgacgctcaacttcacgatctgttcgacaccggaagcggccgtcgcgtacgccgggttggccccgaacccgtacgaatccggtaccagtgtgcgtggtcgtgcgcgcattggccataccggaaatggtcggctgcgcacggcgctatatctcgcgacgttgagtgccgcgcagcacaatcccgtcatcaaggccttcgatgagcggatgcgcgccgcaggcaagccagcgaaggtggcacgctgtgctgcggcgcgcaagctgctgcacattgcatgggcggtggtatgtagagagcaagatttcgatccggagtatgcgcagcggcagatgcagccagtggtcgcgtgagccgggaaaccgccaacgagcgtcagcgaaatgcccgaggcggccgattcaggacttgacaagcgataccgtat

SEQ ID NO: 9601 - DNA, 1367 bp, unidentified
  source 1..1367: mol_type = unassigned DNA; note = element_f05af25
  misc_feature 1..2: note = core
  misc_feature 3..77: note = LE
  misc_feature 78..1103: note = CDS
  misc_feature 1104..1367: note = RE
  misc_feature 1079..1354: note = bridgeRNA
cgatggggtggacgcccctcgacggtatcagtgtgccaagatggcggtgttgagaaaccgcgacagagcaggcgtccatggagaaggttagcacgatcgggattgatttagcgaagcaggtgtttcaagtgcatggggcggctggtgatggaagtgtgatattccgtcgcaggctcagccgggaaaagtttcttgcgtttctggctacggcgccggcgtgtgtggtggcgatggaagcctgtgcaagtgcccattactggggtcgggagatccgtcgtctcggccacgaggttcgcctgatcgcaccggcatacgtaaagccgttcgtcaagcggcagaagaacgacatggctgatgcagaggcggtctgtgaagcggcgcagcggccgacaatgcgctttgtcgcggtcaagagcgaggctcagcaagcttcggcgatgatcttcagggcgcgtgaccttctggttcgccaccggacggcgacgatcaatgcgctgcgtgcacatctggccgagtttggttttatcgcccccaagggaactgcgcatgtcaagcgattgcaggttatgatcgaggatacgtcgaacggcatgccagagccggcgcgcttactttgccaagacctgcttgagatgatccgcatctattcgacccgcattggcgcgctggatcgcgaggtccgcgagcgtgcgcggcaggacgatgttgccaagcggttgatgacgatcccaggcatcgggccgctgatcgcgacggcgctgcaggccatggcgccgccaatcgagactttcgatcggggccgggatttcgctgcatggatgggattgacaccccgtcagcattcgaccggcggcaaggcgcggcgcggcaagacctcgaagatgggacagcgcgaccttcgccgattgctgatcattggcgcgagcgccgtggttcactgggcggtgcggcgcggtgcgccggccggctcatggctcgaacgaatgcttgccaagaaaccacgtatgttggtcaccgtggctcttgccaacaagatggcgcgcatggcttgggcgctgatggctaagggcggtgtctatcgagctccggcgccggttgcataagcgatcggcgtttgtgaggctgtcgagaatgtgagcagggcgaaacaagggtatgggcaaacggtcacagagacgggatcgggaaaaccaggtcaaccggacggcgcctcgagcgcgcgtgaccgtattggacccgatcctcgcatctccatactggcccgcggcatctgaaaagccgcatcgagaggccgaacacacgtcagcacctgaccacatgctgcccgagtttcaaattctgcttgctttcaatggggcgtccacaca

SEQ ID NO: 9602 - DNA, 1499 bp, unidentified
  source 1..1499: mol_type = unassigned DNA; note = element_f05ffb6
  misc_feature 1..2: note = core
  misc_feature 3..227: note = LE
  misc_feature 228..1478: note = CDS
  misc_feature 1479..1499: note = RE
  misc_feature 15..249: note = bridgeRNA
ctaatcagtcttggcgagtctgcggacgtcgttcggcagactcgtgcctgacagccgccagcaggtgagcactcatagctactggaccttgagtcctgcgcaaagatcgtgcccctgctggtcggtcgggagaagtgatcgctgctgggatgtcgtgcccgcacgccagggcgtgagcactgcttgattagttcgtcgatggttctcccgcaggctgctgagaagtggtgacgatcgaggatcgggggtcgctgttgcgcctgttcatcggggacgactgggccgaacagcatcatgacgtcgaactgatggacgccaccggacgcgtcctggccaaggcccgactgcccgagggggtgggcgggatgacgcggctgcacgagatgatcgccgcgcaggttggcagcgcctgcgaagaggccgaggtcgtcgtgggcatcgagaccgaccgcggtccgtgggtgcgggcgctggtggccgccggatatgccgtgatggcggtcaacccgttgcaggctgcgcggtatcgcgaacggctgagcgtatcgggcgccaagagcgacgccgccgatgcgcacatgctggccgacatggtccgcaccgattcccaccagctgcgccccgtcgccggcgacagcgaccaggccgaggcgatcaaagcggtgacccgggcgcacaagacgctgatctgggagcgaacccggcacgcccagcggctgcggcacacgctgcgcgactacttccccgccgccctggccgccttcgcggatctggccgcgcctgacagcctggagctgttggccaaggccgccgacccgcaggcagcggcgaagctgacgctcggccagatcaccgccgcactcaagcgggcccgccgccgcaacgtcgccgacaaggcggccgcgatccaggccgcgctgcgcaccgagcaccttgggcagcccgcggcggtgtctgctgcctatgccgtcgttgttcgttcagccgtcgcggtcctgaaggtgctgggcgagcagatcaagcagctgcaaggacaagtggaagagcactttgggcggcacccggccgctgagattctgttgtctcagcccgggctgggcacggtcctggccgctcgggtgctggccgagttcggcgacgacccgcagcgctacgccaccgccaaagcgcgccgaaactacgccggcaccagccccatcacccgggcctcgggcaagaagaaggtcgtgctcgcccgctacgtccacaacgatcgcctcgtcgacgccctggacgcccaggcattcaccgccctgcagacctcacccggcgcccgcgcctactacgaccggctccgagcccgcgacgtctatcaccacgccgcgctccgccaggtcgccaaccgcctcgtcggcatcctgcacggctgcctgaaaaccggcaccctctacaacgaaacgaccgcgtggtcacaccacctcaaacccctggcagcttgacaccctaagcacctgggatgt

SEQ ID NO: 9603 - DNA, 1427 bp, unidentified
  source 1..1427: mol_type = unassigned DNA; note = element_f060b17
  misc_feature 1: note = core
  misc_feature 2..92: note = LE
  misc_feature 93..1130: note = CDS
  misc_feature 1131..1427: note = RE
  misc_feature 1197..1422: note = bridgeRNA
caatgggatggactcctcctcacctcaccggcatctacgtgccaaaatggtgagtgattagtcaaccatcatgaagatgaggagaagcccagatgaatattatccgtgtcggtgttgatattgccaaatcagttttccacgtgcacggcgtagaccgtcacggtaagacgcaatggcagggcaaatactctcggcagaagtggcttgatgccctcagccgtaaagtacccgctggtgccgagatcggcatggaggcttgcgcgtcatcacaccactgggcccgggaactccagaagcgggggtatcatgttcggttgattgccgcccagtttgtcaaaccctacgtcaagagcaataagaacgatcgggtagacgcggaagcgatctgcgaagccatgagtcgtccgaacatgcggtttgttgcccccaagacggttgcccagcaggacattcaggccgctcaccgcatccgggaagagcttgtgggacagcgcaccgccaaagccaaccagatccgggggctggtgggcgagtacggcattgtggcaccagtgggcatccaacagctgcgccgggccttaccaggctggcttgaagatgctgagaacgggctgaccgataatttccgggctctgctgaatgggctggctgaggacctccgctacctggatgaccgcatcacagcgcttgatgaccggatcactgagagcgtcaaacaagatcccatagcaaagcgcttaatgacattacgcggcgtagggccgctcacagccagtgccttggctggcgccctgggcgacggaaaggccttccgcaaagggcgggacttcgccgcctctctcgggttgacgccccgacagcacagcaccgggggacgggatcgcctgctgggtatcagcaagcgcggcgacagttacctgcgcaagctgctcgttcacggagcccgggccgtgttgcgtcatgttgatggcaaagacgacgggcttagtcattggctcaaaggccttgccgcccggaagcatgtcaatgtggccacggtggcattggccaataaaacagcccgtattgcctgggcgctggtacacaacgaagaggcttatgacgaagagcttgcagcggctgatgcttgatcgggtagtttgagtgctgagtatgcgggggcaacaactggaaacggtataggaaacgtccaacaccacgattgcgtggcactttgattgatggcgaacaggtcgaaccggcactggaaaaccccgtagtcacgatgagccttaagctcgttgaatcaattgggagccagtgcgcggatagcccatcagggtccgatgcctgcaagacggcatcattaaagagaccggatacacgtaggcagtcgtaccttagtcgcggtcagacaaagtgcttgcaatagaggaggagtccataca

SEQ ID NO: 9604 - DNA, 1402 bp, unidentified
  source 1..1402: mol_type = unassigned DNA; note = element_f06254c
  misc_feature 1..2: note = core
  misc_feature 3..93: note = LE
  misc_feature 94..1110: note = CDS
  misc_feature 1111..1402: note = RE
  misc_feature 1156..1400: note = bridgeRNA
cgatgagatggtctcctccccccttttaaatcggcgtcgcaatgcgccatgatggaggtgataccaaccatcaacatagaggaggagaagaccatgaataagattacgacaattggactggatttggcaaagaatatatttcacctgatcggttttgatgcacggggcaaagaggtaaaaaagaagatgctgcgacgttcacagatgttggagttttttgcccaattgccaccgtgcctgattgggatggaggcctgtgccagtgcccattactggggccgggaactgacccggctggggcacacggtgcggctgatcccggcgcagcacgtgaagccctttgtgcagggcaacaagaacgactataacgacgcccgggccattgccgaggcgatagaccggcccaaaatacactatgtggccatcaagacggtggaccagcaagatgcccaggcgctcgagcgcctgcgccagggtgccctggatgatcgcactgcgctgtgtaatcggctgcgcggtttattgggagaatacggcctggtcgttccgaaaggcgtaaacgtcttgcgccgacggatcccggagctgttggaagatgccaaaaacggcctaagcgaattcttccgtcgcttgctggcgcaggactaccagcgcttgcaagagctggatgtgcacatcgtgcgttacacccaggaactcaaggctcacagccaacgcagcgatgcctgccaacgcctgcaaaccattccgggctatgggccgatcctggccagccgcttccacggtgtggtgggtgatggcaaagcctaccggcgtgggcgggatgtttctgctgccttgggcgtggtaccacgccagcacagcagcggcgggaaaaatgtgctgctgggcatcagcaaacggggggatggccacctgcgtgccctgctgatccacggtgcccggtcagtggtgagacacgcggccaagaaagacgaccgcctgagccggtggatcaataaaatccaggccgaacggggctacaataaagcgacggtggcattagccaacaaaatggcccggataggctgggcggtattgcgcaacaacaccctctatcaggccacctgagggtatcgtacaagcgcatgactaaataactaaaaagagaggtaacaacctgccgacgattgcgaagataatgtgaccgctgatgacaaaacaggtaagaccagcgtatcgaaaacctgacaaagacgcaggctgcttacaggccgacttagcgataaggacgatacgcgcgcatttcatcaaggccagaggttactctaaaatacctcatcaacaggccggatatacgtacacaattctgtcccttgtcacgacgaacacaatgtcttgcaaaatgggaggagaccatata

SEQ ID NO: 9605 - DNA, 1627 bp, unidentified
  source 1..1627: mol_type = unassigned DNA; note = element_f0670b8
  misc_feature 1..2: note = core
  misc_feature 3..283: note = LE
  misc_feature 284..1486: note = CDS
  misc_feature 1487..1627: note = RE
  misc_feature 14..303: note = bridgeRNA
ctactacaatgtatatatggttagtaaatatgacaagccagtcatgttattatccttcttgttgcttaagctgttagaatgtaggtagtaattggtcaggccccttttttcttggactccgcgtccgtaccacagactgccaaccagctcctcattcgcagcattcgttttatgcaggttgaactgctttttaccagcacgttcgtgtcacaccacagtagattgaataggcaatgagtaaagctgaattccattgctaaaataattttaaggagtgacgtatatgaacgcagtaggtattgatatttccaaaggtaaaagtatgatcgccatccttcgtccttgcggtgaaatagtagctaatccatttgagatttgtcatacttctaccgaaatcaatgatttggtggaacacatccaaactctcgaaggtgatactaaaatcgttatagagcacaccggccgttattatgaaccaatggctcgttgtcttactaaagccggtcttcatgtcagtgcagttaatccaaaacttattaaggattttggaaccaattcacttcgcaaagtcaaaacagacaaggcggattctgtaaagatcgcccgatatgctcttgacaactggagtgatctgcgacagtatagcattatggatgaattgcgtaatcaattaaaaactatgaaccgacagtttaacttctatacgaagcagaaaaccgctttaaaaaacaatcttatcggtatccttgaccaaacatatccaggcgctaataccttctttgacagccctgcccgtagtgacgggaaccaaaagtggattgattttgcatctacctattggcatgtcgactgtgtgcgaaagaagtctctttctggatttacagagcattatcggaaatggtgtaaacgcaaaggatataactttcaacctaataaaccgaaagaaatatactcagtttcaaaagacttgataacaattcttccgaaagataccatgacaaaaatgcttgttatgcaggctgttgggcaatcaaacctggtttctaaaacagttgaagagcttcgcagtcaaatgaatcaagttgcagcacaactacctgaataccctgttgtaatggccatgaaaggtgtcggtacatcccttggtcctcaactcatagccgagataggtgatgttactcgtttcactcatagaggagcccttacagcatttgccggagtggatcccggtgctaatcaatcagggacttacgaacaacatagtgttcgcacatcaaaacgtggttctgcccaacttcgtaaaactttatttttagttatggatgtgttgatcaagacatctccggtagatgatccggtttatgcttttatgtctaaaaaacgttccgagggtaaaccttattatgtctatatgacagcaggatctaataagtttttgcgtatttactatggtcgtgtgaaagaatatttggcttcactttcatagtaaagtaatttacaactacatacatttttttggggtcagcgtaatgcatgatctaattttgtatgcccattaactgataaaacatttgctaaaacatttttataaatattatcaattacctcttgactttttatttgcagg

SEQ ID NO: 9606 - DNA, 1512 bp, unidentified
  source 1..1512: mol_type = unassigned DNA; note = element_f07af12
  misc_feature 1..2: note = core
  misc_feature 3..250: note = LE
  misc_feature 251..1492: note = CDS
  misc_feature 1493..1512: note = RE
ctaatgagagctagcgagtcggccatccggcagactcgggtttggtagccgccggcaggtgagcactgctcctccccgggcactgttcgggagccctgaagacagatcgtgcccctgccggctggccgggagagttgatcgctgctgggatgtcgtgcccgcccgctgggcgtgagcactgtttcattaggtcgctgatggttctcccgcaggctgctgaccgtgaccgctcaccaggacgggaggaaccttgcggcttttcgcgggggatgactgggcccaggaccatcacgacgccgggctgatggacgcgacgggccggcggctggcgaaggcgaggctgcccgagggcgtggcgggcctggcccggctgcacgcgatgatcggcgagcagctcggcgaggacgctgatgaggacgacgccgggcaggtcgcgatcgggaccgagaccggccagggcccgtgggtggccgcgctgatcgccgccgggtacacggtgttcgcggtcaacccgctgcaggcgtcccggtaccgggaacgccacggcgtgtcgggggccaagagcgacgccggggacgcgcatgtcctggccgatatggtgcgcaccgactcccgccagctgcggccggtggctggtgacagcgcgcaggccgcggccatcaaggtggtgacgcgcacgcacaagacgctgatctgggaacgcacccggcacacccagcggctgcggcacgcgctgcgggactacttccccgccgcgctggaggccttcgaggacctggacgccgccgacaccctggaactgctggcccgcgccccggacccggcgtcggcggcgaggctgacggccgcgcagatcagcgcggccctcaagcgcgcccgccgccgcgacatcgcggcgaaggcggagcggatccaggccgtgctgcgcgccgcccacctgggccagcctgacatcgtggccgccgcctacgccgcctcggcccgtgccctgatcgcggtgctggtcaccctgaacgagcaggtcaaggccctgcaaggacaggtggaagcctattttgggcagcacccggacgctgagatcctgctgtcccagcctgggctgggaccggtcctcggcgcccgggtgctcgcagaatccggcgacgaccccgcccggtacgccagtgccaaggcccgcaagaactacgccggcaccagccccatcacccgcgcctccggcaagaagaagatcgtgatggcccggtacgtgcacaacgaccggctcaccggcgccctcatgagccaggcattcaccgccctgcgggcctctcccggggcacgcgcctactacgaccaccagcgcgcccgcggcgccgggcacaaccccgccctgcgccagctcgccagccggctcaccggcatcctgcacggctgcctcaagacccggaccctctacgacgaggcgacggcctggccgcagtacgcggcgacctcggagaagaccgcagcttgacattcaagctcctgggatgt

SEQ ID NO: 9607 - DNA, 1496 bp, unidentified
  source 1..1496: mol_type = unassigned DNA; note = element_f07dac0
  misc_feature 1..2: note = core
  misc_feature 3..252: note = LE
  misc_feature 253..1476: note = CDS
  misc_feature 1477..1496: note = RE
  misc_feature 6..248: note = bridgeRNA
ctaatgagagctaccgggtcgccatccggcagactcgggccgtagccgccggcaggtgagcactcctagcccttggacccctcttcggagggagtcctaagttaagaccgtgcccctgccggcagccgggagagttgatcgctgctgggatgtcgtgcgcgcctgctgttggcgtgagcactgtttcattaggtcgctgattgttctcctgcaggctgccggccagatccggaacatgggacgggagaacgcatgcggttgttcgtcggggatgactgggctgaggaccatcacgatgtggagctgatgggtgaggcgggccgggtgctggcccgcaggcggctgccggagggggtggccgggatcgcccggctgcatgagctgatcgggcagcacctgggccaggacggcgaggatgcggaggtggtgatcgggatcgagaccgaccggggcccgtgggtggccgcgctggtcgcggccgggtacacggtgtatgcggtgaacccgctgcaggcgtcccggtaccggtcacggcacggcgtgtccggggccaagagcgaccgcggtgactcgcacatgctgggcgacatggtgcgcacggactcccaccagctccgggtcgtggcaggcgacagcccggaggccggggcggtcaaggtggtcgcccggacccataagacgctgatctgggaacgcacccggcagacccagcggctgcggcaccagctgcgggactatttcccggccgcgctggcggccttcgaggacctggatgccccggatgcgctggagctgctggctaaggccccggacccggcccgggccgcgcggctgacccgcgcgcaggtcagcgcggcgctcaagcgcgcccgccgccgcgacatccccggcaaggccaccgcgatcatggccgcgctgcgcagcgcccagctgggccagccgcacgccatcaccgccgcctacgccgccactgtccgtgccctgatcgcggtgatcgccaccctcaacgagcaggtcaaggccctgcaaggggaggtggaggcggtttttggcagccacccggacgctgagatctacctgtcccagcccggcttgggacacgtcctcggcgcccgggtcctcggcgagttcggcgacgacccggaccggtacgccagcggcaaggcccgcaagaactacgctgccacttccccgatcacccgcgcgtcaggcaagaaaaagaccgtcgccgcccggttcatccgcaacgaccggctcaccgacgccctcatggcgcaggccttcgccgccatcagcacatcccccggcgcccgcgccctctacgacgccgaacgcgcccgcgaaaccgagcacaaccccgccctccgcaaggtcgccaaccgccttgtcggcatccagcacggatgcctcaaaacccgcaccctctacgacgaggcaaccgcctggccccagcacgaaaaccagctagccgcttgacatctaagcccctgggatgt

SEQ ID NO: 9608 - DNA, 1407 bp, unidentified
  source 1..1407: mol_type = unassigned DNA; note = element_f07e8f3
  misc_feature 1: note = core
  misc_feature 2..98: note = LE
  misc_feature 99..1136: note = CDS
  misc_feature 1137..1407: note = RE
  misc_feature 1183..1402: note = bridgeRNA
caatgggatggagtcctccccacccttcatcggcgtcgttgcgccacactggtgggtgagtgcatcacttaccagcctgaggatgaggagaactccccatgaacattacccgggtcggcgtggatatcgcaaagtctgtctttcatgtgcacggcgtggatcgccatgaccaggtccagtggcgtggcaagtactcacgagacaagtggctggacgccatcgtcaatcgcgtccctgccggtgccgtgatcgggatggaagcctgcgcctccgctcatcactggggccgcgagctgcaggcacgcggctatcacgtcacgttgatcgccgctcagttcgtcaagccctatgtgaagagcaacaagaacgaccgcgtcgatgccgaggccatctgtgaggccatggggcggccgagcatgcgcttcgtgacggtcaagtccgtcgcccagcaggatgttcaggccgctcatcgcatccgcagcgagctggtgcatcagcgcaccgccaaggccaaccagatccgcggcttggtcggtgagtatgggctggtggcccccgtcggcatcggccagctgcgcgccgcgctgccccgctggctggaagatgccgaaaatggcttgaccgatgatttccgcgtactgctggccgacctcgcagaggatctccgctatctgagcgatcgcatcgctacagtgacggagcgcatcgagcaccacgcccagaccgacccggtggcaaagcgcctgttatcgctccgcggggtcggcacactgactgccagcgcgttggccggcgccttgggtgacgcccaggctttcaagcgcgggcgggacttcgctgcttcgctgggcctgacgccgcgtcagcacagtacgggaggacgtgaccgcttgctgggcatcagcaagcggggcgacagctacctacgaaccctgctggtgcacggcgcgcgcgccgttctgcgctgcagcgatggcaaggaggacaacctgagtcactgggtcaggaaactggccgagcgaaagcatgccaacgtggcgattgttgcgctcgccaacaagacagcacgtatcgcctgggcgatcacgcgtcacgacagcgactatgatcccgagctggcggcccatgtggcgtaacatcaccctactgaattccaacgtttttaccgagggttcccaccaccacgattgctgagcatgctgcaagatggcgaacaggtcgaaccgacgtcagcaacccccgacacgtacgtgagctaacagctcgatgaaccgattgggaactgacgtgcggatagcccatcagggtccgatgccattggcattattaatgagaccggatatacgtgtgcagtcgtacctaccgccgatcatgcctcatgctggcaaacggggaggactccatata

SEQ ID NO: 9609 - DNA, 1437 bp, unidentified
  source 1..1437: mol_type = unassigned DNA; note = element_f097097
  misc_feature 1..5: note = core
  misc_feature 6..232: note = LE
  misc_feature 233..1423: note = CDS
  misc_feature 1424..1437: note = RE
  misc_feature 1..236: note = bridgeRNA
cccccgttacctttttcgtagttcctgttcaaggagctgtggtcgccaggcccggcatgactaacgcccccagtcgaaggcatgatccgggggggtggtgtcaccgggtctggtggcatcgagggaccgctgatagggacacggccaccaactggtaggtctcgtcgtaacgtgggtgccggccatcgatgccctcccggtgaccactcgcgacgagtgaacggcatggtggatgagcagcagtttcagcgtgttcctcggcctggacgtcggcaaagatgcccaccacgcggtcggcctcgacccggacggcaagcggctgcatgacgccccgttgcccaacaccgaacccaaactgagagccctgttcgacaaactcgcccggcacggaacgctgctggtcgtggtcgaccagccggccacgatcggggcgctgcccgtcgcggtcgctcgcgcggccggtcaccaggtcgcctacctgcctggcctggccatgcgccgcatcgccgacctctaccccggccgcgcgaagaccgatgcccgggatgcgttcgtcatcgccgacgccgcccgctcgctgccccacaccctgcgcccggtcgatgtcggcgacgaggccctggccgagttggaggtgctggtcgggttcgacgacgacctggccggcggagctacccggatccgcggcctgctcaccggcatccaccccaccctcgagcacgccatcggccccaagatcagccacccggccgtgctggaaatactgtcccgctgcggcggaccgaccggcatcgccaaggccggccgccgcaaactcaccgcgatcgccaaggtccacgcgcctcgcatgggcgacaaactggtcgaggcgatcatgaccgcgctcggcgagcagaccgtcaccgtccccggcaccgcggccgcagacacggtcctgccccgactcgcggacagcctcaaaaccgttctccagcaacgaaagcaggtcgccgcccaggtcgaggggatattcgatgcacaccctcttgccggggtcctgacctcgatgcccggcatcggcgtcaggaccgcagcccgcatcctcctcgagatcggcgacgcctccaacttcgccagctccggacatctcgcggcctacgccggcatcgccccggtcacccgcagctccggcaccagcatcaaaggcgagcaccccgcccgcaccggcaaccgcaagctcaaacgcgcgttcttcctcgccgcgttcgccgccctgtcggacccgaccagcaggacctactacgaccgcaaacgcgccgaaggcaagaagcacaacgccgcgctgatctgcctggcccgccgacgctgcgacgtcctctacgcgatgctgcgcaacgggactcattaccgccccgaagccgctcctgccccagcagcggcttgacaaccactgggaca

SEQ ID NO: 9610 - DNA, 1342 bp, unidentified
  source 1..1342: mol_type = unassigned DNA; note = element_f0a3f7e
  misc_feature 1..2: note = core
  misc_feature 3..71: note = LE
  misc_feature 72..881: note = CDS
  misc_feature 882..1342: note = RE
  misc_feature 1110..1339: note = bridgeRNA
ttaatgagatggtcacccccaccctgtgagcggtacgctgacagggtgtttgtctttaaggagaggccatcatggaaaacgttgcgcttattggtattgatcttggtaaacactcttttcatattcattgccaagatcggtttggcaaggtacttcttcgcaagaagttcaaccggacaaagctcatcgaatttctagccacttttcctgcatgtaccatcgtcatggaggcgtgtgccggtgctcatcacatggctcgtcggcttgctgagcttgggcacgagagcaaactcatttcgcctcagttcgtgcgtccgttcgtcaagagtaacaagaatgacttcatcgatgctgaagccatttgtgaggctgcttgccgcccttccatgcggtttgtcacaccgaagaccgaaagccagcaaatgctgggagccctgcatcgagtacgcgagtcgtttgtgcgagatcgggttaaggcatcgaaccagatccacggcttcttgctcgaattcggcatcagtctgcccatcggtcatgctgccatcaagcgtctgccttctgtgatcgcagaacatgaactaccagcgcgactaattgccgtgttggagaggctccatgctcatttcaagtatctggaacagcaaattgccgagatcgacaaggaattggccagccagatcgatgaggacgatctcggtcatcgtctgatgacgatcccaggtgttggccccatcacagccagtttgttggccaccgaactcggtgacggtaaacactatcgatgtagtcgtgattttgcagcgtcagtcggattggtgccgcgccagtatagtactgggggccgagcgaaccttaagggtatcagcaagcgcggagactagaacctcaggcgattactggtgcaatgcgcgcgagcttatatgcaacatcttgagcaaaaaactggacggctggcagattgggtcagggacttgctgacacgacgacacacgaatgtcgttgcttgtgcattggccaacaagttggcccgcacggcttgggcactggctgctcggcataccgaatttcgggcaatgcctgcctaacaagccctgatttacagttgtacttacacacccacctggttttgcgacgattgatattggatgacgtaaacggcataccggcctgactgataacttggcaaaaaagtcggctttctaagccgcgtggttttttaggacagtcaggcgcgattctcatcgtggcgcggagaactttcttcttttagacgccggatagatttaagcaagccaactacaacacccgaaatcaaggttgcaaaaaagggggggaccataga

SEQ ID NO: 9611 - DNA, 1385 bp, unidentified
  source 1..1385: mol_type = unassigned DNA; note = element_f0bd37c
  misc_feature 1..2: note = core
  misc_feature 3..87: note = LE
  misc_feature 88..1116: note = CDS
  misc_feature 1117..1385: note = RE
  misc_feature 1090..1369: note = bridgeRNA
agatggggtggatgccgctctcccctgacggcatcgcgatgtgccaaactcgtggtgtcgaagcgcaagctgtaggagagggcatccatgggagaagttaccatcatcggcgtcgatctggcaaagaacgtgttccaggtgcatggcgctgcggcggacggctccgtgctgttccgcaagaagctttcgcgaccgcagttcgcccgtttcatggcggaccagccgccgtgcctcgtggcgatggaggcctgtgccagtgcccatcactggtcgcgagaaatgtcccgccacgggcacgaggtccggctgatcgcgccgcattacgtcaagccgttcatcaagcggcagaagaacgacgccgccgatgccgaagcgatcgttgaggcagcgctacggccaaccatgcggttcgtggagccgaaatcggcggaacagcaggcgcgcgcggtcgcgttccggacgcgcgagcagcttgtgaagcagcgcacggaggcgataaacgcgctgcgctctcatctctacgagttcgggcatgtcgcccccgaggggatcggctacgtgccgcggctcgcaaaagtcgtcgacaatcccaacgtcgaattgccggaactcgcccgggacatctgccgcatgcttctcgagcagatcgtccacctgacggaccggatcaatgcgctgaaggcacggatcccggccatgtcgcaggaagcggaaatgccgcgccagttgcagacgatgcccggggtcggcccgatcaccgcgctggcagtcgaaaccttcgccccgccgatggagcagttccgccgcggccgcgactttgccgcctggctcggcctggtgccgcggcagcattccacgggaggcaagcagaagctggggaagacctccaagatgggacaacgcgacatccggcgattgctcgtgatcggggcgaccgccgtgattcgctgggcttcacgacggggtgcgccgaaggggtcgtggctggcgcggatgctggaacgcaagccggtccccgtcgtggcggtcgcgctggccaacaagatggcgcggggcatctgggcgatgctgacgcgcggtgaaagctatcgcggtccggtgttgatcagcgcctgaaccggcgccgaacgggcatcgggccaccgagttgtgaggaaggcaagatctgcatgggcaaatgatcgacatgatccggatcgggcaaaccagaaaccttctccgagccccgagctcgctgttggagatgtggccccgctccgcgcatcaccatcccggccagcggcgccagtcagcagccgcacgaacaggcctgacaaaagaccgcactcgatcacaagtccagacgatcagaaattccttgcaaaccgagcggcatccacaaaaga

SEQ ID NO: 9612 - DNA, 1583 bp, unidentified
  source 1..1583: mol_type = unassigned DNA; note = element_f0c4df0
  misc_feature 1..2: note = core
  misc_feature 3..239: note = LE
  misc_feature 240..1391: note = CDS
  misc_feature 1392..1583: note = RE
  misc_feature 14..310: note = bridgeRNA
ctactacaatatatttataggttataaggcactactaatctcattagtaattccttttatctatcatgttgcttaagctgttagaatgagagggcaatggtcgggcatactcctccttggactttagcgtccgtataaaagtctgccaaccagctgctcattcacagcgttcgttttatgcaggttgaactgctgtttaccagtacgttcgtgtcacaccccagtagattgaatcggcaatgtgtttacgctggctttccattgcgacaaatcttaaggagctgattgtcttgaacgcagtaggtattgatgttgctaaaggtaaaagtgttgtttcgattctccgacctttcggtgaagtgatctctagtccttttgaactctgccatacttctagtgacatcaacgattttattcattctctttctcaccttgaaggagacgtcaaaatcgtcatggagtacactggacgttaccatgaacctgttgctcattggctttctgatgcggatttttatgtcagtgtggtcaatccaaaactcattaaagattttggaaataattctcttcgtaaagtgaaatctgacaaaaaggatgccgttaaaatcgctcgttacgcgcttgacaactggaatgacctgcgacagtataatcttatggataagacaagagaccaattaaaaattatgaaccgacagtttgatttttacatgaaacataaaacagctctcaaaaataatctcatttctcttttggatcaaacatttcctgaagcgaatacttttttcaccagtcccgttcgaaaagatggtagtcagaaatgggttgattttgtcacctctttttggcacgtcgactgtgttcgaaaaggctctctgacagctttcactgaacgttatcagaagttttgcatacgtaaaagctatgatttccacccagagaaagcagcacaaatcttcgaggcctctaaagagttgattgctcttttacctaaagacaaaatgacaaaaagtctgattgtccaagcaattaatcagttaaataccctttctaagaccgttgaacagttacgactacaaatggatcaaacggcttcgcaattgccagaatatccgatagttatggctatgaaaggtgtaggtccttccttgggtccacagatcatggcagagattggcgacgttcgccgcttttcacgtcgaagcgccttgactgcttttgcaggggttgatccaggtgtcaatcaatccagcacctataatcagaaaagtgtacgaacttctaaacgcggatctgctcaactgcgtaaatcactgtttcaagtaatggatgttttagtgaaaacatcgcctgaaaacgagcagagggaaagccatactatgtttacatgacagctggtgcgaataagtttttacggatctattacggacgagtaaacgaatatttggcatcacttccagaagaggactgattgtcgtttttgagcgtatgttgaaaccagcgattatcggtggttctatttgtcatgccttcaatccaggtaactcttttcccaattttttacttgactttttatttacagg

SEQ ID NO: 9613 - DNA, 1362 bp, unidentified
  source 1..1362: mol_type = unassigned DNA; note = element_f0c8f36
  misc_feature 1: note = core
  misc_feature 2..69: note = LE
  misc_feature 70..1101: note = CDS
  misc_feature 1102..1362: note = RE
  misc_feature 1133..1353: note = bridgeRNA
tactaagatggtccgccgcttgatcttccccggaagatcttgtaggcagattcaaggaggatcatcgacatgcagattcgatcggttggtattgaccttggcaagacgacctttcacctggtggcacttggtgataacggcaaggtgctgctgaagaagaagtttacccagaagcagttgattgccttcaccgcgaacatgcagacctgcttgatcgggatggaagcatgttcggggtcgcacttcctcggccgtgctttacgggaacaaggccatgatgtgaagttgattccagcccagttcgtgaagccgtttgtgaagtcgaacaagaacgatttcatcgacgctgaagcgattgctgaggctgtggatcgcgagaacatgcgcttcgtgccgatcaagacagatgaccagctcgacctgcaagctctccatcgcgtgcgtgaccggctcatggcgcgaagaacttctctgatcaaccagattcgtgcgttcctgctggagcggggcatcgtgttcgccaagagcccgattcggctgagggaagctctgcctgaggtgcttgagaacgtcaacgagaacctcacccctaggatgcggaacctggttgccatgctgtggagcgagtggaaggacctggagcttcagatcgtgcagatgaacgacgaagtggaacggatcgcttcgagcgatgctgcgtgtcggagactgctgcagatccctggcatcggaccgctggttgcaaccgcgatcgtggcctccatcggtaacggcgcagccttccgcaagggacgagagttcgcggcctggttggggctactaccgaaccagcattcgaccggtggcaaggtgaggctgtatggaatcagcaagcgcggtaactcttacctgcgcaagatcctgattcatggagcacgcgcggtcgtattgcgatccaagcgggaccgaatcgcgatgggcgcctggatgacctcgcttgagacgagggcgccacgaaacgtattgatcgtggcaacagcacacaaactggcgcggatcgcgtgggcagtgctctcgacgggccaggactatcgcgcagtacccgaggcactgacagtgtaagcaggcttagccaccagcaacatcaagttctccccaccgaggtctgcaccggataagtgaagatgaaagaacagttaaaacggcgcacctgaaacctgcttgccgaaatggccaatacgaggccgggcgttttcaaaggacaggtacgcggcgtatctcatcaaggccaggagaaaactctccacctaaaggccgaatacattgacgcagactttccttcattcgaaacttttcccttgcattcacacggcggaccataca

SEQ ID NO: 9614 - DNA, 1456 bp, unidentified
  source 1..1456: mol_type = unassigned DNA; note = element_f0d3679
  misc_feature 1..2: note = core
  misc_feature 3..220: note = LE
  misc_feature 221..1435: note = CDS
  misc_feature 1436..1456: note = RE
  misc_feature 7..219: note = bridgeRNA
ctaatgggggtggatgactcgcccgtttggggtgaggctgtccccgagccaccgacgggtgagcactgaaaggacctgggccttgagctctaaacctagatcgtgcccccgtcggctggtgaggactggaacggctgcaggggtgtcgtgccttgagcactgatccattaggtcgccgccagctcctccgggctcgtcagaaccgacaaaggaggcgaccgtgatctttgtgggcgtggactgggccgaggcccaccacgacgtctgtgtcctcgacgaggacggcgcggtgctcggtcggcggcgtgtcgacgccggcgtgaccggtctggccgagctgcaccggctcgtcgcggaccacgccgaagaaccagaggaggtggctgtcggcatcgagaccgaccggggtctgctcgtgagtgccctcgtcggcgccggctacgcgctctacgcgatcaacccgttgtcggtggcgcgctatcgggatcgccatcatgtctcgggggccaagtccgacccgagcgacgcgaagctcttggctgacctcgtgcgcaccgaccgacacaaccatcgccaggtggcgggcgactcggagctggccgaggtggtgaaggtcttggcgcgagtccaccaaagcgccatctggggccgccagcgccaggcgaacgcccttcgttcggcactgcgcgagtactacccggctgccttggaggccttcggaaccgagcttcacagccccgacgccctggcggtgctggcaatggctcccacccctgagctcggtcgtcagctctcgcgctcgaagatcgccgcggcacttcgacggggcggccgggagcgcaacctcgagcgccgggcccaagagatccaggcggcgctgcgctccgaccagctcggccagtctccggtgctcaccggcgcctacggggccgtcgccacctcggcggtgcggcttctcgccgcgtacaacgccgagatcgccgagctcgaggtgagcctctcggagcattttgagcagcacccggacgcgaagatcatctgctccctgccaggactcgggatggtcctcggcgcccgggtgctcggcgagttcggtgatgaccacgctcgctacgccgacgggaagtctcgcaggaactacgccgggacgtcaccggtcacgaaggcttcaggcaagagccgggtcgtcctcgcccgcttcgcccggaaccgccggttggccgacgcgctcgaccagtgggcgttctgctcgctcacgcgctcagcgggagctcggcgctactacgacgagttgcgcgcccgggacaagacgcatcgccaggcgctccgacagctcgccaaccgatgggtcggcatcctgcacgggtgtctcgatcacggttgcctctacgacgaagacgttgcttggcgaaccgcgcagcgaccggccgcttgaccagttggagacaaggggtgt

SEQ ID NO: 9615 - DNA, 1695 bp, unidentified
  source 1..1695: mol_type = unassigned DNA; note = element_f0d6025
  misc_feature 1..6: note = core
  misc_feature 7..319: note = LE
  misc_feature 320..1609: note = CDS
  misc_feature 1610..1695: note = RE
  misc_feature 87..324: note = bridgeRNA
cagggcccgccctgaagttacttttcagaacactccgcactgatattttctgtattgaagacgtcgatgatgcacccgtataccattgacgtcgacaccatcagatgcggaccgcgcggtgaccccacattccgctggcgcccatggggctgccctcgtttcctgacatgtcccgcgcgggccgcggcgagccgagaccgccgcatgacctaataggagcatggagcgataccgcggacccgatcaaccgcattctatcgcgccccgtcagtgtgccgtctgcccggtccaggcgagcacggaaagaacggagcgagacatgagaaccgaatcgacacccggctcccgcgggccggtcttctgcggggtcgacacccacgccgactcgcactggctgtgcgtcctcgactggaggggccgcagggtcctgtcccgccggttccccgccgacgcggcgggctacgaggcgctcgccggtgcgatcgcggcggccggggagccggcctgcgtcgcgatggaggggacgtcgtcctacggggcgggcctcaccaggcacctcgcgtcgctggggatgcccgtgcgcgaggcgctctccccggcggggatgcagaggaggcgcccggggcagggaaagtgcgacgaggcggacgcggagagggccgcccgcgcggcgatgtccggctcaaagctcgggacccccaagagccaggacgggtgggtcgacggggtgcgctgcatgctcgcggcgcgctccggggcggtggaggcgcggacctcggcgatcaacaccgcgaggtcgctgctcaccaccgcgtcagaggggctcaggtcgaggttccgcgggatggcggggccgaggctgatggaggagctcccctccgtgcgcgccgagggcgcgctgggcgccgcgctcggcgcgctggcggacctgtgggcggcggcgcgcgacgcggcgctcgacatggagcgcgcgatcgaggcgtccctggaggagaactgccccgcgctgctggcgatgtacgggtgcggccccgtgagcgcggccaagctcgcggtcgcggccggagacaacccgggcaggctgcgctccgaggcgtcgttcgcggcgatatgcggggcctgccccatccccgcctcgagcgggaagaccgtgaggcacaggctcaacaggggcggcgaccggcaggcgaacagcgcgctgcacgagatcgcgaggcagagggtcatgcgcgaccccgagaccgccgagtacgccgagagggcgagggcgcgggggaagagcgacagggaggtcatgaggtgcctcaagcgctacatggccagggaggcgtaccgggcgctgatgcgctcgcacgagatcaggaggcccgaggacgcctcggaactcgtggcggccaggcgcgcggcgaaggtcagccaggtgagggcggcgtccatactgggcaccagcgagaagtacatctcgatgctggagaggggccaaagggagctcaagcccataaggagggcctacgaggcgtgggtcgaggcggggctcccgctcaattgggacaggcaggcgttcgaggccgagcgcaaaatggattctaaaaaacaccttgccaaataggagcgtcaggacgcaagaaacccccgccgcacgaagtgcgcagcaggggtttcttgcatgtccgaggacgttctgaaaagtaactt

SEQ ID NO: 9616 - DNA, 1443 bp, unidentified
  source 1..1443: mol_type = unassigned DNA; note = element_f113f15
  misc_feature 1..3: note = core
  misc_feature 4..245: note = LE
  misc_feature 246..1163: note = CDS
  misc_feature 1164..1443: note = RE
  misc_feature 1197..1396: note = bridgeRNA
agatgggatattcggctttgcgtctcagcgttgaccattgcggattgcggtgctgcgcttctggctgatggtaaaacgaggtcatgtctctcaacagcctcaaacatcaaagggagaagcgcagcatgaaacactattgtgcactggacgtatcggtgaaagagaccgcggtctgcattgtcgatgagacaggcaaggtttgccggtagacgaaagttgccagtcaccctgaggatttgatctcggtgatcaaggatccgaagtggcagattggacggatcggtcttgaagccggaccactgtcgcaatggctttatgaaggacttgccaaggcgggattgccggtgatctgcatcgagaccaggcatgccaaggcatttttgaaagcccaaccgaataagacggaccgcaacgatgcgcgtggcatggcgcagatgatgcgcgtcaatctctatcggcctgtgcatgtgaagacattgacgagccagaagcaccgagcattgctgaccgcgcgcaaactcttgcaggaaaaagccatcgccatcgcgaatgacattcgtggatcgttgcgcaacttcggtctgaaagtcggattggccggcaagatcaaattcgaggagcggatcaatgagctcgtcgaagacaggcctgatctatacgaaatcatgcagccattgttggctgcacgcaaactgctgcgggacgagttcaccaagctgcacaagaaggttttggatttggtccgcgacgatgaggtatgtcgccgattgacgacgatccctggtgtcggcccggttgtcgctctcacctatacggcaaccatcgatactcctggccgttttgcacattcaaaggcggtcggttctgtgctcgggctgacgccgaaactgaacgagtctggtgaaagcaaacgggtcgggcgagtatcctgttgcggtgacgcaatgatgcgatccctgctttacgaagcagcgcaagttctgcttgtaaacgttaagaaatggtcgtggctaaaagcttgggcgatgaatatcgccaaacgccgcggcaggcaaaaggcggttgtagcctcggcccgacggcttgctgtgatcatgcatcgcatgtggagtgacggaaccgaattctgttggacacgggagagcttgcctgttgctgcgtaattagcaacaaggtgacaacaacaaaaggagacaagattccgccgccggtggaaagatgtccttcgcgggacgacggatggggtgagttcgcgtggttgtcttggtacggtcgtttattgcgatcaggtcgccgattagattgttccgcctcattcttctggtcccataatgggagggctatgcaggccgatcccgtagagaagcgcgatactgcgaagacatcaatcaccatagctacggacagtcagaaggtgcttgacctcaccacgccgaatagaga

SEQ ID NO: 9617 - DNA, 1448 bp, unidentified
  source 1..1448: mol_type = unassigned DNA; note = element_f114870
  misc_feature 1..2: note = core
  misc_feature 3..157: note = LE
  misc_feature 158..1192: note = CDS
  misc_feature 1193..1448: note = RE
  misc_feature 1209..1443: note = bridgeRNA
agatggggtcacgggccgacggatggagccggtcgccgctacggcgcaattggacagcgcgcttgcgaccggcttggccgagaggcggtcgtccctcaaactgatggtgtcaacggagtcgggcaagacccgctccaagcatcattaagggacgaccatgtatcactatgcaggaatcgacgtgtctttggaatgctctacgatttgcgttgttgatggcgcgggcaagattttgcgggaggcgaaggttgccagcgagccggcggccctgatcgcctggttccgatcgctgggcgtgagcctcgagcggatcgggctggaagcaggaccgctgtcgcaatggctctatggggcgctgcgtgatgcgggccttgcggtggaattgttggagacgcggcatgtccgcgacgccttcaaggcgatgccggtgaagtcggaccgcaatgatgcccgcggcatcgcccagctgatgcggctgggctggttccggccggtgcactgcaagtcgatcgaagcacaggagacccgcgcgatcctgacggcgcgcaagctgctgcagtcgaaactgcgcgatgtcgagaacagcgtgcgcggcgtgctgcgaggctttggcctgaaggtaggcaagaccaccgagcgcagcttcgccggccgcatcagggagctcgtcgccggccatcccgggcttgaactggtggcgaaggcgctgctcgaggcccatgccgtggtgctgcgcgagttcaatggtctggataaacacacccagaagctcgccagatcgcatcctccagcccgacttctcatgaccacgccggcagtcggcccgatcgtggctctcacctatgccgcggcgatcgatgatccgaccaggttccgctcatcgaaggcaaccggcgcgcattttgggctgaccccgaagaagtaccaatcaggacaaactgactacagcggtcgcatcagcaagatcggcgatgcttcggtccgcgaagcgctataccaggccgctcatgtcatgctgaccaaaccgctcaagggctgctcggctctgaagagctgggcgatgcggatcgccaggcgcgcaggcatgagcaaggccaaggtggccctggcgcgcaagcttgccgtgatcctgcatcgcatgctcaccgacgcaaaaccgttcaatccgatggccaagggtgccgtcatctaagcaagaagcatcagccgaatccgggcgggccacaacaccaggccttccctgagcgaagtcccttgccgggacgacggatccggtcaggccgccatccgggaagttggctcacaaccacgcttccgtagattggccggccggctcctctcatgcaccccatcaggcgacggccatcgcgcgccgatcccgtacagaagcaagtgcccggcaagcggatgacgcaaaaagggattgactaacccaggcccgtgacaga

SEQ ID NO: 9618 - DNA, 1403 bp, unidentified
  source 1..1403: mol_type = unassigned DNA; note = element_f118c2b
  misc_feature 1..2: note = core
  misc_feature 3..83: note = LE
  misc_feature 84..1127: note = CDS
  misc_feature 1128..1403: note = RE
  misc_feature 1176..1391: note = bridgeRNA
tgatgacgtggaacggcccgcacacggcaactcggtggtagagagctgctgttggaccgagatcatcaggaaaggatcattcgatgcaggaagttgcgaccgtcggcctggatttggccaagcaagtatttcaggctcatggtgccgatgctcaaggtgcgccgctgttcaaccgcaagctgcgccgcgccgaactggtgcgctttttcgaaaagcttccgccatgtctggttggcatggaggcctgcagcggtgctcactactgggcacgtgagctctcgaagctaggccatgacgtacggctgatccctccggcttacgtcgcgccgttcgtcaagcgcggtaagactgatgcaggtgacgcggaggcgatcagcgaggcggtggtgcgcaagaccatgcggttcgtgcctgtgaaaacagccgagcagcaagcagccgcaatgcttttgaagacgcgcgcgctactggtccgtcaaagaacacaggtgatcaacgctttgcgcggacacctgaccgaactcggcatcatcgctggcgctggtgtcgcgaaggtggagtcgctcatcgcgatcgtccgcgacgatgccgacgcccgcttgccgcagaccgcacgctttgccctgaccgctattgccgacgagatcgagttcttgaagcgagcggccagcaaactcgaggacgcgatcgtccgcgaagcgaagctggacgaggacatgcgacggctcgtaacgatccccagcatcggcgcgatcaccgcggccacgatcaaagcgctcgttccggaccctggcgggtttaaatcagctcgccacttcgccgcctggatcgggctgacgccgaagcctcggtcgagcggcggcaaagaacggctcgggcgcatctccaaaatgggcaacccggacctgcgttcccttcttgttgtcggggcaacgtccgtgcttcgctatacagagaagaacgccacgacgatgccctggttggcgggcatcgccgcaaggcggccatacaaggtcgcggccgtcgcgctcgccaacaaaatggcgcggatcgtctgggcagtgctgaaccgaggcggcgtttataaccgtcccaacaatttagcggctggtatggtcatggcatgacctttatcgccgctcatacgagctgaccggcacggtagccggcagaagtgaggtgctcgaagcaaacgatgaatccttgggacgaaactccgacgtgagataggctgaaacccacgacgcgcttcgagcgcgcacccctgatcaagccactcgcgccgcgaacttcatcgaggccagcggtcataagccgcactgataggccggacatatgaccgcaccgttcccatgcgatgagtcgaatgcagagagctcttgctacgcgggccgttccacata

SEQ ID NO: 9619 - DNA, 1483 bp, unidentified
  source 1..1483: mol_type = unassigned DNA; note = element_f120d18
  misc_feature 1..2: note = core
  misc_feature 3..242: note = LE
  misc_feature 243..1463: note = CDS
  misc_feature 1464..1483: note = RE
  misc_feature 7..241: note = bridgeRNA
ctaatgggaggtaccgggtcagccgcgctggcagactcggtgcctggtagccgccggtgagtgagcactcttatcgcctggaccttgagtccttgggtcagattgtgccctcgccggtggtcaggggtcttgatcgctgatgggatgtcgtgcccgcccgatcgtggcgtgagcacttgtccattaggtcgccgaccggctcctgcgggctgctgctccgaccatcgagcgtggagggtgatgtgctgttcgtcggagacgactgggccgaggaccatcacgatgtggaggtccaggaccgggaggggagggtgctcaagcgggcccggctgcccgaggggatggccgggatggcccggttccacgacctggtcggccggttcgtggccgccgacgccgaggcgtccgaggtcggggtgtgcatcgagaccgaccggggcccgtgggtgcgggccctggtcgcggccggctaccgggtgttcgcggtggaccccaagcaggccgcccggcaccgcgagatcctgggcagctcgggcgccaagagcgacaaaggcgacgcgcacgccctggccgacatgctgcgcacccgccaccggcagctgcgcgagatcgcgggcgactcccagaccgccgaggcggtcaaggtcgtcacccgggcgcaccagagcatggtgtgggaacgcacccggcacatgctccggctgcgatcggcgctgcgcgagtacttccccgccgcgctggaggcctacaagcccctggggctgaccagcggggcggtgctgcggttgctgaacagggcccccaccccgcaagctgccgccaagctcacccgctctcagatcgcggcggcgctcaagggccgccgcgacatcgacggcaggaccgcggcgatccagcaggtcctgcgcggcgagcatctgggccagggcgagatcgtcacgagcgcctacgcggccaccgtccggtcgctggtcgcggtcatcaccactttgaacgccgagatcacggccttggaagggcaggtcgaggcgcattttggccggcacccggacgctgaggtcatcctgtcccagcccggcctgggcgtggttctgggcgcccgggtgctcgccgagttcggggacgccgagggacgctacgcctcggccaaggcccgcaagaactatgccgccaccagcccgatcacccggcaatcgggcaagatgcgcaccgtgcacgcccggttcgtccacaacgaccgcctggtggacgccctccacctccaggcgtcctgcgcactcctgcacgacccgcacgtccgcgcctactacgaccggctcagagcccgcgacatcgcccacaacgccgccctgcgccaggtcggcaaccgtctcgtcggcatcctgcacggctgcctgaagacccgcaccctctacgaccgggcgaccgcatggtcacaccacaaccacgacctcgccgcttgacatccaacctccagggatgt

SEQ ID NO: 9620 - DNA, 1355 bp, unidentified
  source 1..1355: mol_type = unassigned DNA; note = element_f123640
  misc_feature 1..2: note = core
  misc_feature 3..66: note = LE
  misc_feature 67..1092: note = CDS
  misc_feature 1093..1355: note = RE
  misc_feature 1094..1345: note = bridgeRNA
ttatggaatggcccgccccaactccccggcagtaagatgccggtgcgtaaagaagaggagcgagccatgaccattgtgatgatcggaatcgacttaggcaagaacagctgcagcctagccacggtggatgagagtggcgcggtggtgcagcggcggcggatgcgtccggggtcgatcccggcgttcgcacaacgtcacgcaccgtgcacgatcgcgatggaggcgtgctgcggcgcgcatcatctcggccgactattggccgcgcagggtcataccatcaagttgatggcgcccgagtacgtgcgaccgtacgtgaaggctcagaagaacgatgaacgcgacgccgaggcgatcgcagaagcagcatcgcggccgagcatgcgcttcgtcgagcttaagtcacaggagcagctcgatgtccagtcgctgcatcgggtgcgctcgcggctggtgagatgccgaacgatgctgatcaaccagatgcgggccctgctcctcgagcgcggcatcacggtcgcccaaggccggcgcaacttcgagaaggccgtcgacgcgatgatcatcgacgatacttcactgctggccgcgcgcatgcgcgatctcatgatcgacatgcgcgcggagtgggtcgcactcgatcgccggatcgagttactcgaccgcgagtttgtcgagctcgcccgcactgatgatctgacgcgacgcctgatgacgatcccgggaatcggcgcgctcaacgcgaccgcgctggtggcggcggtcggcgatgcttccggcttcagtcggggtcgggatcttggagcttggctcgggctggtgcccagacagtacaccaccggcggcaagcccaggcttcttgggatcagcaagcgcggcaacaaatatctgcggacgcttctgatccacggcgcgagagcgacaatggcgtcgcttgagaagagcaagacccggctcggggcttggctacgcgcactgctggccaggtgccactacaacacggtcgttgtagcgcttgccaacaagctggcgcggatcgcctgggtgacgcttcgtcgcgggacggacttcgccaatcagccggcaacggcgtgacgcaatcggtcaccagtcctcgcaaagctgagtgacccacaagatgtctgcgggaggattttcttgaagatggcctgaaggttaagtccgcgcctcgaaagcctggcttcaaaaatggcaccgcgatgccgcactttttatgaggcccgagacgcgcgactctccatcttggcacgcggctcagctgctatgccgtatacgttgatgcagacccatcagttgccacctcaattaaacctcttgccgacggggcgggccatacg

SEQ ID NO: 9621 - DNA, 1452 bp, unidentified
  source 1..1452: mol_type = unassigned DNA; note = element_f12ba84
  misc_feature 1..2: note = core
  misc_feature 3..110: note = LE
  misc_feature 111..1046: note = CDS
  misc_feature 1047..1452: note = RE
  misc_feature 1218..1447: note = bridgeRNA
agatgccgtaatgggcttgcacccgggctgacatccgaggcgggtctcttccagagtgatggcacaacgcgggcccgagcggttcgggtccgtccatcgggagggcggtcatggaacaccatgttgggatcgacgtgtcgctggagctgagcagcctgtgcgtgctggacgcgaccgggaaggtcatccgggaggcaaaggtcgcgagcgagccggaggcgctggtcgccttcctgcgcggcctcggcgtgacgatcgtccgcgtcggcctggaggcgggacccttgtcgcagtggctctacgacgggctgcataaggcaggcttcgaggcagtgctactcgagacgcgccacgtcaaggcggcgttatcggccatgacgatcaagaccgaccgccgtgacgcccgtgggatcgcacagctgctgcgcatgggttggtatcggcccgtgcatcgcaagtcgatgtcgtcgcaggagatccgggcactgctgggcgcgcgcaagcaaatgcaaatcaaggccatggatctggagcagacacttcgcggtttgctgcgcgggttcgggctgaaggttggcgacgtgagccgcggcaggcttgcagggcgcattcgcgagctggtcagcggacacgtcatgctggagcggatcgcggagccaatgctgacggcgcgcgatgcgttgtggagcgagttcgccaagctgcaccgcgaggtgctgatcatcgtcaaggaggatcaggtttgccgcaggctgatgacggtgccaggcgtgggtgccgtggtatcgctgacctatcgggcaggcgtgggcgaccccgatcggttcacgaagtccaagtcggtcggcgccttctttggcttgacacccaaacgctatcagtcgggcgagacggatgtcacaggctcgatcacgaaggttggtgatgctgcggttcgaacagcgctgcacgatgcggccaacgcgctgctgacgcgcgcgacccggttcagcacgctcaagcgctgggcggaggtcgtcaaggttccggcggcgaagccgttgtaaaacgaccggaggggttggacgtcgccaagcggcggggcatgcggagagcaaaggtggcgctggcccgtaagcttgctaccgtgttgcaccgcatgtgggccgacgggactgagttcgtctagggcaaggatccggcagcggccgcgtcggcataaccgcagagagagatagagttcggggcgggaccaagaggtctagctcccacgaggtcccttcgccggacgcggagacggtaaggcaggttcctttgcagtggccgggagcgatcccgagactacgcccggtagattgctccgccggctcccttattaagcatcatatgacggcctggcgccgatcacgggcagaagcacgaaaccggcgagtggatgcactctgagcttgacgaccaagggcccattacaga

SEQ ID NO: 9622 - DNA, 1461 bp, unidentified
  source 1..1461: mol_type = unassigned DNA; note = element_f12bf51
  misc_feature 1..3: note = core
  misc_feature 4..225: note = LE
  misc_feature 226..1440: note = CDS
  misc_feature 1441..1461: note = RE
  misc_feature 7..220: note = bridgeRNA
ctaatgggggccgagtgggccgtttcgtgcgagcctgctcgtgagctgccggtgggtgagtactttccgagccggggttgcgagccctatgcgtagagcgtgcccctactggtagttggtggcctggacggctggtgggatgaggtgccgttgcgagcactggtccattaggcggctgcgggtcatcacaggctcgatggtcgtggacgaaggaggagggctgcgatgcggctgtttgtgggtcatgactgggctgaggctcatcatgacgtgttcgtcgaggacgaggcgggggggaaactcgccgcggtgcgggttcctgaggggatcgagggtgtggccaggttccatgctctggttgccgatcacatcgatgacccatcggaggtgatggtggcgacggagacggatcgcggcttgttcgtgggggcgctggtcgccgccgggtatcgggtgttggcgatcaatccgatgtcggtggcccgctaccgggaacggcatgcgacgtcgggagcgaagtcggatgccgccgacgcgtgggtgttggccgagttggcgcgggtcgatgggcagcatcatcggccgatcagcggcgacaccggcctggcggatgcggtcagagcactggcacgggcccatcagtcgctgatctgggcacggaagcggcacaccaaccagctgcggtcggccctgcgggagttctaccccgcagccctggacgccttcgacgacctcgcctccggtgacgcgttggcggtactcgccatagcgccgacccccacagcaggtcgacacttgacatcaccgcggatcgtctcggcgctgcgccgtggcggacgtcaacgtctcgtggaccaacgagccggcgagatccgacaggcgttgcgtgccgagcatctcagggcacccgacgtggtcgccgacgccatgggggccaccgtggtggccctggtcggggtgatcagcgagctacgcatccagatacgacgcctcgaaactgaactggccgaccgttttgaccagcacccggacgccacgatcatccgctccctgccaggactcgggatgatcctgggcgcccgggtgctcgccgagttcggggacgacccgaaccggttcgacagcgccaagtctcgcaagaactacgccgccacctcacccatcacccgagcctcaggcaaacaccaggtcgtgctggcccgctacgcccgcaaccaccggctcgccgacacctgccacctctgggcattcgccgccatcaccgccagccccggagcccgggccttctacgaccaccggcgacaaacaggcgacacccacaaccgggcgctacgcgccctcgccaaccgtctcgtcggcatcctccacggctgcctcagacacggagccccctacgacgaacacaccgcctgggcacaccgcaacgacctcgccgcttgacaacaaccacccgtgggatgt

SEQ ID NO: 9623 - DNA, 1710 bp, unidentified
  source 1..1710: mol_type = unassigned DNA; note = element_f12d786
  misc_feature 1..2: note = core
  misc_feature 3..74: note = LE
  misc_feature 75..1235: note = CDS
  misc_feature 1236..1710: note = RE
  misc_feature 1272..1490: note = bridgeRNA
agatgctatggggcgggcggcggcgaggatattgcatccatcgtcgctgatatgaaccagatggagcgctccccgtgcacaagttaaacgacctgagccgatccctcactcccctcgattcttacggcacgctgatcgctgtggtcgagatgagccagtcgagttggctagttgccggcatcgtacctggcgtcgagcgcctgccattgaaaaagctcaaagtcgacgagtgcacattgctgaagctgctgcatcgatggcgagaggaagccgaaaaggcaggacacaggatccaacgcatctgtgtggccttggaggctggtcgtgatggcttctggctggcccgctggctcagggcgcgcgatatcgaggcccatgtcattcacgcatcgagcgtagccgtatcgcgcgagcaccggcgcgccaagaccgatcggctcgacaccgagttgctcaaacgcgcttttctcggctggctgcgcggcgagcgcgatcactgcaagatggtagtgatcccgacaatcaaggacgaagatgccaagcggcccaaccgtgagcgcgagagcctcgtcggagagcaaaatcggatcatcaaccgaatgaaggcaacattgacccggctcggcatccgcggcttcaatcccaagctgaagaaggccgccgagcgccttgaaggcttgcgcaccgccgagggcgagccgatcccgcccaacacgttggctgagctgcatcgcgacatggtgcgccggcggctcgtcagtgatcagatacggcagatcgaggatgctcgtctggagcgtctcaagcaggcacccagtgctggaccacacgcaatggtgcgtctgttggcgcgcgtgattgggattggcatcgagaccgccgacatgctggtgcaagaggtgttgcggcgaaacatgcgtgaccgacgggcggtagcccgttatgccgggctcactggctcgcccgacgagagcggcacaaaccggcgagagaaagggctggcccgttccggcaacgctcgagtccggcggggcatgatccaattggcgtggcgatttctcatgttccagaagaacagcgtcttggtgcagtggtttcgaacccgcactgagaacgcccgcggtactcgcaagcccatgatcgtggccttggcgcgcaagcttctgatcgcactgtggcggctcgttcaggaaggcgttgtgccagaaggcatcgtcctgcgtcccgcacaatgaacggaggacgctgaagtcacgcaatagttcggcgcagtcggtccgcttgtgacaggtcgccgatgatggttcgaggtggcgggtcccgacgtgtttccttggctttcatgccgaaagggagaatgggtccgctttctcggagcttcgctgccgatgcgcatagctgcatcatggttcgggttcttgcacccaccgaatacaaggttgtggcgcgattgatccgcgcccgaaagcgggctcccctctgatcgtcatcccgaccgcaccaagcgtgccgtcgtgctcggagctgtcaaggtgtggcctggcaaaagcggagcatgccggaaggttggtgcgacggccaaccttgacagctcctccgcgcgccggcgtgagcaaagtgcgggtcgggacgaagaaacgggctctttgatcgaacaaagaaaccgacaaaggaaaacagataaactcctcgttgacaaaaccccataca

SEQ ID NO: 9624 - DNA, 1422 bp, unidentified
  source 1..1422: mol_type = unassigned DNA; note = element_f134eac
  misc_feature 1: note = core
  misc_feature 2..127: note = LE
  misc_feature 128..907: note = CDS
  misc_feature 908..1422: note = RE
  misc_feature 1183..1422: note = bridgeRNA
gaatgaaatgaacgcgtcccaccccgtgaccgagtgagcgaagaatgagggtggatcctcacgggccaacggcatcgatgtgcccaggtggaaaatgcacgcatttccggcaaccggaggatccacgatgaacagtatggccgtaggtatcgacatcgccaagcaggtattccaagtgcattacgttgaccgggaaaccggcgagatcgtgaacagggcaatcaagcggacgaaatttcttgagcacttcgcgaaccgtgcggcttgtcttatcgggatggaagcgtgtggtggagcccaccattgggcacggcaactgatgcagatgggtcacgaggtcaggctgatgccggccgaattcgtgaaggcgttcaacatccgcaacaagaacgacgcggcggatgcgcgggcgatgtggctggcggtccagcagccgagcaagccggtagcagtgaagaccgaaatacagcaggcaatgctggcgctgcaccggatgcgcgagcagttggtgaaattccgcacgatgcagatgaacggactgcgcggcttgctggcggaatacggcgaggtgatgagcaagggacgagcgaaactggacaaggagataccggacgcgcttggccgaatcgcggagcggttgccagccgcactgatcgatacgttgcgcgagcaatggaacgggttggcgaagctcgacgagcagatcgaggaaatcgaacgtcgaatgcgcgaatggaagaaggaagacaaggcagtgaaggcaattagcgagattcccggcgtaggtttgctgacagccaccgcagcggtagcaatgatgggcgacccgaaggcgttcagctcggggcgggagttcgcggcgtggggggcctggtgccaaagcagaccggctcaggcggcaaggtgaacctgcacgggatcagcaagaggggcgacacgtatctgcgcacgctactgatccacggcgcacgaagcgtgctgacgcatgcgaaagagcccggagaatggatcgagcagatgaagaggcgacgtccgccgaatgtggtgatcgtcgcattggccaacaagatggcgcggacgatctgggcggtgcttgcccatgaccggccgtaccggaaaaactacgtgagcgtgaaaccggcctcgggacacgcgaagcagaagatcaacgtttaacacaggatgaacgtctaaaggttgcgcagcaatcgagtgtgatgacgaatcaggtgggaccgggactcgctaaacctgtatagggtcacgagcttagagctcgcgaggtgaatgaggtgcgagtcagcgaatttcataggggcccgcagcggcaataccggctgcaagaaggccggatatagagctgcagcccatcctgtcagtctgaacacacgaaagctgttgcaaacgggacgcgttcatata

SEQ ID NO: 9625 - DNA, 1196 bp, unidentified
  source 1..1196: mol_type = unassigned DNA; note = element_f139bd0
  misc_feature 1..2: note = core
  misc_feature 3..227: note = LE
  misc_feature 228..1193: note = CDS
  misc_feature 1194..1196: note = RE
  misc_feature 24..201: note = bridgeRNA
cttgtatgttctgccgtggcaagcgtaggaatagcttgtcgggcggagggacccagtccggatctgacggcaagcacgtacagacagtgggagagatgtcccgccctcaccccaagcaccgatcaggaatccatcggaccgtgaccgcggtaccgtccataccctgcaagccagtgctgtggtgaatcccgacaagccttttgaaccttagtcgggaggatcccatcgtgacaagtcagaacgaggcagtgtgctttggcatcgacgtctccaagcactggctggacatcgccgagcatcccagcgcgcaggtaacgcgcgtcgacaacaccgctgcggccatccgcggctggttgcgcacgctgcccagaggtgcccagcgcatcgcctgcgaatcgaccggcagctatcactgcacgctcgtcaagttgctcatcaaggccgggcatcaggtgtttctgatcgacggcttcaagctgtccaggtaccgcgacaccgtgggccagcgcgccaagaccgatcggcacgacgcacgcctgatcgcccgctacctcgcgcacgagggcacggatctgcgtccgttctcgctcccggcgcccgcggtcacagaactgcgctgcctgctgcgtcgtcgcgcaaccgtggtacgcagcctgggtcgcatccgtcagagcatggaagatctgcccggctttgctcgcgaagtgcgtgtggctctcgcgcggctcaccgccttgatcaaacggttcgaacagcgcatcgcctcgctgatcaacgagagcggatggactgaaccgtaccggcgcatcctgaagatcgaaggcgtcggcgcgctcaccgccgccggcctgtgcgcgatgttccatcgcgctgccttcagcggtgcggacgccttcatcgccttccttggcatggacgtcagcgtgcgcgattcgggcaagaagaccggacgccgtgcgctgagcaagaagggggactcggagatgcgccgcctgctctacaacgccgccatggcggccagcagatccacgacctggcagccgttctaccagcgcatgctccagcgcggattcagccgcacccaggcgctggttgcgctggcaagaaaactcgctcgcgttgccttctctgtgatgaagaacgcggccgactatgtcccgaaacaacacgaaaacgcttgcggcggaacatagaat

SEQ ID NO: 9626 - DNA, 1390 bp, unidentified
  source 1..1390: mol_type = unassigned DNA; note = element_f14477d
  misc_feature 1..2: note = core
  misc_feature 3..130: note = LE
  misc_feature 131..934: note = CDS
  misc_feature 935..1390: note = RE
  misc_feature 1157..1352: note = bridgeRNA
acatggggtaatcgcgggagcgagtcgccctgaaaccaagcatatccttggaaggtggctgttccccgataagatggaaatacgggctcacgacctgacgccgggcccaagcatctgatggagaacagccatggaagaatatatcggtctcgacgtgtcgatgaaagagacagcggtggcgatccgacgtgaaggcaagcgcgtctggcgcgggaagtgcgcctctgatccaaagatcattgccgagcttatccgcaagcgggcgccagccgccaaacgcgtggtgttcgagactggacccctttccgtctggttctatcacgcgctacgcgcggaaagggtgccagcgatctgcatcgatgctcgccatgccaaagctgcgctcgatatggcgccgaataagaccgacgcgaacgacgccgacggtttggcgcatcttgcagaggtgggattcttccgtgaggtgcgggtgaaaggatttgacagcatgctgacccgcacgctcgtggcggcacgcacccggctggtccggatcaccaccgaactttccaaccagattcgtggaatcatgaaaacgttcgggctgctcgttcctgcaggtaagggaaccacgttcgagaagaacgttcggcgccttcttatcgatcacgaggaacttgctctcatcgtgctgccgatgttggaggcctggcgcggcattcgcatccgtgccgccgagcttgggcgccagctcgtcgcagatgcacgtcagagccaggcatgccgcatgctcatgtcgatccctggcatcggcgccatcaccgcaacctcgttcgccactgccattgaagatccgggcaacttcaagacgtcccgatctgttggcgcctggataggcctaacgacgcgccgctacgaatcgggagaagtcgattatgacggccatatatcctgacgcggcgaccgccatttgcgagggcttctctacgaagcggcgtcggttattctgacgcgtagctcaaccgagagcaccctgcggacatggggtctccagctccgggagaggatcggcttcaaaagagctgccgtggctgtggcgcgcaaactggcggtgataatgcatacgatgcttaaaaccggcgagctcttaatccgaatgcaggagccacaacgtaaatccggatagcgttcagaatctgaacgcctgaggcgtccctgccgggacgtgagccgagccattccgctgatggggttgcaccgctgactcagcaaagtagcgtcgtccacattgaaggctcgtcccgcgaagctccatcatgcggcgaccgatgttgaccgcgaagacaaccgtgtacccggccaacgcatctccaagcgcgaagatacttgacgtccccaccgcgattagaca

SEQ ID NO: 9627 - DNA, 1392 bp, unidentified
  source 1..1392: mol_type = unassigned DNA; note = element_f148aab
  misc_feature 1: note = core
  misc_feature 2..80: note = LE
  misc_feature 81..1124: note = CDS
  misc_feature 1125..1392: note = RE
  misc_feature 1126..1380: note = bridgeRNA
atgatggtgtggacggccccctacggcatcgcgatgtgccagaatgaggttgttgcaaatctcagacaagggagccgtccgtgaaccagattatccgcattggaatggatacgtcgaagcatttttttcagctgcacggggttgataccgccgagcggccggtgctgcgccggaagctgcggcgcaaggaaatggcagggttttttgccaagctgccaccgaccgagatcgggatggaggcctgcggtgcggcgcattactgggggcgcgtgctgcgtgagctcggccacacggtgaagctgatcgcgccgcaacacgtcaagccctacatcaagcgcaacaagaacgacgggcgggatgccgagggaatatgcgaagcgatgagccggccgacgatgcagttcgtgccggtgaagaccgaggagcagcaggcagccctgatgctggtgggcatgcgcgagcggctggtggcccggcgaacgcagttgagcaatgcgatccggggctacgcggcggagttcggcctgaccgctgccaaagggctcgacaagatcgagccgttgttggcgaagattgcagcggatgaggccttgccggtgctggcacgtgatctgttcgcgatgcacggcagggagtatgtgcaactacaggccgaattaaagaagatcgaggccaggctgatggcttggcaccgtgccaataccgacagccggcgtctggcgcagattccggggatcgggccggtcgtcgccacaacgctggtcatgaaggcgccagatcctcgcctgttcccgtccggccggcacttcgcggcctggatcgggctgacgccgaaagaccattccaccgccggcaagacccggctcggcacgatcacccgcgccggagatgagatgttgcgcagcgtgctggtggcgggagcgaccgcggtgatccagcaggcgcggcgcggccgcggccgtgcatcgccttggctgctcgcactgctggcgcgcaagtcgtcgccgaagctcgcagcgatagcgctcgccaacaagattgctcgcatcgcctggaagctgttggtgacgggggagagctatcacgcgggcggcaagccgatcgcatcggcgcacgccgcgtaaaagagatcggtggggcggccgccttcgggctcgccacctcgaccggtgccggagctgcaagaggagatggtaggatcgatcgatccgaggtgcgagacactccgtgggacccattggcctgtaaaggtcgctgtgatgtttggaactcgcgtcgcggaaaaccatcttggccagcggtctacgaccgcatcaacaggccggacatatggatgcaagcgatccgatcagaccttcaaaaaaactcttgcggcacgggggccgtccacat

SEQ ID NO: 9628 - DNA, 1357 bp, unidentified
  source 1..1357: mol_type = unassigned DNA; note = element_f14a408
  misc_feature 1..3: note = core
  misc_feature 4..74: note = LE
  misc_feature 75..1103: note = CDS
  misc_feature 1104..1357: note = RE
  misc_feature 1126..1344: note = bridgeRNA
tgatggggaagacggccccgctccgaaccgattggccgtatgataacgcgccaactcaaacaggagccgctgatatgatcgccaatacgataggccttgatctggccaagcataattttcacgtccatgcggtggatgccgatggattagttattaaaaccgcggcgctccggcgaagcgagatgatcaaattcttcaagagcgcaaggccttgccttgttggtatggaagcttgcgcaacggcgcactattgggctcgagagctgatgatgctcggtcacgaggttaggttgataccgccttcgtatgtaaagccgtttgtacggcgcggagcgaagaatgacgctgccgacgctgcagctatctgtgaggctgtccggagacccgacatgcgcttcgttccggtcaagtccgaggccaaccagagctttctgatgctacatcgagctagaggtctgctagtccggcaacggactatgacagtctgtgcaatccgcgctcatctcgccgaattcggaatcatcttcggccaaggtcgacaacgcatcgagaccataatgccgatgatagaggaagttgcggcctcgttgctagaacatgctcggtatgccttgaccagtttgatcggctctgttggcgagttgaacaagcagattgacggaattgagacgaagctagcggaaatcggtcgttcagatccagtctcaaatctgctgtcgtcgattccaggggtcggcccaatcacgtctacagctatcgcggcgaccattccagacgcgaggatgtttcgctccggccgagagtttgcagcctggctgggcctgaccccgcgtcaaaactccagtggcggcaccactcgattgggaggcattacaaaacaaggagatgcctacctgcgtcatcttctcgtaatcggtgccaggaatatagttcggtatccgaaagctcgagcgaaggtcgggggaccgtggatcgacgctttgctacaacggcgacgtcctatgatcgtggcggtcgccgtggccaacaagcttgccagggtcatttgggcgatgatgacgagcggagagatgtttagggaggcgcgcgtcaaggcagcatagaggggaaccgaacgaaccggcgtaaggtgcagaagcgaaagatggtcatccagcggagctgaagatcgagtaaacccggagagctttaagcgcagcattcaagcgcgacccgttgatgaggcctcgatccgcgtactccatcagggccagcgaccatggtctcggtcgcagacaaaggccgaatacatgaacgcacccgaatgatgacctaaaatttgcagaaagcctcttgcgcccgcggggccgtctataca

SEQ ID NO: 9629 - DNA, 1395 bp, unidentified
  source 1..1395: mol_type = unassigned DNA; note = element_f14c517
  misc_feature 1: note = core
  misc_feature 2..222: note = LE
  misc_feature 223..1293: note = CDS
  misc_feature 1294..1395: note = RE
  misc_feature 13..237: note = bridgeRNA
ctacttaagactgggcggcaggaccgggtccggccagactcaggtccaggtgctcggcgagtcgctcgctcgcagcggctgcccgccggtgtcattggcgtggctctctcatggcatgcgtctcgccgggcaccgcgcgaggagtggctgaaaaggggtctgtcctgctcgaagtagcggtgccctccttgctgatatcggtgtcgaggcaaggagaaccggatgcccgtgatcatcggaatggatccgcataaacggtcggccacgatcgaggtgatcaacgaactcggcaacatgatcacgggcggcgaactcggcacagaccgggtcggatatgccgagatgctggcaaccgggcgccggttcagtggccgggtgtgggcggtggagggctgcaacggcgtcggccgccatatcgcccaccggctgatccacgacggcgagaccgtcctggacgtgccggcgaagctgtcggcgcaggtgcgggtgttcgcgaccggcaacggccgcaagaccgacccgatcgacgcgcactcagttgctctggtcgcgctgcggaccccgaacctggtgcgtctccaggccgaccccgaactggtcgtgatgggcatgctggtcgaccgtcgtgacgagctcggtcgcgcgcgaacgcagaccgtcaaccgtctccaccgcctgctgctggagctgtttcccggtggagcaaagaagttcctgtccgcgatgcaagcacgcgcgctcgtcgcgacgatcaaaccacgcgacgtcgtgggcaagactcgacgccgactggcggtcgagctgatcgcagaactcgagaccatcgacaagaagatcaaagctgcggacagagatctccgcgagctggtgatcgcccgcggctccactctgctcgacctgcacggcatcggcccgtctggtgccgcacggctgctggccgatgtcggcgacatccaccggttcgccggccgggaccgattcgcgtcctggaacggcaccgcgccgttggacgcatcctccggcgaacaacaacggcatcgcttatcccgcgccggcaaccgcagaatcaaccggacgctgcacatcatgggagtggttcagctccgcaatcccaccgctggtcgtgtctatttcgatgggaagaaagcggctggcaagacctcgatggaagcgatgcgcgccctcaaacgacggttatcgaacgtcgtctacgcccgcatgctcgtcgaccagaaacgacgtgaggcggcaggcccgggaggcactcggggacgactctgcaatccagcgtgaccggcctgaccccggacgccggcccttcggacaagccacaacccgaacctgccacccgcaagcctagcctcgccagggccaccccttgacataaaggggagc

SEQ ID NO: 9630 - DNA, 1349 bp, unidentified
  source 1..1349: mol_type = unassigned DNA; note = element_f151ea7
  misc_feature 1: note = core
  misc_feature 2..66: note = LE
  misc_feature 67..1092: note = CDS
  misc_feature 1093..1349: note = RE
  misc_feature 1120..1346: note = bridgeRNA
taatgggatggtcacccccacctcgcagcgaggtgtactctgccgggattccttgggagatctgccatgcaaaacgtcacgctggttggaattgatctaggcaagcacgcttttcacctccatggccaggacaaggcaggtacggccgtgtttcgcagaaaggtatcgcgcaagcagctgatcgagttcttcgcgacgttccatccatgcacggtagtcatggaggcatgcgccggtgcgcattgcatggcacgcaagctcgccgaactcgggcacgaggtaaagcttatctcgccgcagttcgtacgcccgttcgtcaagagcaacaaaaacgatttcgtcgatgcggaagctatttgcgaagctgcttcgcgaccgtcaatgcgcttcgtcacaccgaagactgtatcgcagcagacattgtcggctttgcaccgggtacgcgactcgctcgtgcgcgacaaggtgcgcaccaccaatcagatgcatggattcctgcttgaattcggcgtcacgctacctgtcggcaatgccgttgtcaggcgcctgcccactttgctggccgaacattccctcccgccgcgtcttgtcgcgattcttgagcgcctgcatgcacatttcaaatatctttcggagcagattggcgagatcgagaaggaactcggtcggcagctcgcagatgacactattgcccagcgacgactttccattcccggtgttggagcgatcaccgcaagtctacttacctccgaactcggcgatggaaagctgtaccgatgcggccgcgactttgccgctgccgttggattggtaccacgccagtacagcacggggggccggtcgaacctgttgggaatttccaagcggggagacaagaacatccgccggttgctcgtccagtgtgcacgtgccttcatgctgcatctgaacaagcactcgggcaagatggccgactgggtgcgttcaatgctcgcacggcgacactcaaatgtggtggcatgtgccctcgctaacaagttcgcgcgaatagcctgggccattgcgagtcgcgacacagtattcgacgcatgcatgcgaagtgccgctcgatgagcaagcacccgcgctatcgctttaccgaagtcaacccatctggttttgcgaatgttgatactgatgacgtgaacggcaaaccggcctgacggaaaccctgagaggttaacagcttctgaagctgcccctgttatcaggaccaccaggcgcgattctcatcgaggcgcaacggctcatccagccctgacgccggatagatttaagcaagcccaacatgccatgaaattcagcattgcaaaaacgggggtgaccataga

SEQ ID NO: 9631 - DNA, 1525 bp, unidentified
  source 1..1525: mol_type = unassigned DNA; note = element_f1586ee
  misc_feature 1..2: note = core
  misc_feature 3..240: note = LE
  misc_feature 241..1434: note = CDS
  misc_feature 1435..1525: note = RE
  misc_feature 8..260: note = bridgeRNA
ttcgtacaatataagagtagggattacatcccctattcttatttttttgttatgatgaggttgattggctgacgtaattaacgattgggacatcacgcccggagcaaaacttgtcagccagctctcattatcatgaattcgattcagcaagttgggctattacgcccgagtaactaacgaacatgaacagatatttgagatgttggaaccaatcataataatcacaaaggaggactaaccttgatagctgttggaattgatgtgtccaaatcaaaaagcactgtagccattcttagttctgatggtgagattcttgctaaaccattcagtattcgtcatgttgaaagcgacatagataacctcatcacatatctacgttcccttcaggacgatgtaaaggttgttatggaagccactggtcactaccatcttcctatccttaaaaagcttcacgattccgatctattcgtatgtgtcatgaacccatatctaatgaaaaagtatggtgacaacgaaatacggcgtggtaaaacggataagaaagatgccatgcggatggcttattatgctctcgaaaaatcttatgctctcacgcgctattcttctttggagcagaaatatcttgatcttaagtttctgtcccgccagtataatcagcgtgttgctacaaaagttgtaaaccgtgtgcacttaggcaatctgcttgatgaagccatgcctggcattgaaaccattctgatgtccaagacaaccaatcctgaaaacaacatgctttacaacttcatagtaaaatataaaaattttgatgttataaaatctatgggcaaaaaaagatttcttaatagctacaccaagttagctgagaaaaatggttgtcgtaattatgcccgaaaagccttacagatttatgaactggccgttgacagcatcgtcacccgtgggtcagacccctatacggaactggctattgagcaatgcctaaacattttgaaacaatccgaaatagctgccaaggccattatggtacaaatgcagaacattgcttgtacgcttcctgaatacccgattgtacgatcaatgaatggtgtaggagacaacttagctccacggcttattgcagaaatcggtgatgttcgccgttttaccagcggcaaggctttgaacgcatatgctggcaatgatgctcctccatttcagtctggacaatatgaaagtcaaaaccggcatatatctaagcgaggcgctcccgcgcttaggaaagcttgttatgaggtaatgcaatgcctcaagatgcataagccgcaggacgattccgtctatctattcatgataaagaaagagcaggaaggaaagcccctgaatgtagcgaagatggctgccatcaacaagtttcttcgcatttattacgcacgagttatggaaatctataaatagatttcttttgccttattgcccagggcttattaaagttacccttttttatctcaaaatccatcaaaaaagtacttgacatttattagcaagg

SEQ ID NO: 9632 - DNA, 1391 bp, unidentified
  source 1..1391: mol_type = unassigned DNA; note = element_f15bd80
  misc_feature 1..2: note = core
  misc_feature 3..241: note = LE
  misc_feature 242..1309: note = CDS
  misc_feature 1310..1391: note = RE
  misc_feature 35..227: note = bridgeRNA
tcatttagatttgcaccagtcaaaaataatccttatctttgcatgtatatacaataaaaaaaaggattaaccaccgagttgcaagtgaactatagtgagttctaagatagcagtcttaaaacacagaaatagtcttgcttctcacgaggctgaatgctctaactagattaataggacacgaccttttaaatgatttagctagttcaacccacagtggttaacccataacatttgcaaaggtatgaaaagatcctattacatcggcatcgacatctcgaaaaaaacacttgatgcatcaatttttgttgagaaaatggaagaaaagcgatttccacatctcaaagttgacaacaacaagaccggattcaaggagatcctgaagtgggctcgcaaggaaaaggtcaacctcaaggactgcatgttctgcatggagaataccggccattacggactcgacctgtactctttcctggagcagaaaggcattgaatactgctcgatctgtccgttggtcatgaagcgctccatgggcatatcaagggacaagaatgacaagatcgacagtgccaggatagccacgttcgctttcgagaaggcctacaagctgaagccgtcaaagctggcgtcagaagatatccttaaattgaagcagctgcaatcggagcgcgccatgtacgtcagcgaacgagctaagtataaggcatatatctccgataagagcaacaagaaaggcagtaccttcaagcggatgtccctgctggtggaagcgctgtctcagcagattgaggcggtggaggcagagattcagtccgtcatccaacggaatgaggaattgaagaccagctacgacctgatcacctctgtcccaggtgtcggcaaggtcatcgccatatccactttgacccatacgaacaacttccagtccttcagcaatgcccgacagtatgcctgctacgctggtgtcgccccctttgcccgcacttccgggaccagtatccatggagcggccaccgtgtcgaggataggagatgcccagatcaaggcagaactctcacagggagcgatgagtgcccgccacaacgaccctgaaatgagtgtgtatgctgcccgaaagcgggaagaggggaagcaccccggtgtcatcttgaatgcgatcaagttcaagctcatcgaacgcatgttcgcggtcatccaccgcggtaccccatatgtgttgactcatgaatacaagaccatgaaaaacactgcagagggatgccatagcggcgggagacgcaaagtctcccaagagcgtgtatttgcaagttgaacttaacagaactctcaattttgaaaaatattcaactttttaaataaatattcaacgagaaaccttggccgtgtcctagatt

SEQ ID NO: 9633 - DNA, 1598 bp, unidentified
  source 1..1598: mol_type = unassigned DNA; note = element_f166b2e
  misc_feature 1: note = core
  misc_feature 2..266: note = LE
  misc_feature 267..1385: note = CDS
  misc_feature 1386..1598: note = RE
  misc_feature 12..286: note = bridgeRNA
cctgttacaatatatttgcttgatggcgtagcatccagctgcgccattttccatttcgttgccaaagctgttagaatgagagatgaatggtctgacggtggcctccaaggacttcacgtccgtctaaaagtcagtcagccgtcctctcgttcgcagcgttcgatttatgcaggtagaacctcgtgcgttcgtgtcatcaaacagattgaataggcaacgataaaagggtgggccgccatttgtgaatcaatcagtaggaggtttttatgaacgcagtgggaatcgacgtttccaaaggcaaaagcatgattgccgctgttcgcccctttggcgaggtgatcgttacaccttacgaggtgcgccataccgccagtgaactcagggagttggcaaaaacccttaaaagtctggacggtgaaacacgagttgtgctggagcacacaggtagatattatgagcccgtggctcagacactcagcaatgctgggggctttgtcagcgcagtgaatccgctgctcatcaaggaatacggcaacaattcaatccgcaaagtcaagaccgacaaagctgatgcgttgaaaatcgctcgatacggacttgacaattgggctgaattgcgggaacatactcctatggataagctacgagaacaattgaagattctgaaccgccagtacagcctatatgggaagaacaagacggcattcaagaacaatctcatcgccttgctcgaccagagtttccccggtgcgaatgcttactttgccagcccagttcgtgaggacggcagccaaaagtgggttgactttgcagcgtctttttggcatgctgactgtgtccgtaatcttagccttcatgccttcaccgagcgttaccgcaagtggtgcaagcgccacagctataattttagttctgccacagtcgcagaaatttatgagaacgcaaaggagcttgttccaacacttccgaaaaatgaaagcacaaaggtgctcttgactgaagctattacacagcttaatgccgtttcgagaacgaccgaggttttgcgctctgagatgaatcgagtggcgaaagagttgcccgaatacgaggtcgttatgggaatgtacggtgtgggaacttcgctcggtccgcagatcatggctgagattggcgatgtgcgtcgctttgctcatcgaggctcgttgacagcgttcgcaggtgttgatccgatgccgaatcagtccggaaaatccgagagacagagcaatccatcatctaaacgaggttccccttatctgcgaaaatcgctgttcttcgtgatgagaaatctccgccaaccgatgctgtgtaccggttcctcgacaagaaacgcagcgagggcaagccgtactatgtctacatgactgctggtgccaataagtttttgcgcatctattacggcaaggttaatgagtatttgcgctcgccggatgacgctgtcgatgtttcattaacctaatcgctctgcgaatccaacacaatacgtcggtgcgaaaacctccgcagcggcgcttttgttgtgcgctttttcgctctgcaaattcttctcattttcctattgacttcttatttgcagg

SEQ ID NO: 9634 - DNA, 1637 bp, unidentified
  source 1..1637: mol_type = unassigned DNA; note = element_f174fbb
  misc_feature 1..4: note = core
  misc_feature 5..46: note = LE
  misc_feature 47..1192: note = CDS
  misc_feature 1193..1637: note = RE
  misc_feature 1205..1425: note = bridgeRNA
cttagacaaaatggcgccccttctgggcttgaaaaccgtgggttagatgcaagatttgcatttaccacaaaacaagaaaaccgacagaaggaacgtaatgaaaagaaaagtatatgtaggaatggatgtccacaaagaaacgattcaaattgcatatttaacgagtaatacaaaggaaatgctgaaagaacaacagataaaacataatgaggttcatatcaaaaaattcatcaacaaactcaaaacagaatggaacgaaattcattgttgttacgaagcgggagtaaccggctatccactttacagatatctaaagtctttgggagtgaactgtatccttgtagcacccggaaagattcccagacaaagttctgataaaatcaaaacggataaaagagatgcgatcaagttagcgagattattacgaagtggggatttagaatcgattcatgttccgagtgaagaagacgaagcagtaagggattatttaagatcccgtgacagtcttcgtttggatttaggaaggaatcgtcagaggttgatgaagtttctattaagaaaagggaatgtatattcaacaacaaagtattggacagtcagtcattacaaatggttgaataatcttcattttgaaaatgagatccttcatgaaacgtttaacgactattacagccgagtgagagttcaagaagagaatctcaaagcgatggatcaaaagattcaagagatcgcgaaaagtgaagcttttagagaacgagtgggaatcttaagatgttttcgaggagtggattatctaaccgcaatgttcttgctcagtgaggtaaacgactttcgtagattcaaaacggcaggttcttttatgagctttttaggacttgttcctggagaatattccagcggttcgaaaagaaaacaaacagggattacaaaaacgggaagtccgagacttagaaggattttgacggaagctgcttggcagcatcgcttccccggaacaggaagtaagatcgtagccgcaagaagaaccggacaacctgcgttagtcgttgctttagcagaaaaagcttccttaaggttacacaagaaatttcgtaacttacagctaagaggaaaaactcctcaagtaatgataaccgcagtttcgagagaactttccggatttctttgggcagcgatgaacttggtagcttagagttagagtaatgtttcattcaatagcttaattcgttagagaagatgtacgataaaggaggaatacttgttagttcagtgttgaagcaatctgctttgcagatttgaccttcgttttttagactaagaacagctcccgatgtatagattatcctgcggtatccaacccgcgaatatcagtctgatcaatcgtcgcgaatgcttttctctaacgagttaaactattgaatgattaaaaaaaatatttactgctcagcttgggtgcgccatatcagaacttgtctcaaaaccttaaagaatttagataatagttttttagaaatttttaataaaacacaatagttcctacaaaaaccgtcacctttggtaatttgcgaaccttcagtaattctaatattgttaaatttttgtgtgagttcccacatcttgaggttttgggacaagtt

SEQ ID NO: 9635 - DNA, 1370 bp, unidentified
  source 1..1370: mol_type = unassigned DNA; note = element_f176ab6
  misc_feature 1: note = core
  misc_feature 2..231: note = LE
  misc_feature 232..1104: note = CDS
  misc_feature 1105..1370: note = RE
  misc_feature 1140..1364: note = bridgeRNA
gaatgatatggactcccctaccaaacggcatctatgtgccatattgaaagtgtaagcattcaatcaaaggagagaccatatgtctttaattaaagctgttggcatcgatttagccaaacttgttttcagtattcatggtgtagatgaacatagcaagtgtaaattacgcaaaactatcaaaagaaacaaactgtagctgaaatcgcaaatctacctccatgcattatcggtatggaagcctgctctggtgtgcattactgggcgagagagtttaccaagctcggtcatgatgttcgtatcatggcatgcaagtttgttatcccctaccgacaaaatgaaaaaaatgatgccaatgacgctgaagctatttgtgaagcagttactcgtccaaaaacacgcttcgttagtattaaaagtgaagaggagcaagccgtactttgcttacatcgcattcgccaaggtgccattaaagatagaacggcacgtataaaccgactacgtggcttacttgctgagtttggcatcatcatgcctaaaggtcgttatccggcacaaaacgccattgctggtatcttagaggatggtgagaataatttacccttcattgcgcgtgagttgctcgatgacttatggcaaagcattaaaggcttaaacgaagaaatactcaaatacgatagaaaaatacacgtactaactaaccaaatgaaagacgctaaacggttaatgggtattcctggtattggtgaaataaccgctaccgccgtagttgctacggttaatgatgctaagcactttgaaaccagtcgttcatttgccgcatggattggtttagtgccaaggcaatatactacgggtggcgttgctcggttagatcgtattagcaaacgaggtgaaaaacacattcgtacttcacttattcatggtgcacgagccgttattgctaactgcaaaaacaaaaccgacagaactagcatgtggataaaagacctcgttgaacgacgagggtttaaacgcgcaaccgttgctttggctgctaagaacgctcgattaatttgggcactgttacactcagaaaaggaatttcagatagattatataaaataaatttttatgaagtaaagaggttaaaccaaacggttaaccccatcgagtctgtgcattagcaattgacgataacacggtcagaccgagagcaagaaagcctatttaagcgggaagagataaatactctgcttaacaaatgaggcattgctcaagcgcaaatcatcagggcgatagcgtaacaaagctaataaacgccgaatgtagagctgctgtcagatcttcttgttgtaagagatacttttgcttgacaaaggggagtccatgta

SEQ ID NO: 9636 - DNA, 1334 bp, unidentified
  source 1..1334: mol_type = unassigned DNA; note = element_f1771e0
  misc_feature 1: note = core
  misc_feature 2..66: note = LE
  misc_feature 67..1092: note = CDS
  misc_feature 1093..1334: note = RE
  misc_feature 1115..1328: note = bridgeRNA
taatgagatggtccgccgcgcagtcaacctgatgggatgattgccagcgaaacggaggatcatcacatgcagattcgttccatcggcatcgacctgggcaagactactttccacctggtaggactcggcgaacgtgggaagatcgttatccgcaagaaactctcgcgcaaacaactgctggcctttaccgccaatctgccgccaacactgatcggactggaggcgtgctcgggatcgcattttctggggcgcgctctttcgcagcaaggccacgaggttcgtctgatcccggcacagttcgtaaaaccttttgtgaagtccaacaagaacgactacctggatgcggaggcgatcgccgaggcggtcgagcgcgagaacatgcgtttcgtgcccatcaagaccgacgaccagcttgacctgcaagccctacaccgggtacgcgagcggctggtctcgcgtcgcacggcggtcatcaaccaggtgcgcgcgttcctgctggagcgggggatcaccttccgcaaagggccggcgacactgcgccggcagatgcccgagatcctggagaacgctgacgcgcaggtatcgcctcggatgcgtaatctgctggcgacgctatggcaggagtggaagcagctggaagagcagatcgactgcctcagggctgatattgagaccatctgcatcgctgatccggcgtgccagagactgcggcagattccaggagtggggccactagtggccacagccgtagtggccgcgatcggcaatggtgctgcattccacaagggccgcgagttcgccgcctggctggggctgatcccgaagcagtactcgacgggagggaaagccaagctgctcggcatcagcaagcgagggaacccgtatctccgcaagatgttcatccacggggctcgcgctgccgtgctgcgtctgaaacgagacggttccttgctcggtgcctggatgaacggattggaggccagggcaccgcgcaacgtgttgatcgtggcgatggccaacaaactggcgcggatcacctgggctgtgctgtcgagcggcgagccctatcgggcggcaacgctggccgcctaaccagtccataaaagcttcccattaaggtctgcagaggagaaccaggacgaacgaacagtcaaacggcgtgcctgagaacctggggcgataaacggtctttcacgaccgcgcgatttagcaggacaggcacgcgcggaactcatcgagtgcccggagattcatctccatcaaggccggatacatttgcgcagactgaacttcgtcccaacgatctctcttgcagtcgtgcggcggaccataca

SEQ ID NO: 9637 - DNA, 1403 bp, unidentified
  source 1..1403: mol_type = unassigned DNA; note = element_f180ad8
  misc_feature 1: note = core
  misc_feature 2..78: note = LE
  misc_feature 79..1134: note = CDS
  misc_feature 1135..1403: note = RE
  misc_feature 1162..1394: note = bridgeRNA
taatgggatggtccggccgtgctccggccccgccagcaagcgaagctggaaaggggcggcaaagacgaggagcacgccatgtcacacaagctcaattctgcaatcgccgtgatcggtatcgatattggcaagaactcatttcacgtggtggggcacgataaccgcggggcaatcacgctgcgagagaagtggtcacgcgggcaggtggaaagacggctcgccaacctgccgccgtgtctcatcggcatggaggcttgcgtcggcgcgcatcatctcagtcgccagctgcggatgcttgggcacgatgctcggctcatgccggcgaagtatgtgcgcccgtattcgaagggacagaagaacgacttccgcgatgccgaggcgatcgccgaggcggtgcagcggccgacgatgaagttcgtcgcgaccaagaccgccgagcagctcgacttgcaagcgctgcaccgcgtgcgggagcgtttggttagtcagcgtaccggcatcatcaatcagatccgcgccttcctgttggagcgcggcattgctgttcggcaaggactgcgcttcttgcgcgccgagttaccacgcattctcgccgcgccttgcgatgctctgtcaccccgaatgttgcgcgtcgtcgaggatctggccggtgactggcgccggctcgatgagcgcatcgagggcctatccagcgagatcgaagcgcaggcacggcaagataagggctgcgagcggctcatgaccgtgcccggcattgggccgatcatctcgagtgctatggtagccgcgatcggcactggagatgcgttctcgaaaggccgcgacttcggtgcgtggcttgggctggtaccgaaacaaatctcgaccggagaccgaacaattctcggcagcatatcaaagcgaggcaatcgctatttgcgcgccctgttcgtccaggcggcctgggtggtgttggtcaaggtcgggccaaagcattgggagcgctatgggctcaagtcctggatcgaagcagcgaagaagcgactgcaccacaacgtccttgccgtcgcgctcgctaacaagctcgcccgcatcgcttggagcgtcctagctcatgggcgaaccttcgagaccagcaagattcaggccgcgtgattcaacgcgaattgttgaaaacgccttacctgccgaggtctgcgagaggatgagaaacgagatggaggatcggtcttcccggcgcatgcgagcactggtgaccccgacggcccgttgaggcctgaccgctaatgagatcgcacgcgcgctgatacccatgatggcccggagcataaaaggctccagtcaaaggccggatacattgatgcaagaccgcacatccgccaactcgatgaaagttctcttgcaacgcgcggccggaccataca

SEQ ID NO: 9638 - DNA, 1172 bp, unidentified
  source 1..1172: mol_type = unassigned DNA; note = element_f18ad75
  misc_feature 1..2: note = core
  misc_feature 3..206: note = LE
  misc_feature 207..1169: note = CDS
  misc_feature 1170..1172: note = RE
  misc_feature 3..181: note = bridgeRNA
cttgtatggtgatactcgaaggggtggtgggacgaaaaagccgaatctgactgttcacagcagtacagaccgtgggagaactcgccccaccccttcaccaaagcgccgataaagaatgcatcgtttgcaagcgacgatagaagcaagccagcgcctcttggtgaaacccctccgagcccaaaaaccataccgtgggagttcaggcgatggcaatgcgagtagagaagttcatcattggcgtcgatgtcgccaaggtcgaactggtcagctattgcgaggaaaccgctcaacaacactcgttgaaaaatacaaagcctgagatccgcaagtggctggcacttcagccagccaatacggctatctgtgttgaagccaccaacgtttatcacctggacctggtggagatggcttacgaaaagggttttgcagtctatgtcgttgatgggtaccaactcagcaactaccgaaaagggattggcgggcgtgccaaaactgatgcatctgatgcctgcctgctagcccgtttcctggatcgtgagggcagcttgcttcgtccttggtcaccccctccagccgtctacagcaagcttcagagccttctccgacgccgagcagcactggtgtcagcgcgcaccagtctgacccagagttggggtaacgaagcgtccctcaaggacgccttcaatagcttcgccaaacactttgaatcgcttgatctgctgattcaaaagcgtttgaagacgctggttagagaagcggggctgagcgagcaggttgcccgctgccaggcagttgaaggcattggttttctgactgccgtcgctttagtcaccgccttcatccgcggcgacttcaagcgcagcgattcattcatcgcttttctaggcatggatctgaaagttgccgaatcaggccagaaatccggacgccgatgcttaaccaagcgaggctgctcagaagtgcgccggctactgcacaatgcagccatggcggctagcaagacagctgcgtggaaagaggtgtatgaacattatcggaatacaggtaaggcaaccactcaggcccttgtcatcctgtcccgaaagctggccagaattgcattcgccttgatgaagactcaaggcgaatacatgagcaaagggggcaaaaagcattgcccacaaccatagaat

SEQ ID NO: 9639 - DNA, 1346 bp, unidentified
  source 1..1346: mol_type = unassigned DNA; note = element_f18e2b2
  misc_feature 1: note = core
  misc_feature 2..74: note = LE
  misc_feature 75..1091: note = CDS
  misc_feature 1092..1346: note = RE
  misc_feature 1115..1343: note = bridgeRNA
taatgagatggtcacctccacaccctgccagggctaggctttggcagggtgttttattcagggagaccatcatcatgagcactgcaacgctggtagggatcgatctcggcaagcacagttttcatctgcacgggcaagacaagtccggacgtgaggtcttccgcaagaagacgacacgccaacagatgatgcggctgctgagtaacctgcccagttgcatcgtggtgatggaggcctgcgcgggggcccatttcaccgcacgtcagttggtgggattcggccacgaagtgaagctgatcgctccgcagttcgtgcgtcctttcgtcaagggcaacaagaacgacttcatcgatgccgaggcgatctgtgaagcggcctcccggccaacaatgcgtttcgtaacgccgaagaccgaggcacagcaaacgctgtccgtcttgcaccggatacgagaatccctggtgcatgatcggacgaaaaccgcgaatcaggtccatggcttcctgctggagtttggtatcagcctgccgaaaggattgtcatccgtcaggcgtcttccgagcacattgtccgagcgtgagttaccgccgcgcctatccatgttgctgatgcggttgcacagtcatttctgctacctggagcagcagctcgtggagctcgataaagaactcgcaaacgagctggctgaggacgatcttggcaaccgcttgatgagcgtccccggcgttgggccgatcacagcaagcctgctgtcggctgagctgggggatggcaagcagtatggctgtagccgtgatttcgctgcctcgctggaactggtcccgcgccaatacagcaccggtggacgaaataccctgctggacatcagcaagcgcggcgacaagaacctacggcggctgctggtgcagtgcgccaggtcctacctgcagcgagtggatcgacatcagggtgactgggttcgctcgttacgcgaacgccgccactcgaatgtggtggcttgcgccttggcgaacaagctggcccgtattgtttgggccatagcggccaatcactcggagtttgaggcgaggccaagcgtctgcagcgcctgaccttgcatttaccgccgtaccaaggagcaccttttcaggttttgcgatcactggacaaccgatgacgtgaacggcacaccggcctggtggacaccctgaagcaaagactggccttcgaggccgcgctttttcttaggaccactgggcgcgactctcatcgtggcgcggggcatgccccatgcaaacgccggatagattcaagcgagcccaacactcgtcgttgaacagtattgcagaaacgggggtgaccataga

SEQ ID NO: 9640 - DNA, 1512 bp, unidentified
  source 1..1512: mol_type = unassigned DNA; note = element_f18f713
  misc_feature 1..2: note = core
  misc_feature 3..238: note = LE
  misc_feature 239..1300: note = CDS
  misc_feature 1301..1512: note = RE
  misc_feature 14..186: note = bridgeRNA
cttgtatgttgctttctgaggcgtgaggatgttttcacgtttcggcggagaggccgttcccacccgaggccagtcttgactgagcctgatgcgaagatcggccgccgtccctctctttttatgctgtggagaatcggaggcctttggagcctgcatgttcaaggtcagcagaaagagcaagtccgtggacgcggacagggacggctgctgaagcccatcctagttccgaaggaggtctatgagcaagcagatcatcgctctttgtaagtccacagattcatcgcagaaatacccagctgctcaagggaagaagttgttctgcggtattgatgtaggcgcggagattctggcgattgccattatggagttggaccgtccgtgcgtgcaacgcgagttcgccaacacggttgcgggtcacaaagcgcttctcaactggctgaagaaatttaagtcccaggtacgggtgtcgctggaggccactggcatttactcgatggaccttgccatggctctggacgcgaccgagtgggtggaggtagcggtgctgaatccgaaaagggttcacgactttgcgcgaacacttcgccggtccaaaacagactccgcagatgcccaagtgctggccgagttcagtctgcgcatgcccttcgcagtctggcaaaagcccagccaaagcgcccttgccctgcgcgccgttagccggcatctggaagcgctggtggtccagcaaaggcgagaagccaatcgactgcatgctgccgaaagatcgatagccacgccgcgctgcgtgatcgcagacctgaagcgttcgttggccggagttagccgccgtatcgtgaagctgcgccgtgaggccatgacgttgatcgccgccgatgtccagttgaacgagcggttcaagctgttaacaggcgttcctggtatcgcggccgtcagtgcgctccagatcctgggcgagctggtcctgctggccccggacatgaaggtgcgtcaatgggtggcgcgaagcgggctcgatccggtacaccaagactctggcacttcggtgcataagccttcgcgcattagtcgcgccggcagtcgccacctgcgccgcgccctctatatgccggctctggccgcggtgcgttgggacccgcacctgaaagccttctatgaggctttgctcgcgcgacataaacgcaaactgcaggcgctgatcgcggtcgcccgcaaactgcttcatgccatctacggcatcttccgcactcgaactccatacgacggaagcaagctcttcccgcatctggagaccgcataaacgctacaatcgcctcaccaagtgaaacggaagcgggctctgctgggaagcaaccatgccgagggataacttggtgggctcatcctgacgatgaaccgatggccgggcggggtatcctcgctcggccccgacaggcatcggagggaaagaccctccatgccttgaaaatccaaacccgccccgcccaaaatgcttgaccggaaagagagaat

SEQ ID NO: 9641 - DNA, 1328 bp, unidentified
  source 1..1328: mol_type = unassigned DNA; note = element_f192aab
  misc_feature 1..2: note = core
  misc_feature 3..68: note = LE
  misc_feature 69..1073: note = CDS
  misc_feature 1074..1328: note = RE
  misc_feature 1095..1326: note = bridgeRNA
ttaatgagatggtcactccctccttcccagtactatgctgaggacaggctttcattcggagaaccatcatggaaaacattgcgcttattggtatcgatctgggtaagaactctttccatattcattgtcaggatcgtcgcgggaaggccgtttaccgtaaaaaattcacccgaccaaagctaatcgaatttctggcgacatgcccagcaacaaccatcgcgatggaagcctgtggcggttctcactttatggcacgcaagctggcagagttagggcattttccaaagctgatatcaccgcaatttgtccgcccattcgttaaaagcaacaaaaatgacttcgttgatgctgaagctatctgtgaagcagcatcacgtccatctatgcgtttcgtgcagcccagaaccgaatctcagcaggcaatgcgagctctgcatcgtgtccgtgaatccctggttcaggataaggtgaaaacaactaatcagatgcatgcttttctgctggaatttggtatcagcgttccgcgaggtgctgccgttattagtcgactgagtacccttcttgaggacagtagtttgcctctttatctcagccagttactgctgaaattacaacagcattatcactatcttgttgagcagattaaagatctggaatctcagttgaaacgaaagttggacgaagatgaggttggacagcgcttgctgagtattccctgcgttggaacgctgactgccagtactatttcaactgagattggcgacgggaagcagtacgccagcagccgtgactttgcggcggcaacagggctggtaccccgacagtacagcacgggaggtcggacgacattgttagggattagcaagcggggcaacaaaaagatccgaactttgttggttcagtgtgccagggtattcatacaaaaactggaacaccagtctggcaagttggccgactgggtcagggagttgttgtgtcggaaaagcaactttgtcgtcacctgtgctctggcaaacaagctggccagaatagcctgggcactgacggcgcgacagcaaacttacgaagcataaaggcagaaatacaccagtttaaacaatcattcatctggttttgcgaatactgatattgatgatacaaacggcccaccggcctgttgaggaacctgtaaaacggaaaggctcgctgaagccgtatattttctggaggttcatcaggcgcggaactcatcgaggcgcgggaataaaatcccattcagacgccggatagattcaagcaagccaacttatcgtcaaaatcggtgttgcaaaaacgggagtgaccataga

SEQ ID NO: 9642 - DNA, 1494 bp, unidentified
  source 1..1494: mol_type = unassigned DNA; note = element_f19955c
  misc_feature 1..2: note = core
  misc_feature 3..247: note = LE
  misc_feature 248..1474: note = CDS
  misc_feature 1475..1494: note = RE
  misc_feature 13..227: note = bridgeRNA
ctaatcagttctgggagtggccatccggcacactcctggtggtagccggccggcgggtgagcactcttttgtcctggacgcctgagtcctgctgaaagacagtgcccctgccggtgggccgggagagtcgatcgctgctgggatgtcgtgccccgcgtgttcgtggcgggaagcactgcttgattaggtcgctgatggttctcccgcgggctgcacaaggagatcgagatcgagagcgggagggccgttgcggctgttcgtgggggatgactgggccgaggaccatcacgacgtcgagctgatggacggcacgggtcgccggctggccaaggcccggctgcccgagggcgtggcggggatggcccggctgcacgcgatgatcggcgagcagctcggcgagaccgacgacgaggacgtggaggtgctggtcgggattgagaccgaccggggcccgtgggtggcggcgctggtcgcggccggctacacggtgctggcggtcaacccgttgcaggcggccaggttccgcgaccggctgggagtgtcgggcgccaagagcgacgccggtgacgcgcacgtgctggcggacatggcccgcacccactcccacgaactgcggccggtcgccggggacagctccgaggccgaagcgatcaaggtcctggcccgcatccacaagacgctgatctgggaacgcacccgtcacacccagcgactgcggcacgccctgctcgactacttccccgccgcactggacgcgttcgaggacctcgacgccgccgacaccctggaactgctggccaaagcctccactccagcgcgggccgcccggctgacgatcgcccagatcagcggcgtgctcaaacgcgcgcgccgcaagaacatcgcggagaaagccagcctgatccaggccgcgctgcggaccgggcatctcggccggcccgagatcgtggcggaggcctacgccgcctcggtccaggcgctcatcgcggtcctggccacgctcaacacgcaggtgaagaccttgcaggggcaggtggaggcccattttgggcagcacccggccgctgagatcatcgggtcccagcccggtctgggaccgatcctcagcgctcgggtgctcgcagagttcggcgacgaccccggccgttacgcctgtgccaaggcccgcaagaactacgcgggcacctccccgatcacccgcgcgtcgggcaggaagaaggtcgccctggcccgcttcatccacaacgaccggctgatcgacgcgctgatgtcccaggcgttcggcgcgctgaaaacctcgcccggagcacgcgcctactacgaccggcagcgcgcccgcggcgcagggcacaacgccgccctgcgccagctggcgaaccggttggtcggcatcctgcacggctgcctcaaaaccggcaccctctacgacgagacgaccgcctggtcgcatcacgccgagaacgtcgcggcttgacatttcagctcctgggatgt

SEQ ID NO: 9643 - DNA, 1426 bp, unidentified
  source 1..1426: mol_type = unassigned DNA; note = element_f19a0fc
  misc_feature 1..3: note = core
  misc_feature 4..128: note = LE
  misc_feature 129..1148: note = CDS
  misc_feature 1149..1426: note = RE
  misc_feature 1188..1426: note = bridgeRNA
agaattgaaatgaacgcgtcccacccgtgaatgtgagtgcggaggaagaggtggatcctcacgggccaacggcatcgatgtgcccaggtggaaaatgcacgcatttcccggcaaccggaggatccacgatgaacagtatggccgtaggcgtggacatcgccaagcacgttttccaggtgcattacgtcgatcaggaaagcggagagatcgtgaacaagccgctcaagcgggccaagtttcttgagcacttcgccaaccgtacgccctgtctgatcgggatggaagcatgtggcggagcgcaccactgggcgcggcaactgacgaagatggggcacgaggtcaggctgatgccggccgagttcgtgaaggcgttcaacatccgcaacaagaacgatgcggcggatgcccgtgcgatctggctggcggtgcagcagccgggcaagccggtggcagtgaagagcgagatgcagcaggccatgctggcgctgcaccggctgcgcgagcagttggtgaagttccggacgatgcagagcaacggactgcgtgggttgctgacggaatacggtgaggtgatgagcaaggggcgagccaagctggataaggagataccggctgcgcttaagcggatcgcggagcgtctacctgccgtgctgatcgatacgttgcgcgaacagtggaacggcctggcgaagctcgacgggcagatcgccgagatcgagcggcgcatgcgcgagtggaagaaggcggatgcggccgtaaaagcggtcagcgagattcccggagtcgggctgctgacggccacggccgcggtggccatgatgggcgatccgaaggcattcagctcaggccgggagttcgccgcctgggcgggcctggtgcccaaacagaccggcacgggcggcaaggtgaacctgcacgggatcagcaaacgcggtgacacgtatttgcgcacgctgctgattcacggcgcgcgctccgtgttgagtcatgcgaaagaacccggtccttgggtcgagcagatgaaaaagcggcggccgccgaatgtcgtgatcgtcgcgctggccaacaagatggcgcggacgatctgggcggtgctcgcccatgggagaccgtaccggaaggactacgtgagcgtgaaaccggcctgattggttcatgcgcagtagaacatcaacgtttaacacagggtgaacgtcgaaaggttgcgcagcaatcgagtgtgatgacaaaccaggtaggaccgggactcgctaaacctgaatgggttggagagcttcgagctcgcccggagaatgaggtgcgagtcagcgtatttcataggggcccgcagcggcagtaccggctgcaacaaggccggatatagagctgctgcccatcctgtctgtcgtaacacacgagaactgttgcaaacgggacgcgttcatat

SEQ ID NO: 9644 - DNA, 1406 bp, unidentified
  source 1..1406: mol_type = unassigned DNA; note = element_f1aecba
  misc_feature 1..2: note = core
  misc_feature 3..87: note = LE
  misc_feature 88..1140: note = CDS
  misc_feature 1141..1406: note = RE
  misc_feature 1172..1392: note = bridgeRNA
gatggggtggatggctcccgctcccggcatcagagtgccacgttgtggaagcgatcatgcaaccacgagcaaagggagccacccgccatggaaattaccacggtcggcctcgatctggccaagcgcgtttttcaagttcacgccatcggcggcagcggcgaagttgttgtgcgcaagacgctgcgtcgagcgcagatgatcccgtattttgccgggctcgagcggtgtctggtgggcatcgaggcgtgtgggacgagccactattgggcccgcgagattggcaagcttggccacgaggtgcgcctgatgccgccggcctatgtgaagccttacgtcaagcgtgggaagaccgaggcgagcgatgccgaggcgatctgcgaggcggtgcggcgcccaacgatgcgctacgtcgcgatcaagtccccggagcaacaggcggcgctggggatgcacaggacacgcgacctgttcgtcaagcagcgcacacagctggtcaacatgatccgtagcctgctggcggagttcggcatagagatccggcaggggatcgggcaggcgctgatggtcgccaagcgggccgctgcggacgatatgccggacataccgccgctggcagcaaaggtgatcgcgggcctggccgggcaggtactcgatctccaggcgcggctgcgtgagatcgagcgtgagatgctcgtctggcaccgttcgaacgacgttgcccggcggctggcgacaattccaggtgtcggcgtggtctgtgccacggcgctcgctgcttcggtcaccgacccccaccagttccgctccggacgacagttcgccgcttggctgggtctgacgcctttgcaacactcgagcggcggcaaggagcggctggggaggatctcgaagatgggcgacaaatatctgcgccggctgctcatcgtcgggatgacctcgctggttcggcgggcgaagtacaagcccaccacagtcgatccgaggcttgccgatctgctgttgcgaaagccggtccgcatggtcacgctcgcacttgccaacaagaccgcgcgcgtggtctgggcgatcatgacgcggggtgggacttaccgcacgcctcaaccggccggcgcgagcgtttctcaggcggcagtcgcctgacaaggaaacaggggcaagcgcagaacaaattcagaggttgcgaggacgatgcgatgtgatggcaaaccggtcagaccggggatgaggacaacccgcccaatgtccagggcatcacagcccgataagcagaatgggaccttgtccgcggataccatcagggccagcggtcatgtgcgaccgcatcaaaaggccggacacaagactgcacccgaccattacgccaaaccgtcaaatcaacccttgcaaagcgggcgccatccacacag

SEQ ID NO: 9645 - DNA, 1383 bp, unidentified
  source 1..1383: mol_type = unassigned DNA; note = element_f1b3abf
  misc_feature 1: note = core
  misc_feature 2..86: note = LE
  misc_feature 87..1127: note = CDS
  misc_feature 1128..1383: note = RE
  misc_feature 1158..1378: note = bridgeRNA
caatgggatggacccctcctcacctatcgacatcgatgtgccaaactgagtgtgtctattcagttaacgataaagaggagtccgctatgaagattaatcgagttggtgttgatttggcaaaaaatgtttttcaattacacggtgccgattacaaaggtaaaactgtgtggaagcgacagttatcccggtccaaatggttaccggttttatgcgatacggttgaacccggaaccgagataggcatggaagcctgcgctggtgcccatcactgggccaggcagttaatgcagcggggttacccggtgaaaatcatcccgccgcagttcgtgaagccctttatcaagagcaacaagaacgacgccaatgatgccgcggcaatctgcgaggcgatgggcagacccgatatgtacccggtcaaggtgaaaacggttgaacaacaggatctccaggcgatgcatcgtatccgagatgaaatcaagagccatcgtatcgccaaggcgaatcagatccggggcctggtcaccgagtatggtctcgtggcacctcaacagttgcatgcgctgcgccgagctattccagactggttggaagacgctgagaatggtctcagcttcttgttcaggcaactcctgcaggggctatggggagacttatatgcattagatcaacgaatggctgaactggataaacagattgccgtggtcgcacaagaagatcctacggctaaacggttacaacagttgcgcggtgtgggtccgttgattgcgacggccctggtggcgacaatcggggatggcaaacagtatcgtaaaggcagagatatggcggcggctcttggcttaacgccgaggcaacacagttcgggtggtaaagaccggctgctcgggatcagtaaacgaggtgacgcctatctacgctgtttactggttcacggtgcccgttctgcggtgcgtacggccaaagataaggatgaccgattaagccgctggatcattaatctgcaagccaggcgacatgcgaatgtggttgccgttgccatggctaataagatggcgagaatggcctgggtaataatgacgaaggatgttgattatgatccggatcttgcagcagcatcaatcagctaaatacaggtaacgaggagagtctattcaattgacgattgcgaagtaaacggttaatggcaaacaggtcgaaccggcgtcgataaaacccgcgagtgtccgcgtgtgtgacaacacggcaaagcaatagggaatcggtgcgcgaaaaacccattatggcccggcatcagcgtatgccacctgaagaggccggatatacgtatgcagtcgagcctactgccaacaaccgattacttgcaaacgaggaggagtccatata

SEQ ID NO: 9646 - DNA, 1512 bp, unidentified
  source 1..1512: mol_type = unassigned DNA; note = element_f1b754d
  misc_feature 1..2: note = core
  misc_feature 3..238: note = LE
  misc_feature 239..1414: note = CDS
  misc_feature 1415..1512: note = RE
  misc_feature 3..218: note = bridgeRNA
cttgtattatagagtagtagttattagagtccctctccaaggacttatgctacactgtaagagatgctgtggatttgttttctgctcctaccacaagatggttcttgaaaggttcaaaccacggtctcttacattttgttaatcagttaaataccgccagacggtttatctagaacaaggttacaaaagtaagatgttctgtggatacagcattaattttcccgttggaggttttattatgatttctgttggtattgatgtttctaaaagcaagcacgattgctttattatgaattccgatggtcaagtcctcgctgatgtatttactatccctaatacattagatggatttcattctctgctccaaaaaatcagctcttgctgccaacctcaagaaataataaaaataggtcttgaggctaccggacattacagctacaatctgcttggcttccttcttgacaatggtcttcccacctatgtcttgaatcctttacgtactaacctttatcgtaagagtcttagtttgcgtaaaactaaaactgataaagttgatgcacgcaatattgcagctatgcttttgtctgatttgagcctcaagccctattcagacacagcttaccacaatgaggagctaaagtcactaaccagatatcgctttgttaaagttaaagctcgggccaagttaaaagcttccatttcacgtcttgtctgcatcctttttccagaattagaacagctggttcctactctccatatgacatcggtatatgctttgctggaagcatttccaggggccgggaagatttcagaagcacatcttacaaggctgaaaacattgctccatgatgcttctaaaggccgctatggtaaagatatggcgcttaaacttcgtgaagcctctaaaacttcgatcggttctactctgcctgccaagtctttggaacttagacacactattcatcttatccggatattagattctgaaataaacgacattgaaaaagaaataaacaagatcatggagtcgattaactctccaattactactattcctggactcggagccaggatggctgccatgataatcgctgaaaccggtgatttttccagatttgagtctgccgataaacttttagcttatgctggcctttctccctcaacctaccaatctggtcaattaaaaaactgttaccctcatatggaaaaacgtggctcaaggtatctgcgttacgccatttttaatgctactaaatttgtatgtcattgggactctgttttttctgtttatctggctaagaaacgatctgagggtaagcattacaatgtcgctatttcccacgcagcaaagaaattagtgcgactgatttttgctctggaaagatctaaacaaccttaccagttagcaatttagttacaatggtcatatttgacatttatttgttatgcctttttttaactaattgtgttggtatctcttcctattttccagcttgacttttaatagttaat

SEQ ID NO: 9647 - DNA, 1204 bp, unidentified
  source 1..1204: mol_type = unassigned DNA; note = element_f1d50e5
  misc_feature 1..2: note = core
  misc_feature 3..187: note = LE
  misc_feature 188..1171: note = CDS
  misc_feature 1172..1204: note = RE
  misc_feature 12..196: note = bridgeRNA
cttgtatctctccagatgagctgcttagctatcagttcatcgcccggtggggttgatctggcacccatcctgaggccttgagcctgtgacgtagattcaggcccccaccgattctcttgaaactgaatggtatcggagtccctccctgagggggagtgaggctgaatgtacaaggggagtggagagaatgaaagcggttatcggcattgacgtgagcaagcacaaactcgattgcctgtggctgcgcgacagcgagacccgcaaggccaaggtcaaggttcaccccaacacgccggcgggccaccgccagctgctggcctgggtcgagcaccagaccggcaggtcggtgcgcgagtgccggttcgtgctggaggccacgggggtctaccaccagcgcctggcctatgcactgcatgaggcaggggcggaggtggccgtgctcaacccggcccaggtgcgggactatgcccggggcctggcggtacgcaccaagaacgaccgcaaggatgcgatggtgctggcgctctacggggccaaggagacggtgcggcgctggcagcccgagcccgagccggtgcgccagctcaaggggctgctggcgcggctcgaggcgttggaggcggacatccggcgcgagcacaatcgcctggagaaggcccgggtcggcgggagcgcggcggcggtcatcgagtccatcgagaaggtgctgcgccaactcgagcaggagaaggcgcgggtggagcggctgatcgatgagcacatcgacaagcacccgccgctcaagcacgaccagcagttgctggagacgatcccgggggtcggcaaggtcctgagccgccacatgctgagcgtgttccgcgcccgcgacttcgacaacgccgggcagatggccgccttcctgggggtcgtaccggtcgagcatagctccgggaccagtgtgcgcaagccgccccggctgtccaaggcgggcagcgccaggctgcgggccaagctctacctgccggccgtggtggccgcacagcacaaccccactgccagggcggtgtatgagcggctactcaaacgaggcaaggccaaaatggcggccatcggcgcggtcatgcgcaagctggtgcacatctgttacggggtgctcaagcaccagaaggcttacgccccacaagcggcctgacgggcgcttgtgggggtaagggagagatggtat

SEQ ID NO: 9648 - DNA, 1516 bp, unidentified
  source 1..1516: mol_type = unassigned DNA; note = element_f1d8455
  misc_feature 1..2: note = core
  misc_feature 3..237: note = LE
  misc_feature 238..1404: note = CDS
  misc_feature 1405..1516: note = RE
  misc_feature 3..219: note = bridgeRNA
cttgtataatgaacttgtagtcaaactacaggttcaatttttataatcatatatactaaacatagtgttgtggattggtgttgcctcctatagctttgactatttaatttaggctccaaccacagttctatgtttttttgtttattagttagataacgctttgacgttttatatcgagcaaggatacatgacatagactctgtggactcacaaccaaatttgaaaggatgtgttcttatgatttatgtcggtatcgacgttgctaaaaagaaacatgattgctacattgtaaattctgatggcgaagtaatcaaagatgtttttaccatttctaactcacgcgaaggatttgataaactctttgacgccatccctaaagattctttggacaaagtaaaagtaggacttgaagccactggacactatagcacaaatattgtcaacttcattaatgataaacagttcccgctggttatcttcaatcctctccaaacaaatcttttcagaaaagctcaaacacttagaaaaagtaaaacggataagattgatgctcgacttattgcactgatgctccatatgagtgactttaaaccctactctacttcatcataccaactatcagagcttaagtcactaactcgccataaatctaggttaaaagaaaatatggcacgatataaaattcatttgattcggatcatggacatcatgtttcctgaactcgaatctcatgtatattcattaaatcaagcatctacttatatgcttttaaaaacctttggatcaaaagatgctattgccagtgctcatattacaaaactaacaaacatccttaaaaaagcttcgaatggaaaatattctagagagaaagcattaatcataaaaaatgctgctcaaaattctattggatacgatagtaaagcgttgagctttgaactttctcaaattttaaatttcattactatttatactaacgagattaaatccatcgaaaaggaaatcaaaattattgtagatgaacttgatagcccacttctctcaattccaggtatttcatatggtttaggatcagtcattctttcagaaatcaatgatatacatcagttttctacaccttctaagctacttgcttttgctggacttgaaccatcaacatttgaatcggggcagtttgttgccacaaacatgaaaatggttaagcgcggttcttcatatcttagatgggcactgcttgaagcagcacggctagtagccatgagagacaaaacattccacgattactatcataaaaagaaagctgaaggaaaacatcattacgttgctaactcacatgtcgctaaaaaacttgtaagagttattcatcatttacttactaacaatctaactttcaaacctcaaaattaagcattaaataacttttttggtagaataactaccttctttttgttatgcaatttttcacaaaatataaacaccacaattattcctatatttacattgacttcatatagttagt

SEQ ID NO: 9649 - DNA, 1336 bp, unidentified
  source 1..1336: mol_type = unassigned DNA; note = element_f1dfd00
  misc_feature 1..2: note = core
  misc_feature 3..77: note = LE
  misc_feature 78..1094: note = CDS
  misc_feature 1095..1336: note = RE
  misc_feature 1099..1332: note = bridgeRNA
ttaatgagatggtcagcccggcgagaacctcaggtctacactactgaggttctcacttttcctgaggaggttttctcatgaacagcgtaacgcttctaggcatcgacattggcaagaacagcttccacttacacggccaggacgcacaaggccatcaggtactgcgcaagaagctcaatcgaagccagttgctgccattacttgcacaaatgcccccctgcaaagtcgccatggaatcctgtggcgggtcacagtttcttgccagagaaatcaccaagctcggtcatcaggtccaactgatagcgccgcagcatgtgaaggcttacgtcaccggcaacaagaacgacttcattgatgccgaggctatctgtgaggccgcatcacgtcccagaacgcgctctgtacaggtcaagtcggttgatcagcaggtgttgtcgaccgtgcataaactgcgtaaatcactggtgagtcggcgcactggagtgatcaaccaggtgcacgggttcttactggagtttggcgttatctttcccgctggctatgccgcgctggatcgggttcctgcattgatggaagagcacaatctaccgctgcgcctgcggcaggctattagtcggatgcttgataacattcgtcaattgaccagcgaaatcaaagcactggatatcgagatcaagcagcaggtgaacgggagtgacgctggcaaaagattacagagcatccccggcataggccccctcatcgctagcgcgctggtggccgatgtcggggacgcttcgatatataaatcgtcccgagatttttcggcttcgttggggctggtgccacggcaatactctaccggagggcaaaccacgctcctgggtatcagcaagcgcggggatcggtatttgagaaccttgctgatgcagggcgcccaaaccctgctttatcgaatcgataagcgaaacgacgcccttggagtctgggccagaaacctactggctcggaaacctcttaacaaagttgcctgtgcgctggctaataaaatggccaggattgtctgggcgctgctgaccaaaggtggcacctacaacgggcatttcaccgtgtgacccagctttaccaccggcttttgcgacgtcagtaattgatggcgataaacggcagataccctggctgagaacctgataagcaaaatagctttcgaagctgaagcgcttttaaggacaggcaggagcgaatactcatcaagggccgaacgcgtaaccgcgctcacaaggagcccggatacattagcgcaagcctgatttaccgttcatcgtgactggatagcaaaaggtgggctgaccataca

SEQ ID NO: 9650 - DNA, 1419 bp, unidentified
  source 1..1419: mol_type = unassigned DNA; note = element_f1e4359
  misc_feature 1: note = core
  misc_feature 2..221: note = LE
  misc_feature 222..1247: note = CDS
  misc_feature 1248..1419: note = RE
  misc_feature 15..233: note = bridgeRNA
ctgatggaggatctgggcgggcgttgagcgtgggctcgtagcgtcctggggtctcggccggctggctctcgaactgcctgctgctcgcgtgtcgggttggcttccgaacgaagcgccagctggtcgaggtccggtcacggcgtggctcgaaagaggcgagcagcacctgcattaggagtgcccgccgtgacgctcacacgcgtccacgaggagggacttccatgtcggtgatcatcggtgtcgacccacacaaggggacccacacggctgtcgcgatcgaccgcgacgaacaacccatcgccaggctggaggtggttgcggatcgatgccagaccgagcggctgttggcctgggcagcaccattgggcttcgaacggacctgggcgatcgagtcggccaacgggttgggcaagctgctggcgcagcagctggttggtgccggcgagcaggttgtggatgtcccgccgacgttgtcggcgcgggtccggttgctgggctcgaccaaggccggcaagaacgacaacaacgatgcgctgtcgactgctatcgcggggctgcggcattgcgagttgcgcacggtccgcggcgaggaccacaccgccgtgatccggctgttgatcgaccgctacgacggcctggtggcgttgcggacccaggccacctgccggctccacgccgtgctgcgcgagctcatcgccggcggcgcacccaggcgtttgtcggctaaccgggccgccaagctgctgcgcagcatccatcccgctggtccagcggccatcgaacgcaaacggctcgcggtcgatctcctggccgacgtacgacgcctcgaccagcagatcaccaccacgcgatcacgcatcaccgacgctgtcgggcactccaacaccaccctgctcgagctgcacggcgtcggatcgatcgtcgccggctacatcctcggccacgtcggcaacccggcccgcttcgcgacaccggaacggttcgcttcctacaacggcaccgcccccatcgaggcgtccagcggaccgcgcaagcgacaccggctcaacccgcgaggcaaccgcaagctcaaccacgccatgcatctcatcgccgtcacccaaatccgcaacgacactcccggccgcgtctacttccaacgcaagctggccgaaggcaagtccaagaaagaagctctacgcgccctgaagcggcgcatcagcgacgccgtctggcgccaactccaagccgacctcaagcgtcgctgaccagcgggcccgggaggacaatcaggggcgactctgaaatccagcgcggccggcttgcaccctgacaccggcacttcggaccagtcactcccggacccgacagcgaccctacgcccgccgcccacgggctgcttcaacgcgcccacacactccccttgacacaaagaggctt

SEQ ID NO: 9651 - DNA, 1345 bp, unidentified
  source 1..1345: mol_type = unassigned DNA; note = element_f1e8b8a
  misc_feature 1..3: note = core
  misc_feature 4..81: note = LE
  misc_feature 82..1104: note = CDS
  misc_feature 1105..1345: note = RE
  misc_feature 1083..1334: note = bridgeRNA
tgatgatgtggacgcccctgcaccgacggtcagccgctatgctgctgaccgtcacccgaagcaggaagaggagcgtttaccatgacaattattacgatgggcctggatttggcgaagagtgtgtttcaggcacacggtgtggatgagcacggcgccacggtgctggtgaagcggctgcacaggaagcagatgctgcctttcttctcgaagctaccgccatgcctgatcggcgtggaggcctgcggaacggcgcaccactgggcgcgcacgctcgccgcgatggggcacgatgttcgcctaatcccgccgtcctacgtgaaggcctatgtgaagcgcggcaagagtgacgcgctcgatgccgaagcgatttgcgaagccgtgcagcgtccgacgatgcgattcgttccggttaagacggtcgagcaacaaggcatcctcatgacccatcgcgcccggtccttgctcgtgcgtcagcgcaccatgctcgccaatgctttgcgcgcgcatctggccgagctgggcttcgtcgcgaaccccggtatcgccaaccttgcaaagttggccgagcaggtgattgccgataagaacgccctgccatcatatgcgcaggcggctttgaagatactgatccgccagatcatgacgatcagcggcgagatcgcggaactcgaccagcaactcatcacctggcatgcccagaacgaggccagtcgcaggcttgctgcgatccccggcctcggcgttatcacggcgacggctattgccgccaccgttacaaatcccgatcagttccgctcgggacggcagtttgccgcatgggtcggcctgaccccgcaacaacattcgacaggcggcaagaccaggcttggcgggatctcgaagcagggagatcgatacctgcgtcggctactcgttgtcggcgccacagccgtcatgcgtcacacgaaagataaatccacgccaatggccgactggataaggaagctcctggagaagaagccattccggctcgtctccgtcgcgcttgccaacaagctggcccggatcgcatgggtcgtgctgacccgaaaggaagactatcggccctacgaactggcgacctgacacaccaccgatcacccgaattggcagtggcagtcgatgatgagtaacgatcgagccaatggtgaggaaaacccgtctgattcaatgcgcttcacaaacgcgccatcttgatcagggacctcaccggcggatttccatcaaggccagcggcaaccaaccgccgcacaaacaggccggacatatgaaagcaaccgatcaaaccgtatcgaaaaaagcccttgccataggtggcgtccacata

SEQ ID NO: 9652 - DNA, 1375 bp, unidentified
  source 1..1375: mol_type = unassigned DNA; note = element_f1eab2e
  misc_feature 1..2: note = core
  misc_feature 3..73: note = LE
  misc_feature 74..1108: note = CDS
  misc_feature 1109..1375: note = RE
  misc_feature 1151..1366: note = bridgeRNA
ttatgggatggcccgcccctcccgccggcaccgagctatggtgctggtgtgtttgagaggaaggagcgaaccgatgaccatcgtgacccttggaatcgacttgggcaagaacctgaatagtattgttggcctggatgcggaggaacgggtcgtcctgcgccgacgcgtccggcgagcgacccttgccgaacttgcaggcaagcttgagccttgtacagtcgctctggaggcgtgctgcggggcgcatcatgtcggtcgtctctttgccgcgaaagggcatgaggtccgactgatgtcgcccgaacatgtccgtccgtacgtccgtgcacaaaagaacgacgacaacgatgcggcggggatcgccgaggcagccacgcggccgaccatgcgcttcgtcgagttgaagagccaggagcggctcgacctacagaccctgcaccgggcccgctctcgtctggtggcagcgcgaaaggcgctcgtcaatcaacttcgggcgatcctgctcgagcgtggacataccttccgccaagggcgcagggttcttgaacgggaaatcgaaccgttcctcgctgagccgccttcggacctttcggtccgcatcttggtgctcatcgcagacatgcgagccgagtggcgatcactcgatgagcggatcgacgctttgaacgacgatctgaccgagcatgcacgtgccgacgaggcggcaggccggctgacctcgatacccggcatcggcatccttggcgcaaccgcgctgtttgcggccgtcgggaacggtgaggcgttccgtcgggcgcgcgacattccagcctggctcggcctcgtgccgaagcagatgacgacgggcggcaaaccgcggctgctcagcatcaccaagcgggggaacaggcacctgcgcatgctgctaatccacggcgcacgcgcggcactgccgagcctctccaaacaggcgacgcctttgggctcgtggcttcgaggtcttctgtcccgagcacaccgcaacgtggtcattgtcgcgctcgctgcgaaactcgctcgtatagcgtgggcaacgctgcggcatggtgtacgcttcgagccggaaaagggcacggtgatgaccgcctgagcggagctgtatagtcgaaaggatcggccccggatcgagggagccgtatgaggttggcggaaggaggctgatggccggaagggtcgaacacccgcgtccctggaaacctggttcaaaaaacggcgctacgacgccgagacttttatgaggaccaggacgcgcggatctccatcatggcgagggcagcaacgccactacgccggatacgtttgtgcacgaccaaacaaagcctgaagcaaccaacttgccaacggggcgggccatacg

SEQ ID NO: 9653 - DNA, 1609 bp, unidentified
  source 1..1609: mol_type = unassigned DNA; note = element_f1eea47
  misc_feature 1..2: note = core
  misc_feature 3..278: note = LE
  misc_feature 279..1487: note = CDS
  misc_feature 1488..1609: note = RE
  misc_feature 14..298: note = bridgeRNA
ctactacaatatatttatggttaatattcctaacatccagctaggatgttacccatcttgttgcttaagctgttagaatgtatggagcaatcggtatagcggaaacctccttgggctttgcgcccgtaagtaagtctgctacccagctcctcattcgcagcattcgttttatgcaggttgaacccatgtgcgttcgcgtgataccccagtagattgaataggcaatgagtaaaactggtattgaccattgctatcattaagataaggagcattgtattatgaacgcagtaggtattgatgtttctaaaggtaaaagcactgtcaccatacgccagcccggcaacgtggtcgtcctccctccctgtgacatcaggcacaccagatccggcattgacagcctgatagaccagatcaaggccctggatggtgaaacaaaggtctgtatggagcacacgggcaggtattacgagcctatggctttatggctgtcttctgccggcatatctgtcagtgcagtcaaccctgtccttgtcaagaactttgatactgatgaatccctgcgccgccctaagactgacaaagcagattcctgcaaacctgcaagatatacccttgacaagtgggacagcctgccacagtatggtcttatggataaaacacgcaatcagttaaagacaatgaacaggcagtttgcgttctatatggacgaaaagaccgccatgaaaaacaaccttatttcccttctggaccagacattccccggggcaaatgatttcttcccaagccctgcacgtcctgacgggagccagaagtgggtggattttgtctacacctactggcatgttgactgcgtccgttccaaatcccctgatatgttcacggagcattaccggaactggtgcagccgcaataattataacttcagtgcggacaaagccggatacatttacgaaaccgcaaaagaccttatcgccgtgttcccgaaaaacccggatacaaagctgctggtccggcaggctgtccgcctgctcgatacggcttcccggactgttgaaaccctgcgcatccagatgaatgataccgcatcaaaacttccggagtaccctgttgtcatggcaatgaacggtgtagggccgtcactcggcccacagctcatggctgagatcggtgatgtgacccgctttgtgaaaaagagtgccatcacagcctttgcaggtgttgaccccggcgtaaacgagtccggctcctacaggcagcagagtgtgcccgctaccaagaaaggctctccccatttacgcaggacactcttccaggttatggacggccttattaaaagggctccattagacgaccctgtttacgcctttatggcaaagaaacgcagcgaaggcaagccttactatgtctacatgactgcaggtgccaacaagtttctcaaaatctattacggacgggtgaaagaataccttgcctcacttccgcaatgaccacttcttccatactcttgcttcagaccagcggtaatcggtggtctgtttaaagtacgcaaaattcctacataaaacttgtttgaaaaatttcaatttcctattgactttttatttgcagg

SEQ ID NO: 9654 - DNA, 1788 bp, unidentified
  source 1..1788: mol_type = unassigned DNA; note = element_f1f06b8
  misc_feature 1..2: note = core
  misc_feature 3..407: note = LE
  misc_feature 408..1640: note = CDS
  misc_feature 1641..1788: note = RE
  misc_feature 91..369: note = bridgeRNA
ctcgtataatagtttttggagggtttaagttaagaaatttccagttacaaaccctaatgattcgacctttatttccaaaaactcactggaaattttcatgaacattggcaatttaatatttttaatgctcatggtacaatggtatcagccattgaggatagttttgtttcaccttgttgaacccatgtggttacttcttagggagtctgttcccctggcctggtgttatcttcgaaccactggttgtttacctggcttcctctttctcctttatggcagtcgggagattcatgcacagttggtttccagggcggattcttatggcgagggtgttgatgcatcaggcacctgggcattggttaaatcaatggctttcatactctttgctctgaaaggaggtgtttgctttgcctagtcctttatttgttggcattgatgtaagttgcaaggataataaagttcagctgctccattcagatggtgctgaaattacaaggttttctgtccccaataatcatcccggtgctaaatccctctctgaaaaaattaccggggtcatgggtaagaacaaattcgattcccttgtaattggtttggaagccacttcagtctatggtcatcctcttgtctacttcttaaggcaagaaccatcaattaaggctctcaatccaaggattcatgttcttaaccccaaacaggttgcaaacttcaaaaaggcttatcctgaactgccaaagaatgactgggtagatgcttgggttattgctgacaatctccgttttgggcgtattacaaaggaggtttgcatggacgaaaagtttgatgccctgcaaaagcttacccgtgagcgctaccatgtggccaaaaacttaacccgggaaaagaaccggttcttaagcaacctgtttttgaagttcagtgcccttgctcaggaagacatattctctgataagtttggggctacatctatagccataattgaggatttcttttccgttgatgatattgcttatatggatgtagacaaactggctgaattccttaacaagaaatctaaaggccattttgccgatcctcatgaactggctgaaaccatcaagaaagctgccagaagttcttacaggctgcccaaaacagttaatgattctgtaaatcaagtgcttgctgtatcgctggtagccattaaagctttaaaaaagcagcttgaaacgcttgacaaggctattgaaacacagtttgcccttatacctaacacattacagtcaataaagggtgtggggcctgtgtatgcagctggtatagtagctgaaatcggtgatattaaacgtttcccaaaccatgctgcattagctaaatttgcgggtttggcatggtccgaacatcaatcgggccagtttaaagctgagaacactcatatgatacgttccggcaatagataccttaaatactacctcttagaagccgctaacaaggtgagagtgcatgatcccgagtttaagcgcttttatgagttaaagtatgccagaaccccaaaaacaccacataaacgtgcacttgccttgactgccaggaaatttgtccggcttgtctatgcactgctacatagcaaccggctttatacgccgccaaaaggagagtaatttccaattggtgttccacaacttaccaattttgcaaattaaatttggtaagtctattgaggatggcctttttgtctcaaaaaccccttaaaaactattaaattttcaaaaattttttccaatcacctcttgactttttaccactgga

SEQ ID NO: 9655 - DNA, 1276 bp, unidentified
  source 1..1276: mol_type = unassigned DNA; note = element_f1f882d
  misc_feature 1..2: note = core
  misc_feature 3..211: note = LE
  misc_feature 212..1204: note = CDS
  misc_feature 1205..1276: note = RE
  misc_feature 35..201: note = bridgeRNA
attgtatattaattaataattataattttgtataaacttacaacatcaggaagtggaagaagaccgatttttcattaatccttgagattgtagattatgttcagtccccacttctttacatccaaaaccggatagctcattgggctttatataaccccgcattcgcaatgatggttcacagatgtattgatgttattaaaatattaagactatgacctacgttggaattgatgtaagcaaagacactttcactgttgcctattcttcaaataagaacagtaagacaaagacattcaagaatacagtaaaaggtattcatgagtttatccaaaccatctcaaaagaagaaacacactgtgtacttgaagcgacaggaaactacagtgcgcttttagtctatcttttttcggaagcaggtattacaaccagtcttgagaatccattgaagataaagaacttcgcacgtgtaatgctgtctgtcactaaaacagatgatgtagatgcaagactcattgcaatgtatggcgaaaagatgaatccttctccctacaagttgaaagatgaatcaatccttgtactcaaacagaaaaggactgttttaagacagctcaaaaaacagcttgtagcaaccagaaaccttaagggttcaatggaagttttgccatttgttgattctacgtgtaaaagaacgatagataaaactatcatattccttgaaaagcaaatcaagaatatggaagaaaacattacatcccttgccactcaggaatacaagaaacagatggatctgcttacctccattaagggaatcggagtaactcttgctgctgcactgataattgcaacaggaggattcacttactttgataatgccaaacaatttacacgttatcttggattatcacctacttatcaacaatccggtacgtcagtcaatgtcaaaggtcacatcaatcgaaacggagattctgcactaagaagccagctttacgtggctgcctttgcctcactcagatgtaactcggagtgtaaggagtgttatgaccgtttgcgatctaacggaaagcctggaaaggttgccgttgttgctgtagctaacaaactcgtcagacaggcttttgccgtcgttactaaagaaaaagaatatgtagatggatttatttctgaaaagccgcagaagttacaaaaacatatctcagcataactcttattccgatagtaaacgtataaatatgctaaaaatctttaaccatattcagtttttttattatagctc

SEQ ID NO: 9656 - DNA, 1253 bp, unidentified
  source 1..1253: mol_type = unassigned DNA; note = element_f204321
  misc_feature 1..2: note = core
  misc_feature 3..240: note = LE
  misc_feature 241..1212: note = CDS
  misc_feature 1213..1253: note = RE
tgataagtttgctttttaataatagtttagataaaaagttaaaaaattacatttacaaacatattggaaaaagcagtaggaaaaagtcagagaagtggttgatacaaaaatatcgtgtcgaacaatatgtccctactgcttgttttctggaaaccgaatagaatgctgtttataaagagaaaaactcttatcacactggttcataagaaaacaaaattccaatacatttaaagtaattgtatggtaaatttagaaaagaaagtagtaggaattgacgtaagctcaaagtttttgaccataagtttcaaaaacgcacaaaaccaagaaatcgtaatgaatattggcaatttgaaaaaagatattttaagctgtctgaaaaagttagaccaaaaggattataaaattgtagtagaagccaccggttcttacagtagcaaaatactttactatgcttattcaaagggatttgatgtttatcaggtaaatcctttgacgattaaaaaatatgcagaagtaagaaacttaatcagtaaaactgatgatgaagatgctaaattaatccgggattttggagagaaaatggaaatttgtccttttgaacccaaaaaagagaatcttgaatttttagaacaggaactcaatcttttgcaggatttggaacaggagaaagcgagattttcattaaaattaaaatctctgcgccaaaaagcaagactcaataaagaggtggtaaaacattatgaaacattgattaataatttgcaaaaagagatagaaaaacttttgaaacgattgccaaaactggaagatgaggaattgcaagagaataaaactctgctcaagagcattaatggaattggagagaaaacctcgctcttattgctggttgcaacgaaccatttcaagagttttgaacactcaaaatcggtaagtaaatactttggagttgctccaagaatgtatcattccggaaacaaaaaaataacaatcggcaaatgccgaacaaccaaagaatatatccgaagtgtcttattcatctgctcttggagtgcggtaaaatgcaatccgcaatgcaaagccttatatgaaaggattttggaaaaagggaaatgtaaaaaattagctttaatagcagtttgcaacaaactgctacgacaagcctttggaataataaaatctaaaaacaaatatcaactggattttgcaaaataattaaaaaaatgaacctaaaaattttggaatataacatagaa

SEQ ID NO: 9657 - DNA, 1665 bp, unidentified
  source 1..1665: mol_type = unassigned DNA; note = element_f204c53
  misc_feature 1..2: note = core
  misc_feature 3..292: note = LE
  misc_feature 293..1567: note = CDS
  misc_feature 1568..1665: note = RE
taatctccattccgccgcctttcagtcggcggcacaaatagtaatgaaagattttcaatctccttactctgtgcaataatagtttcaagaagctatactacaaagcacgggaggagaagttgtaaattctttctcgttttagacagcattttaatcagtgtaagtcctgccttttcaagcacaaataagtggtactacgagtccgtacactaagaattgtttaaacgccttagtttaattgtgtggcagttcagtcaatggcttcttatcttttacgaaaggagtccgacttatgaaagttacttatccaacctgttgtggtgttgatgtccacaaatcttttctcgtcgccacaattattaaaactaccaatggttttgaaccttcttatcaaaagaaacgcttctctaccttcaacaactctattttacaattcaaaaactggcttcttgaaaataactgttttgatgtctgcatggaatctaccggtaaatactggattcctgtctttaatcttctggaagacaacatcaatgttacaatcgccaaccctaaatgggtaaaagctgtcaaaggtaataaagacgatacgaaagattctaaatggattggggatttgttccgtcttggacttgttcgcggcagttatattccttgcaaaaagattcgtattctcagagaatatacaagatatcgttataaacttgtttcctgccgttcaagtgaaaagaatcgatatcagaatgcacttactgtttgcaatgttgctttagattccgttgtttctgatatctttgggaagtcatctacatccatcattgactacctgctccaacattcgggtacgtccatcaaccatgaagaaatcgcttctaaacttcttaaacgtctcaagtctaaagaagatgcggtgattgaatccattgagggataccagatgactgattcccaaaaatatcgcatgcgcctcatccgcgcacatatggattatatcacagctgaaatcaatgatgttgattctatgataaaaactatgatttcttctgaccctgattatgaaaacgctgttcagttactctgtactattccgggtgtcaatcatgatagtgctgtcaccatcatctccgaaataggtattgatatgtctcaattctgcacttccaagcgtttatgttgctgggcaggccttactcctggcagcaacgaatctggtggtaagaagaaatctgttagaattacacgtgccggtatctacctcaaaccagcattggtacagtgtgcccatgctgccgtgaaatctgacaaatctccttactacaaaaagaaatatgaatctcttgcaaaacgccgtggtaagaaaagagccattatcgcaattgctcgaatgattctcactgctatctaccaaatgttgtctactggtgaaacatggaatccgagcgacttatacaaaatcgatatgccacaagctcttgttgacaaacaaaaggctaaggctatcaaacaagctaagaaactattacaacaagaaggaatacttccccttgatgaaccgatagcttcttgaattaattttctaattctatatcacttccaaaagttgtctattttagacagcttagataagtgcgtcacttattggcttacttctactttctttcacac

SEQ ID NO: 9658 - DNA, 1222 bp, unidentified
  source 1..1222: mol_type = unassigned DNA; note = element_f20ed05
  misc_feature 1..2: note = core
  misc_feature 3..209: note = LE
  misc_feature 210..1124: note = CDS
  misc_feature 1125..1222: note = RE
  misc_feature 12..191: note = bridgeRNA
cttatctgattggaatctggcaccgtaggtgtcgagagccggcgtgggccgccgtgtaagcctggatctcgacgatcgccatgtagcttggcgcccacgccggaatctcccttgatccgcccgaacagttgctggagctgacactcgcagtgataagactgggcaagctggggagctctcgacccttccagactatacggagtccggtgatgaacgggatcgggattgatgtaagcaagcgccagttggacgttggcacgacagacggacagaccctgcaggtcagcaatagccgctccggctttgctgaattggatctctggctaaggaaacgcccagccggccagatcgtgctggaggccaccggtggctatgagcaatccgtgctggacttcctgcacagcgtcggtcatccggtggtccgcgccaacgcgctgcgggcccgcaggctggcccaggggatggggcagatggccaagaccgaccgcttggatgcctatgcattggcgcagatggcggccttggtgaaactgccgtcctatcagccattggaaccttggcagcggaagatgcgggaatttgtgcgggcacgtcgacaggccatgcacgcgctgaccgtagcgcggcagcagcagcaaatggtgactgatcgtgaattgcgccgactgctgctggccaatatcacctgcctgcagacgatggttgaacgcctgggaaaacagattgccgagcaggttgcccagcagcctcaactggctgtcctgaagtcgatgaaaggtgttggcccgggcctgcaggccgtgttggccagctatcttcccgagctgggcaagatcagtggcaaggccgtggccagcctagtcggtgtggcaccgatgtcccatgacagcgggaccatgcgtggcaaacgaagcatccatggcggcagggctgagatccgtcaggtgctctacatggccagcatgtcggccatgcggcatgaacctcgcctgcgggacttttaccagtcgctgcgagcgcggggcaaggaaggcaaagtggccatcgtggcggtgatgcggaagatgctggtgattctcaacgcccgtatgcgtgacgctcaaggcggatcgatccccgcctgagcgcaccagagggcgttgctcctgaggctgccggccagcggccggcactaccgtgcccgtctgcaggaggggcccaagctcctcctgcaacacagttg

SEQ ID NO: 9659 - DNA, 1381 bp, unidentified
  source 1..1381: mol_type = unassigned DNA; note = element_f21225e
  misc_feature 1..2: note = core
  misc_feature 3..76: note = LE
  misc_feature 77..1114: note = CDS
  misc_feature 1115..1381: note = RE
  misc_feature 1118..1368: note = bridgeRNA
tgatggggtggacggccccctacggcatcagtgtgccagaatgaggttgtcagacacccattcacaggagccgtccgtgggccagattatccgtatcgggatggatacgtcgaagtatattttccagattcatggcgttgatgcatcggagcaggtcgtgctgcgcaagcggcttagccgcaaggcgatgctggagttttttgccaagctgccgccgacggtggttgtgatcgaggcttgcggggccgctcaccacctggcacgtctgctcggcaggtcgggacacacggtcaagctgattgcgccgcaactggtgaagccctacgtgtcgcgcaacaagaacgacggacgcgatgcggaagggctgtgcgaggcggcgagccggcctcggatgcggtatgtgccggtgaagacggcggagcagcaggccgcactgatgctgctgggcgtccgtgagcaattggtcgcgcgtcgcacgcaactctccaacacgatccgcgggcatgcggccgagttcggtctgatcgcggccaaggggctggacaagctcgccgggttcctggcggcgatcagccaggacgaaggcgtgccggcgctggcccgcgagctgtttgcgatgctggctcgccaatatgatcaggtgcaggtcgagctgaaggcggtcgaggccaagctgctggcctggcaccgggccgatgccacgagccggcgattggcgcagatcccggggatcggtccggtcacggcggcggcgctggtgatgaaggcgccagatccgcacgccttccgctcaggaaggctgtttgcggcctggctcggcctgacgcccaaggaccattccaccgcgggaaagacccggctcggcaagataacccgtgcaggtgatgagaggctacgtcagctgctggtggtcggggcgacctcggtcgtgaagatggccaaaacccgagatcgcgggtcgcgctggctgatcgagctgttgacgcgcaagacaccgaagcttgccgcagtggcgctggccaacaaaatggcccgcatcgcctggaagctgatgaccactggagaaagctacgacggtgcgcggctcgacgccactacggcaaccgccgcgtagctgaagattcggccgaccggcggcttagtccaccggccgaaccggagctgcaagagcagagcagatggagtgatcggtcgacccgagacgcgagcaaatccgtgggacccattggtcatacaaaggccgctgcggtgattggaactcgtgttgcggaagccatcttggccagcggctaccaagctgcactcaacaggccgcacatatggatgcaagcgatccggtcaaacctgacaaagctcttgtgccacgggggccgtccacata

SEQ ID NO: 9660 - DNA, 1423 bp, unidentified
  source 1..1423: mol_type = unassigned DNA; note = element_f21bd6d
  misc_feature 1: note = core
  misc_feature 2..231: note = LE
  misc_feature 232..1410: note = CDS
  misc_feature 1411..1423: note = RE
  misc_feature 14..240: note = bridgeRNA
ctacgtgtttcattgacgtcaggatcgggcccggccaggctcggtctgaggtgactggggttgccgctctcagcgcggttgcccacgctcttggcgtgaggctcgcaattggcctgcgcagccctggtcaccgcaagggccgggagaggctcaagaggggtatgcccagccgtacgtagcggtgccctccctgctcgacaccactgttggcacgagcaagggagcaggagcatggatgtggaaacccggcgggtcgtgatcgggatggacccgcacaagcgcagcgtgacgatcgaggtgatgaccgctgatgagtcgatcgtcggtggcggtcggttcagcaccgacgcgggcgggtacgcgcagctgctcggttacgccagggcttggccggaccgggagtgggcggtcgagggctgcgccgggatcggcaagcacatcgccgaccggctggtcgccgacggtgagtcggtggtcgacgtgccagcgaagttgtccgcccgggtccgggtcttcgccaccgggcagggtcgcaagaccgacgccaccgacgcccactccatcgccctggtcggggtgcggatgagcgggctgcgcccggtcgtcgctgacgagcagctggaggtgctgcggctgtgcgtggaccggcgtgcctcgctgggtcgcgagcacacccgcaaggtgtcccagctgcacaaactgctgctcgagctcatccctggcggggccaaccggtcgctgtccgcggcccaggccaaggagctcctggccaaggtccgcccgagcaccgcggcgggcaaggtccgcaaggcccacgcctctgagctcgtggccgacctggccaccatctacgcgcgcagcaaggccgcggacaaggagctgaaggcgctggtgagggcgaccggcaccaccctgctcgacctgcacggcatcggcccctccggcgccgcccggctgctcgccgaggtcgccgacatcacccggttccccgaccgcaaccacttcgcctcctggaacggcaccgccccgatcgacgcctcctccggggaccacacccgccaccggctctcccgcaagggcaaccgagcgatcaaccgggtcctgcacatcatggccgtcgtccagctgcgcaacgccaccgagggacgcgcctactacgaccggaagaaggccgccggaaagacctcgatggaagcgatgcgctgcctcaaacgcaggctgtccgacctggtctacaagtcgctgctcgacgacctggccgggcacgcgacgacgggcccgggagggcactcaggtgacgactctgactccagcgtgaccggctcacaacccaccgccggctcttcggacaagccacttcccggacccgccaccaccaagcctagaaccaccctcccagccgcctcttgacacagaggggtgc

SEQ ID NO: 9661 - DNA, 1382 bp, unidentified
  source 1..1382: mol_type = unassigned DNA; note = element_f21d940
  misc_feature 1..2: note = core
  misc_feature 3..87: note = LE
  misc_feature 88..1119: note = CDS
  misc_feature 1120..1382: note = RE
  misc_feature 1127..1370: note = bridgeRNA
tgatggtgtggaacggcccttcgaagcggcaccgaaggtgcttatcgtggtgatgcgaaccgccacgaaacaaaaggaaccgttcccatggagaagattatcacgatcggcttagacttggccaagtcggtatttcaggtccacggcattgccgacgacgggagtatcgtcgtccgccgagccttgcggcgatcgcaggtgctggacttcttccgcgctatcgacccgtgccttgtcgggatcgaggcgtgtgcaagctcgcactactgggcgaatgccattgggcaactcgggcatacggtcaggatgatgccgccgacctacgtgaaggcctacgtcaagcgaagcaagaccgacgctgctgatgccgaggcgatttgcgaagcagtatcgcggcccaccatgcgcttcgtgcccatcaagacccccgccgaacaggcagcctgcatggtgctgaggacccgtgaactattcgtccgtcagcggagccagacggcgaatgcaatgcgtgctcatatggctgagctcggcatcatcgccgccgcgggcatgaccagtatcgcgaagctcatcctggtcctgcgggacgcagaggacacgcgtctcccagtcgcggctcgggcagcgctcctcgagatggccgagcaaatcgagatgctgacggcacgtatcgagaaactcgatacgaagatcatcgcgacagtgaaggcagatgagaccgcctggcgactgaccagcatcccaggcgtcggaccgatcatcgccgcgacagtccgagccacaattcaggatcccacggtattcaaaacgggccgcgatcttgctgcctggatcggaattactccgcgagctaactccagcggcggcaaggagcggcttggccgaatatcaaaacagggaaataaacagttgcgcacgctgctgatcgttggcgcgacatcgatcctgaagcaagctcgcagaggcgtaaagctgccctcgtggatcatctcgctgatggcacggcgaccatataaggtcgtagccgtcgcgctggccaacaagatcgcccgcacgatttgggcgcttctcgtcaaaggcggcacgtaccaagcacccgcgatcatgacgagggcatagaacaaaaggaattccggcgtctcgcgctgggatcaagcggcaaggtgccaaagcatgatgaacctgagggacgatacctcgatgccgaccagaccgtctgacgcactgcgccttcgagcgcgtgaatttgattaggcgatcggtatcgcggatctcatcgtggccagcggttaaggaccgcgccaattaggccggacatatgactgcaccgtccgacggcgatttatgcgacgaataccttgctaaccgggccgttccacata

SEQ ID NO: 9662 - DNA, 1357 bp, unidentified
  source 1..1357: mol_type = unassigned DNA; note = element_f221eaa
  misc_feature 1: note = core
  misc_feature 2..70: note = LE
  misc_feature 71..1099: note = CDS
  misc_feature 1100..1357: note = RE
  misc_feature 1121..1353: note = bridgeRNA
taatgggatggtcgcccccgcctccgcgaagcgcgtacgctacggagatctttaccgaaggggaaccatcatggaagacgcagcgctggtgggtattgaccttggcaagcattcgttccatctgcatggccaagataagaacggcaaggaagtgtttcaccgtaaggtgacgcgcaagcaactggtgcagttgcttgccaatttcccgacgtgcacgattgcgatggaagcgtgttccggtgctcatttcatggcgcgcacgctgagcagtttcggccacaaggttcgattgattgccccacacttcgtccggccattcgtgaagagcaacaagaacgacttcgccgatgccgaggcgatctgcgaagcggcgtcacgaccctccatgcggtttgtcacaccgcgaacggagtcgcaacaagttcttttggcattgcaccgtgttcgggattcgtttgtccgcgatagggtaggcactggaaaccaggtgcatgcattccttctggagttcggcatcagcctcccggtgggcagcaccgtgatgaagcgcctgccagccgtcattgcagaacacccgcttccgccgcaactcatagcgatccttgagcgcctccacacccactacaagtatctcgatgcacagattgccgagatcgacaaggagcaagcacgtcaactttccaccgacgacatcgggcagcgtctaatgacgattcctggcgttgggcccattactgcgagcgtgctatcagccgaagtgggcgacggaaagcagtaccgcaacagccgagacttcgcggcatcgattggccttgtgccacgtcagtacagcacaggcgggagagccaatctgttggggatcagcaagcgaggagacaagaacatccgacggctgctcgtgcaatgtgcgcgctcgtatatgcgagacgtcgataaacgagccggtgcactggctgaatgggtgcgatctctattggcacggagacactcgagcgtcgtggcttgcgccttggcaaacaagctagctcgagtcgcatgggctatcgctgcgaagcacaccacgttcgttgcttctaatcgccagccgctgcctgtttgaaacaagagaagtcaaggtctggatcaaccatctggttttgcgatcgctggaaatttgatgacgtaaacggcataccggcctgaacgaacaacccgatagtcataaaggctttagaagccgatgtgtttttttttaggatcgtcaggcgcgactctcatcgaggcgcgggaccttgttcccactacgacgccgaatagatttgagcaagcccgcaacaacatcaagaacctgcattgcaaaatagggggcgaccataga

SEQ ID NO: 9663 - DNA, 1445 bp, unidentified
  source 1..1445: mol_type = unassigned DNA; note = element_f22619b
  misc_feature 1..5: note = core
  misc_feature 6..220: note = LE
  misc_feature 221..1420: note = CDS
  misc_feature 1421..1445: note = RE
ctcactggactacctttcggcacatgggattcgaggagagcccgcgtcgcttgccgcacgacggccagcgtgagacccgctccctcgaatgaaacgacgagaggcccagaccggccacaggatgaagcgccaggtggcgtgcaagcccagagcgcctatcagtgagcgaccggccggacctctcaccacgcagtgtctcgctgtcacccggaggaaggcaatgccgttctacgtcggactcgattgggcgagtgaggcccatgccatctgcgtcctcgatgacaccggccgcgtccgctggcagggcacggtggcgcactccgccgacggcctcgcggagctcatccgtcgcttgacacgattcgcggcgccggccgcactccaggtcgcgctcgagcggccgtccggcctgcttgtcgacacgctcgtcgaggccggcttcgcggtcgtccccattcaccccaatgccctgaaggccacccgcccgcgctactcggccgccggcgccaagagcgatcccggggatgccttcatcctcgccgacgtcctgcgtacggacggccggcgcttccgccctctcaccgtcccgagcgacgcgacgcgggccgtgcgcgctctcgtgcggggccgcgacgatctcgtcgcccagcgcgtggccctcggcaatcagttgcgcgccttgctcgatcgcttctggcccggcgccgccgcgatcttcgccgacgtgacctcgcccatcgcgctcgcgttcctgagtcgctatcccatgccccagagcgccgcccggctcggcgaacgccgcctcgcgcagttcctggcccagcacgcctactccggccgccgcacccccgccgagctcctcgcgcggttgcaggccgccccgaccagctgcgtcggtgacgccgaagccgaggccagcgccgaggtcgtccgcgcgctcgtcgcgatcctcgccccgctcgtcctccacatcgcgcagctcggcgccgcgatcaccgccgccctcgtgcagcaccccgacggccccgtcgtgatgtccctgccccgcagcggccacatcaatgccgcccaaatcctcgccgagctcggcgacgatcgcgcccgcttcccctcggcggatcacctcgcggccgaggccggcgtcgcgcccgtcacacgcgcgtcggggaaatcgcgcggcgtctgctttcgctgggcgtgcaacaaacgtctgcgccagggcgtcaccacgttcgccgataactcgcgccacgcctctccctgggccgccgccgtctacgcgcgcgcccggcagcgcggctgcgatcatccgcacgccattcgcatccttgcgcggtcctggcttcgcgtcttgtggcgctgctggcaggatcgcctgccgtacgacctcacgcgccaccgcggtgccgtcgccgcgtgacgcgatacaggtggacacaggatgt

SEQ ID NO: 9664 - DNA, 1536 bp, unidentified
  source 1..1536: mol_type = unassigned DNA; note = element_f22b086
  misc_feature 1..4: note = core
  misc_feature 5..254: note = LE
  misc_feature 255..1442: note = CDS
  misc_feature 1443..1536: note = RE
atcatgtataatcttaaacataaagattgcaagattaaagttttgttttctttatgttttttgttattataacaaatatcggtaaagacggattatatcaggtacttcgagtacgtttttttgaatgtctgccatatgattatttattaattcggttgtagataatggaacgaaagagttcgaatgattaagcatgtaggaatataagtggtcgaatatggtttaaccgaaatattatgaaaggagaaatttttatgaaacatattttaagttttgatattgctaaaggtaaaagtgtttattgttttattgatgaattaaaaaatgtaattattgatgcttctttaattgaacataaaaaagatgaatttgacaatttatttaatttaattaaagattatcctaatttaattgttgtaatggagtctacttctgtttatcatttaccagttgaaacatattttagatctaagggtgttgatacagttgttatcaaccctaaattagttaaacaatttaaagatactttaaataaatctaaaactgataaactagattgttttaaaattgctagatgttttttaggcactattgataatttttatcaaaaacaagatgaatattttatgtatagtcctcttgcaagacaatattggtctttaattgaaggacaaactagactgaaaaatagatatagacaacttattgatattgtttttcctgaatttgttttgattttcaacgatttatatgatgatttagctttaaattttattcacgattttcctcatccagtattatttgttaatcgtagaattgattatttaatgaattatttaaaggaaaaaaatgggactactcaagcttatagattcaagaataaagttttaaaaatgaaagaatttgcttcaaattctttatgttttgtcgcttttgattcttatcaagttcaaaatcttgtacaagttattgaaatgattcaatatcataaatcagaaattaataaaatcaaaaaacaacttattaatgatatgaaagataaagagttatttaaaattattaattctattcctggttttggtgaattttctactgctttatttctagccgaagttggtgacataactagatttgatgataagtatcaatttatatcatttataggaattgattcagttacttcacaatctggtgtttctgcttatcatggaccaatttctaaaacaggttgtaagtttggtagaactattttatttaatatagttacaactatattacaaatatctgctcacacagacaaaactaatcctatttatttgtttttcagaaaaaaacaatctgaaggtaaacatcattataaatgcataatcgcctgcgaaacgaaattatgtaaaattatttataaattatgttcttcaaattgtctatacgaaaacaaatagactaattttccaaattttttaaaattgaggaaactcagttctttttgtcgtgtatataatatcacatttttttaaatttgacaaaacttagata

SEQ ID NO: 9665 - DNA, 1510 bp, unidentified
  source 1..1510: mol_type = unassigned DNA; note = element_f22fac2
  misc_feature 1..2: note = core
  misc_feature 3..248: note = LE
  misc_feature 249..1475: note = CDS
  misc_feature 1476..1510: note = RE
  misc_feature 48..226: note = bridgeRNA
cttatattaggtctgttgcatgtaagtcacacgtcaggtgattttatgtagaccgatttcaaagagcttgctgggatgaggaccacccttccccaattccgttgaggatcgaaaagagaccgtcccgcccagcaaaagaacgggtttttaagctcaatagaaagtcgtcccttagaggaccgatataaggcgagctttccgttcacagcgattggaactgggcaaagagaagttaggaggaaaagcaattgccacgatattacttgggagtggattgggccgacaaatcccatcagctttacgtgtgtgatgagagcgcaagaaaaataaaggagcaggaagtccaacataccgttggtgagctcgttgagttggggcgctggctcgatgagagtcgccaaaatgggatcgagctttggggggccatcgaaaagccccacgggcggattgtcgattttcttttggaccacggtgtgatgacttatccgatcaatcccaaagctctggatcgcgcccgggatcggtttcgcatgagcccatcgaagtctgacgcctttgatgctcgggttctggcggagtttttgaggaccgatcacgctcatctgcgcgcccttgagccggattcgattgcggctcaggagcttaagatgctgacgcgagatcaccagcgtctgggacgccagaaaatccgtctgatcaatcagatcaagatcactcttaaggagtactatcctcgtgcgctggaggtctttggggatcttgaaactcagatcgccctggattttctcaacaattatccaaccccgcaggcactttcgaaactcacgcaacgtagctggatgcgctttgccactcgggagcaccacctcggtgaagctcgtgcgaaggagctttgggacaaactcaaccccattcagctcccggtccccgaacacgtggtgcgagccaaaacgaaacttctgctggcgttggtggtgcaagtgcaggcctcgatcaaggcggtggacagctacaacgaggagattcaaagttttttcgccgctatgccgccagctcaactggccaagacgctgcccggcgctaaaagcgccaccacggtagcaaccctttgggccgagttgggcgatgctccaagtcgctggagttctttcagacatcttcaggcacaggccggagcggtcccgatcaccaagtccagtggcaaaaaccgcctggtccagtttcgatcggcctgtaacaagcatttgcgccagaccctgtactggttttctttcaactctctcagtcgatgtgagtgggcgaaaaagtactatcgagatcaacgagccaaagggcacaacaagcatcaagcgctcagagctctgggagccaaatggctcaaaattattttcgtgatgtggaaagaccataagccttacgacgaaaattaccacttggccaacattgctcgacagcgcatgcgccaagcggcctgaaaaatagcggacgattgacaaaggtcatagaaagt

SEQ ID NO: 9666 - DNA, 1466 bp, unidentified
  source 1..1466: mol_type = unassigned DNA; note = element_f23c3ec
  misc_feature 1: note = core
  misc_feature 2..250: note = LE
  misc_feature 251..1447: note = CDS
  misc_feature 1448..1466: note = RE
  misc_feature 1..240: note = bridgeRNA
cgttaccttcttcgtagctccgatggttcggggttctggtcgccaggttcggtatgactgtctgcccctgtcgttcgcatgatccggggggtgttgtcgccgggtctggtggcgtggggtgaccgctgatagggacacggccgcttccacccggtgagggtcgggagtaggtctcttcgtaacgtgggtgtcggcttcctgcgccagactgcggccagcgaagactgggctcgcagaggaggacagggagatggcccccagcgattacgcggtgttcgtcgggttggacgtgggcaaggaagcgcatcacgcctgcgccctggatcccggcggcgcgcgagtgcacgacaaggtactgccgcagtccgaagcccagatccgccaggtcctcacacggctcgcggatcggggccgggtgctcgtggtggtggatcaaccggcctcgatcggggcgctggccgtcaccgtggcccgcgaagtcgggatcgacgtggcctatctgccgggtctagcgatgcgcaggatcgctgaccttcatccaggcaacgccaagaccgatgcgcgcgacgcctacgtcatcgccgacgccgcccgatcgatgccccacgccctgcgccgggtcgatgcaggggatgaggccctggccgacttggaagtcatcgtgggctacgacgatgacctggccggggaggtcacccgcgtcagcaaccggatccgcggcctgctgacccagatccacccggcacttgagcgggtgctgggccccaagatccagcaccaggcagtcctggagctgctgatccgcttcggcggaccacagggactggccagcgccagtcgccggcagttgctggcggcgacgaagggccgggctccgcggtcctacgaggcgctcatcagcgccctcaccacggccctggaagagcagaccgtcacggtccccggtacccgggccgccgagctcgtcctgcccaaactcgccacgaccttgcgtgaactcctgcaacaacgtgagcaggccgcgggccagatcgaggagatgctcgatgcgcaccctctttccacggtcctgacctcgatgcccggcatcggcgtcaggaccggagcccgcatcctgctcgaggtcggcgacggctcgtccttcgccaccagcgggcacctggccgcttacgccggcctggcccccgtcacccgccgctcgggcacttccatccgcggcgaacaccccgcccgcgggggcaacaaacaactcaaacgcgcgttcttcctgtccgcgttcgcctcactgtccgacccggcatcacgcgcctactacgaccgcaaacgagccgagggcaagaagcacaacgccgctctcatctgcctagcgcgccgccgcaccgacgtcctgcacgccatgctccgcaacggcactctctacgaggcacgcaccccggcagccgcttgacgaaccgatagggacaccc

SEQ ID NO: 9667 - DNA, 1502 bp, unidentified
  source 1..1502: mol_type = unassigned DNA; note = element_f240c13
  misc_feature 1..2: note = core
  misc_feature 3..249: note = LE
  misc_feature 250..1482: note = CDS
  misc_feature 1483..1502: note = RE
  misc_feature 15..242: note = bridgeRNA
ctaatgagtcttagcgagtcggccatcgggcagactcgtgtctggtagccgccggtgggtgagcactgtttcatcctggacgttgagtcctgatgacagatcgtgcccctgctggtcggccgggaggatagatcgctgatgggatgtcgtgcccgctggtttgtggcgtgagcactgcttcattaggtcgctgatggttctcccgcgcgctgccgaacgtagtcgacattgaggacgggagacaacgcagtggtgctgttcgtgggtgatgactgggccgaggatcatcacgatgtcgaggtgatggacgcggccggtcgcaggctggccaaggccagactgcccgagggcgtagccgggatcgcgaggatgcacgcgatgatcgccgagcagctcggcgaccgggtcgacgagaccgaggtgctggtcgggatcgagaccgaccggggtccgtgggtggccgccctggtcgcggccgggtacacggtgtacgcgatcaacccgctctcggtggcccggtaccgggaacggcacagcgtgtccggtgccaagagcgacccggccgatgcgcacacgatcgcggacatggtccgcaccgactcccaccagctgcgcccggtcgccggggacagcgcgcaggccgaagcggtcaaggtggtatcgcgggcgcacaagacgctgatctgggaacggacccggcacacccagcggttgcggcacgcgctgcgggagtacttcccggccgcgttggaggccttcgacgacctcgacgcgccggacacgctggagttgctggccaaggcaccggacccggcctcggcagcacgactgtcgatcagccagatccgtgccgcgctcaagcgtgcccgccgccgcaagatcgacgagaaggccgagcggatccaggcggcgctgcgggccgagcagctgggccgcgccgaggtcatcaccgcggcgtatgcggccacgacccggtccgttgcggcggtgctggccacgctgaacgagcaggtcaaggcgctgcaaggtcaagtcgatgcgcattttggtcagcacccggacgctgagatcatcgggtcccagcccggcatgggcccgatcctcggcgcccgggtgctcgcagagttcggcgacgacccccaccgctacaccaccgcgaagaaccccaagaactacgccggcacgtccccgatcacccgagcctcggggaagaagaagaccgtcctggcccggttcgtgcacaacgacaggctcatcgacgccctcatgacccaggccttctccgccctgcaagcctcgcccggagcccgcgcctactacgaccagcaacgagcccgcggagcgggacacaaccccgccctgcgccaactcgccaaccgcctcgtcgggatccagcacggatgcctcaaaacccgcacccactacgacgaagccactgcctggtcacaccacaccgcgaaacctcttgccgccgcagcttgacatctaggctcctgggatgt

SEQ ID NO: 9668 - DNA, 1326 bp, unidentified
  source 1..1326: mol_type = unassigned DNA; note = element_f24179f
  misc_feature 1: note = core
  misc_feature 2..70: note = LE
  misc_feature 71..1111: note = CDS
  misc_feature 1112..1326: note = RE
  misc_feature 1110..1314: note = bridgeRNA
ctatgtatggactcctccaacccagttgcctaggttggaaggtcaaccaaaaccctattggagtccatacatgcgctattcaacaacagttggcgtcgacctggcaaaaaacgtcattcaggtctcggtggtttcgtgccgcggcaaagaacgtctcaaccgatccctgacacgccgcaagttcgcggagttcctggctaaacaagaaccggcactggttgcgtttgaggcgtgtgcgacatcgcactactgggcacgagcagcacaacgctacggccatgttgcgggcatcattccggcgaaggcagtagcgccgttccggcaaggccacaagacagatagcaacgatgcactggcagttgccgaagcggcccgccgaccgaacatcaaagaagcaccgatgaagacggtagagcaacaagggttgcaggcgatccagcgttcacgagacctgttggttcaagagagcacagcactgtctaaccatctgcgcggcttgctgatggagttcggtgtcgtgataccgaagggtttggcatcgttgcggcgtgagctgccagagatcctcgaggacggcgacaacgaagtacccgatatgtaccgaccaacactgcaccgtctctacgttcgcttcctggaactgcgcgaggatatagagatgatggacaagcaggtcaaggtactggtgaagcaacaccccgcctgcaagcgactaactgcacttgaaggtgttggtccgatcagcgccgtgttgctgtatgcatcgcttggcaccggcgaggctttctccggcagtcgtgagttcgcagcctatcttggcctgacgccgaggcagttcagcagtggcggcaaaaccaacatcgtgggcttgagtaagaagatcggcaactgccggttacggtccgtgctgatccagggtgcgcgctcctacgtgcacaagctcaaagagccgaagacatccaaagatcgctggttgatggaagtcatcgagcgttccggtcacggcaaggcggctgtcgcactagccaacaagaatgttagaacggcctgggcaatgctgacccagggcactgactatcaacgtcgtccgcaactgaaggtggctgcgtaacgagtcccgcaaacagagaccataatcagataaagatatctgctccggtagaacctgcttcgctttgaggccctagagcccattgacccttagaggaatcggagcgcgcaaacatagtgggccaggagatagcgtctccaaccaaaggccggatatacatacgcgtctgaattctgatcaaagtaactgtttgctagactggaggagtccatata

SEQ ID NO: 9669 - DNA, 1456 bp, unidentified
  source 1..1456: mol_type = unassigned DNA; note = element_f241b76
  misc_feature 1..2: note = core
  misc_feature 3..78: note = LE
  misc_feature 79..1200: note = CDS
  misc_feature 1201..1456: note = RE
  misc_feature 1188..1443: note = bridgeRNA
tgatggggtggacggcgcccgacggcatcgaatgtgccagagtgaggtcgtatgagatctcaaacaagggagccgtccgtggaacaggttatccgcattggcatggatacgtccaagagtgtttttcaattgcacggtgtcgacgctttggagcggcctgtgctgatccgcaagctgcagcgacgtgcggtcgttccgttcttcgccaggctggcgccggtgaaggtcgggcttgaggcgtgcggcggctcgcatcactgggcgcgcacgctgtcggcattgggccacgatccggtgctgatggcggctcagcacgtgaaggcctatttgcggcgcggcaagcacgacgcggccgatgcggaggcgaactgcgaggcgatgagccggccgagaacccgcttcgtggcggtgaagagcgtcgagcagcaggcgggtcagatgctgtttggggtgcgcgagcaaatggttcggcggcgcacgcagctttccaatgcgatccgcggccatgcggccgaattcggactggtggctgcgaagggccttgcccatgtcaagccgctgctggcccgcgttgcagccgatgatggcgtgccggcgctggcacaggagctgttcaacatgctcggcgaggaataccgcgccacctgcacccggctggcggcgcttgagaagaagctggtggcccattaccgccaagacgagaccgcacggcggctggctgcgatgcccggcgtcgggccgatcggggcaacgctgctcggcatcaaggtcggcgacgcaacggcgttcaggtcgggacgcgacttcgcggcatggctggggctgacgccgaaaaaccactcgacggccggcaagacccggctgggtgtgatcacgcgggccggcgacgagatgctacggcaggtgctggtggtgggtgcgacggcacacatccagcaggtgcggcgcggccgcatcgcggcctcgccgtggctggccgcgctgcttgcacgcaagccgccaaagctggcggcggtggcgctggcaaacaaaaacgcccgcttcgcctggaagatgatggtgacgggcgagccataccgttgcgaccaagcgggcagtttggcaccggcctcgccgccgtcaaggccgtccggcgccgcctgcggcggtggcctgcggccggccttgaccgcggctccgtccgacgccgccatgccctgactggtcgcaacggagagacaccgggaatacaagctcttgcaacggaaggaagatggcgtgatcgatcgatccgtgacgcgcgaaactccgagggatccattggccgacggaaatcgctggcatgattggaacgggcgtcgcgaaacccaccttggccagcggctgaaacgaccgcaccaacaggccgtccacatatggacgcaagcgatcgaaaccgcctgacgccaaccattgcagacagggcgccgtccacata

SEQ ID NO: 9670 - DNA, 1100 bp, unidentified
  source 1..1100: mol_type = unassigned DNA; note = element_f2435ba
  misc_feature 1..2: note = core
  misc_feature 3..161: note = LE
  misc_feature 162..1088: note = CDS
  misc_feature 1089..1100: note = RE
  misc_feature 1..157: note = bridgeRNA
cctgtctgttggtgatgtgcgaaagtgggcggtggaagggaacccgtcccccccgagggtctggagcccgtttgggagcatgggtcccttccaccttcgttcaaccctgaacagttgcttgggactttcgatcccgcacgacatggacaggaaccctcaccatgccacagccagtcatcggctgcgatctttcgcgcgccttcctcgatctctgcgaccttccttccggcaggatgcagcgcattcccaatacccgtgacgccatcgccgaatgggccgaaacgctcacgcctgatgtgctcgtcgttttcgaggccaccagcggctgcgacgacatcctcatcgccaccctgaccgaacgcgcgcatccgttctcgcgcgtcaatccgcgtcaggctcgcgagttcgcccgcgcaatcggcatgctggccaagaccgaccgcgtcgatgcgcgcgtgctggcccagatgggcgcagccctggatctgcctgtcacccgcccggtcagtccggcccgtgcgacattggccgttttcttacgtcgccgcaggcagttggtcgacatgcgcaaggccgagaagttgcgtcgtcacagcgcaggccatgatgacatcgccgagcagatcgacgccatgatcgctctgctctcgacccagatcagcgtgctcgatcagcgcatcaaagccataatcgctgcagatcgcgcgctcgcggaacaggccgccctgatgagcaccgtgcccggcatcggcccgaccgtaatggccgtcctgctcggcgaactaccggaactcggcacattgtgtcgccgcaagatcgcctctcttgccggtctggcaccccatgcacgcgaaagcggctcatggaagggagcacgacgcatctggggcgggcgacgaaaggtccgcgaagccctctatatcgcagccctctccgcgtcccgccgcgtccctgcactcattgccatgcgcgataggatgcgcgccaaaagcaagccacccaagaccatccttatcgccatcgcacgccagctcctcgtcatcctcaatgccatgatccagaaaggtctgcctttgcagatcacatgatcaacacagttg

SEQ ID NO: 9671 - DNA, 1188 bp, unidentified
  source 1..1188: mol_type = unassigned DNA; note = element_f24e8ee
  misc_feature 1..2: note = core
  misc_feature 3..186: note = LE
  misc_feature 187..1155: note = CDS
  misc_feature 1156..1188: note = RE
  misc_feature 13..195: note = bridgeRNA
cttgtatctctcctgggtaatgagattagctacctcattacccggagccggctgagcacctacccaacctgagcactcgatgctgtttcgtagaatgtgcctgccggctccctttctccacatcctgaatggtatccaagcccctccatcggagtgaggctgtatgcacaaggcaaggagcgagaaatggcggttatcggtatcgacatcagcaagcagaaattcgattgtctgtggctgcgcgacgtccgtagcctcaaagtgaaaaccaaggtcttcgccaatcggcccacaggattcgccgaactgatcgactggtgttgcgcccagaccggtgagacggtggagcagttgcaggtcttcctcgaggccactggggtctatcacgagcccttggccctctaccttcatgaccggggtgtccaggtcttcgtcctcaatcctgctcgggtacgcgagtacgctcgcagcctgggcatacagggcaagaccgacaaacaagacagcctggtcctggcgcgctatggcgcgacccagcccgtacgcccctggacgccagagcgacgcgaggtccgcgaactcaaggccttgatcgctcgccatgaggcgttgcaagaggatctgcagcgcgaacacaatcgtcgcgaaaaggccgcggtcagcgacagcctgggcgtgctggcttccatcgataacgtggtgaaggcgctgcagcaggaagcggagcgggttcgccaggacatcgacgaccacatcgatcgacacgacgatctcaagcgtgatcgtgccttgctgcagagcatcgacgggatcggcgaggtgctgtcgcgccacctgttgtccctgctgcgcagtcgcgacttcagcagcgctcgacaatgcaccgccttcgtcggcctggtgccccgtccctggcaatcgggcaagacggtggcagcgcccacgaggctgagcaaggccggtccgccacgtatcagagccaagctgtacgtcgccaaaggctgcaatcccgctgtgaaggcactgtatgaacgtctgctggcccgcggtaaaccccggatgagtgccctaggcgcggccatgcgtaagctgctgcagatcgcctatggcgtgctcaagacgcagcgaccatatcaaccacgacaggccctttagaagacctgttgtgattggtgggagagatggtat

SEQ ID NO: 9672 - DNA, 1356 bp, unidentified
  source 1..1356: mol_type = unassigned DNA; note = element_f253f4e
  misc_feature 1..2: note = core
  misc_feature 3..81: note = LE
  misc_feature 82..1107: note = CDS
  misc_feature 1108..1356: note = RE
  misc_feature 1124..1343: note = bridgeRNA
tgatgtgatggacggcctccgctcccggcatcgcgatatgccaagatgtcgcgtgtcgaactcacatcaggagatgcgtccatggagaaggttgcgataattggcctggatattgccaagcaggtattccaggttcacgggatcaatgaggctggtgctatcgtgtgccgtcgtaggcttcgccgagacgatgtcgttgcattcttcaaggtattgccgccatgcctgattgggatcgaggcttgtgcaacggggcactactgggcgcgggttctcacggcactggggcaccaggctcggttgatgcccgcgtcttatgttaagccgtacgtgaagcggcagaagaatgatgcgaccgacgccgaagcgatctgcgaggctgtcacgcggccaactatgcgcttcgttccggtgaagagcgaggagcaacagagcgtgctgatgcttcatcgtgtccgcgagcttttgatccgacaacgaacgatgcttgtgaacgccttgcgcggacacctggcagagttcggcatcattacgcggcagggcgttgccggtgtcgaaacgcttatcgcggtggtcgaagccggggatcaagatgtcattccgccgcttgcgcgttcagcacttctctcggtggtagggcagttacgagaggtgcacgagaaaatcggcgagatggaccgccaaattcacacttggcatcgcgggaacgaattgagccgccgcttggagacgatccctggaatcggcccgattactgccagtgcgattgccgcgacagttgcagacgcgtctctcttcagatccggccgacaattggcggcgtggataggccttgtaccacggcagaactcatcgggtggcaaagatcgtctcgggaggatcagcaaacaaggtgatccctatctccgacgtcttctcgtcattggtgcgcacgcggtccttcgcttcagtaagaagggtaaaacggcaccgacgcgttgggcggccgatcttctggtgaagaagccttacaacgtcgtcgccgttgctttggcaaacaagatggcgcggattgtgtgggcactgatggcgacaggcgggcgctttgagggtaccggcaggctctgacaacctgagagaatgcagaaattggtgaggtgctgatggtgtgatggcgaacggtcgaaccgggattggagaaacccgatcagtgggtgccgcttgaaagcgcgttgacctgtctgggatccaatcagcggactacatcagggccagcggcatgaataggccgcgatcaaaggccgaatacatgcctgcacccgaccaatccgccagaaacgccaaattgccccttgccacgcggaggccgtccataca

SEQ ID NO: 9673 - DNA, 1534 bp, unidentified
  source 1..1534: mol_type = unassigned DNA; note = element_f2550c7
  misc_feature 1..3: note = core
  misc_feature 4..247: note = LE
  misc_feature 248..1435: note = CDS
  misc_feature 1436..1534: note = RE
tttggtattataaacctgtaattattatatcatgtatttgattgataattacaggcttttttactatgatgtaagaggattggttaacggattactattggagtttctatactcgcacgataaagtgttaactaacctctacattcaatattcgattaagcaagttgagttaaatactcgtataaagaaccaaaatgaaaatttgtagaagagttagatccaatcattattaaaaaaggagaaaattatgaagtatggagttgggattgatatttcaaaaggtaaaagtacaattgctattttaagcattgaaggtgaagtaatcaaagaaccttttgaattttatcataatcaaaaagatttagataatttaaatttattattaaataattattctaaagaagatttaaaaattattatggaagaaactggaacatatcatttaccggtattgtcttatctaatagataaaggatattgtgttattgctgaaaatgcttttagaattatgaaatatttagacagaggtttaagaaaagctaaaactgataaaaaagattcattaaaattagcagaatatgcttgtgataattggtataaattaaaaatgcctattatagaagataaaaattataaagatttaagatttttatcaagacaatattttgctttcaatagtattaaaatacaacaaaaagttaatttttctaatttaactgatatgttatttcctggttattatcaattattagatgaaaataattatatacttggtttgaaagtgtttcaaaaatactcaatagacataattaaaaagaaaaagttagaaacttttataaatgaggtggataaaattgcacaaaaaataggacataaaagagctggtattacgtttgctaaaaaagtttacgaactagcaaaagaatcaattccatcatgtccatcttctgaatatacacaattaattatagacaattgtgtagttgctttaatccaatcaattgaaacaactaaagaaattatatcaaagatgcaagaaattgcaaataaattgccagaatatgaaactgtaaaaagtatgccaggtgctggtccaagactagctccactattaattgccgaaattggagatataagaaaatttaaagattctagtagtctaattgcttatgcaggaatagatgctcctccatatcagtctggacagttcgaagcaactaatagacatatttctaaacgtggtaataaatacctaagaaaaacaggatatgaggtaatgaaagcaattaaatctttttatagtactgggaatgaattttatgattatatggtaaaaaaagaatctgagggtaaaaagaaaaaagttgccaaaatagcagctttaaataaattcttaagacaatattatgctaaattaattaaagtatataattaatttttttaagacctattttaggtgtttttgtcatgcaataatatacttaattaaataattttatttttttataaaaaactattgatttatattagcaag

SEQ ID NO: 9674 - DNA, 1216 bp, unidentified
  source 1..1216: mol_type = unassigned DNA; note = element_f2579b2
  misc_feature 1: note = core
  misc_feature 2..213: note = LE
  misc_feature 214..1185: note = CDS
  misc_feature 1186..1216: note = RE
  misc_feature 34..202: note = bridgeRNA
tcttaagtttacatttcattaaattagagtataaactagaaaagacaaaagagaggattaaggttattatatacgtagagactatagatctcgtcaacattgaaaatcccctctcttttctacacagatttcgtacagttctatgaggctttagacctcgattttaagtcgttgaaactcgcgtaggttgtcctttcaaaaaatagttgaataatgaataaagatattaaatattttggaatagatattagccatttagttttcgatgtcacagattctaacggtaactactatcaatttaagaatactagtttagggtttaaaaagtttctaaaactcttagattcaaatagtcattgtgtaatggaagctacaggttactatcattaccagttggcctattatttactggaatctggtgttaaagtttctgttgagaatccattagcagtaaaacgttttatccagatgaagttgtctaagatcaagactgataaaagtgattctaaacttatctgcgagtatgcaaaacaggtagagttgaaactatggcaaggcaactcaaaacatcaaacagaatgtcttcagatgacaagactcctttctgtatatacaaaacagagtacgatgttaaaaaacaaactacatggtgaagctgttttgggcaatccaagtaaagatgttttacgttccttaaagcgcagtttggaacaggttcagaaagaaatgaaaaccttggaagagaaactaatcataatagtcaagcaagtgcatcaaggtgttttaacacgtttaaaaagtataccaggcattgggaataaaactgctttaatgcttgttgttttaacagatggtttcgagcgttttacaagcggaagtgaattatgcagttatgctggtctgaccccaataattagaaaaagtggcagtagtgtaaatggacggagtaggattagtaaaatagggaatcaaaagcttcgtaatttattatttatgtgcagttttaatgcctgtaaatacaacaaggcatgtagagaaatttatgaacgaatagtagccaaaggaaagagtaagaaactagccctaatagcagtttgtaataagcttttaaaacaagcatttgcaattgcaaaatcaggattaatatatgatgatagttacagaagtattttggttaaaaattaagtgaattttacttgttttttaccacagtact

SEQ ID NO: 9675 - DNA, 1713 bp, unidentified
  source 1..1713: mol_type = unassigned DNA; note = element_f25807e
  misc_feature 1..2: note = core
  misc_feature 3..275: note = LE
  misc_feature 276..1295: note = CDS
  misc_feature 1296..1713: note = RE
  misc_feature 9..234: note = bridgeRNA
ttagtaccatataagtgtagcaaagagaaatacaacatttcccctgctgcacttattttattatagtaagggaagcagctggcctgacaccctgtcattgggtttttacacccgtttctgaaaaagtcaaccggccccttattatatacactcgattaagcggatagggacttaatggctcccgcgttacgcactaagctggggtgtaataagttcggttgggatgctgctgcttatttatttctttttatatcggttccttgaaggaggtcattatgttaagcgtaggaattgatgtatccaagggtgaaagcatggtttgcgccttgaatcaattcggaaaggttgtgttaaccccccgtagatacaagcatgtaaaatcagcattgggcagccttgtagaaaggctaagatcctttggagataacgacataagaattattatggaagccaccggaatttacagcctgcctgttgccaaatattttaaagagcaggggttttttgtggctgttatcaatccttatgccatgagccggttccgcatcggcggtcaaggcagcctgcgcaatgtaaaaacggacaaggctgattcaatgaccattgccggttatggaaggcagtgttgggatacgttaatggaatataatccggcggcagagacttattggaagttggattatttactccgcctgtatcagaaaatactggcataccgggtttctattcttcaggaactgtatggaatcatagaacaaacgatgcccggtattaaggaaatcggaataaaaagtccccaggtatccacagccaaagatatcctgctcgattttgccaaaactttctggcactatgatcagattaccggcatgtcagaaaagaaatttatcagccggtatcttgtctgggcaaagaaaaagggacaccgccccgatgtggggaaggccgctgcaatttatgcaatggccaaagacggtatcccttgtcttccagcggatccgatcgtaaagcagagcatccatacaaatatcgaagcgctggaaagagttggaacaactctacgtgacattttatcacaaatgagtgggctggcaaagacacttcccgagtatgacattgtcagggcgatgggcggcgtcggagatgttcttgtcgtcaaattgattgcggtcatcggggatataaagcgattcaggaaggccaaatcattagttgcttatgcaggaattgatccgccgccttattcctccggaaagtttgaaggaaataaaaggaggatcagcaagaggggatagactcttcttagaaagataggatatgagatcatgaaaagtctgacaaggaacaagagaccagaagatggagcggtatacgattttatccgaaagaaggaagaagaggggaaagctaaaaagcaggctaaaatagcgggattaaataagttccttcagatatactatgcccgggtaaagagcatttataaaaagacaacggaggggaaagcggcttgaatcgggcaagaggtactcttctccggtgtgggccggtagcacacctaaagcacgggaaagacattggaaaaacagcgggcgattaagagcaggcttctgtccggtctttttatggtgtcaaaaatctgttcaaatggattctatctgaatcattcagttctaaaaaaattctgctttcccctattgacaaacgttagcagat

SEQ ID NO: 9676 - DNA, 1479 bp, unidentified
  source 1..1479: mol_type = unassigned DNA; note = element_f25ee87
  misc_feature 1: note = core
  misc_feature 2..235: note = LE
  misc_feature 236..1459: note = CDS
  misc_feature 1460..1479: note = RE
  misc_feature 15..247: note = bridgeRNA
ctaattgaggccgtggtaaggcgctgcggtttgccgtagcgttcaggggtccgacgggctggctccctaaccgcctgccggccgcatctgctgtcgcggtctggctttagaacgaggtgccagcctgccgggtctcgccgcggcgtggctcaaaagagggacgagcgccagcactgtaattaggcatgcccgccgcggttccatcatgcccggaacgaggactggagcgtgctgaatggcggctgtgatgatcggcgtggatccgcataaggggtcgcacaccgcagtggcgatcggcgcagatgaggagccgctcggccagctgcgggttcgtgcctcggtaacgcaggccgggcggctggtggcgtgggcggcggcgtggccggagcgcacctgggcggtcgaaggcgcgggcgggctgggtcatctgctggcccagcagctggtcgccgctggtgagcgggtgctggacgtgcagcccaagctgggtgcccgggtgcggctgctggccaccggggccagtaacaagaacgacccgaacgacgcccggtcggtggcgctcgcggcgctgcgctccaagacccggcggccggtgaccgccgatgaccacggcgcggtgctgcgggtgtggtcgcggcgccaccgggacctgggccgggccaagaaccaggccgcgtgccggctccacgccgtactcagcgagctggtccccggcggtgtgcccgacgaaatcaccgcagcccgggccattcgcatcctggaccgcagcacgccatccggcgccgtcgggcaggcacgctttgatctcgccaccgagctcctggacgacatgcgccgcctggacgcccagatccgcgagtcgcagaagaaactcgccgtcgcggtcaaggcatcgggcaccagcctgaccggcctgttcggcgtcggtcctttcatcgccgccaccgtgatcggcgacgtcgccgacgtggcccggttcgccacccgggatcacttcgccgcctataacggcaccgccccgatcgaggtgtcctcggggaaccgcaagatctaccggctgtcgctgcgcgggaaccggcgcatcaaccacgccatccacatggccgcgatcacccagatccgccactcccacagcgacggccgcgcctattacgacaagaagctggccgagggcaagacccacaaagaggcgctccggtccctcaagcgccagatcagcaacgcgatctaccgctgcctccaggccgacgcccggcaggctgccgcagcggcctgcgccaagggcccgggagggcaaccggggaacgactctgactccagcgcggccggctcacaccccgagcgccggctcttcggacaagccactcccgggccaagccccacactacgagccgccacccccgccgggcgaaccacgccgccgaagcagacatcaaagaaaacccgccgtagtgcttgacaacaaaagcaaagagggct

SEQ ID NO: 9677 - DNA, 1611 bp, unidentified
  source 1..1611: mol_type = unassigned DNA; note = element_f265a87
  misc_feature 1..2: note = core
  misc_feature 3..528: note = LE
  misc_feature 529..1455: note = CDS
  misc_feature 1456..1611: note = RE
  misc_feature 64..260: note = bridgeRNA
ctggtatatataaattagctcattcaactgagtaatctgcatataccttttcctttctacctgatctagtattcatcaggattttgtttatctgttagaattgaaattgtggatgtgtacttgagtgatctcctagaggctttgacttcataagaaagaatcttgccacttcctaatattcagaactgcgatcagttggatgagcctttgagttcgtattaccaggatcagtcgaatactttgcaagtggttcatccattcacgcatatatagaaaggacggtgcttctatgcgctattttatcggtatcgatatcagtaaattcaaacatacggctgctgtaattgatcaggatggtgtcgttcatatcgaaccttttgactttgacaatgacatcatcgggttcaattctttttttacttctgtttcttcctttattcaggatgatttcatcatcggcatggaagatactggcactatgccgacaatcttcaaaagtttctcttatccaagaatcttaaggttgccatgttcaatccattggctaccaatcacatccgtttagccttcaatctggctaagaatgataggctggattctcttacaattgcttcggctttagctatgcctagactttatagaatcatcgaagatgagcattttacctatcatgagatccgtgaactgtcgcgttatcatcaaagcctttcgaaaacaatgaatcgctataagaatcgtcttcagaagtttattgatatcgctttccctgaattcaataaactttttgatacaaaatactcaaaaacttatttaaagattcttaaagatttccaaagtgctcagaatattgccaatacagatatacggacacttagaaaagctcttttatcaaaaggaagatgcgtttccattacggctgaggaactgaaatctgctgccagggattctattggtcattcccatatagcacttgatctggagatacagcagacagttgaaatgatcgaaaagattgattccaatctggatatagtggataaaaaaatagaagaattcagtctgcagctaaactctcctatccttgccatccctggtatctcacacatatcagcgatgtccatcctgtccgaacttggtgacttcacccagtatgaaagtgctaagaagatcatcaagctgtcaggaaccaatccatatatctatgaatctggtacctatagtatgccacgaacaaggctagaaaaaaagggatcaaaatacttaagatgcactttatacaacatcatccagaccgtcatcaacaacaatccagtattcaaggattattatgacagaaagatatctcagggaaaatcgcatcgatgtgcacaggggcattgcgtgagaaaactactcagagtcatctatcatatcctgacaactggatgtgaatttgatccgtctcttttacgataacccgtctatacaatcaatcgtataaaaaggctattttccgatagttctttttagtgtacacatatttacaatttcaaagatcaatacaacctttaaagtctagttttatatttcatactttttcatcgcttagtacttgactttatatatagttgt

SEQ ID NO: 9678 - DNA, 1435 bp, unidentified
  source 1..1435: mol_type = unassigned DNA; note = element_f268f40
  misc_feature 1..2: note = core
  misc_feature 3..120: note = LE
  misc_feature 121..1152: note = CDS
  misc_feature 1153..1435: note = RE
  misc_feature 1188..1388: note = bridgeRNA
agatggggtaatcggccggcgatcttgtggatagctgaagattttgggtgctgcgcttcaggctgatggtgaaacgaggtccgtggtgacggcctcaagcatcagaaggagaagcgcagcatggaccattttgctggactagatgtttcagtcaaggagacgagtatctgcattgtggatgacacgggcaggatcgtgcgggaagtgaaggtggcgagcgaacctgaagctttgctggcggtgctggcgaaccccacctaccacttcaaacggatcggactggaagccgggccgctatcgcaatggctgttcagtgcactcgccgaagccggcttgccggtgatctgtgtcgagacgcggcacatgcgggcggtgttgcaggcgcagatcaacaagactgaccgcaacgacgcacgcggcatggcgcagatgatgcgggcgggactttaccgcccggtgcatgtgaagacgttacgcagccagaagctgcgaatgctgctgacccatcgcaagctgctgcagtcgaaggccgtcgcgatcgagaacgacctgcgcggcacgttacgcaactttggtctcaaagtaggcgtggtgggcaaggtaagattcgaggcgcgcatcagggagcttgtcgagaacctccccgacctggcggtgctggtcgaaccgatgctcattgtccggcgggtgcttcgcgagcagatcggcatcctgcatcgccgtttgctggccatcgtgcgggacgatgacgtgtgccgacgcctgatgacgatccccggcgtcggcccggtggtggcgctgacctatcgcgccaccgtcgacgtgccggcccgcttcaagaactccaaggctgtcggggcggtgttggggctgacgccgtccaagtatcaatcgggtgagatcaaccgatccggcgcgatatcaaagtgcggagacgagatgatgcgggtgatgctctacgaagcggcccaggtcatgctgacccgcaccaacaagtggtcctggctcaaagcctgggccatgaagatcgccaggcaccgcgggatgaagaaggcgatcgtggcgctggcgcgccggctggccgtgatcatgcaccgcatatgggttgacggcaccgagttccagtggacccgggaggccgcagtggcatgacagcagctcaggatcacatgcgataggagaaaactcgagctccaccaagcggtggaatgatgtccctcgcgggacgatggatgaggtgagttcgtttgtccgcttggacctgtcgttcgtctgacggcaaggccgcccaatagattgttccgcctcgtcttcgaatcccatgatggaagggccttagtgccgattccgaagagaagcacgagcccgcgggcgacatcgacactgcagtggtggatagtctgaaagcgcttgacccaaaacggccgattagaga

SEQ ID NO: 9679 - DNA, 1697 bp, unidentified
  source 1..1697: mol_type = unassigned DNA; note = element_f27df07
  misc_feature 1..2: note = core
  misc_feature 3..273: note = LE
  misc_feature 274..1671: note = CDS
  misc_feature 1672..1697: note = RE
  misc_feature 76..250: note = bridgeRNA
agccctaactgcgtcttcgacgcgtcgctagtgccagaaacttgtctagagtttccccttttgcgaatttgatgcaggattcgattcggcaagctaaggccgcaaaccgacatggcgcttcgtgcccgacgataagcatggctccggtactggcgatcactagtctggtggcaaggaccttgttgtaccggccctttgaccccgttggagagttttttaaaccgttcgtcaccgggccgaatcggatcctcatttccaccgaggaggaccgagatgaggacggacaaaatgctgtggcgaaatcgcaagttgaagaaggaactagcgcggcggttgcaatcggagaatccgggtctggaggtggtccatccccacgccgcaggaatcgatgtgggcaatagtgcccattatgtggcggtgcggccagaccgtgattcacaaccggtgcgtcgattcgagtgcttcactgccgatcttcatcgattggcgaactggttgcaagactgcggggtgaagaccgtggccttgcagtcgacgggcgtgtattggattcccctgtacgacattctggaagagcgcgggtttgaggtttatctggtcaacgcgcgacacaccaagaatctgccgggacggaagagtgatgtgcaggaaagccagtggttgctgaaattacacacctacgggttgctgaacaactcgttccaaccaccttcaaaaattcggatcctgcgcacctattggcggcagcggttacaacacgtcaccggagcggccacctgtgtgcaacgcatgcagaaagcactgacccagatgaacatacagctggcgaatgtgatcagcgatctgagcggagtgactggacagctgatcgtgcgggccatcatcggcggggaacgcgacccgtggaagctcgcagaactcagtcacccgcggattcaggccagccgtggggagattgccaagagcctggagggcaactggcgtccagaactgatcttcgtgctgcaacaggaaatggagatgtataacacctaccagcgacgagtcgctgaatgcgaccaggaattgcagaaacacctgggcgcttttgccgatacggtcccgccgccagttaaagaagaactacccccgaaaaagaagaagaaacaaaacaagaataatccgcacttccatcttgccgaggaattgcagcgcatcagcggagtggatctgacgcgcatcgacggcgtcgatgtgatggtcgcgcaaacggtcatcagtgaggtgggcctagacatgagccgatggaaaaccgaggcacactttgcttcctggttggggctctgcccagacaaccgaatcagcggagacaaagtgcttgctcgagggactcgccatgtgctcaaccgcgcagccaccgcactgcggctgggggcctcgaccttactgcgaagccagacctatctcggcgcgcagtaccgacgcttgcgcaccaagctcggtgctcccaaagccatcaccgccatggcgcaccgcctcgcccgactggtctatcgcatgctgaagtatggtcagcagtacatcgacaaaggggcggaatactacgagcaaagaaaccgccaacaacaaatcgagttcgtcagaaagaaggccgcccaactcggcctgcaggtcacaccagctcatgtgtgaacctaccaatcaagaagtttctggag

SEQ ID NO: 9680 - DNA, 1165 bp, unidentified
  source 1..1165: mol_type = unassigned DNA; note = element_f283809
  misc_feature 1..2: note = core
  misc_feature 3..196: note = LE
  misc_feature 197..1159: note = CDS
  misc_feature 1160..1165: note = RE
  misc_feature 36..211: note = bridgeRNA
cttgtcttatgaagaggtgtcctttggcgttagtcttgggatgccagccgggcttggccaagcccggctggcggaatgggacggatcgttgatttgcaggcctttgcagggccgagttagagtttgatcgcccatttcttttccagtggcctgaacggatacatgggggcaagccccgtatgacaagcaaaggacaatggtcaagatgacgcagtatacaccaactttcgccggaatcgatgtctcgaaagcgcaccctgatgtttatcttcatcccgccggattgcatcgtcgtttcagcaacggcaaaacgggctggcgggcgctccgtgggtggctggctgacgctcatccggatggcgtcgtctacgaagcgacgggaagttaccataaaggcgtcgagagatacctcggcgaacggggctttgccattgcgcgcctcgacccgcgccgggcccggcgctttgccgaggcccttggcgtcaacgccaagaccgacccggttgacgcccgggtcctggccgaattcggcgcctttttaaagccggcgacacgacccctgccggaaccggcgctggaacagctcaaggaactggtcgtcgcgcgccgtggcctggtgcaacaaaacacccgcatcgccaacaggagcaaaaccgttacctccccattgctcaagctccagttccaacaatcagcccgtcaggtcaagcaacagatcgccgggatcgacaccgaatgccgggacatcgtcggggcggacccggcgctggcgcaacgtctagcaattctgatcagcatccccgccatcggcgacgtcaccgccatgaccttgcttgccgacatgcctgaactcgggctcctcaacgataagcaagtcgcaagcttgatgggggtcgccccaatcgcccgcgacagcggaacattcagaggcaggcgccacattcggggcggccgcgcacaggtccgacaggacgtctacatggccgccctcgtcgccacccgcttcaacgccgatatgaaacaaaaataccagacgctcattgaaaacggaaaaccgccaaaagtcgccctgacagccatcatgcgaaagctaatcatactcgcaaacgccctcatcaaagataacaggctgtgggctgaaatcaggccttgcaaataacggata

SEQ ID NO: 9681 - DNA, 1246 bp, unidentified
  source 1..1246: mol_type = unassigned DNA; note = element_f2866d6
  misc_feature 1..2: note = core
  misc_feature 3..238: note = LE
  misc_feature 239..1231: note = CDS
  misc_feature 1232..1246: note = RE
  misc_feature 9..178: note = bridgeRNA
cttgtatgttggtcccggactcggacaatgggtgattgttcaccggggaaaccgtcccgacctggaggcagacgaacgtctgacctcgcctgtagagcggttccccgcctcattgctcagtccgaggagtatccggaagccacggttgtggacttcgcatcacaaggtcggacggcatgaaatgcgaggtcggggaacctggtgacattctgcccacccaagattcgaggatcaactcatgtcgacttttgccggaattgatgtcagcgccaagaaactcgatgtcgcctgcctgacaggcaaggcaaaaccggcttttgcgcagttcgagcagagcccggccggccaccgcaagctggtcgcctacctgaaaaagcgccgcgtcgaggcggtggtgatggaagcgactgggatctactatctcgacgccgccgtggcgctgagctgggccagcgtgccggtctcggtcatcaatccgcgttcggcccaccacttcgccgaggcgatgcttcagagcagcaagaccgatcgcatcgatgccgatctgctggcccagtatgcccagcgcatggacctcaaaccttggcagccgccacggggagactggctggctctgcgcgatatctcgcgcagaatcaaccagctgagcggtatgtgcacggccgagaagaaccgcctgcatgccctcgaggcccagcgccacactcgtcaggccgtcctcgaggacgtcagatcgcacatcgagttgctcgagcgcagcatcgatcgcctgacggcttcagccctggaactgatcgagcaagatgccgatctggcgcactatcggtcctgcatgaccgcagccaaaggcgttgccgatgccagcgtggtgacgctcctcggcgagctgtgcatgctgccgcttgaactgcgctcggcccaggtcagccggcaggccgggatggacgtccggctgaccgaatcgggcagcagcgtggacaaacccggccggctcagcaaggcgggcaatgcctacttgcgagccgccctgcacatgccttcgctgagcctcatcgtccacgacaaatacgccaaggcgcactacgaagcgctcgtcgagcgtggcaaaaagaaaatgcaggcactatgcgccatccagcgcaagatgctcaccgggctatgggcctgcatgaaaactggccagccttttgatagcaccaaattgttcgcgatcgagcccaaaaaggcttgacgggcaacagagtat

SEQ ID NO: 9682 - DNA, 1361 bp, unidentified
  source 1..1361: mol_type = unassigned DNA; note = element_f288cb8
  misc_feature 1: note = core
  misc_feature 2..71: note = LE
  misc_feature 72..1091: note = CDS
  misc_feature 1092..1361: note = RE
  misc_feature 1126..1357: note = bridgeRNA
taatgagatggtcacccccaccctgtgaggcgtacgctgacagggtgtttttctttctgaaggggatcatcatgcaaaacgttacgctgattggtatcgaccttggtaaacacagcttccacctgcacggacaggatcggagcggtcatgccatcttccgcaagaaatttacccgtaccgggctgctggcgtttttggcgacctgcccaccttgctctgtggtgatggaagcctgtgccggtgcccattgtctggcacgtcaactgacctcatttgggcatcaggccaagcttatttctccgcagtttgtccgccctttcgtcaagagcaacaagaacgacttcattgatgccgaagcgatttgcgaggcggcttcgcgccccgcaatgcgcttcgtcaccccgaaaacagagcatcagcagacattggcagcaatgcatcgagtacgggagtcgctggtacgtgacaaggttaaaaccaccaatcagatgcatggttttctgctggagttcggcgtcagcctgccaaaaggggaagcggtgattaagcggctttccaccgtgttggcgaagcaggtattgcctgcgccattggtgcaattgttgatgcgcttacaggcgcattatggctatctgcggcagcagattgttgaactggaacaggcactggaagcccatctggagcaggatgaggctgcgcagaacctgctgactatccccggtgtggggccaatcaccgccagcctgttgcattgcgaactgggcgacggcaaacactatgccagcgggcgcgattttgctgctgcggtggggttggtgctacggcaatacagtaccggcggtaaagcgacgttgatggggatcagcaagcgtggagacaagaatctacgacgattgctggtacagtgcgcccgggtatttatgatgacgctggagaaacggcaaggccggctggcagaatgggttcgggcgttgctgacgcggcggcactccaatgtggtggcgtgtgcattggcgaacaaactggcacggatcgcctggtcgctgagttatcggcgcgaagcttatcaagtaacaggggttaacgtatgaaacgttaacccactgtttataaagttagtcatgtaagttacacccagttttgcgaagacagagtgttgatggcacaaacagctcactggcctgacgagtaacctggcaataaaatcggcttacgtggccgaggccctttttaggttcgtcaggcgcggctttcatcggggcgcgggagcaggcttggtttcccaacagacgccggatagatttaagcaaagctcactgtacctcaaaattcatcttgcaaaaacgggggtgaccatagat

SEQ ID NO: 9683 - DNA, 1249 bp, unidentified
  source 1..1249: mol_type = unassigned DNA; note = element_f28c32d
  misc_feature 1..3: note = core
  misc_feature 4..208: note = LE
  misc_feature 209..1213: note = CDS
  misc_feature 1214..1249: note = RE
  misc_feature 2..198: note = bridgeRNA
tgcctttagtttgtatttacgtaaaaatacactaaattaaataaaaaggaaacgggtgaactagaacgttttgtaagccttagacttaatagctgcattagtcccgtttcctttatcaaacttgtaagaaccaattggaatgatgggcgttggggcccgataaaggcaatagtcatacaagttattgtttaacgttaaaagtaaagttatgaaaaaagtaaaagaaatcacagaaagcattggtatagatgtatcaaaagcgactttagatgtgtttatacatacaaagcgactacacaaacagtttttaaataataagaaaggttttgcagaacttttgaaatgggtcaagaatgaagtcagtaaaatagaagaaacaatctggtgttttgaacataccggttggtattgtgtgctattaagtcattttatgtacagtaataaattatattactgttgtgtaaatccaatggagataaagcgttcgatgggcttaaaacgaagcaaaacagataagcaggatgctgaggagatagcaagatatgcctggttgagaagaaatgaattggattcaagtataccaatgccattaaatttagttgaattacaacgtctaatgagtttaagagaacagttggtaaaacaaacaacagcgctaaaaaacttaagtaaaggatttaaagtaacagtagaaaaagagagttctgattttggaatgaagactattaaacaaacgttaaaacagttagaaagtcaaataaaaaaagttgagaaagaaatggctcgactaattaaacaggatggaaatatgtaccataattttaagatgagtaaaagtgtaaaaggagttggtgatatcatggcaatacaaatgcttttacatacacataattacacaagatttggcacttggcgagagttttcatcttactgtggtttggttccctatccttaccaatccgggacaagtataaatcgaaaaccaacaactcacagtgtcagtgatcaaaagatgaagagtttattaacgatgtcagcaataagtgctatacaggctgataaagagttaaaacagtattttaagaagcgagttgaagaaggaaaaccgaagatggttgtattaaatataataagaaacaaaattgtatcaaggatatttgcaactgttaaacgaggaacaccttatgtagagatgtataaatttgctgcttaaaaaaagttgttaaattatttgttttttaccttggaa

SEQ ID NO: 9684 - DNA, 1607 bp, unidentified
  source 1..1607: mol_type = unassigned DNA; note = element_f28dbab
  misc_feature 1..2: note = core
  misc_feature 3..276: note = LE
  misc_feature 277..1497: note = CDS
  misc_feature 1498..1607: note = RE
  misc_feature 18..299: note = bridgeRNA
ctcctaatataaaagtgtagtggttatactccccaacagccaactgggggtataggcctctcgttgcttaagctgttagaatgtagtggcattggtttggacgggcacctccttggacctcgcgtccgtgcataagtctgtctgacaaccactcattcgcagctgttcggtttacgtagattgaaccgcttttcgtgcgttcgcttgatacccaggagattgaataagcaatgaggaatggttgacccactgcaaatatatcttaggaggtattctatgttgaacgctgttggtattgatgtctcgaaaggcaaaagcactgtcgcgatcctacggcctgccggagatgttgtgcgcaaacctttcaatgtttctcattctgtcaaagggctatcggatctgatctcctgtgtcaaagatctcgatggtgagaccagagttgtcatggaaacaaccggccattatcatgagcctgttctcaaggcttttctggacgctggtatttttgtctcagctgtaaatcccagcctcatcaaataccatgacagtgataaaaatccactccgaaaagttaagtccgatccagccgatgccagaaagatcgccaagtatactcttgacaagtgggaacatctgcgtcagcattcagctatggatacttctcgagcccaactgaaaacgctgaatacgcagttccacttcttcatgcaacagaaggtttctttgaagaataaccttattttcctcttggatctgacttatcccggcgtaaacaagttatttgacagccctgtccgctctgacggaagtgagaaatgggttgattacgcccgctccttctggcatgtagactgtgtccgcaaaatcggcctgaaagctttcacaagtcgttatcagaatttctgtaagcatcatggctataactttcagccgggcaaacccgaggaactctttaatgcctccaaaggccttgttgctgtcgttcctaaagacccgatatacaagcagctgatcctcagctccatcgaacagctgaatacggtttccaggcaaatagaactgttccgccataccatgaatgagcttgcttctacgcttcctgaatacaccaccgtcatgtcgatgtatggggtgggaccctcctatggtcctcagctcatggcggagataggtgatatttcccgttttgaccatcgctctgcgattacagcctttgccggcgtagatcctggtgttaatcaatccggattggtaaatcatgagagtaatagtgcttcaaagcacggatcaccgcgtcttcgaaaaacgctcttccagatcatgactaccttgcttcagcttgcgcctgcggatgatccggtttatctctttatgatgaaaaagaaaactgaaggaaaaccgtatcaggtttatatgactgccggagcgaataagttccttcgcatttactatggcaaggtcaaggagtgtttggcagttcaatctatttctgaataacaaatgtccttcatcttttccttggccggcacgatcgggcggcctttttgtgatacctccatttctatctacgaattcgccaaagttcttcttgattttttattagtaga

SEQ ID NO: 9685 - DNA, 1668 bp, unidentified
  source 1..1668: mol_type = unassigned DNA; note = element_f2a0662
  misc_feature 1..4: note = core
  misc_feature 5..532: note = LE
  misc_feature 533..1528: note = CDS
  misc_feature 1529..1668: note = RE
  misc_feature 12..308: note = bridgeRNA
ttgctacaattgtgttggttctgaaaggttcacagccagtgagctatacagacgcccaaacctaagctacaattgagatgtgcagagagaacgctgccctgcttgagctttcacgctcgtacgcgcaaactgttctccgccatctccattgcagcgttcgattgacgcaggttgagttatcagtgactcttgtcactgtacattcgtgtcacaaagcaagctgaatcggtgatgggcatcaggcggaacaagcacaaaaaggaggccggaaaaatgaagtcaatggaaatcacagccgtaggtattgatgtttctaagagcaaaagcacagttgctattcgcaggccaggtggagtaattgttgcacgtccatttgacatatctcattctaaccatgatcttgagaaactggtctccatattgaaaacgacaggaggagatattcgcgttgtaatggaacacacaagcaactattggaagccgattgcattgaccctaaaaatgccggcttttatgtttctgtggtaatgccatgttaattcacgatttcagcaataattctatccgaaaattgaaaacagatcgtgcggactccttgaaaatcgccaactatgcactgacgttttggaatgaactcccaccattcaatgatgaagacgaaaccagacttgtgttgagagagcagtcacgaatgtatgaaagattggcttcgacagcaacatcccttcgcaatggcctgattgcactggcagatcagacgttcccttcgattgatcaggcttttggacacgcgatcaagaatgcggatggtcatgaaaagtgggtcgatttcttttcaatttattggcacagagactgtgtactcagactttccattgaaaaattcacagaatcttaccgcaaatggtgtttgcggagaaattataaatttcgtacgaatacagcgcacaagttgtatgctctggcacaggatgccgttcctacgctcccgaaaaacaacggaacgaaggctttagtattgcaggcttgcaagagcctgaatgctgtatgcgaggcgaaacagtctactcaagaagaaatgaaccggttggcttcgctgcttcctgaatatgaagttgtcatgcagatggagggcacaggacccattacaggccctgctctaatggctgagattggtgatgtcagacgtttcaaaaacaagaaagctctcgttgcctttgcaggcattgatgcgccgccgttccagtctggaaactttgaatctaagtcacgccatgtttccgagcgcggctcaccttatttgaggcgtacggtgttccttgtggcaaatattattctaaccttatcccacaaagataacagcgtcttttgctttatggacaaaaagcgcgctggaggaaagcactactacgtctacacgattgctggcagtgcgaaatttctgagaatctactacgcacgagttactgaatatttgcgcgttcaagagagacctgttgctgccagctgtccaaacggtaacagctaactcaatcctttagtttgaaaattctgctgacaggctggtaactgtcggcttattaaagttgccggatgctcagctgcacccggcaacaattattttggtctaaattttctgattttacctcttgacacactttagcaggt

SEQ ID NO: 9686 - DNA, 1355 bp, unidentified
  source 1..1355: mol_type = unassigned DNA; note = element_f2a2ace
  misc_feature 1..2: note = core
  misc_feature 3..66: note = LE
  misc_feature 67..1107: note = CDS
  misc_feature 1108..1355: note = RE
  misc_feature 1121..1345: note = bridgeRNA
ttatggaatggcccgcctcaaacgaagctgtcattatgggctgaggtacaaaatgaggagattgtcatgaacaacactaacattgctgttttgggcgtggatctaggcaagaacatttgcagcctcgccggtttcgatatcagcggacagttaatattccgcaagcgcatgcggcccgatacgattccaaaatttacagagcgactctcaacatgcatcgttgcaatggaggcctgttgcggtgctcatcatctgggccgtttaattgcccggcaaggacacgagatccgactgatgtcgccggaatacgtgcggccatatgttaaagctcagaagaacgatgaacgcgatgccgaagctattgctgaagctgcttcgcgcccgacaatgcgctttgttgaacttaagagcgccgaacagctcgacatgcagacgctgcaccgttcgcgttcacggcttgtgggtacacgcacgatgctaataaatcagatgcgagccattctgttagagcgggggctcagatttccgcaaggcaggcgcaagcttgagctggcgattgatgcgatgctgggcgaaccggctaccggcatcagtcaaagaatattcgaactaatagcggatatgcgagatgaatggagagaactcgatggccgtattgccattctggaccgtgagtttgctcaatgtgtccggtcagatccggatactcagcgcctgacttctgttccgggtatcggaccgttgacagcaacagcactggttgcagcgattggcaatgccagttcttttacgcgtgcccgtgatcttagcgcatggcttggcctcgttccaaaacaacgaaccaccggcggcaagcctaagcttctgggcataagcaggcggggtaacatctatttgcgaacactgtttatccacggtgcgcgagctgctttaccgtggctggcgaaaagcgagacccaattgggcttttggttgcgcgggctgcttgcccggtctcaccgcaacactgcagttgtagcgcttgccaacaaactggtgcgtatcgcgtgggcaaccttgcgtcaccaagaagcatatcggaatgcgcccgccaaatctgtggcataaatatcaaggagttacaatctatcgagagatacgcttttgcgagtggaaagtgagatggccgaacggttgatcggcggaccggacacctggttaaaaaaatggctcttcgaagccgacatgcttatgaggaccgggccgcgcgaatatccatcttggcgacgatcagatgatcgatatgccgcatacgtttacgcagaccgtgcgattgctatcaaaaaatctactattgcaaagaggcgggccatacg

SEQ ID NO: 9687 - DNA, 1614 bp, unidentified
  source 1..1614: mol_type = unassigned DNA; note = element_f2a4d49
  misc_feature 1..2: note = core
  misc_feature 3..274: note = LE
  misc_feature 275..1483: note = CDS
  misc_feature 1484..1614: note = RE
  misc_feature 12..294: note = bridgeRNA
ctattacaataaatttggatctggagcccggcagccatccgggcttcactccatctcttgcctaagctacaataagaggagcagctggttgaccacacactctttggtgcttttatgtccgtaaataagactgtcagccatcctcttgttgtagcgttcggtttagcaggttgagccaccgtacatcggggtgttcgtgtcacgcaatagattgaatcggcaatgagaaaaagatggattccggttgcatgatttttgtattggaggaatgacaatgaacgccgttggcatcgatgtttccaaaggcaagagcatgattacagtcatgcgtcccggtaaggaagtggtgattgaaccctttgaagtaagtcacaccgacagtgaactgatcgacctggcaaaggtgatccaaagcctggacggtgagacccgtgtagtcatggaggcaaccggcaactaccacttgcctatagcctggatgctgcacgatgctggtatttatgtttccgtagtcaatgcgatgctgatccgcaactacggcaacaacacgattcgtaagggaaagactgacaagaaggacgcccagaaaattgccaactatgcaattgacaactggacggagttgccgcagtactttcccgaagaagatgtttggatgatgctgaagaactgctaccgtcagtacgaacacttctccaaaattcggacaatgatgaaaaacaacctcatttcccttctggatgttacttttccagatgcaaaccgcctgtttagcagtcccagacgggctgatggcagtgaaaagtggctggatttcatagaaaccttctggcattgtcagtgcgtctgtgggcttactccagcggcattcacgaagaaataccagaagtggtgcaagaagcacggttacaatttcagcgaagataaagcattggacatctatgcttctgcctgtggtcatgtctgcgtaatgccgaaaacggatgacactgagttcatgatgcagcaggcaatactccagctgaagaccgtctccaagactctggccgcactccagcagcagatgcagactcttgccgagaagctgccggaatacccggtagtcatgcagttgtttggtgtcggcccgattctcggcccacagctcatggctgagattggagacgtcagacggttccattcaaagaaagtactggtggccttttcaggcattgatgcaccgccttgccagtctggaaccatggaggtccgaagcagaagcatttccaagagaggctcttcctcgctgcgcagaacgatttttcttgtcatgagtgtgatcctgcagcagaagcctttggatgaacctgtgtaccagttcatggacaagaaacgagccgagggaaagccctacaaggtgtacatgatggcctccgccaacaagttcctgcggatctactacgccaccgtaaaggcttatctggatgctttagacgccgaataaccaactcctatattcgatggatagctgccgtttcaaaaacaaaacgccgagcagcttggttgaggtatgccttttttgcaaaaaacattttcaaattttctcaatttaagacttgacttttattagcaggt

SEQ ID NO: 9688 - DNA, 1410 bp, unidentified
  source 1..1410: mol_type = unassigned DNA; note = element_f2aa895
  misc_feature 1..2: note = core
  misc_feature 3..145: note = LE
  misc_feature 146..1111: note = CDS
  misc_feature 1112..1410: note = RE
  misc_feature 1154..1397: note = bridgeRNA
tgatgtggtggacggcgcccgctcccagcaacgagctgccctagggtggtcgttgcgatcgaatcacatcagggagcctcgacatgcaaatcaccacgatcggtttggatatcgccaagaacgtgttccaggttcacgggatcgagtggccgagaaggtcgtcattcggaagcaacttcggcgcagccaggtgctggcattcttcaaagcgctgccgccgtgccttgtcggcatggaagcctgcgccacggctcattattgggcgcgtgagctgacgaagcttggccaccaggtgcggctgatgccggcgaaagacgtgaaggcctacgtcaaacgcaacaagaatgacgctgccgacgccgaagcgatctgcgaggcggtgcgacgcccgaccatgcgttttgtgcaggtcaaatcggccgagcagcagggccagttgatgcagcatcgcacgcgcgatctactgatgcgccagcggacccaggtgatcaatgctttgcgggcgcatttggccgagctcggcattgcgtctgcgcaagggcgtgaaggtctcaaggagttgctgaagattgttgcgagcgatgcggatgagcgcttgccggccgatgcgcaagcgagcctgatcgtgctggcggcggagcttcgagcgatgcagacgctaatcggatcgatcgagaaacggatcgtgacgcagcatcgcgggaacgaggcgagcaagcggctgcggaccatccccggtatcggcatcatcggcgcgactgctatcgcggccaccgtcacggacccgaaggcattccggtcgggccgtgatatggcggcctggatcgggctcgtcccgcgccaggattcgaccggcggcaaacagaggctcgggccgatctcgaaacagggcgatcgctatttgcgacgcattctcgttgtcggcgcgcactctgtcctgcggcgcgcaaagctgaatccgcagaaacatccttggctcacgcagctcttggcgcggcggccgttcaaggtcgtggcggtggcgctggccaacaaaatggcgcgcatggcatgggcgttgctggccaagggcggcgcctatcgggcgcctgcgctcgcagcaacggcctaacaggtctggcgacgggaggatgaggttgcgtctgtgcgttcacgaactgcaggggtgatgacgacattgatgcgaaacggtcgagaccgtcgatcggaaaacccgtgaagggccacgcgagtaaaagacgcgagcttttggttgggaccgatcagcggatcacatcagggccagcggccactgcggctgcatcgcgacagaggcaatcctccaagcgaaaacaggccggatacatggctgcacccgaacgcttcgctgaaatgtcagattcctcttgcaccgcgggcgccgtccataca

SEQ ID NO: 9689 - DNA, 1473 bp, unidentified
  source 1..1473: mol_type = unassigned DNA; note = element_f2b0945
  misc_feature 1..3: note = core
  misc_feature 4..230: note = LE
  misc_feature 231..1454: note = CDS
  misc_feature 1455..1473: note = RE
  misc_feature 7..227: note = bridgeRNA
tctaatgggtttggacagcatcacgttttggagtgatgctgtctccgagccgctggccggtgaacactttggcatttccgagcgttcagctctggcaacagagggtgccccggtcggtgggtgaggtcgacggagaaggctggaggggtgtcgtgccgtgagcactgaaccattaggacgctgccgttgcctcggggctcatcgtgattcaactagcgggaggtggcgaaatgatttttgttggtgtggattgggctgaggcccaccacgacgtgtgcatcttggacgttgatggcaacgtcctcggacgaagaagagtcggcgactcgttcgccggagttggtgagttgcacgcgctcgtggctgcgcatctaggcgacgatgatgaagcagatcaggtcgtagtcggcatcgagaaggaccgcggtctcatcgtgaccgcactggtcgcggcgaactaccaggtctacggcatcaatcccatggcggcggcgcgttaccgcgagcgccaccacgtctcgggatcaaagtccgatcccggtgacgccaagatgttggcggacctggtgcgcaccgatcgccagaaccaccgtcaggtggcgggcgacagtgcactgatcaacggcgtccaggtgctcgcgcgagcgcaccagaacgccatttggggccgccagcgtcaggtgaacgcgctgcgctcggccctgaaggactactacccgggcgctctcgaggctttcggcacggacctatcgcacatggacgccgtcgcggtgctgagtgtggcgccaacgccggcgatcgggcgcacgctgtcacgcgccaagttggtcgcgacgctgaaacgcggcggacgacagcgccagctcgacgagcgtgccgaaaagatccaagcggcgttgcgcaaagagcagctgcacgaacccaaagttcttgaggacgcctacggccaggtcacctcgtcgatcgtgcgcactatcgcgttgatgagctcggagatcgctgagctcgagaaggtgatgtcggaaagttttgaacagcacccgagcgccaagatcgtccgctctcttccaggaatggggacggtcctgggcgcccgggtgttgggtgagttcggggatgacccgaaccggtacttcgacgccaagtctcgcaggaactacgccggcacgtcgccggtcaccaaggcttcgggaaagtatcgagccgtgttcgctcgacgaagtcgcaataagcgcctcgccgacgccctcgaccagttggccttctgttcactgattagctctccaggtgcgcggcgctactacgacgagatgcgcgctcgagaaaagacccatcgcaaggccgtgcgacaactggcgaaccgctgggtcggcatcctgcacacgtgcctcgagcgcggctgtctctatgacgaagagattgcgtggccaacgcctgaagagattgccgcttgacatttacgaacaaggggtg

SEQ ID NO: 9690 - DNA, 1597 bp, unidentified
  source 1..1597: mol_type = unassigned DNA; note = element_f2b2148
  misc_feature 1..3: note = core
  misc_feature 4..239: note = LE
  misc_feature 240..1448: note = CDS
  misc_feature 1449..1597: note = RE
  misc_feature 53..223: note = bridgeRNA
cttatctgttaaactcaacccagggagcaggaatactcacccaggttggcaaaaatttttaattaaaactttccgggaaaaggatttcatctcctggcagttcgactgcccacgaaagagctacctttcccggagcaaatttgcagactgcggttcatagaagggttgtgcttcgagcaccacgttagataaggcccactgccagtctgcaacaaaattcgtacgcggaggttttggacatgtactttgtagggattgactgggctgacctgcatcatgacgtagccgtgctcgatgaaaagggtcaagagctaaagtacttcaccgttccccacaaaagggaaggcatggagcagttgaaacaaaaacttttaagcatcgaccccgacccggaaagctttgcctgcatggtggaaaccaaaaacggtcttctggtgcagttcctgttggaagccggttttccggtttacccgctcaacccgaaagttgtggattaccggcgaaaaccctccggggctaagagtgacccaattgatgccaggctgctggccaacatcggccgctccgacctggcgcagctaaagaggctaaagccggatgcggaactaatcgcggaattaaagatgttgactcgagaccaggacggcctgatccaggaatccacgcgccttaccaataagctcattgcctgcttgaaggaatattacccggtagctttaggattcttttcgaagccgaccctgccggtagccttggagttttacaagtgctaccctactttagagctggtaaggaaagccactgtaccagagatcgccgcctttctgaaaaagcacagacatccccggcccaatcaaacggccatctctatctggcagaaggcgcatgagccgcagctttgtgccagaactcccaccgtgcgggcgaaatgccgcttaatgctcgccctggtggggcaactggaagtagtccggaaacagattgatgcctacgacgaggagattaaccgcctttttcagttgcactccgacagcaggatcttcgctagcctgccgggggcggccgggcgcctggcgccaagactgctggcggagtggagcgatgaccgcgagcgttacgaagatgccgccgtggttcaggctttagcgggcacctcgcctgtgctcttccagagtggcaagtaccgatttgccaggcagcgcaagtcttgcgtaaaacctttccggcgggcaatgcacctgtttgccttccagagcatcagtcaggttccctgggcaagggagtattacgatactaaaagaagccagggtaaaacccaccacgaagctttgcgggctttggcgaatatctgggtacgggtcatctttgccatgtggaaaaaccgtacttgctacgacgaagccacgtttatcgcggcccgcgccaggcatcttaattgggcagcataaggttaaatattaggttgtcaatgttctaaccgctggcgactaaattttaatccagttggagccaggcggaaagggtgaaggcgtcttttaaagcgctcgaacatctgtgctacttataaaaattaagttttgctattgacatagaaggt

SEQ ID NO: 9691 - DNA, 1319 bp, unidentified
  source 1..1319: mol_type = unassigned DNA; note = element_f2b7bf2
  misc_feature 1..3: note = core
  misc_feature 4..232: note = LE
  misc_feature 233..1195: note = CDS
  misc_feature 1196..1319: note = RE
  misc_feature 50..207: note = bridgeRNA
gttgtatattatttgtatattcaaaataattgttgtatctttgtagccgatttaacatctaagtatggaataagaccgatatttgggttgtgccacacaccgtaataaacgttcagtccccatacttatacatccaaaaactggatagttcgttggtctcagaacccgtatttgcaacgatagtgttcagatgtattgatgttaaaccagcgcaaataaatcaaataacattatgacctacattggtattgacgtaagcaaggattcgttcgtagcagcttatccggcaaagagtggttacgccactaaaacattcaaaaacaccagtagtggtgtgcaccagttcattcaatcgcttccggctgaatgtcattgtgtaatggaggcaactggcaactacagcatgcttctcctctatctgcttcaacaagctaacattattgttagcatggagaatccgcagaagattaagcattttgctcgagctatgctgtccactaccaagacggacgatatcgatgctaaactgattgctatgtatggcgagaagatggagcctgccccctacaaaatcccgtctgagagcattatgttgctcaagcagaaacgcacagtcctaaggcaacttaagaaacaacttacgatgctactcaatctacagcactccttggcagttctgccgaagcaagatcctacagcaaaggttgccacagagaaaaccattaagttcttgcgcaagcaaatctctaagttagaagatgagatcactcatctatctaacaaggaatttaagcgccaaatggatcttctcacttccattataggcattggcaaaacccttgcttcagcactcatagttgctaccggaggctttgcgttctttagcaacgcaaaacagatctcgcgattcttgggactttgtcccacttaccagcaatcaggtacgtcagtacatttcaaaggtcacattaatcgcaatggcgatacttatctacgtagtcaattatacattgctgctgtttcctcaattaaattcaatgcagcttgtaaagagactttcaaacgtttgaaggataaaggcaaatcaggcaaagttgccgtcatcgctgtcgctaacaaacttattcgtcaggctttcgctgtcgtcactaacaatcgcccctacgttgatgggtatgtatcagcattaccataaaatattttatttgttttcccgctgggagcgctgtcggcaagggagtgccggaacactcccgacgagacacttggcaggtaaacattaaaatctatcaatttttgactacttttaaatatagttc

SEQ ID NO: 9692 - DNA, 1320 bp, unidentified
  source 1..1320: mol_type = unassigned DNA; note = element_f2bd268
  misc_feature 1..2: note = core
  misc_feature 3..75: note = LE
  misc_feature 76..1113: note = CDS
  misc_feature 1114..1320: note = RE
  misc_feature 1088..1305: note = bridgeRNA
agataattggactcccctccttactaaccgtaagctagataattcgaagcttgctacataaaactggagttcagcatgaagaaaactatcgttggtgtcgacttagcaaagaaagtggttcaagtttgtgtctatgcaaacaagaaggtgcgttccaataccgaaatgacgccgaatgaattcgctttgtggttagctaactccaagccaatgacagtgatatttgaagcgtgtagtacttccaattactggaagcagcggactgcatctttaggtcatgatgcccgacttatttctccaaatttagttgcttcagtaagacaaaatcaaaaaacagataagaatgatgcactggccattattcaagcttcattgcttccagatgtcgcatttgtttctggaaaatctgtagaacaacagcagcttcaatccataatgcgcatgagagagctttgcatgaagcaaaagacagccgcgaaaaatcagattatcgctttgctatcggagttcaatattaaagtgtctaagcgcaagggtggattattacgagttattgaatcaacacttgaagatgctgaaaacggcttttctatggagttcagggttgctctctgtgcagctaaagaacagtatctcactttggttgaaactattagtacttacgatacctgccttgagcaatctataaagtctcatcccgactgcaaaaaacttctgaagatcgagggaatcggaatactgaacgccataaacttgtacattgcactgggctgcgcggatatcggctctttcacaaaagggaaagatgccgcggcatgtattggtttaacaccgatacaacactcctcgggaggtaaatccaaggtggggtctataggtcgccgaacaaagaataccattttaagaagtcaattgataacaggggcaatgtctatagtcaatcacttagggactagagcagctaaaacgaagaaagagctatggcttaaagcgctgattgagcgtcgaggcaaaaagtgtgcagcagtcgctttagccaataaaaatgttagaacagccttcgccttgcttacccaaggttcggaatacaaagcggatcctgtatcagcttaaacgtgtcaaaacagtgaaatgcatatatgataaaaatcaactggttatgcaggtccaaaacaagagcttctagctcgtctagcagaattgcaactagttcgcgtaaatatcatagagcctgagttcgctactcttcgagagctcgtacataagtgcgcatttatttcatattataatttttactgttgacaacggggagtccacata

SEQ ID NO: 9693 - DNA, 1377 bp, unidentified
  source 1..1377: mol_type = unassigned DNA; note = element_f2c2b18
  misc_feature 1: note = core
  misc_feature 2..87: note = LE
  misc_feature 88..1119: note = CDS
  misc_feature 1120..1377: note = RE
  misc_feature 1141..1368: note = bridgeRNA
caatgggatggactcctcctcctattaacggcatctaggtgccagactggagctgttagtaaccagtcacaagagaaggagtccggtatgaagcttagtcgcattggaattgatttggcaaagaacgtatttcagttacacggtattgatcgtcacggaaagacggtatggaggcgccgattgaagcgagaccaatggctcgaggtgctgttggataaggtagaacccggttgtgagattggcatggaagcgtgcgctagcgctcatcactgggcgcgtgagctgcagaagcgaggatttgtagtcaggttgataccgccccagttcgtcaaaccgtacgtgaagagcaacaagaacgacgccaacgatgcggaagcaatctgtgaagccatgagtcggccgaacatgcgctttgtggccgtgaagcgtgtcgagcaacaggatatccaggccactcaccgcatccgggccgagctcatgacccagcgcaccgccaaggccaaccagatccggggcttagttgctgagtacggtttagtcgcgccactgacactgcgtgcattacgcgtggcgatccctgaatggctggaggatgccgagaacggtctgaccgatcatttccgtaccttactgcatggtgtgtgggtcgatctgcttgccctggatgaccgggtactcgagctggatcgggagatagaaagactcgccaacagcaacgaggtcactaaacgactacaacaactgcgtggtgtcggagcgatggtggccacggcactggtcgccaccgtcggtaacgccgatcaataccacaagggccggcagatggcggcatctttagggctcacaccaaaacaacacagctccggtggtaaagatcgtttgctcggtatcaccaagcgcggcgatgtctatctgcgaacactgctcatacacggtgccaggtcagtggtcacccacgctaaacacagggacgatcgcctcagccggtgggttaccagcatcgccacgcggcgccatccgaacgtggctgctgttgcgctggccaacaaaaccgcgcgcatggcctgggccatgctgcgcaatgaaacaaattacgatcctgacttcgcgattcgctaagacaggaaaccgaaggagatcctcaacaacgattgcttaagcaaactgcatgatggcaaacaggtcgaaccggcgtcggccaaacccgtgaatgaccacgtgctcaaagcacgagaaagcaattgggagccgacgcgcggataacccattatggcccggcatcaacgtatgccaactcaagaggccggatatacgtacgcagtcgtaccatgtgtgccatcagacagattgcttgcaagtcgagggggagtccatata

SEQ ID NO: 9694 - DNA, 1357 bp, unidentified
  source 1..1357: mol_type = unassigned DNA; note = element_f2cedca
  misc_feature 1..2: note = core
  misc_feature 3..74: note = LE
  misc_feature 75..1106: note = CDS
  misc_feature 1107..1357: note = RE
  misc_feature 1108..1347: note = bridgeRNA
ttatggaatggcccgcccctttccccagcgtctgttatgatgctggcgtgtgaaaggaagaaaggaacggaccaatgaacataatgattctcggaattgatctgggcaagaactcctgcagcgcagttggtgtcgacgcaactggtgcggtggttactcgccggacgatgcgtcgcgagacgctgattgattacgtagcgaagctcccgatttgcgtggtcgcaatggaagcatgctgcggtgcccatcatctgggtcgcctgtttgctagacaaggccacgaggtccggttgatgtcgccggagtacgttcgcccgtatatcaaagcccagaagaacgacgaccgggatgctgagggtattgccgaagctgcatctcgaccaaccatgcgttttgtcgaccttaagagcgaggagcaactggacatccagacgcttcatcgggcgcgttctcgccttgtgactgaacgaacgaacctcatcaatcagcttcgcgcgatcctgttggagcgtggggtaatctttccggttgggaggcgaaaactcgagtttggcgtggacagcatgcttgcagggagcaatgaggtcttgtcgtcgcgactgtgccagctggttggcgagttgcgtgcagaatggaaggaactcgacacaaaaatcgcagctctgaataccgaatttatccagttggctcgcggtgatgccgctatgtgcaggctgacatctatccctggaatcggtgtactcaatgcgacggccctggtcgctgcggtgggtgatgcgagcagcttcgccaaggctcgcgatctgggcgcttggctcggattggtccccagacagtacagtactggcggtaaaccccgactgcttgggatatcaaaactaggcaacacctatctgcgcactctacttattcatggtgctcgcgcggcgttaccgtcgctttcaacgagtaacacgcctctcgggcgatggctgaaggccatgatagagcgacgcgtacaccgtaacgctgtggttgtagcgctggcgaacaagctggcacgaatggcgtgggccgccttgcgcaaggaaacagcttttgaccgcagttacccggtagctgcgtaatcggattggctacgcactatgaaacgcgcagcccaacgaagtttgcaggaaggatcgtgaagatggcctgacagtcgaacggcgtttggaaagcccggttaaaaaaatggcactgggtgccgaagtgtttattggggctctgaacgtgcggatgtccatcttggccatgagcttactcatgagaccgtatacgttgacgcagactgatcagcaaatcgtagaatgctcttgcaagcggggcgggccatacg

SEQ ID NO: 9695 - DNA, 1431 bp, unidentified
  source 1..1431: mol_type = unassigned DNA; note = element_f2e7d86
  misc_feature 1: note = core
  misc_feature 2..88: note = LE
  misc_feature 89..1138: note = CDS
  misc_feature 1139..1431: note = RE
  misc_feature 1202..1423: note = bridgeRNA
caatgggatggactcctcccaccttgcggcatcgaagtgccagattggtagaatataactttccaaacaaaaggcggaggagtccgaaatgaatattaaacgcataggcattgatttagcaaaaacagtatttcaattacatggtgtggatagtcgcgaacagccggtattgcgcaagaagctgaaacgtgagcagatgttaagctttttccgcacaatcgccccctgtttgattggcatggaagcctgcagtggggcgcattattgggcacgggaactgcaaaagcttgggcataccgtcaagctgatggcaccccaatttgtgaagccttacgttaaggccaacaaaaatgatgctaaagatgctgaagctatttgcgaagccgtgtcccgaccaacgatgcggtttgttacgatcaaaacgattgctcagcaagatcttcaggcgagtcatcggattcgtaaagaactggttggtcaacgcaccgccaaagtcaatcaaattcgagggttgctagccgaatatgggattgtcgttggtcaagctattgaagttttgcgtaaagcgctaccttgcttgttggaggacgccgaaaatggattaagtgctgacttcaggatattgctaaagggtttgcaggaagacctactggcgcttgacgaaagggttgcagagttggataagcgcatccatacattggcacacactcatgaagacgctaaacgcttactgcaaattccaggggttggcccactcaccgctacggcaatcattagtgcggtcggtgatggcagtcagttcaaacgcggccgggatttggcagcctggataggtttaacgccacgacaaaacagcagtggcggcaaggagcagttattggggattagtaaacgcggtgaccattatttaagaaccttgttgatacatggcgggcgttctgtactcagagtggcaggcagcaaagacgatccgcgaagtcgttggctaacaggcattagtgaacggcgccacaaaaatattgctgccgttgcgcttgccaataaaaacgcacggattatttgggctctattgacccaaaaaacggactatgaacagaaagctggcgagctttcatctggtgaatcggtttgtgcgtgaaagtaaactttcacgcacaaaccgattgagaataaaaccattggcttaccgataaaggagaaatccaaaccgattgcgaagcaacacatctgatggcgaccggtcgaaccggcgtttgcaaaacctggaatggctgctgtgccatagagcacgtgaaagcgattaggagcaaacgcgcgaatagcccattatggccagagcatttgagctcaataacaggccggatatacgtgtgcagtcgtacctttagcttgatggagtgaaatgcttgcaaaacgggaggagtccatata

SEQ ID NO: 9696 - DNA, 1573 bp, unidentified
  source 1..1573: mol_type = unassigned DNA; note = element_f2eebde
  misc_feature 1..4: note = core
  misc_feature 5..293: note = LE
  misc_feature 294..1457: note = CDS
  misc_feature 1458..1573: note = RE
tcacgtataatcaatcttaagggaaatatccttttgattgatccctttcatttttatttttcattatatgttttataatgaaattgcactgtggatttgtttctatattattacggcctttatggactggtgttggtgactcaaaccacagatttttaatttaattggtaattagttagttaacacgttagttttttactaatcgatgttttattaaattacgtgattccatgattagaaactctgtgacaaactatcagtgcaaataaactaattaggaggtgctttttgtaatgatatattatgttggcattgatatatcaaaattcaaacacgatttctgcattatctcaaatgcaggtgaagtaattgtagaaaattcttcttttgaaaacaacaaaaaaggattccaacttttattagatcaattgaaatcctacgataaagcacaagtccgaattgcctttgaggcaactggacattattcttcgaatttggaatcgtttttaaacaatcaagagtattccttcatgaaaattaaccctcttgtcgtacatcaatttctaaaagctcgaagcttacgtagaactaaaacagataaggcagatagcttagctatggccaattatctaatgtctgttccatacgttccaaattcaaaggtattatatcatattaattctttaaagtcactatgcagaactagagaactactaattaaagaaagaagcaagtttgctgttctattaacaaatgagctagataagtcttttcctgaggtaaaagcattttttaataacatattttcttctactttattatttattttagaaaaatataaaaatgcttatcatatttctttaatgaaagattatgactcattaaaaaaagtatctcatggtaaattttcttatgctaaatttgttaagttaaaggaactcgcaaaaaatactgttggttattatgatgataactctgacttacttatttcaacgtatatttctatctacaatgactttaataatcaaattgatcctatagataaacaaatttctacaattatcaaagaactaaaccctagaatgttatccattccaggtcttggagaaatatctgctgcttctattctttctgaatacggagatattactaatttttcttctccaaataaaatgttagcttttgctggattagaacctagtgttattcaatctggcacattagaatctaatggcaagatggttaaacatggttctagacatcttcgatattcaatcatgaattcagctatgattattttaagacattctcctactttttatgactactacaataagaaacgcaatgaaggcaaatgtcatagagttgcattatctcatgtatgtaaaaaactgataagagttatttattcacttgagaaatacaaccaaaattttaatccctctttactgaaataattatttaataattttttcaaaatttcacatagtgaaatatttttggcttgggataaactccaatttataacaaactattaaaatattcaaaattattattgacttctaatagttag

SEQ ID NO: 9697 - DNA, 1495 bp, unidentified
  source 1..1495: mol_type = unassigned DNA; note = element_f2f6ee6
  misc_feature 1..2: note = core
  misc_feature 3..251: note = LE
  misc_feature 252..1475: note = CDS
  misc_feature 1476..1495: note = RE
  misc_feature 6..236: note = bridgeRNA
ctaatgggagataccgggccggccacacggcagactcggatccggtagcggccggcgagtgagcactcctggagcctgggcggactgtccagcccttggcagagaccgtgccctcgcccggccgtgaggagagcagtaccactgaaggggtgtcgtgcccgccgctggcgtgagcactatccattaggccgttggtgttctcctcccgctgccgcgctgttaaccgaggtagggatccaggggaggctggtgtgctgtttgccggggatgactgggctgaagatcatcacgacatcgaggtgcaagacgagcggggccgggtgctggcccgggcgcggctcccggagggggtcgccgggctcacccggctgcacgcgctgatcggccagttcgctgatctggacgtcgagcccggtgaggtggccttcggcatcgggaccgaccggggcctgtgggtgacggcgctgcacacggccggctatgccgtctacgcgatcaacccgcggcaggtggcccgctaccgggagcggcacggtacctccggcgccaagagcgacaaggccggctcgcacaccatggccggcatggtgcgcaccgactctcaccagctgcggccggtagccggtgacagccccggggccgaggccatcaaggtggccgcccgcactcaccagacgctgatctgggagcggacccggcaggtgcagcggctgcggcaccagctgcgggagtacttccccgccgcgctggaggccttcgaggagctggatgcgcctgatgcgctggacctgctcgctagggcccccgacccggcccgggccgccaggctgacccgggcgcagatcgcggccgcgctcaagcgtgcccgccgccgcggcatcgccggcaagaccgacgccatcctggccgccctgcgcggcgagcagctatgccagccgcagccggtgaccgccgcctgcgccgccgccgtcagctccctaacggtgatcatcgccgccctcaacggcgagatcgccaagatggaacagcaggtgacggcgtgctttcgcggccacccggacgccgccatctacctgagccagcccggcatagccgagatccccggcgcccgccagctcggcgagttcggcgatgacccgcaccgctacgccagcgccagggcgcggaagaactacgctgccaccagcccggtcacccgccagtccggcaagaagaagatcgtcctggcccggttcatccgcaacgaccggctcgccgacgccctgcaccggcaggcgcaaagcgccctgagagcctcacccggcgcccgcgccttttatgacgagcaacgcggccgcggcctggaccacaacgccgcgttgcgggcgctgtccaaccggctggtcgggatcttgcacggctgcctgaagacccgcaccctctacgacgaggcaaccgcctggtcgcaccgcgtcacaacttccggagccgcttgacaatcaaagtccaggggtgt

SEQ ID NO: 9698 - DNA, 1405 bp, unidentified
  source 1..1405: mol_type = unassigned DNA; note = element_f2f902c
  misc_feature 1..2: note = core
  misc_feature 3..210: note = LE
  misc_feature 211..1161: note = CDS
  misc_feature 1162..1405: note = RE
  misc_feature 22..216: note = bridgeRNA
cttgtattagcgcgaatcagtatggtggtgacgttccgcaaggaacggtccggcccgggtggccacccgggtcggaccgccgatcgtcggatcgttgcccacctgagcctttagggctgtctacgtagcaggactcgcgatcggctcttcatcaggcccgtatggttgaaggaacgtaagggttcgcatcacaaggaagggcgaggaagattgagcaagcgtagcacggatcacgccggtattgataccggcaagcgcaggcttgacgcggcgctaaacaagcgtggtgaagagcttcaggtcgagaacggccctgagggccaccggaggctttcggcctggttgcgtaagcatggcgtaaagcgggttgggatcgaggccagcggcggctacgagatggatgtcgtggcgcatcttcgccgcgacggcttcacggtggtggtgtttcagcctgcgcaggtgcgggcctatgcgaagtttcacctgcagttggccaagaatgacaagatcgatgcccgcctgatcgcggcgtgtacggcggccaaggagagcatccatgctgcacctgatccgcgtctggcgccgctggcggcgcacctgacgtttatcgatcaaattgtcgaggatatcgcctgctgcaagacccggctggagacctgccgagacccgcgtgcgcaggtgtactggaagcaggagatcgcgcgtcttggcaagctccaaaaggccgagattgcgctgctggaggaagcgatccgccagcaccgcgatcttgccgcgcggctcgacctgattgccagcgtcgacggcatcgggctgaagacggcgattgtcatcctggtgcgcattcccgagatcggccggctcagccgcgagcaggttgctgccctggtcgggcttgcgccctatgacgatgacagcggcagtcgtcacggtcaccgtcacatccgcggcggccgcaagcgggtgcgctggggggtgtacgcggcagcgctgccggcatcgcttcttcacaatccgcagctcatggcgatgtaccaacgactgcgtgccgcaggaaaggaacacaaggtcgcgctggtggcttgcgccagaaagctggtcatcttcgccaacacggtggttgcacgggggacgccgtggctgcccctgggcgcgttctgagcagcagttcaatcgggcgccgccccttctcccttcctttcgtcagtttctttgttcgaccgaagggaagaccgtttcttcgtcccgacctgcctccggcaggacgccgcgcgcagccaccgtcaaggatggccgtcgcgcgaacgcctccgcacgaccagcacttccaggccatccttgacggtggagagcacggtgtcatgctggtgccaggtcgggacacccccgcgcgatttaatggttg

SEQ ID NO: 9699 - DNA, 1201 bp, unidentified
  source 1..1201: mol_type = unassigned DNA; note = element_f2fbcf8
  misc_feature 1..3: note = core
  misc_feature 4..238: note = LE
  misc_feature 239..1186: note = CDS
  misc_feature 1187..1201: note = RE
  misc_feature 31..204: note = bridgeRNA
cttgtatggtgtagcggggtgaaccgtgttgagatggagggcgctggggtgacggacagattcccgtttctgccatcgcattggacagactgcgaaagcgctctgcgctccgtgcccaacgtcgataaggaatgcgacggccgcgtaagcggaccgtcgatagctctgcaagcttacgtgtgcacggcctcaccccagcgctttgaacgtagtacacctgcgaacgagggaggtcaagatgagtgaagttaattgtttcgccgccgatgtgagcaagcgcgagctggtgattgcggtttatccgggtgaggtcggcgtcaaacgcatcgccaaccaggacgccgcgatcagtgcctggttggacacgctgccggccggcagtgtgatcgccatggaggccactggcacctatcaccgccggctcgccgacttggcccatggccgcggcttggtggtctacgtcgtcaatccccgcaatgtctactactacgtgcgtggcatgggtgctcgtggcaagaccgatcccagtgacgccaagttgctggcccgctacgtggcccatgagcgggcgcagctgcatccttatgtgccgccctccgcactgtgcgagcgcctgaccacactgctcgagcgtcgggcggtgctggtgcgcagccgccaagcgctcactcagagcttggccgagttgcccgccctcggccgcgagaaacgcaacctgttcaaagccatcgccaccttgttgagcgggatcgaccgcgagctcgcggcgcttaccagcagcgatgcctcgacggcaaccttggtcacgcgccttaaaaccatcagcggcgtgggcccgttggtggccagcctgctgtgcgctttgttcaagcgcttcgcctttcgtcacgccgacgctttgatcgcctatctgggtttggatccgcgccccgatgaatccggccagcatcgaggccgacgccgcctctccaagcgcggtcatcccgagtggcgccgcttgctgatcgcggccgccatgtccgccgcgcgtaccaagatttggcgtgattacgtcaccctccaacgcgccaaagccctgcccgccaccgccgtgcatgtcatcctcgcccgcaaaatgctgcgcaccgccttcgccctgttcaagaatggacaagaattcattcccccaagggttcgacccacttgacaaagaccatagaat

SEQ ID NO: 9700 - DNA, 1166 bp, unidentified
  source 1..1166: mol_type = unassigned DNA; note = element_f2ffdce
  misc_feature 1..2: note = core
  misc_feature 3..206: note = LE
  misc_feature 207..1154: note = CDS
  misc_feature 1155..1166: note = RE
  misc_feature 36..212: note = bridgeRNA
cttgtcttatgacgattacgtcgttcaccgccaatatgggttgccgccgacgagtcgcaatctcgccggcggcgggaggggacgggtcgggaagttgctggccttttgggccgagctagagtgtgaccgcccctctcttttccttgtggcctgaacggatacccgagggcttgcgcctcggatgacaagcagaggacctggaaaagatgcctgaatcagtaccccaaaatgtcggcatcgacatctcaaaagatgcgctcgatgtctgcctttatcctgaagccgcgagcgcgcgcttcggcaacgacaagaaggggttcaccgccctcatgaaatggctcggcacacgcaccatcgcccggctcgttttcgagcccaccggagcctatcatcgcgccttcgaggctcgatttcttcaagccggcttcaccctcgccaaggtcaatccgcgccaggcgcggcgctttgctgaagcgatcggaaccaacgccaagaccgacgccgtcgacgccgcgatgctcgcccggttcggcgccatgctcgagccgcgcgctctgccgccacacagcgaaatcctctctgaaatgaaggatcttctggtcgcccgccgcgccctcatcaaggatcgcaccgcgatgcagaaccgggcgcatcagcgcagcttggcgctcctcaaagcccaggccgccgaccgactgaaacaggtcgagcgtcagatcgccgccatcgatgcggccatgcgtgaacgcctcgatgccgggcctgcgctcaaggcccgatacaacatcctggtctcgatccccggtctcggcgaaatcactgcgctggccttgttgatcgatatgcccgaactcggcgcgctcgaaaacaagtgcgccgccagcctcgccggccttgccccgatcgcgcgcgacagtggacaatcgcgcggcaaacgcttcatccgcggcggccgcgccgagctgcgccaagcgctgttcatgcccgcgctcgtcgcgatgcgcttcaacgccgacctcaaggccgtctatgaacgcctgatcggcgccggaaaagcgcccaaagtcgccctcgtcgcggtcatgcgaaaactcgtcatcctcgccaacgccatgctcaaaaaaggcgctcgctgggaaccgaaactggcttgatcaagacggata

SEQ ID NO: 9701 - DNA, 1490 bp, unidentified
  source 1..1490: mol_type = unassigned DNA; note = element_f30137a
  misc_feature 1: note = core
  misc_feature 2..232: note = LE
  misc_feature 233..1438: note = CDS
  misc_feature 1439..1490: note = RE
  misc_feature 8..223: note = bridgeRNA
cgttaccttctagacggccccgatcttggggctcccggccttctggcccggcatgacttttgccccctgtcgaccatgacccggggggtggtgtcaccgggtcgggaggcgccggtagatcgctaataggggcaggagcgccggcccgccggcaacgctcttcgtaacgtggttgccggatgtcggcgccgtgccttggccgggaagacaagaccctcccaggaggagtgaagtgatcgacatccgcgacgtggccgtcttcctcggcctcgacgtcggcaagggcgaacaccacgccacgggtctcatgccggacggtaggagcgtcgtcgacaagccgctgccgaacagcgagccgaagatacgggccatgctcgacaagctcacggccaagtacggccgggtcctggtcgtcgtggaccagcccgcctcgatcggtgctctgccactggccatcgcccgcgacgcgggctgcgaggtggcgtatctgccgggcctgacgatgcggcggatcgcggacctctatcccggtgagggcaagaccgacgcccgcgacgcggcgatcatcgcggacgccgcccgcaccatgccccacacgctccgatcgatcgagctcacggacgaaaccatcgccgaactccacatgatcgtcgggttcgacgacgacctcgcgggcgaggtcacccgggtcgcgaaccggctccgcggcctgctcacccagatccacccgcacctcgaacgggtcctggggccacgcatccagcacccggccgtgctcacgctgctggaacagttcggctcgcccaaggcgatccgcaaggccggaggacggcgcctgatcacgctgctgcggccgaaggcgcccaggatggcccagcggctggtcgaggacatcttcaccgcactcgacgagcagaccgtcgtcgtcacgggcaccgacgcggccgcggtgatcgtgcctaagctcgcgaagaacctggccggcctgctcgaccagcgcaaggaactggcctcggacatcgaggagttgctcaaatcgcaccctctttccgagctcctgacgtcgatgccggggataggcgtcaggaccggagccaggatcctcatcgatgtcggtgacggcaccgccttcccgaccgcgggccacctcgccgcctatgccgggctcgctccggtgaccaggcggtcggggtcctcgatccgtggcgagagcccgtcccgcagaggcaacaagcacctgaaacgggccttcttcctcgccgcgttcgcctcgctgtccgacccgtcctcccgggcctactacgagcggaagaaggccgagggcaagcggcacaagcaggccctgatgtgtctcgcacgccgtcgcgtcgacgtgctcttcgcaatgctccgcgacggcacgttcttcgaacctcaagccaccccccaagccgcctgaaacatcaccaatcaaccgacgcgccccttgacgaaagagataggggcacccc

SEQ ID NO: 9702 - DNA, 1454 bp, unidentified
  source 1..1454: mol_type = unassigned DNA; note = element_f301f9a
  misc_feature 1..2: note = core
  misc_feature 3..447: note = LE
  misc_feature 448..1341: note = CDS
  misc_feature 1342..1454: note = RE
  misc_feature 10..253: note = bridgeRNA
gtataatgtatttaggctcatgaaggcagcctagaagcctttgatagctgaaagattatacacaatgatgtataattagggtattagatagaggatgtcgtcaccaccttgagacaaggatctcgtactcaaaagactgacacctttgtctgataaactgattacggataagttggatgttgaccagattactggtacttcgaatatagaacaaggcggtaacgtttatcagataagaggaactatctaaaatattttgaaaaggtgaactgaatgctgtacttaggaattgatattgggaaaaatacacatgttgcctcattactcgacgataatgctaagctgttgtttaaagcattctcatttggcaatacgaccgaaggcggctaaagcttaatttcaaagttaacttctcatgtttcatcgatttcggaagttgagattggcatggaagcgacgggtcattattggctgtcactgtactcttttcttgtagggaaagggtacgtcatccatgttgttaaccctattcaaaccgatggatggcgcaagggaacagaaatcagaaaacgcaaaaccgatacaatcgattccatccttattgccgagctcattcggtatggagattttctcgaaacctctttggcggatgaaaacacgatgtctttaaaaaacttaacccgcttgagacactatctggtcgcttcaattggtgacttaaagcgtaaagctatttgtgtgctggatcaggtatttcctgaatatcagtccgttttttccaatgtctttgggcaaacctcaaaagaactgctgctgcaattgcaatcgccggatgattttcaaagtttatctgccgaaaaacttgaggatgtactaaaaagtattacctttaagaaattcgcacaaaacaaaatcagcaccatatatgagcttgcggcaaattccttcggactttccttttgcagaaatagcttttccatgcagcttaagctgttgcttgaacaaatcaaattcattgaagtacatgtggcggatgtggaaacaggattacgtttgttactcgaaaaaataaattcctctatcactacaatccccggaattggacctatcaacggtgcaactattcttggcgaaatcggggatatctcacgtttttcaacgccagccaaactggtagtttatgcgggaatcgatgcatctgtcagccagtccggaatgtatcagagtaccaataacaaaatgagcaaacggggttctccatacctgcgaaaggcgctttttcaagcagctttggttgcatccaactgtccttatcgagtgcagactatttcgtcagactgattattccattaattcctttttggcttggcttcggtcaggtctttttgctgtgtatttttatgcatcatctcccatcatgtttatatattttacctattgactttttatagttg

SEQ ID NO: 9703 - DNA, 1648 bp, unidentified
  source 1..1648: mol_type = unassigned DNA; note = element_f308b3f
  misc_feature 1: note = core
  misc_feature 2..302: note = LE
  misc_feature 303..1529: note = CDS
  misc_feature 1530..1648: note = RE
  misc_feature 15..325: note = bridgeRNA
tcctacaataaggttgtgggtaacagaatacctggcaaccagtcaggatctgctcccccttcattgctaaagctgtagaatggtatggcatggatctgacggattcctccttggaccagatcaagaatccgcgtccgtagataagcctgtcagccagccatcctcattctcagccgttcggtttatgcaggttgaaccgatgtctgtaagtttcatcgcgttcgtgtgatcccccaggagattgaaccggcagtgagaaaactggccatccaatgcgcatcttaaatctggaggtatcagttatgttgaacgcagtaggtattgatgtatcaaaaggcagaagcacggtcgctgtcctgcagccaggcggtgtcgtgattcataagccttttgacgtgtcccacaagtcctcagatcttcgtgatctcgcccgctatctcgggtcactcaatggtgaaacgagagtcgtaatggagagtacaggacgttatcacgagccgatccgtaatgctctgtcaaaagcaggtctctttgtctgcgcggttaatccacacctgatccgaaactacggaaacaacacgcttcgcaaggtcaagaccgatcccgccgatgctaagaagattgcccgctacacccttgacaactgggcgtccctgcgtgagtattcagtcatggacactacgcgtacagaactgaaaaccctcaattcacagtttgccttcttcatgaagcagaaaacggctgccaagaccaacctgatcgcccttctcgacatgacctatcctggcgtaaataagctctttacaagccctgtgcgccctgatgggagcgagaaatgggtcgactatgccgattccttctggcacgtggactgcgtcctggattccggcccgaaggtgttcacggaacattaccaaagcttctgtaaacatcacggctatgattaccagcctgcccgtccggaaaagctttacgcccaggcaaaggagctggttccgactgttccaaaggatccggtctacaaagagatgatcagggacagcatcgcacagctgaaccttatgtcaaagcatgtcgaagaactccgccggaagatggatgaactcgcatcctcgctcccggagtatcagaccgtccgttccatgtatggcgtaggtccaagtctcggcccgcagatcatggccgagatcggagacatcagccgattcaaccatcgggaagcattgacggcttacgccggcgtggatcccggaaagaacgattccggtgaggtcgttcacaagagtggtcacgcatcgaaatgcggctctgcacgccttcggaaatcattgttccaggtcatggaggcgatgctccagctcggtccccgcgatgacgatccggtcagccagttcctgttcaggaagaaagccgaaggaaaaccatatctcgtatatatgaccgctggtgcgaacaagttcctccgtgtctactacggtaaagtaaaggagtgcatccgtaatcttcctgcctctgattcagaggactgagttaatgctatccatagtgtaaacctgaggccgtctgaatgaatacggccaggtttcttatgcccattttcaccctccacgattttctttatttactgcttgactttttattagcaggc

SEQ ID NO: 9704 - DNA, 1431 bp, unidentified
  source 1..1431: mol_type = unassigned DNA; note = element_f314d84
  misc_feature 1: note = core
  misc_feature 2..67: note = LE
  misc_feature 68..1117: note = CDS
  misc_feature 1118..1431: note = RE
  misc_feature 1210..1425: note = bridgeRNA
taattggtatggtccgccgcttcttgccccttcggggactataagaggtgagcacaggaggcggtccatggaaatcgacacaatcggcatcgatctgggcaagacggtttttcatcttgttggtctgaaccgggctggtgaggtggtggtacgaaggaagttttcgcgtctgcagttgctgcgcttcaccgctaaccttggcgtcagactcattggcatggaagcctgcggaggctcccactttctcggacgcagcctgcgcgagcagggccatgaggttcgcctgatgcccgcgcagtacgtcaagccgtacgtgaagaccaacaagaacgactacatcgatgccgaagccattgccgaagctgtagggcgagcgaacatgaggtttgtgcccatcaagagcgatgagcagctggatatgcagtcgctgcatcgtgtgcgcgatcgctgggttgcacgcagaacatcggtgatcaatcagatgcgcgggctgctgctggagcacggtatcacctttcggaagggtcgccgacacgccgaggcttgtctgccgggcgtcctcgaggacgccgataatcttctctccgggcttcttcggatgctgctggcgcagttgcagggcgaacttagacatctgcagagccagatcgatgaggccgatacgttgatcgccagggcagcaggcgaccatgaagcctgccgtcgtttgatggcgattcctggtattggaccgctgacggcgacggcggtcgtagcttccatcggcagcggcgctgagttccgcaaagggcgctcgtttgcagcctggctggggctggtaccgaagcaggagtcaaccggtggcaggcagaagctgctgagcatcagcaagcgtggaaaccactacctgcgaagactgctggtgagcggagcaggcgccgtgctgcagtgcagggacaagcagtcaccgggcctcagtgcatggctgggccagcttgcatcgcgagttcacacgaacgtcgcggcggtcgcactggccaacaagatggctcgggtcgcatgggcggtgttggccaaaagcgaggcctatcggcctcccctgtcagtgatctcgacagaggcactggtctgcaattgacgcctggcacggaacgccaggcttggaaatcgcctcgcgattcccacaatctcagaccagcgacgacggctgattttcaacaaggttttctgccaggtctgctggcgaacagcgagatggcaaaatggtcgaacccggcgctctcgaaacctgtcactcggaacagccctctgaggcttcgaaactagttaggacgaaagcgcagcgcattccatcaaggtccagagcttcggctcacacaaaggccggatacatttgcgcagaccacaccgtcaccttcacttttcgcttgcaacaaggcggcggaccataca

SEQ ID NO: 9705 - DNA, 1243 bp, unidentified
  source 1..1243: mol_type = unassigned DNA; note = element_f315cd2
  misc_feature 1..3: note = core
  misc_feature 4..214: note = LE
  misc_feature 215..1144: note = CDS
  misc_feature 1145..1243: note = RE
  misc_feature 16..197: note = bridgeRNA
gcttgtgtcttgggcaggaattagactgagggtgagagcggtgagtggcaagctgaatgcccggagtgcttaaagcacgtgtgggagcccatgctgccattcacctctccgctctggttattgagcccgaacagttgaacgagccgacctcgaacattacaagcgtggtgcccagccagagcgctctcacctttgagtgtaagagggttcggctatgttttcctgcgcaggcatcgatgtttccaaagatacccttgaaatttggattaacccgcaagacattggcgccagttacctcaataccgccagtgacttccttgggctgattgattggttaaagcgctaccaggtcagccgcgtattgctggaagccaccggcggctatgagcgagaggtcatgaaagcgcttcaggctgccggcttcgaagtcttgcggatcaaccctcgccgagccagagactttgccaaggccatggggcagcgcgctaaaaccgacccgatagatgcgcggctgctcgcgcagtttgccgaagtcataaagtcgccaagcaaccgaatcaccagccctgaacaggacaatttacgtgcgctggtacagcaacgtgaaaactttgttcagcaacatggcgacgatttacggcgcctcaaaacagcctctgctgacacggtaaaaccctgtctgcgaagtcatatcgactatttatgccaagcaataaagtcgatagaaaggttgatccgtcaaactgctaaagacctggacagtgataaaacggcccgtttgtgttcggtcaagggtatagggctcgtgacggcagccagcttgatggcctatttacctgagctgggcgaggttggacggcacgagatcgcagcgctggcaggcatagccccctacaacgacgacagcggcaaacatgaaggcccccgccacattggcggtggcaggtttgctgcgcgtcgggcgatgtacatggcgtgctgggtggtgattcagcgacagcctgagttcaaagcgcggtatgacgcactgcgtcataagggcaaatgcgcaaaagtagcgctcatcgcctgtatgcgcgtgttgttgatacggctgaacgccatgatccgagaccgaactgagtggaaagaacccttggcctaaacgggtcgcggtgttcctgtagggcatcgcatggcctaaagctgtgggagttcagctgtctatcaatatgccttcaaaataaaggtcatcaagacagtt

SEQ ID NO: 9706 - DNA, 1366 bp, unidentified
  source 1..1366: mol_type = unassigned DNA; note = element_f331988
  misc_feature 1..2: note = core
  misc_feature 3..93: note = LE
  misc_feature 94..1104: note = CDS
  misc_feature 1105..1366: note = RE
  misc_feature 1080..1353: note = bridgeRNA
cgatggggtggacgccccctgacggcatcgaagtgccagagtggaggtgttgagcacaccactgcaaaggaggcgtccgtgggtgaagttagcatgatcgggctcgatctggccaagtcggtcttccaggcgcacggcgccgatgcgtcgggcggggtggtcttccgcaagcggctgaggcgcgacaagctgctggcgttcttcgccggtcagccgcggtgtgtggtggcgatggaggcctgcgccagcagccactactgggcgcgagagatagcggcgctggggcatgagacccggctgatcccgccggcctatgtgaagccgttcgtgaagcggcagaagaacgacatggccgatgcggaggcgatctgcgaggcggcgcagcggccgaccatgcggttcgtcacgccgaagagcgccgaggcgcagggcgcggcggtagtcttccgcacgcgcgatctgctggtccggcagaggactcagctgatcaacgccctgcgcggccacctcgccgagttcggcttcatcgtgcggcagggatcgggccacgtgagcaagctcatcgacctggtcgctgatccgtcgtccgagcttcccgccgaggccagagccgtgctggcggtgatcgccgacagcttgcaggcgatccaggcgaggatctcggtgctcgatcgcgagatcgccgccagggccaaggccgatccgctcgtcaggcgcctgatgaccattcccggcgtgggaccgatcgtcgccacagccctggtggcgctggcccctgaggcctcgaccttccggcggggacgagacttcgccgcctggctggggcttacgcccaggcagcactccagcggtggcaaggaacgcctgggtcggacaaccaagatgggtgagcgcagcctgcgccggctgctgatcctgggggccagttcggcggccaagaacgccggacgggatggatcgcgcgcaagcccgtggctggtgggcatgctggccaggaagccgcgcatgctggtgacagtggcgctggccaacaagatggcgaggatcgtctgggcgctgatggcgcacggaggaacctatagagctccggtcgcggcggtgtaacgccgtcgcgatccgaggcggtcagggaggcgggaaggtcagacgagaggtatggcgcaacggtcagaagacggggtcgggaaaaccagacaatgtccaagcgcctcgagcgcgagagagcgaagtggatccgatccgcgatctccatacaggccagcggccacgtgaacggctgcaccaacaggccggacacacggaagcacctgagcctgcgcgctcaaactctcgaaaaacctcttgcatccgaaggggcgtccacaca

SEQ ID NO: 9707 - DNA, 1229 bp, unidentified
  source 1..1229: mol_type = unassigned DNA; note = element_f338bb7
  misc_feature 1: note = core
  misc_feature 2..226: note = LE
  misc_feature 227..1198: note = CDS
  misc_feature 1199..1229: note = RE
  misc_feature 45..215: note = bridgeRNA
tcttaagttagcattttaataaaaacactaaatttaagctatataattagaaataacaaaagagaggaataaggttaatatatacgcagagactacagatctcgtcaacattgaaaatcccctctctttttctacacagatttcgtacagttctatgaggcgtttagacctcgattttaagtcgttgaaactcgggtagctagtcctttcaaaaaaatattttcttatgaataaagatataaaatattttggacttgacatcagccatttagtttttgatgttaccgattcccaagggaattattaccagtttaaaaacagtattacgggctttaaaaagttcgtaaaattattagattttaatagccattgtgtgatggaagccacagggtattatcactaccaattggcctattatttgcaagaagaaggcattaaaatttcggtagaaaatccattatcggtaaaacgatttattcagatgaagctatcaaaaattaagaccgataaaagcgattcgaaactaatatgtgaatatgcagaacaagtagaattaaagctatggaaaggcaactcaaaacatcaattagaatgccttcaaatgaccagactcctttctgtttatacaaaacaaagcactatgcttaaaaataaattacatggagaagctgttttaggaaaccctagtaaagcagttttaagctctttaaaacgaaacttaaaacaggttcagaaagaaatgaaaactatagaagataaattacttgttttagtaaaagcagcacatcaagaggttttaacccgcttaaaaattattccaggaattggaccaaaaacagcactaatgttagtggttttaactgatggctttgatcgttttacaagcggcagtgaattgtgtagttacgcaggtttaactccggtgatccgacaaagtggaagtagtgtaaaaggacgtcctcgaattagtaaaataggaaatcaaaagcttagaaatttattatttatgtgcagttttaatgcttgtaaatataaccatgcttgcaaagcaatttatgagcgattggtcgccaaaggaaagagcaaaaaattagccttaatagcggtttgtaataagcttttaaaacaggcttttgctatcgcaaaatctggtctaacctatgataataattacagaagtactctagaaataaattaataagtttttacttgttttttaccacagtact

SEQ ID NO: 9708 - DNA, 1191 bp, unidentified
  source 1..1191: mol_type = unassigned DNA; note = element_f3451ce
  misc_feature 1..4: note = core
  misc_feature 5..209: note = LE
  misc_feature 210..1178: note = CDS
  misc_feature 1179..1191: note = RE
  misc_feature 23..187: note = bridgeRNA
atccattaggtttgttttatatttaaagatatcgcaagtcagaggtgaaccatctgctatccaggtataaagacctaattagggattcggtcctctgactttgctatgctccgggcttaaatagaaattcaggcatgcaggcctattattatggatataagctgtaagcataactgcgatactttctaaacaactcaaaattaaacattatggaacagttttcattttttacaggtattgatgtatctaaactatggttagatattgcagtcttcaaaccgggctatgggattgtctaccaaaccagggttaacaacaataccaaagagatcagaagtttcttaaaagggttaaaaaaacagttgaaagccgaaataaccggaaacttgttttgcatggagcataccggtaagtatggccatgcttttctgaatgcctcgatccttgaacaagctaaggtttgggtagagctgccgatccagatcaaaagaagccagggacttgtaagaggaaaaactgacaagtgggacgctatccggatcgcgcaatatgcctaccggtttgccgataaagctgtcttttggatgcctgcgaataaaatcattcaggacattaaagaacttcaggtaaaaagaaacaggctggtaaaggcgcactcacagttgagccaggaaaacaagaatgatccgctttttaagaagcccctgctggccttaaagctaggcattgaggctattgagttaaagatggaacagctgatagagcagaatgagttagctaaccaccaatacgaattgcttaaaacagtgcctggaattggtaagcaaacagcaatggccctgatcattgttactaacggctttaccaggctgacagatagcagaaaactaagctgctatagtggtctggctccatttccgtatcaatcgggaagttctgtaaaaggcagaaccaaagtgtctaaaatgggggataaaaagttaaaagtattacttaacctttccgcctggaatgcgatcagatcgatcaccgctttcaaggattatttcaacagaaaagtgagcgaaggaaaacacaagatgtccgtcatcaatgccgttagaaacaaattgatcgccctggctttggcagtaatcaagagaaacagtccatttgaaaaaaactattctttttcttgattttgccatagaa

SEQ ID NO: 9709 - DNA, 1431 bp, unidentified
  source 1..1431: mol_type = unassigned DNA; note = element_f352640
  misc_feature 1: note = core
  misc_feature 2..131: note = LE
  misc_feature 132..1163: note = CDS
  misc_feature 1164..1431: note = RE
  misc_feature 1198..1429: note = bridgeRNA
atgtaatggatgcctccccttacaggacgggcagcggggagctccaggggcagggagtcctcgcttgaaccgaacggcatcaaggtgccaaggtggaagttcatccacaaatgggttaaggaggactcaagatgcagaatacaatttatgggatggatttggcaaaacgagtgatgcagctgcactgggtggattgggagacgggtgagatccatcgcaagcaggtacggcgtggcaaactccttgagttcttcgtgaaccgggagcctggcattatcgccatggaggcctgtggcagtgcccactactgggccagggagctgcgtaagctgggccacgaggtgcgcttaatcgccgcgcagtttgtgcgccccttcgttaagaccaacaagaccgatgcggcggacgcggcggcgatctgggaaactgttcagcgtccagatatgcgctttgtcaccgtcaaaagcgaggagcagcagtccgttctggccctgcatcgcatgcgggagcagctggtcaagatccggaccatgcaggtgaacgagatccgggggctgctctatgaatttggcatagatcttccccaaggtcgcgagaaaggcctgaaggaattccctgaggcgctcgcaacactggagggcaggctatcggacctggcgctggagacctttcggcgtcagcgcaagcggctggaagaattcgacaaggacatagccgatatcgagaagcgcctgaccctatggaaaaagaaccaggaggcggtggctcgtttgatggccatccccggcgtgggattactcaccgcaacggccattgtagccacagtaggagatatgaagtcctttcgctctgggcgggagtttgcctcgttcttgggactggttccacgtcagagtggtaccggcggcaaagttcgactgttgggcatcagtaagcgtggggacacctatctccgaaccctactggctcatggggcgagagccgtggtgaattgccagaccaggaatcgaaatccctggatcgacgaattacgcagccgacggccccacaatgttgtcgtcgtggcacaagccaacaaaatggcgcgaacgatctgggccttactggctaagaatcgccagtttgacccgaattacaagtcgacggcggtggctaccgcttgatcaccgttgagtagctggacactcacactattctaaagtttcagagttgcgcaggtagacatgattgatggcataacaggtcagaccggggaagggtgaacctggagtaaacttgtcccaaaaaggacgcaataaagataaggacccttccagcggatttcatcagggccagcaggaaaaactgcataataggccggatataaggcagcactttgacctcaaaaagctagacgtctagtcgacttgcacaaaaggaggcatccatata

SEQ ID NO: 9710 - DNA, 1453 bp, unidentified
  source 1..1453: mol_type = unassigned DNA; note = element_f36a092
  misc_feature 1..3: note = core
  misc_feature 4..133: note = LE
  misc_feature 134..1174: note = CDS
  misc_feature 1175..1453: note = RE
  misc_feature 1203..1405: note = bridgeRNA
agatggggtattcagcttgagcctcatcttcgggtgagagtgcacggtggataggttgaaggtgctgcggttcgagctgatggtagaacgtggtctgtgacccagccacaagcatcaggaaaggaagcgcagcatgaaacattatgccggactggacatctcggtgaaagagacgtcggtatgcatcgttgacgaaacaggcaagatttgccgtgaagtgaaggtccccagccaccccgatgacctgatcgcggttctgaaagatcctgcctggaactttgagcggatcggtcttgaagcggggcccttgtcgcaatggctcttcgagggattggccagagctggcctgccggtgatttgcatcgaaacgcggcacgtgaaggccttcctgaaggctcagccgaacaagaccgaccgcaatgacgcccgcggcattgcccagatgatgcgggtcaatctgttccgcccggtgcatgtgaaaaccctgacaagccagaagcgccgggcgctgctaaccgcgcgcaagttgctgcaggaaaaggcgattgccattgagaacgatatccgcgggctgttgcgcaattttgggctcaaggtcggcaaggtcaaagccgtcaagttcgaggcgcgcatccgcgaactcatcgaaggcatgcccgaactggccgaggtcatcgaaccgctactcgacgcacgcagcaagctacgccagcactttgatgctcttcatcgcaaggttctggcgatcgtccggaatgacaaggtttgccaccggctgatgacgattccaggggtgggtccagttgtggctctggcctataccgcgacgatcgacatcccggcccgcttccgcaactcgaaagcggtcggaccgatcttggggttgacgccggtgctcaatgagtcgggtgaaaaccgacgggtcggccggatctcattatgcggcgacaccataatgcgaacgctgctctatgaagccgcgcaggccctgctgaacaacgtgaaaaaatggtcatggttgagagcatgggcgatgaacgtcgccaagcggcgcggccggcaaaaagcgatcgtcgcactggcaaggcggctagcagtgatcatgcatcgtatctggagcgacggtacacagttccgatggaccaggaaggaaatcatgccagttgcggcctgattggtccgtaagccaagaaggagataacaaagttccacttgccggtggaaagatgtccttcgcgggacgatggatgagggtgagttcgctgatcaagcagtaccgatcgcatcgccgcgatcaggacgcataagagattgttccacctcattcttctgactccatgaagggtagggcctgagcgccgatcccggagagaagcaagaccccgcgaaagacgtcagatgccggcaaagcggaaggctcgaaagcgcttgacctcaacccgccgaatagaga

SEQ ID NO: 9711 - DNA, 1412 bp, unidentified
  source 1..1412: mol_type = unassigned DNA; note = element_f36fabc
  misc_feature 1: note = core
  misc_feature 2..266: note = LE
  misc_feature 267..1289: note = CDS
  misc_feature 1290..1412: note = RE
  misc_feature 16..289: note = bridgeRNA
cctcctaatatataagtgtagggtttcagtacccaacagccagttgggacttcatcctctcattgtttaagctgtataatgattaggcatcggtctgacaaaaactcccaggaccataaaggcgtccgtcagaaagcctgtcattgcagccattcgatttatgcaggttgaactactacaatacgtttgtttgataccccaggagatggaatcggcaatgagaaaggctggaatccatgcaaatatatttttggaggtacattagaatgtataatgcagtaggtattgatgtctcaaaaggaaaaagtaccgtgacggtcctgcagcccggcggcactgtgatccacaaaccctttgtcgtttcccactctccccagagcctgcatgatcttgctgagtatctgacctctctggatggtgataccaggatcgttatggaatgtaccggcagataccatgaacctatcctaaagttcctctctgatgctggtctgtttgtctccgcagtaaatcctcatttgatcaaaaatttcggcaacaattccctgcgcaaggtcaaatccgatccgcagacgccagaaagatcgctcgctatacccttgacaactgggcggaattacgcctattctttctggcatgtggactgcgtccgtgggattggcttaaaagctttcactgagcgttaccgggccttttgcaagagacatcattacaacttccaggcggacaagccggagaaactgtttcatgccccaaaagagctggtagccgtctttcccaaggagaagacctataagctgctgatccaacagagcatccagcagttaaacctcatctctgaacatgtggaacagctccgcaggaaaatgaatgaattggcctccactctccctgaatacaacacagtaatgggcatttatggtgttggtaagacttatggcccacagctcatcgctgagatcggcgatgtatccagattcacccacagggaagctctgacggactttgctggcgtggatcccagtatggatgagtccagtcagcgcagatccaagagcaaccgggcatctaaagttggatctgcaagattgcgtaagacattattccagatcatgacaaccttgctgcaaaatgccccggaagatgaccctgtgtatcgtttccttgataaaaaaccttctcagggaaaaccttactatgtctacatgacagctggagcgaataagttcttccgcatctactatggcaaagtcaaagagtgcctgcgtaacttagagcgggaatcataagatcttttttcagatcacctctttcaaagcgggcatttatggcggcttaaaagttgtgccccaaaatatcagatcggctttttaaaattcccttcaaaaagcacttgactttttattagcagg

SEQ ID NO: 9712 - DNA, 1565 bp, unidentified
  source 1..1565: mol_type = unassigned DNA; note = element_f376c9d
  misc_feature 1..4: note = core
  misc_feature 5..213: note = LE
  misc_feature 214..1443: note = CDS
  misc_feature 1444..1565: note = RE
tcacgtataatccaatcatattagaaagtgattggattttctcctttctcccagattctactgggtaattcaatccttatctgatatatttacctaggcactgtggctctgtatctatttaattacagcttgactgttcggaggtgactcagaccacagcttttcgtctattactgttaatcagtttgttaacgctctgacgtttctatttacgtgattacacagccggattccctgtggaagacagcagtgccaaaatacatatcaggaggtaatctaaaatgtccatgtactttgccgaaattgatatttccaagtacaaacacgattgctgcatcatttcggcagccagtcaaaaagttgttgctaagtttactttcaaaaacgataaagcaggctttcaacaactacttactacttttaactctctccaatcctgaggacataaaaatagggtttgaatcaactgcccattatgctctcaatcttgaactcttccttgaaaatgcctgccacagcttcatggaagttaatccggttctaatcaaggaatacaagaaatcaacaactctcaagcgtacgaaaaccgactctgttgattgcgaatcaatagcacgttggttaatgactgttgagtacaaaccccattcaaaaggattttaccacgcctattctctaaagtcattagctcgtttacgtgataagctgatccgtcagcgttctttttaccttgtaaagattacgaatgtgctggatcacacttttcccgaatttaaaccatttttcaatgagcgtttatctaaaactgctctttatctgcttgaaaactatggttctgctgaaaagatggctcgtatgaattctgcttcttacgagaaactgcgttcactgtccagaggaaagttttctccccagcggttcctgaaattaaaagaactggcttccaatactgtcggtgttaacaattctatctttgacgttgaattaaacagcctgctggctttatataaatcccttgtcaaagaaattgatactctcgaaaatgaaatccataagctcgttgaagagatgtgtctgttccaggcattggtccattatccgccgctgttatctattctgagtacaggtgatatatcaaatttctctaatccgggacagatgcttgcttttgccggaatagagccgggtgttaatgattcaggtactgaatcccacggaggcaggatggtaaaacgtggttcatcccagctccgttatactcttattaactgctgccttcctttaattcgttttgacatgacatttgctgcttactacgccaagaaacggggagaaggcaagccgcaccgggtagcgattactcatgttgtgaagaaacttatcagagtcatctatgcatcggagaggcaggaggttgactttaatgttcagaagcttcgctaatatgctgctcctgtagaagcacctattccatctgaaatacggtgtattcagatggcttattaaagttacccttttttacaaaatcaaaaatttcaaaaaaactcttgactttttatagtttg

SEQ ID NO: 9713 - DNA, 1312 bp, unidentified
  source 1..1312: mol_type = unassigned DNA; note = element_f387e1f
  misc_feature 1: note = core
  misc_feature 2..76: note = LE
  misc_feature 77..1099: note = CDS
  misc_feature 1100..1312: note = RE
  misc_feature 1104..1311: note = bridgeRNA
atggacacctccccacaaagacttcaatgagccatgctgtaagtgcaaaccaacagcaattatgaagaggtgtcccgtggaacaaattatcggaattgatctggcaaagcgagtatttcaggtacacatcgtttctgcgcagggtgagaataaagtcaataaaatgattacccgtgaaaaactgatgacgtttattgctcagcagccgtcctctcgtattgtgatggaagcgtgcggtagtgcgaattactgggcccgtcagatcagtaatcacgggcatgaagttaaacaaatcagcccgcaatatgtcgctccattccgaatggggagtaagaacgataaaaatgatgctgtcgctattgttgaggctgacagccgtccggggatgcgttatgtaccggaaaaatcccttgagcagcaggatatccagtgcctgcaccgggttcgccagcgcctgatgaaaaacagaacggctctcatcaatcagattagggggttaggccttgaatacggcattgcgatgcctgaaggcgcgcacaagatcatggcgtgtctgccggattatctggaagatgcggaaaatgacctgaccacactcagccggcagttgtttcacgaaatgctgcaagaactacaggccagtcagcgtcggattaaagagcttgacgtgcgtcttgcccatatcagccagcaaaatgaggatacgctccggctggaaagcatgccgggcatcgggccgctgggtgcgtcagccctggcagtcgctctgggtgacggcagcgattttcagaatggccgacattttgccagttatctggggctggtgccaaaagagcacagcagcggcggaaaaatcaggcttctgggtataacgaaacggggagatggttatcttcgtgggttacttatccacggagctcgatccgtggtttaccgggtgattaacctcccggatgaacagtgcaacgggctgcagcgatggttgaaaggtattatcacccggagtggagtgaataaagccgtagtagcgttggcgaataagaatgcccgtgtggcctgggcgttggtaaaccataagacagaatacaaagcaatgtaacctactgattttaatgagtcaaaagagttgatgtgctgacaggtagaaccgactctctgtgaacctgacaaatagcggggctgctaaaagccatggcactaatgaggacagagagtacggatgttcatcagggctcacgaagccggatatatgtgtgtggctactttgtcagaaagagacctgccggtgcttgcatcggagaggtgtccatat

SEQ ID NO: 9714 - DNA, 1609 bp, unidentified
  source 1..1609: mol_type = unassigned DNA; note = element_f38d132
  misc_feature 1..2: note = core
  misc_feature 3..275: note = LE
  misc_feature 276..1373: note = CDS
  misc_feature 1374..1609: note = RE
  misc_feature 12..295: note = bridgeRNA
ctattacaataagttcggacaggaacaccggatagccagtccggtgttctttccgtcccgtgccttagctagaataagatgagcaactagctgaccaactgtaccttgggtttacatacccgcagataagactgctagtcatcctcttgttgcaacgtttgatttgagcaggttgagccaccgaataccggagagttcgcgtcacgcaatagattgaatcgtcaacgagaaaagatggattccggttgcaggttctttgtgtcggaggaatgtgaatgaactgcgttggcatcgatgtttccaaaggtaagagcatgattgcagtcatgcggcccttcggagaggtagtggtttcaccctttgaagtgcgccacaccgccagcgaactgagcgagctggcaaggctgctcaaaagtctggacggtgagacccgtgtggtgatggaatccacaggttatcaccacacacctgtggcctggctgctccacgacgcgggcctttatgtctcagtagtcaatgcaatgctggtgcatgactacggaaacaacagtttaaaacgagccaagaccgacaagaaggatgccgtgaagctggccaactacggccttgaccactggctcacacttccgagatatgctccggaagaggacacccggctcatgctgaagacctgctaccggcagtaccagcagtattccaaagtacagaccatgctgaaaaacaacctgatctccctgctggacaccgctttcccagacgcaaaccgcctgtttaccagtccgccccgcgccgatggcagtgagaagtgggtggactttgtcgccactttttggcattgcgagtgtgtctgtggtctgtctaagaaagcctttaccgccaagtaccagaagtggtgcagaaagcacggctacaatttcagccaagataaggcgttggatatttatgcctctgcctgtggacgcttcggtgtcatgccgaaaacaaatacggcaaaacttttggtagaacaggccatttcccaactccagacaacttccgccgcattagctgctctcaagcaggagatgcagtctctggcagcttctctgccggagtatcctgtagtgatggaaatgtttggtgttggccctacactcggcccccaactcatagctgaaattggcgatgtgcgccgttttcattccaagaaagcgctggtggcctttgcaggcattgacgccccgccctaccaatctggccaaatagatgtccgcagccgcagcatttccaagcggggatctgcctcgctgcgcaggacgctcttcctagtgatgagtgtcatcctgcaacgtgctccaatggatgagccggtctaccagttcatgaacaagtaacgctctgaaggcaagccctaccgtgtctacatgatggcctctgctaacaagtttcttcgcatctattacgcttctgtgaaagcctatctggattctgcagaacacaactgattttcctatgctttgccagctggatagtcgccatttcgattttgagatgctcagcggctcagattagtgcgtcccttttctttgctcgttcccttaaaagttttacttagcttttattagcaggt

SEQ ID NO: 9715 - DNA, 1585 bp, unidentified
  source 1..1585: mol_type = unassigned DNA; note = element_f3925db
  misc_feature 1: note = core
  misc_feature 2..284: note = LE
  misc_feature 285..1460: note = CDS
  misc_feature 1461..1585: note = RE
cgtatattctaatcatcagatttaggtgattagatttttcctttctcccggtatcccgggtaattgtatttttaatcttctgtctgatattaagtagatggcactgtggatctgtatctatatcattacagctttgactgttaggaggtgacccagaccacagtagttcgtcttttactggtaattagtttgttaacgctagacgttttaagttacgtgattacacagtcggattctctgtggagacagcagtgccaaatctttacatcaggaggttttaacctatgtcgttgtacttctgcggaattgatatttccaagtacaaacacgattgctgcattatctgtgcagctaatcaacaggttgtagcgaagcttacttttaagaacgatcgaaccggttttgagaagtttctttcaaccttgaattctctccaagactcagaggacataagaatagggtttgaatcaacatcccattacgccctcaatcttgaactcttccttgaaagttcgaacctttctttcatggaagttaacccggttctcatcagcgagtataggaagtcttcttctctgcgcagaaccaagaccgactcggttgattgtgaaaccattgcacgctggctaatgtctgttgagtacaaaccccacacaaggggattttaccacgcatattctctcaagtcattgactcgtcttagagacaggcttattcgtcagcgttctctgtatctcgttaagatcacagatgtcttggatcacacattcccagagtttaagccttttttcaatgagaaattctctgctactgcgctatatctattggagacttacggttcagcacaaaagatgtctcatatgaatcaagcttcctatgagaaattgcgttccatctctcgtggtaagttttctatccagaaatttttcagtctgaaggagcttgcagctaattctgtcggtacaaacaacaccatattcgatttagaactctcaagtcttatctccctttataagaacttgcagattgaaatcaacaagatagaagcagagattattaggcttgtagatgagttacacctgcatttcacgagcatcccggggataggtcctttatctgccgctgttatctattccgaatatggcgacataagttccttttcaactccggcaaagatgcttgcatatgccggtttggaacctggaattgatgaatcggggactgaaagctacaaaggaagaatggtaaagcatggctcttcaatgcttcgctttacattacttaactgttgcttaccaacaatcagattcgatctcacttttgctcagtattacgccaagaaacgcagagagggcaaatctcacagagtcgcaatgtctcatgtcgctaagaagcttgttcgagtcatccatgctttggagagacaaggaattgactacgatccaataaagcttcgctaatattaatttttcaaggttcaattcagccatctgaaaaacggattttacagatggcggttttgttatgctcgaatatcacatatccattgcttgtagatattcacttgacttttaatagtttgtca

SEQ ID NO: 9716 - DNA, 1388 bp, unidentified
  source 1..1388: mol_type = unassigned DNA; note = element_f395766
  misc_feature 1..2: note = core
  misc_feature 3..63: note = LE
  misc_feature 64..1122: note = CDS
  misc_feature 1123..1388: note = RE
  misc_feature 1122..1375: note = bridgeRNA
tgttggggtggacggcccccgaacatcataatgaggtcgttagatcacagtaggaggccgtcagtgagcagcatcgcccgcatcggaatggacacttccaagagcatcttcgtactgcatggcgtcagcgccgacgatcaggtcgtgttgcgaaaaaagctccgtcgcaaccaagttctggaattcttcagcaaactctcaccaacgcagatcggcatcgaggcgtgcggggcgtcgcatcattggtctcgcaagcttgaggagcttggtcatgaggtgcttctgatcgcgcctcagcatgtgaagccctatgttcgccgcaacaaaaatgatgcggccgacgcggaggcgatctgtgagacgatgagccgacctcgaacatggtttgtaccggcaaaaactgcggatcagcaggccggcctaatgcttgcgggtacacgcgatgcgctcattcgcaggcgcactcagcttagcaacatgatccgttcctatgccgcagagtttggcttggtatcaccgcgcggactcgacaaaattgagccattgctggcgcggattgcagccgacgaaacgttgccagaccttgcgaaggaaatgtttgccgacttgggcggcgactacacacaactccaggatcgacttacgatcatcgagaagaggctgcagctctggcatcgcagtcacgagcagagcaggcgtctggctcagatacccggtgtcggcgtcgtcggcgctgcgctgatgacgatgaaggttcccgatcccaaagctttccgctcagggcgccacttcgccgcttggctgggacttacaccaaaggatcattcaaccgccgggaaacagcggcttggagttatcacccgagctggcgatgaggccctgcggagcgttctggtcgtcggagcaaccgcactattgcagcaggttcgaaagggacgaagcctgcaatcgcgctggctggctgaactgctgcggcgcaagccgcccaagcttgtggcggtggcgctggccaacaagactgcacgcatagcgtggaagctcgtggtgagcggtgaggtttacgatcggaaccgggttaccccaccgcaggatggcataacagctgaactcgtagcggcgtaatcgaattctgggccggaaaggcggcccgacatcagttgcttgcaagagaagatagcagatggcgtgatcgatcgatctaagacacgagcaactccgtgggccccactggccaagacatcgaaggtcgaaatggtgttaggaactcgcgtcgcggaacccatcttggcagcggtcatatgcggccgcgacatcagaccggacatatgagcgcaagcgatccgattggtcttcttctcagctcttgtaagcagggggccgtccacata

SEQ ID NO: 9717 - DNA, 1581 bp, unidentified
  source 1..1581: mol_type = unassigned DNA; note = element_f3988b0
  misc_feature 1..4: note = core
  misc_feature 5..282: note = LE
  misc_feature 283..1458: note = CDS
  misc_feature 1459..1581: note = RE
tcacgtataatccaattgtcagttgatgattggattaattcctttctcccagctaccactgggtttttctttccatctctgatatattttgaaaaggcactgtggatctgtacctatataattacagctttgactggtacgaggtgactcagaccacagcttttcgtctattactgttaatcagtttgttaacgcatcgacgtttctatttacgtgattacacagccgaactctctgtggaagacagcagtgctcaaaatatttgtcaggaggtataaaactttgtctatctatttcattggaattgatatttccaagtacaagcatgattgctgcatcatatctgcagccgatcaaaaagtggtctcaaagctcactatcaaaaataataaatccggctttgatgaactatttactattatcaattctctatccagtcccgaggatataagaatagggtttgaatcaaccgcccattatgccctcaatcttgaactcttccttgaaaattctctcctaactttcatggaagttaatcccgtgcttatcagtgaatacaagaaatccagaactcttaggcgtacaaaaaccgactcggttgactgcgaatcaattgctcgttggttaatgactgttgagtacaaaccccatccaaaaggattttaccacgcttattccctaaagtcactaacaagattacgagacaaactgattcgtcaacgttctttttatctcgtgaagatcacaaatgttttagatcacactttcccggaatttaaaccattctttaaagaacgtatttccaagaccgctttatatctgcttgaaaactatggctctgctgaaaagatggcccgaatgaattcagcttcgtacgaaaagcttcgctctctttcaaggggcaagtttactccacaacagtttttacaattaaaagaacttgcagctaatactgtaggcgttaataactctatcttcgatgtggaactaaatagtcttttatcgttatataaagcccttgccaaagagattgataccctcgagagtgaaataaacaagttgatcaacgaagttcatccgcattatatgtctatcccgggaataggatcactatcagccgctgtaatctattctgaatacggtgatatatctaatttttccaatcctggtcagatgcttgcatttgcaggcatagaacccggaatcaatgagtccggcactgaatcacacggaggtagaatggttaagcgcggctcatcacaacttcgttatacgctcattaattgctgcctgccattaatccgctttgacatgatatttgctacttattatgccaagaaacgcggagaaggcaaacctcatcgtgttgccattactcacgtagcaaagaagctaattagagttatctatgctttggagaggcaagatatcgactataacatccaaaagcttcactaaaccccaacttctttagtctgaaatcatccatctgaaatgcaatgtattaagatggcttattaagtttacccttttttacagataaatgattttttcaaaaacctcttgactatttatagtttg

SEQ ID NO: 9718 - DNA, 1332 bp, unidentified
  source 1..1332: mol_type = unassigned DNA; note = element_f3990fe
  misc_feature 1..2: note = core
  misc_feature 3..521: note = LE
  misc_feature 522..1292: note = CDS
  misc_feature 1293..1332: note = RE
  misc_feature 25..199: note = bridgeRNA
cttgtatgatcaaaattaataaaatactaccaaagagatcaagtaagctttaaccgtttattgggaggccgtcccgacctgaggactggtttttgttaaccagagcctgccgcgtagattggcccccgccctattcacccataccgtggagtatctgaggcttagagcctgcatacacaaggaaggtaggtgcatgtgcagggtcggggaaccgatgaacagtctactttctttaacccattcagacaaacccctatgacgaccattaaaattaataaaaatgatcatgaatcaaagctatcgctacaagcaggcattgatgtcggttctgaagaattgattctggttgtccggaagaacagtaagtcattcgacccacaaaaattcaccaacaccccagttgaccgcgcccgattggttaaaaagctgtctaagttacctggcatcatcgtttgcctggaagctacggggtctaccactttgatttggcagtcgccctgcatgatgcaggggtgttgctgatggtggttaatccaaaagcttctcataattttgctaaggtgttgatgagaaatagcaaaactgatgctgtcgatgccaacactttggccgaatacgcagcgaggatggacttcgtcgcttggactcgcccagccaatgagacgatagctcttcgctgtttctcccgcaggattaattcgttaaccggccaaaaagcggccgcaaagaatcatttacatgccctaacagcgactcaggaaactcccaaagccgtattgcgcgatgctaaactggctatcattcaattgcaaaaacgtatcgaccgcttaacggctgaggcgctggtcttgatcagcaaatatcccgaacttgaacgggtactggagctactgaccggtatcaaaggcattgccgaaaccagcgccattgcactcatgggcgaactgttatggttgccgccagacctttcccatcgggaatgggtgaagtttgcgggccttgatcccaaggctttcgactcgggtaaaagtgtccataagaaaacgcgagtatccaaagccggtaaccgttatcttcgtgcagccctttatatgccagccttgagtgcccatcaacatgatccacacgtcagggcttatttcgagcatctagtggtgactaacggtaaggaaaagatgcaggctctctgcgcagtcatgcgtaaattgctccatgccatccatggcatgttgaagcacgataagcctttcgataacacccgtttttatgcaattccggcatctgtcggatagctaaaaatcaatgaaatatgattgacttcaaacagagtat

SEQ ID NO: 9719 - DNA, 1401 bp, unidentified
  source 1..1401: mol_type = unassigned DNA; note = element_f3a19d8
  misc_feature 1..2: note = core
  misc_feature 3..78: note = LE
  misc_feature 79..1122: note = CDS
  misc_feature 1123..1401: note = RE
  misc_feature 1125..1388: note = bridgeRNA
tgttggggtggacggcccccgaacggcatcgctgtgccagagtgaggtcgttggagatctcaatcgaggatgccgtccgtggaccagattatccgcattggcatggatacgtcgaagcagatttttcagcttcatggggtggacgaagcggagcgtgttgttctgcgccgcaagttgaggcgcaaggaggtgacggcgttttttgccggtctggcgccgaccgtcgtggcgatcgaggcgtgcggcggctcgcatcattgggcgcggacgttgagcggccttgggcatgaggtgaagccgatcgcgccgcaattcgtgaagccgtatgtgaagcgcggcaagaacgacgcggccgacgcggcggcgctgtgcgaagcggcgagccggccgaccatgcgcttcgtcgcggtgaagagcgtggcgagccaggcggcgctgatgctggccgggttgcgcgagcgattggtgcgcaatcgcgtccagctcgccaacgcgatccgcggctacgcggcggagttcgggttggttgccgccaaggggcaggccaagatcgcgccgctgctggccctcctccaggccgacgagagcttgccggcgctggcccgggagctgttcgccgagcatgccagggagtacgcgcagctcgagcgtcagctcgccgccatcgaggccaagctgatggcctggcatcggacgaacgcggtgagccggcgcctggtccgcatccccagtatcggtccgatcatcgcctcgctgctggcgatgaggacgcccgatccgcacgccttccgctccggccggcacttcgccgcctggatcggcttgacgccgcgcgaccattcgacggccggcagggtgcggctcggggtgatcacgcgggccggcgacgagactttgcgaagcctgctggtggtcggcgccaccgccgtcatctggcaggttcgacgcggcaccggccgccgcccgtcgccctggctcgtcgcgctgctgaagcgcaaaccgcccaagctcgccgccgtggcgctcgccaacaagacggcgcgcatcgcctggaagctgatgacgagcggcgagacgtacgacgccgagcgcgcgatggtcgtatcgccggaagctgcctgagacgaaatcagcgggacgcgagggcgacctctcgcatcgcgccgatgccggaccttgcaagagaaggagcagatggtgggatcgatcgatccgggacgggagacagtccgtgcaatccagtggcgccatgacgtcgcgactctgtgtggagctcccgccgcggaaaccatcttggccagcggtcatgcgcgaccgcatccaacaggtcggacatatggatgcaagcgagccgatccaaaacatgcccgtccaccttgcaagcagggggccgtccacata

SEQ ID NO: 9720 - DNA, 1234 bp, unidentified
  source 1..1234: mol_type = unassigned DNA; note = element_f3a3c46
  misc_feature 1..2: note = core
  misc_feature 3..210: note = LE
  misc_feature 211..1185: note = CDS
  misc_feature 1186..1234: note = RE
  misc_feature 37..202: note = bridgeRNA
gtcgtacatttgtacgttggttaataattcgataatttatacctttgatataggtatggacaaagaccgattaatagttggtttatgaaaccgggtttaacgttcagtccccatacctttacatctgaaatctggatagttcgttgggacttgtgatcccgtgttggcgacgataggttacaggatgtattcaaccaaattaaagacgttatgacttacattggaattgacatcagcaaggacagcttcgtagctgcttttccgaaagtatcgggttatcagacccaaacttaccctaataccgtaaaaggtatcaggaagttcatcggctcgctttccgtaacagaacatcattgtgtgatggaagctaccggcaattatggctctctgcttctttatctgcttgacaggcaaggtatagccgcaagtatggtgaatcccaaacaaatcaagcacttttcacgcatgatgatgaccgtcaccaagaccgaccccaaagatgcctgcatgattgccatgtacggtgagaaaatgaatcctcccgtttataagatgccgtctgaaaccgtcatgctgttgaaacagaaaaaaacgattatcaggcagttaaagaaacagcttacggcgagcaagaacctgaaaagctccctcgttgtgcttcccctccaagacaagaacgggatgaaagcgttggataagactatttcttttttggcaagccaaattgagtctttggaatctgaacttgcagatttggcttcatctgagtttgacaggcaggttaaactactaacatctatcaaagggattggcatcactttggctacagccttgattgttgctaccggaggattctcctatttcaacaatgcaaaagcaagtttcccgttttatcgggatatgcccgaactaccaacagtccggaacatccgtacatatcaaaaaggtgggattaaccgaaacggggatgcgagtctgcgttcgctgctgtatgtcgcctcttggtcggcattacgtggaaatacaacctgcaaagaatgttacacacggttgaaagctaatgggaagccttctaaggtggctcttattgctgttgcaaacaaactcgtcagacaggcttttgccgtaatcaagtcagattctccttatgtggatggatttgtttctacccgtcaaacaaaatagcctatggtggtatttttgttctcattttacttgcatattaatatagttc

SEQ ID NO: 9721 - DNA, 1398 bp, unidentified
  source 1..1398: mol_type = unassigned DNA; note = element_f3a497d
  misc_feature 1: note = core
  misc_feature 2..92: note = LE
  misc_feature 93..1130: note = CDS
  misc_feature 1131..1398: note = RE
  misc_feature 1170..1390: note = bridgeRNA
caatgggatggacgcccccgccctaaacggcatcgaaagtgccacagtggagacgttagttcttccacttcaaccgagcaggagcgtccaccatgaagattacaaccattggcatcgatttggccaagaatgtgtttcaggtccacggcgtggatgagcatggccgagccgcgttcaacaaaccgctcaagcgcgagcagatggtagccttcttcgtcaacctgcccccgtgccttgtcggtatggaggcctgcggcagtgcgcatcattgggcgcgcaagctgcaggccatgggccacaccgtgcgcctgatggccccgcaattcgtcaaaccctacgtcaagaccaacaagagcgatgcggccgatgcccaggccatctgcgaagccgtcacgcgcccgagcatgcgcttcgtacccatcaagaacgtggagcagcaaggcgtgctggccttgcaccgggtgcgccagggctttgtcaaggcccgcaccgcgcaggccaaccagatccggggcctgctggccgagttcgggctgatcgtcccccagggtatagggcacatcagcgagcgggtgcctgagcttatcgaggatgcctgcaacgagctgcccggcgcgtttcggcgcttggtgcagcgtctgctcgaacacctcaaagaactcgatcgccaggtgcaggaactggaggcacaaattgtggcttggcaccgccaaagcgacttgagccgcaagcttgaactaatccccggtattggtcccatcacggcctgcgcgctggtggcctcgctgggtgatgccaagagcttcaaggatggcaggcaggtggccgcctggctggggctggtaccgcgccagcattccagcgggggcaagcaacatctgctgggcatcagcaagcgcggcgacacctatctgcgcaccctgctgatccacggtgcgcgctcggtgatctaccacgcccagaacaaagctgcggacaatccgcagtgctgctggatcaatagtgtcgtgcagcggcgcaacaagaacgtggcggcggcggcactggcaaacaagaatgcccgcatcgtgtgggccttgctggcgcacgagcgcagctatgagccaggctacgtacgagaaccggcctgagccataaaaaccgaggcaggagcgaggagcaggagaaaaccaccgattgctcaagcaatcatgaagtgatggcaagacaggtcagaccgtggtggatgcaatccgataagagcgtggcacttcgagtgcgctaaaccgataggacctccaccagcgaatcccatcagggaccgtggccccggctacagcaagtccggatatacgggtgcaatctttaccttcttggcagcagtgagtgagggcttggcttattcggggcgtccatata

SEQ ID NO: 9722 - DNA, 1376 bp, unidentified
  source 1..1376: mol_type = unassigned DNA; note = element_f3a4fc4
  misc_feature 1..2: note = core
  misc_feature 3..66: note = LE
  misc_feature 67..1083: note = CDS
  misc_feature 1084..1376: note = RE
  misc_feature 1138..1375: note = bridgeRNA
ataatggtatgaacccactccacttcctaacggcctcgcaatgggccaaaatggaaggtgggtataatgaagattacaacagttggacttgatatagcaaaatctatttttcattcgtttgcgattaatcatatcggacgattgattagaaaaaaacagctcaagcgtaaacagctattagcttattttgccaaacttgagcctagtattgtagtgatggaagcctgtggtggtgcaaactattgggcaagagaatttattaagcaaggtcaccaagtcaaattaatagcaccacaatatgtaaaaccttttgttaaaggaaataaaaatgattacaacgatgctcaagcaatagcggaagcatcacaacgtgcaagcatgcgatttgtgcccattaaatcggttgagcagcaagacttgcaaaatgtccaccgtcaacgagaacgtgtaaaaaaagaaagaacggctttagccaatcaaatacgagggttgctcgctgaatatggcatcgtgatcaaaaaaggtatctcagctatacgaaatgaattaccttcaattattgaagatgcagaaaatgacttaactgtgatgtctagagcgttgtttaatgagctacttgaagagtttcacgctatgggtgacctgcttgagcattgtgatacaaaaataaaaatagcaaataagaataatgacatatgtactcggttaggtgatgtgttaggtataggggatatcacatccaatgcactttatgcagcagcaggagatggtaaaaattttgtgaatggacgacacttttctgcttgggttggtttagttccgggtcaacattcaacgggtgggaagccgaggttattgggtatcagtaaacgaggcaatagctatttgaggacgttattgatacatggtgctagagcggtgctaaggcattcagagaagaagaatgatcgtttcagtctttgggctcaggcactactcaagcgtaggggacaaaataaagcctgtgtagccgttgcaaataagcttgctagaatggcatgggtcataatggctaaaggtgaaacgtatcgcccagcaatgtaataataaattaaatggtattagtgaaaagcactaatgcttattaagtaagtgtaaaaccctttacttcagttgcaaaagataaaagatcggatggtgagataggtcagacctgttcattcaaaacctgctagctgcatcggctcttaagaagccgtatggatgatgaggaggatgaacgcaaataaccatcggggccaggaagtaaaatcttccataaacaggccggatatatgagagcaatgatttcctctcacactatgatcaaatatcttgcaaacggagtgggttcatat

SEQ ID NO: 9723 - DNA, 1456 bp, unidentified
  source 1..1456: mol_type = unassigned DNA; note = element_f3b1f94
  misc_feature 1: note = core
  misc_feature 2..349: note = LE
  misc_feature 350..1255: note = CDS
  misc_feature 1256..1456: note = RE
  misc_feature 14..236: note = bridgeRNA
ctgattgatgcttaagacggcgttgcggtggtcccgtagcgtttggatggtccggctggccggctctcgaagtgcctgccgcctcgggtgaggttggctttcttacgagctgcttgctggccggacttcccgccgtggtgtggctcgaaagaggaaagagcacatcgaacccaaatcaggagtgcccacctcggcccaaccaccaagccaaggaggcaaccccaatgacgatgatcggaatcgatcctcacaaagcaacccataccgctgtcgcgatcgacgacaacgaacacgtgctcgacgagttcaaactccgagccagctcgacccagggcgatcggctgcgcgaatgggccgacgggttcgagagaagcgacagtgggcagtcgagtctgccaacggtctcggctacctcgtcgcgcaacagctcgtcgccgccggcgaaaccgtgttcgacgttccgccagtgctcgcatcacgcgtccgactgatgggctcaggccggtcgcagaagaacgaccccaacgacgcccgttcggttgcgatcgctgcgctgcgttcagaccggctcgctcaggtccaccccgacgatcacgatcgagtgctgcgcctgttggcgaaacgccaccgcgatatggcccgcatgagagccaagcactgcactcgactccacgcactgctgctcgaactcgaagcgggcgggatcgcgtcacgaatcaacgtaaccaaagcaaacgctgccctcgacgctgttgaagtcaccaatgaggtgatgaggtatcgagtgttgatcgcacgcgaactcgtcgccgacatagcgttgcttgacgccgcgttgacgacatcgaaggaacgagtcgtaaccgctgtcgctgcgtcgggaacgacagtgacggagatcgtcgggatcggtccgatctctgctgcgatcctgatcgggttcaccggagacatcaccagattcccgacccgaggacacttcgcgacctacaacgcaacagcacccatcgatgcgtcttcggggccgaaccctcggcaacggctgaacccgcaaggcaatcggcaactcaaccacgccatccatatcgcagcggtcagccaacttcgccacgacgacgaagcacgggactactacgaccgcaaacggaccgaaggcaagtcatccaaagaagcgatccggtcgctgaaacgacggatctccgatcgggtctaccgacacctcgtcgacgacgcccgccgcgtcgctgccagctgatcatggtgggttcgggagggaacccaggaacgtctcttggtccagcgtgaccggctctacgtcctgaacagccggctcttcggacaagccactcccaaacccgaacaacacgttagaaccctcgagcaccgccacgccaggagctcaactccgtcgcgcccaacaagccctcagaaatcaggtcttgacacaaagaggctt

SEQ ID NO: 9724 - DNA, 1455 bp, unidentified
  source 1..1455: mol_type = unassigned DNA; note = element_f3b661e
  misc_feature 1..2: note = core
  misc_feature 3..75: note = LE
  misc_feature 76..1089: note = CDS
  misc_feature 1090..1455: note = RE
  misc_feature 1213..1420: note = bridgeRNA
tgatgatatggacacctcttcctcccacggtgtcataatgcaccaacaagttaacggagtacaaaggagtccaaaatgaataatagcgtaataggcttagacatagcaaaaaacatatttcatctatatacagtagcagaaggaaaagcggttaagaaaaaacttaagcgatcagaattgcttactttttttgctaattatcctgttagtttaattggaatagaagcctgtggcagtgctcatcactgggcaagagaattgattaaattagggcatgaggttgttttacttaatgcgcgttatgtaaaaagctttgtgatcggtaataagaatgattttaatgatgccgccggcatatttgatgcggttactcgcccaaataaacgccaagtcatgataaaaacgctagaacaacaagacatacagttgattcataaagtaaggcaaggattagttggtaagcgaacggctttagttaaccagataagaggactattgagtgaacgagggattattattcctaaaagcataaataaggcaagagagcagctcccgttgattttagaagatgctgaaaatgatttaacccacctcagccgcgaagtatttgccgagcaatataaaaagttggttgatttagataaagacataaaagaacaggatcagcgtattggtcatctttgtaaaaacaacgagacagccaaacgttttctcgatgtccctggagttggcccgatgacagcgtctattgttgcttcggacgtagctcaaggaaaaggctatcagcgtagtcgtgactatgcagcaagtcttggcattgtacccagacaacacagtagtggggacaaacaagtctatttagggataagtaagcgaggaaaccgttatattcgcaccttattaattcatggggcacgtgcagtcttaaagaattgcaaacacaaagaagataaactcagcttatggctacaggcactcattgaacgccgagggtttaacaaagcagccgttgctctagccaataagaatgccagaatactgtgggcaatggcaagccaggacaaagtctatgatgcccagcaggtttaaactatttgcaagaccgggttacccaccctttgaccacagcctacgagctaagatggctcttcgtctgtggacaaagcgtggataaccctcaataacataaccgagtaaccaagattgcggaggcaagttaaccattattgatgacaacaacaggtcagaccaatactttaaagaacccgtttaccccaaagagtccattgcgagaccgttaggttggtagggtcaaaggtatgcggatagattcatcaggagtcctgaggtcagaatacctctaatagagaccgaatatatggctgcaatcttgatctatgttgataacattaaataattgaaaacttggcttgcaataattgaggtgtccatata

SEQ ID NO: 9725 - DNA, 2110 bp, unidentified
  source 1..2110: mol_type = unassigned DNA; note = element_f3be863
  misc_feature 1..2: note = core
  misc_feature 3..272: note = LE
  misc_feature 273..1490: note = CDS
  misc_feature 1491..2110: note = RE
  misc_feature 22..248: note = bridgeRNA
ctcgtataatagatttacggtttaggtgtggtgggaaccgcatgaaacccacttgttgtcccacaagccatgtgggataataaggccagcaggcagagggcgcaggcaatctccttgaagtatagcttccagagaaagaattgcgcctctgtctttgcgggtggacacgaatgagctggatagcgaatgtgcgctgtatatcgaacgaggttgtgtcccgcaaagaagtgtgagggaactctgtctgtaaatcaaggatgggaggtcacgccatgtactattgcggaatcgacatcgccaaatacaagcacgaagctaccgtcatagacaaaaccgggaaagcgttgctggacagcatatcgttttccaacagtgcggagggctgcaaaaaactgatggcactgtttgaacggctgtccatcacaaaagatgccctgatcatcgggatggaggccaccggccactactggctgagcgtctacgaatatcttctggagggcggctttgaggtcaaggtcatcaatcccatccaatcggaagcattccgtaagatgtatatccgtcagaccaagaatgacagcaaagatagcttcatcattgcccagatcatgcgttttgggcagttctccgccaccaatctctctgagcaggccattgtagctatgagacagttgagccgttaccgtctggcgttggtggatgcctgcggggactgtaagcggaggaccatctccctgctggatcaagtatttcctgaatatgacagcttcttttcggatacctttggcgtcacctcaaaggaggtgcttgcaaactatccaacgccggaggatatgctctctgtttccacagcaaaactcacatatctcctggaaaaggccagtcatggccggtttggcgaagagaaagcaaagcaattaaaggaaacagcggccaattccttcggcgtcagttttgcgaaggacgcgtttgcttttcagatccggcagcttatagagcagttggagttcctggaacaccaaatcgaggagctggaagaacagatcgccgtcttgctgaagcagaccggcagctatatcaccaccatcccaggcattggcgatactttgggcgccatcatcctcagtgagatcggcgatattcgccgcttcagtgcgccaggaaaactggtcgctttcgctgggttggatgtccgtgtcacgcaatccggtgagttcatgggcacccggcagaaaatctccaaacgtggttcgccttatctgcggcgggccatctggctggccgcctccagggcggctttttgtgaccctgtcctctcggagtattaccaagggctgagagccaggggcaaacaccacctcactgccatcggcgctgtctgccgaaaactctgcaacatcatttttgccatcctttccgaaaaccgtccttatcagactcttcctccaaacgacaaaaaactttctgcttcgtcattttcaccaacatgaagtgaatttcgtcgtttctgttttaccgctggtatattcttcctctgaaggaggatgtaccatgtcttttgaatttctattttcttcccatgtctttcacgcccgtactaatcttggtttaaaacagccttttgttgcagatgcccttgggatctctcttcgtgaataccaaaacattgagtatggccgggtcacaccgcagctaaaaactttcttaaagctggtctatcttttcaatttggatattgatgcttacagggaggtgctcggcgttgaaaaaattgctgttccttcccgttgagcaggagctgtttgctccttacataggcctttatcgttcttatggtattgctgccgtttgcttttcccgttcatactgcgagattcctgcttttgtttctgatgtttctaccgacttttcttttgtttctcatttagcggatcttttcacgcgcaatcggctggaccctttgcatttgttcaatgtcattgaggactccatctaagtttttctcgactctcttctggctcgctcgcggtgggccttttttcgttgctcttcgcttaccttttcttctttcgcattcttctctttttcctcttgactttttatagctggt

SEQ ID NO: 9726 - DNA, 1520 bp, unidentified
  source 1..1520: mol_type = unassigned DNA; note = element_f3c2b9d
  misc_feature 1..2: note = core
  misc_feature 3..253: note = LE
  misc_feature 254..1492: note = CDS
  misc_feature 1493..1520: note = RE
agtatctgcggcctggcgcccgtcgtgggggtcgaagagttgtgctggtcaccacggtgtcgggggtcgatagtggaggggtgggatgcggtgaccttgaattcctcccttgtgccgaagagccagtacctcagtgtgaggcgcggggcctgccacgggaatcgtggattgttgctacgagcacgcggattagactcctgcatttgttcgccccgtccgcagcccacttccgaggactcgaaaggagaccgagatggaagtgctgcattcccgatgcgccgggatggatgtctccaaatcggatgtgaaagtctgtgtccgcctggctagtccgggacgaaagaccgtgcaggacacaacgacctggtcgtcgatgtgcggcgagattctgcggctgcgggactatctgatcgccgagcaggtgacgtgtgtggtcatggaagccaccggcgactattggaaaccgttctactacctcctcgaagatgccccgttcgaggtgatgttggtcaacgcccacgacgccaagaacctcccgggccgcaaaactgatgtgtcggatgcggcgtggctggcgcagttggccgcgcacgggttattgcgtgcctcgttcgtgccacccgaaccgatccgacggttgcgtgatctgacccggacccgcaccgcgatcacccgcgaacgcagccgcgaaatccagcgtctggagaaagtcctcgaagacgccgggatcaaactgtcggtggtcgcctccgacatcaacggggtctcggcacgtcggatgctgcgcgctctggtccgaggcgaacgcgatcccgccgagttggcggagatgtcggtggccttgctacgacgcaagatcccgctgttgacccaggcgttgcagggccgcttcaccgaccatcacgcgttcttggtcgagttgcatttggacttcatcgacgaacacaccacccgaatcgaggcgttgaccgaacgcatcgagacggtgatggcgccctttcaggccaagcgcgacctgatctgcaccatcccgggcatctccaccaccaccgccgatgtgatcatcgccgagaccggcgcggacatgtcccagttccccacaccaggacatctggcctcctgggcaggggtgtgcccaggccagcaccagtccgcgggacgggtcaaaaacgtgaaaacccgtccggggaaccgttacctcaaaggtgctctcggggctgcagcgttgtcgatcgccagtcacaaaggcactttcctcaacaccaaataccggcgtctggtgcgctcgcgcggcaaacccaaagcgatcgtcgcgctcgaacacagcctgctcaccgtggtctggatcatgctcaccgacaacgtcgtctacgacgaacccggcgccgactaccaccagcaacgccaccccgaacgcaccaaaaaccgcgccctcaacgagctccaccaactcggatacgacgtcaccatcacaccccgcggagcggcctgagcagccacctcacctaactcttcggatt

SEQ ID NO: 9727 - DNA, 1390 bp, unidentified
  source 1..1390: mol_type = unassigned DNA; note = element_f3c4a69
  misc_feature 1..2: note = core
  misc_feature 3..76: note = LE
  misc_feature 77..1120: note = CDS
  misc_feature 1121..1390: note = RE
  misc_feature 1121..1377: note = bridgeRNA
tgttggggtggacggcccccgacggcatcgatgtgccagaatgaggtcgttgcgatctcaaacgagggggccgtccgtggagaagcttatccgaattggtatggacacgtcgaagcaagtctttcagctgcatggtgtcaacgcagcggaggagccggtgcttcgccggaagctgcggcgtaaggagatggtggcgtttttccaggggcttgagccgacggtggtggggatcgaggcgtgcggcggggcgcaccattgggcccgcgtgctgcaggagtttggccaccaggtgaagctgctgccgccgaaatacgccaaggcctatgtcaagcgtggcaagaacgatgccgccgacgccgaggcgctgtgcgaggcgatgagccggccaaccatgcggttcgtggcggcgaagacagccgagcagcaagcggcgcagatgttggccggcacgcgcgaccggctgatccgtcggcgcacccagctgaccaatgcgattcgcggttatgccgcggagtttgggctgatcgcggcgcgtggcgtcgacaagatcgcgccgctgctggcacgcctgcatagcgagccgacgctgccggcgcttgcccgcgagctgtttgccgggcatgccaaggaatacgcccagttgcaagcgcagctggaggcgatcgacgcccagctgatggcctggcaccggcaaaacgaaccgagccggcgtctggtgaagatccccggcatcgggccgatcggcgccaccctgttggtcatgaaagtcgcccaacccgaagccttccaatccggccggcatttctcggcctggatcgggctgacaccaaaggatcactcgacggccggcaagacccggctcggcggcatcacccgcgccggcgacgaggccttgcgcagcgtgctggtggtcggtgcgaccgcggtgatccagcaggtccggcgcggcaaaggccatccctcgccgtggcttgtcgagctgctgaagcgcaagccgcccaaactcgctgccgtggcgctggccaataaaatggctcgcatcgcctggaagctgatggtcagcggccaacacttcaatcctgcccatggcatcgccaccgcgatggacgaagcggcataaccagattagcgggaagcgacagatcacatcccgctgacgcctaagcttgctcgagaaggagcagatggtgcgatcgatcgatcccagacgcgagacagtccgcggtgcccaacggtcttccaataccgccgccatgtccggagctcgcgtcgcggaaaccatctcggccagcggtcacgggcgaccgcatccaacaggccggacatatggctgcaagcgatccgatcaaaaccgtgcgccgcatcttgcaagcagggggccgtccacata

SEQ ID NO: 9728 - DNA, 1151 bp, unidentified
  source 1..1151: mol_type = unassigned DNA; note = element_f3cb623
  misc_feature 1..2: note = core
  misc_feature 3..203: note = LE
  misc_feature 204..1139: note = CDS
  misc_feature 1140..1151: note = RE
  misc_feature 36..209: note = bridgeRNA
cttgtcttatgactttcttcgctgaacgggcgaatatgaaccgctgcgagagggttgtggccctccctcagcggcgagggtcggatcgatgaaccgcggactattcaggttcgaactagagtgtgatcgccctcgtctttctccctggtcctgaacggatacacggagtttggctccgatgacaagcagaggacgagcgaaagatgacccacgataccatcggcgtcgacatctcaaaagaccatctcgatgcctatcgcatgagcgatggtgctagccgccgcttcaccaatgaccgagccggtcacacagccctcctgtcatggctcggggcatcgcatccccgcgttatttacgagccgacaggaccctatcaccggaccttcgagcgcaggctggcagacgcaggctttgcactggtcaaggtcaacccgcgccaggcaagacggtttgccgaagccaccggcaagctggccaagaccgatcggctggacgcggcgatgctggcgcgcatgggcgcactgcttgagctcgaggccagaccggcatgcagcccgatcctcagcgatctcaaagacctgcatatggcccgcgaggcgctggtcaaggaccgcacggcggccaagaacagggcgacgaccctgaccctggccatcctcaagcgacagaatggcgagcagctcaggcagatcgcgcgccagattgccgctatcgaggcagagatcatgacgcacatcaaggccgatcctgaactggcgcatcgcttcgccattctcgtctcgatccctggcgtctcgacgatcaccgccttcgcgctcctgatcgacatgcccgaactgggtttgctcaacaacggtcaggcggcatcacttgcagggctcgcgcccattgcaaggcagtcgggcacgtggaccggccgcgctttcattcgcggcggccgggccaatgtccggcgggcactctatatgccggccctcgtcgcaatccggttcaaccgggacctcaaggcaaaatacgatcagctcaagacagccggaaaagcgttcaaagtcgccatcacggccatcatgcgaaaaatgatcatcctcgcaaacgcactgctgcgggatggccgaaaatgggcacagtccgtgacttgaccaacacggata

SEQ ID NO: 9729 - DNA, 1327 bp, unidentified
  source 1..1327: mol_type = unassigned DNA; note = element_f3cddb9
  misc_feature 1: note = core
  misc_feature 2..88: note = LE
  misc_feature 89..1063: note = CDS
  misc_feature 1064..1327: note = RE
  misc_feature 1093..1321: note = bridgeRNA
gaatgatatggactccccctgctcccacggcatctatgtgccacattgaaggtgtagtcaaacttcaatcagaagagggggcgtcctcatgaatgttacaactattggtatcgatctggcgaaaactgtgttcagtattcatggcaccaaccaacacggcaaggtcgtggttcgcaaacagcttaatcgccctaaactgctggcgttcttcgcacaactgccgccgtgcctgatcggcatggaagcctgctcgggtgcccactactgggctcgtgagttaaccaagcttggccacgatgctcggatcatcgcaccccgattcgtagcgccctaccgcaagagcagtaagaacgacgacaacgatgccgaggccatctgcgaagctgtcggtcgacccaatatgcgttttgtcccgatcaaaaccgaggaccaacaagcggtactttgcctacaccgcattcgccgtgggctgatcaaagaacgcacagaccagatcaaccagattcgtgggctgctggctgagttcggactgatcatccctcaagggcgctatcacgctcgacatcggattccagaaatcctggaggatgccgaaaatggcttgcccatgctggcacggcgtctactcaacaacatcaaccagcgcattctccagctcgacgaagatattctggcttacgaccgggaaatcgaagcgatggcccggcgcgatgaacaggccaaacggttgatggccattccaggtatcgggccacaaaccgccactgcgatattggccagtgcgcccgatcccagacaatactcgaccggaggcaaaccccgattgggcaggattaccaagcgcggggacaaatacctgagaacactgctcatccatggcactcgagcggtgatcgcaaaacttgccgataaaagcgatcggctcagtggctgggccagagatctggtggaacgtcgcggatacaaacgagccgccgtggcattggccgccaagaatgcccggattatctgggcgctgttaatgaaccaaaccgagtttaaaactcagcctgtggcaggctgatcaacgggcaacaacgacaggcagaacacgcctgccagccgagtcttgcaacggcaagcgatgacggaacggtcagaccgagagtgattgaacctgataagctttgtggctgatacaagccgactaacgaatgaggtcatcactcacacgcatcatcatcctggcccgggcagtaatgcccacaaagaggccgaatgtagagctgcagtctcaaaccgcttcagattcaagtggcgttgcttgaccgcagggggagtccatgta

SEQ ID NO: 9730 - DNA, 1436 bp, unidentified
  source 1..1436: mol_type = unassigned DNA; note = element_f3d4602
  misc_feature 1..2: note = core
  misc_feature 3..229: note = LE
  misc_feature 230..1420: note = CDS
  misc_feature 1421..1436: note = RE
  misc_feature 10..222: note = bridgeRNA
tccctacgctttcctgcgggatgtggtgagcccttcgtatggttgacccgcccaggggtgccgggtgtggttcaaaaggctctgccgcttgtggctctcagtgatttgccgcccggcgccccacgacgactcggctgccaattaggaattgcgaatgatcgctgagtagggaatcgacagcgaggtcgtccgtggcaggcaccggcaccacaccgcacggaggcatcacatgaccatgatctgggccggcatcgacgcggggaaaacccatcatcactgcgtcgcgatcaacgaggacggccgccggctgctgtcccggcgcgtcgccaacgacgagcccgatctcctcgagctcctcaccgacgtcctggccctgggcgagacggtggcctgggggatcgacctggccgacggcggcgccgcgctggccatcgccgtcctcgtcaaccacgcccagccggtgcactacatctctgggcgggccatccatcgcgcctccgagagctaccgcggcgagggcaagaccgacgccagggacgccgccgtcatcgccgaccaggtccgcatccgccgcgacctgcaccccttacgtgtcggcgacgaaaccgtcacggacctcaagatcctcacagggcgtcgcgcggacctggtcgccgaccgcactcgcaccatcaaccgtctccgcgcccaactgagcggcatctgccccggtctggagcgggccctggacctcaccaacactggtccgctcgtgctgctgaccggctaccagaccccggccgccctgcgccgggtgggtaagaaacggctcgagacctggctgcgcaaccgcaaggtcctgcgagccgaccggctcgccgagacagctctggacgccgccgcacgccagcacaccagcctgcccggggagaagctcaccgcccagatggtgcacaccctggcagcggaggttttggcactcaaccagcaggtcaccgaggtcgacaaggcgatcgaggcccggttccgcgaccaccgcgacttcgcagtgatcaccagcatgccgggcatgggcatcatcctcggcgccgagttcctggccgccaccggcggagacatgaccgccttcggcaccgcagaccgactcgccggcttcggtggtgtcgcccccgtcccccgcgactccggcaagatcagcgggaacccgcgccggccacgccgctacaaccgcagactccaacgcgtcttctacatctccgcgttgttcagcatccgccactgcgacgactctcgccggttttacgaacgcaagcgcgccgaaggcaaacgccacatccaggccgtcctcgcactcgcccgccgccgagtcaacgtcctctgggccctcctccgcgacggacgtacctacgaacccctaccgcccacacctctcgcggcttgacagaccgcattaggaa

SEQ ID NO: 9731 - DNA, 1564 bp, unidentified
  source 1..1564: mol_type = unassigned DNA; note = element_f3dd686
  misc_feature 1..3: note = core
  misc_feature 4..272: note = LE
  misc_feature 273..1469: note = CDS
  misc_feature 1470..1564: note = RE
  misc_feature 8..248: note = bridgeRNA
cttgtatatttagattactcaattaatcagccattccgttttatttagctgttattttatataattgagttaggcgctgtggactagtaatacctccaccggaatcctttggattactgttaaggaaaggctctagccacagctctttgtcatattgttaataagtttgttagcgcatagctttgactatgacgcttgatttttcacaaggttacataggcaaagagtgtgtggagcatagcgtaaatacttaaaatataggagttgatttcatgctttatgttggcattgacgttgcgaaatccaaacatgatatttctgtcattgacagtaccggaaggatatttgtcaaacatcttcagataacgaataaccgagaaggatttactaagcttcaatcgaccttaaccaatcttcaaaaaacaactggagaagaagttcaagtcgcgttggaagataccggtcattactgctttaatcttttgcggtttcttcgaatgaatggctatccaacgtttagttataatccgttattgattaaggaatttgcgaagcaccattctcttcgtaaaacaaaaaccgataagaaggacgctatgactatcgctcgtaaactacgagaagatatagacaaacaacttttcgaagcaaaaactgacatgattgagctgaagtatgccacaagaaatgcttctaagatcaaagaaaactgcaccaaacagaaaataaactatactcgtttattagatattctgtttcctgagttggcgacgtttttaggttcgcctacggcgaagcatgattcgtttatttatgccgttctaaaagaattcccttcccctaaaaaactggcaaatgcccacttaagaaaactaaccaatctactttcaagacactcacgtggccgctttggaaaagaacaagcgattgcgttaaaagaattagcctctgaatcgattggcagtgaatcttctgctttagaatttgaattacttcaaacgattgatacgattgagtattttacgagccaacgaaaactggcggataaagaggtggccaaaattatagaagaaattgattcacccattttatctatacctggtataggaataactttaggtagtatcatactcgctgaaatccgcgatattgataactttaaatctccaaaccaactactcgcttacgcaggttgtgaaccatcagtcagtacttctggtacgaatcaagtagaaacaggacacatggtaaaacggggctcttctcaactaagatgggccttacacgaagctgccaggcttatgtctatatggtctccttctatgcgtctctacttagataaaaagcgttccgaaggaaagcattataacgtcgctattagccatgtcgtaaaaaaactcgttcgaataatcttccaactccttaaaaataataaatcctacgatgaagataaaatggtcgtcaattagcctgaaaaaaaatcaattttacccaggtttatttgacttgctctaaaaaccgttatttaatcttttgatttttcacttgacttaatatagtttgt

SEQ ID NO: 9732 - DNA, 1172 bp, unidentified
  source 1..1172: mol_type = unassigned DNA; note = element_f3df8d8
  misc_feature 1..2: note = core
  misc_feature 3..206: note = LE
  misc_feature 207..1169: note = CDS
  misc_feature 1170..1172: note = RE
  misc_feature 3..181: note = bridgeRNA
cttgtatggtgatactcgaaggggtggtgggacgaacaaaccgattctgactgttaggcgcagtacagaccgtgggagacatcgccccaccccttcaccaaagcgccgataaagaatgcatcgtttgcaaacgacgatagaagcaagccagcgcctcttggtgaaacccctccgagttcaaaaaccataccgtgggagttcaggcgatggcaatgcgagtagacaatttcatcatcggcatcgatgtcgccaaggctgagctggtctgttattacgaagactccgcccaacagcagaccgttagaaacaccaagcctgaaatccaaaagtggctggcacttcagccggccaataccgctatctgcgttgaagctaccaatgtttaccatctggacctggttgagatggcatacgaaaagggcttcgccgtctatgtcgtcgacgggtttcaactcagcaactaccgcaagggcgttggcggacgcgttaaaaccgatgcgtccgatgcctgcctgctggctcgcttcctggatcgcgagggcagtgctcttcgtccttggtcgccccctccagctgtctacggcaagctccagagcctgctccggcgcagagcagcgctggtttcggcgcggacaagcctgacccagagctggggcaacgaaatgtcgctcaaagaggcgttcaacagctttgccaagcacttcgagtcgcttgatcttctgatccagaaacgcctgaaggtcttggtaaaagaggctggcctagccgaacaagtcgcccgctgtcagaaagttgaagggattggcttcctgaccgctgttgccctcgtcaccgcatttattcggggcgaattcaagaacagtgattcatacatcgcttttctaggcatggacctgaaagttgcagattccggccaaaaggccggacgtcgacggttgaccaagcggggttgttcagagatccgtcgattactgcataacgccgccatggcggccagtaggtctgcggcctggaaagacgtctacgagcactatcgccgggcaggtaaggcaacgactcaggccctggttatcttgtcacgcaagctcgccagagttgcattcgccttgatgaagacccaaggcgaatacgtcagcaaaggggcaaaaaagctttgccctcaaccatagaat

SEQ ID NO: 9733 - DNA, 1484 bp, unidentified
  source 1..1484: mol_type = unassigned DNA; note = element_f3e1ac4
  misc_feature 1: note = core
  misc_feature 2..97: note = LE
  misc_feature 98..1228: note = CDS
  misc_feature 1229..1484: note = RE
  misc_feature 1289..1445: note = bridgeRNA
agtcattatgtagtgaccggcccgctgcgctagtcgtgggttaggctgagtttgtttgacgaactctagtccagagccacaagcggaggagcgggtcatgagagagaagttacgatttttgggcatggatgtccatgctgagacgatcgcagttgccatagcggaaccggatggcgaggtacgcagcctggggacgattgccaagcgcgaagattcgatccgcaagttcatcaggaagcttggtacgcctgagcagctgcgcgcctgctacgaagcggggccaacaggattcgtactgtactggcagctgacccagttgggtgtcgactgcgcggtgatagcaccgacgctggtaccgaagaagccgggagatcgggtgaagacggaccggcgggacgcgttgaagctggcgcgcagtcatcgctccggagatctgacggcagtgtgggttcccgatgaagattcagaggcgttgcgcgaccttgtccggcaacgggaggcagccaagcaggatcagttgcgtgcgcggcatcgtttaaccaagtttctgctgcgcacgggtcaacgtccacctctgggactgaaggcgtggacagagcgttacatgaggtggctggcgcaggtccgctatacgcagccggcgcaggaagtcacgcgtctggattgtatgaacgaagtcgagcacatgagcgcacgggtgaagcggttggaggaagccattctcgaagtggtaaagctggcaccgcaacccatgcaggacgtaattcggggtctgcaggctttgcgcggtgtagcgcatatctcggcagtcacgatcgcatcggagttgggcaacatctcctcccgcttccagagcgcacggaagttgatgggttattgcggcgtatttcccagcgaagattccagcggcaaccgcgttcgaagaggcggcattaccaaggccggtaatgcgcacctcagacgcatcgtggtggaatcggcctggtgctatcgacacctgcctcgcgtcggggaaaagctgcgcaagcgacacgaaggtgttccgccagcaatcatcgagatcgcatggaaggcgcagaatcgcctgcataagcgctacatgaggctgagcatggcaggcaaggatcagaggaagatcatgactgcagtcgcacgagagttgctgggctttatctgggccatcgcgatcaaggctgaagcaagttgtcgacaacccattgctgcatgaaaagacaaaaccaaaaaccttccaaatagggaaaaagaaaaaacgttgaaccaggcaattcaattcgaggacaggctcagccgcagccggactcgcgtggttagtcagagggcagctcccgacggatcatgattatgcggtttcaacccgcgaatatcagcttgatcaatcgtcgccattacctgcctcggctgctgctgaccctgtcctcgttcgaaaaaaacgaccagcgcatcttgaccggtcactacatatc

SEQ ID NO: 9734 - DNA, 1399 bp, unidentified
  source 1..1399: mol_type = unassigned DNA; note = element_f3e96a0
  misc_feature 1..2: note = core
  misc_feature 3..84: note = LE
  misc_feature 85..1125: note = CDS
  misc_feature 1126..1399: note = RE
  misc_feature 1165..1388: note = bridgeRNA
tgatgaggtggaacggcccgctccgacagcatctagtgctaaaacgtggtcgttgcttgaacgccacaaaggagggaccgttccatgaagcaagttagcacaatcgggttagatttggccaaacacgtcttccaagttcatggcgccgatattgaaggctcggccttgttcaatcggaaactgcgtcgcaccgaagtgctgcgcttcttcgaaaggctgcctccgtgcctggttggtatggaggcatgcggtggcgctcactattgggcgcgggagattgctcaatttggtcatgatgtgcgtctcattccgccggcttacgtcaaacctttcgtcaagcgcggcaagacggacgcggccgatgcggaagccatcagcgaggcggtgatccgcaagaccatgcgcttcgtccccatcaagaccgctgagcagcaagcagatgcgatggtgctgaagacccgtgctctgttggtgcaacaaagaacacagtcggttaatgccctacgagcgcatttggccgaattgggcatcatcgcggccggtggccttcccaacgtcgcagcactggtggccatcgttcgggaagctgatgatacccgactacccccagcggcacgcttcgccctcacggctattgtcgatcagatcgacgccttggctgttcagatcgacgtgctcgaacgcacaatcgttgcggaatcgaagcgcgatgagagcatgcgtcgactgacgacgatccccggcgttggtgccatcaccgctgcgacgataaaggccttggttccggatccaggcggattcaagtcggggcgccacttcgccgcttggatgggactgacccccaggccttattccagcggaggcaaagagcgattgggtggaatctctaaaatgggtaatcccgaacttcgtgttctccttgtcctcggagcgacagccgttctgcggattgcccggaacgatgaacgggcacgaccttggctgaaagcgctacttgccagacgtccattcaaggtggccgctgtcgcgttggccaataaaacggctcggatcatctgggcccttctgaataagggcggcgtctacaatcctccggagacatccccaattgcggcggcaacctgatcagtatcaggacctgaaaacgatctgaccggcgtcggccggcagatgcaaggtgcaacagcaaacgatgaacctatgggacgaaatcccggaacgagcgaagccgccaatctcactgcactcaaagtgcgtggatgtgatttagctcctcgtttcgcggatctcatcgaggccagcggtcatgtaccgcactcaaaggccgtacatatgaacgcaccgtcctcgtgggtgaaatcgattgcgaagcctcttgcaccgcgggccgttccacata

SEQ ID NO: 9735 - DNA, 1203 bp, unidentified
  source 1..1203: mol_type = unassigned DNA; note = element_f3eb5ff
  misc_feature 1: note = core
  misc_feature 2..211: note = LE
  misc_feature 212..1177: note = CDS
  misc_feature 1178..1203: note = RE
  misc_feature 35..202: note = bridgeRNA
tcttaagtttgattctgattagattgtagttataaatcagaaagaacaaaagagaggaataaggtcaatatagccataggaactaaggattccgtcaacattgatgatcccctctcttttccactaagacttcgttcagttctgtgagacctagatctcgattttaagttgttgaatcattagtggtaagtcctttccaaaacattttcctatgaataaatataaagaaatccacggagtggatatcagtaaggacgtattcgatgttgtatgccccaatggccgtcaccatcagttcagcaatgcccccaaaggctttgaacaataccttaggttattgggggaagaagacctggtggtcatggaagccacggggtactaccactattcgttggcacagttcctttatacctcaaggataaaagtgtcggttgtgaaccctttatcggtaaagcggttcaggcagatgaaactggccaaggtaaagaccgataagagcgatgccagggccatacgggactatggccgtaccaatgaggtcccgctctatgatggcaaaggggctttacaggcggagagcctacaattattggccctgatggacatctacctgaaacaacgcacccagataaagaacaagctccacggggagaagatcctgggcataccttcaaatgtagtgtaccgttcattgaaacggaccttgaaggacctggagcgtgaactgggttcactcaatgaacgattgctctgtttggtcaaagaaacccaacaagaacaactcaccaatttaaagagcattccaggtcttggtgacaggacggttgcattattgatcgttctgaccgaaggtttcaccaagttcgagaatgctggccagctgtgcaactatgcggggataacacccacgatacgacgttccgggagcagtgtcaggggcaggggcaggatcagtaaggtgggcaataggaaattgaggaacctactgttcttgtgtgccttctcggcctgtaagcacaacaagggatgtagggaaatctatgaacggataacggccaaggggaaaagtaaaaaactcgcattgatagcggtatccaacaaactcctgaaacaggcctttgccattgcaaaatcaggactgccctatgatgaaaactatgtatcgaagttgaactaaaagaacttgttttttaactcagttct

SEQ ID NO: 9736 - DNA, 1384 bp, unidentified
  source 1..1384: mol_type = unassigned DNA; note = element_f3ef28f
  misc_feature 1..2: note = core
  misc_feature 3..81: note = LE
  misc_feature 82..1119: note = CDS
  misc_feature 1120..1384: note = RE
  misc_feature 1164..1381: note = bridgeRNA
taattggatggactcgcccctcgccgaggcgtctgggcgccgtggtggcaacctatagccaccaacagcgagggacgagccatgaacaaggttacgccagcttttgtacgtttggctgtggatctggccaagcaggtattccaggtcgccggggaggacgcctacggccgcgtggtttatgaggaacggatcaactcccgccctgcattcagcaagctgttggcgggcctgggtgcaaaggtggaagtgttgttggagaccggtccaggtgcccaggcgtgggcccgccaggtacaggaggcgggtgccaaagtgcgcattcttcctgcccagcgcgtggccgagcatcgcagcggggccaagaacgaccgcaatgactgtctggctatcctgcgagccgggcgcgacgaagcgattcatggtgtgccggttaaaaccgtccacgcgttggagatgcaggccgagcaccgggtacgcactggctatatccgtcgacagacatccatcagcaaccaggtacggggaatccttctcgagcatggaattgccatcgccaaatccaattccgcgttggccttgtgggtgacccgtatccagcaggacaccagcttcccgataccagagatgctgcgcgaaatcatcgcggacctatgggccgaatgggagcacttggggcagcgtcgcaagcggcttgatcgtcaactggagcagattgcgcagaacgatgaggtggcgcgtcggttgatgaccatccgcgggtttggtccgatcatgaccaccgcgttgctggccaagcagacccagccggagcgttttcccaatgcccgccaatttgcagcgtattttgggctggtgcccgaccagcacagcagcggatccaccgtacgccttggtcggatgaccagacgcggcgacggttacatccgaagcttggcggtaaccggcgcgcagtcggtactgcatcgtgtcagagctgacgccaccggggccgatgacaaacggttgcagcgctggtgtcggcagcatggaaagaaaggcgctgccatccgtctggccaaccgcaatctgcgtatcgcttggatattgatgaccacccaggccgagtaccagccgcaataggagccgactagaccaaacaaacgcatttctgccaccgggtgcccagcacccacaccgctgcttgaagaaacgggatacaggtcagaccgtcgcgaaatgatgcctgcgaccctaccggcccttgaggcctctcggtaattggcatatcgcgagctcaaccaattttggccggcaggcctacgcgcccgcccacgaaggcctgatacatagatgcagccggttcccgggcctaaaagtagcttgacggtgggggcgagtccataca

SEQ ID NO: 9737 - DNA, 1231 bp, unidentified
  source 1..1231: mol_type = unassigned DNA; note = element_f3f9d9e
  misc_feature 1..2: note = core
  misc_feature 3..210: note = LE
  misc_feature 211..1182: note = CDS
  misc_feature 1183..1231: note = RE
  misc_feature 39..204: note = bridgeRNA
gtcgtacatttgtacgtttgttaataatttgataatttataactttgatacaggcatggacaaagaccgattaatggttggtttttgaaaccgttataaacgttcagtccccatgcctttacatctgaaatctggatagttcgttgggacttttgatcccgtgttagcgacgataggtaacaggatgtatttaaccaaattaaagacgttatgacttacattggaattgacatcagcaaggacagctttgtggctgcttttccgaaagtatcaggctatcagacccgtacttaccccaataccataaaaggtatcaagaagtttatcggctcgctttctgtagccgaacaccagtgcgtgatggaagcgaccggtaattacggttttctgctcctttatctgcttgatcggcaaggcatagctactagcatggtaaatcccaaacaaatcaagcacttctcacgtatgatgatgaccgtcaccaagaccgacaccaaagacgcctgcatgattgccatgtatggagagaagataaatcctcctctctacaagatgccgtccgaaaccgtcatgctcctaaagcagaagaaaacgattatcaggcagctgaagaaacaacttatagccatcaagaacttgaaaggttctctaattgtacttccgtaccaagataggaatggcataaatgtattggataagactatttcttttttggcaagccaaatagaatctttggaatcggaacttgcagatttggcttcttccgagtttgacaagcagattaaacttctcacatccataaaaggaattggcatcactttagctacggctttgatcattgctaccggaggattctcctatttcgacaatgccaagcaggtttcccgtttcattggaatatgccccacttaccaacagtctggaacatcggtgcatatcaagggcggtataaaccgcaatggagatgcaaacttacgttccttgctttatgtcgcttcatggtcggcattgcggggaaacactgcctgtaaggaatgttacacacgcttgaaagccaatggaaaaccctctaaagtggcacttattgccgttgccaataaactcgtgaggcaagcatttgccgtcgtgaagtcgggaaactcgtatatggatggatttgtttctacccgtctaacaaaatagcctatggtggaatttttatcttcattttacttgcgtattaatatagttc

SEQ ID NO: 9738 - DNA, 1363 bp, unidentified
  source 1..1363: mol_type = unassigned DNA; note = element_f3fa0fb
  misc_feature 1: note = core
  misc_feature 2..73: note = LE
  misc_feature 74..1102: note = CDS
  misc_feature 1103..1363: note = RE
  misc_feature 1111..1353: note = bridgeRNA
tatgggatggcccgcccctccttctcgctggcgtaggctggccgggcaaccggggtaagggagcggacccatgatggcaatcgcggttctcggagtggatctgggcaagaatagctgcagcgtagcggcgctggacgcgaccggccgggtggttttgcgccggcggctgaaccgggacggggtggtgaggctggcggcagggtcaccaggctgcctggtggcgatggaggcgtgctgtggagcgcaccatctgggccgcaggctgcgcgacgcggggcatgaggtgcggctgatgtcgcccgagtacgtccaaccctatgtgaaggcgcagaagaatgatgagcgagatgccgaggcgatcgccgaggccgcgacccggcccaccatgcggttcgtcgagctcaagagcgaggcgcagctcgacatgcagagcctgcaccgcgcccgtgaccggctggtgggggagcggacggcgctgatcaaccagctgcgtgccattctgctggagcgggggattatcgtgccccaggggcggcgcaagctggaggtctacctggaaaccctgctgtccgaggagcgagtttcgctcagcccacggatacggctgctggtcgaggatcaacgggctgaatggcgtgagctggaccggcgcatcgaggcctttgacgaggagtttgcggctgcggcccggagcgacgaggctgcccggctactgacgacgatcccgggcatcggaccgctgaacgcgacagctctggtggcggcgatcgggcgggccgcgacctttgggcggggacgggacttggccgcctggctggggctggtgccgcggcagatgaccacgggcggcaagccaaagctgctggggatcagcaagcgcggcaacgtctacctgcgcaagatgctgatccacggggcgcgggcggcactgccgacgctgctcaagggcgacaccctgctgggcaggtggctacgcagcctgagcgcccgggcgcacgtgaacacggtggtcgtggcgctcgcggccaaactggcgcgcatcatctgcgccgtgctgcgcagcgggcagcggttcgagatgaaggtggcggcgatgtcgtagcccagaggatcagtcagtcgcgctgacctgtcgcgaagggctggatgaggtctgcgggtggtggaagcgagatggtctgacagtcgaccggtgtcctggaaccctgatccgaaaaatggcgctctgacgccgccagttttatgaggaccgggacgcgcggatctccatcttggcggggagcttgtctcccacgccggatacgttggcgtagaccgttcagaccaagctgcgaaaacccttgcagacggggcgggccatacg

SEQ ID NO: 9739 - DNA, 1513 bp, unidentified
  source 1..1513: mol_type = unassigned DNA; note = element_f401054
  misc_feature 1..2: note = core
  misc_feature 3..161: note = LE
  misc_feature 162..1193: note = CDS
  misc_feature 1194..1513: note = RE
ctcgtattatatagtagtagtgtttatagaccctctccaaggtctgtatgctatactgtttggagatactgtggattggttttcatttcctaccacttgatggtttcagaaaggctccaaccacagcctctttgtatagttgttgatcagttagataccgcatgacggttgatttagaacgaggttacaagcacagagagctctgtggtcctaaacagtatctaaatctattactaaggagtgttcttatgatctacgttggtattgatgtcgctaaggataagcatgactgctttattacgaattcagatggtgaagtcctctttcaggtttttaccatccagaataaccgggagggctttgatgatcttttttccaagattcaatccatttctccagatatgtctctcattgacaaaggtctccccaccttcgtcatcaatccgctccacacaaatctttacagaaaaagtctcagccttagaaagacgaaaacggataaggtcgatgcccgaaccattgctatgatgttcatgtctgatgtgaacctcaagtcctactcagacacatcttaccacaacgaggagttaaagtcactcacccgttaccgttttgataaggttcaggaacgtgctcagctcaagcagtctgtctccagacttgtcaccatcctcttccccgaattggaaaaacttgttccaacactccatatcgcttctgtttacgccctgctttctgaacttccttctgctggaaagattgcctcctgccatctgacacgtctgacaaatctgctgaaaaacgcctcgaaaggtcgttacaaccgggagaaagcgattgaaatacgggatgccgcaagaacttccattggttccaacatgcctgccaaatctctggaattaaagcacacactccggctgatcagcgaactggactctgaaatttcagagattgaatccgagatcaaacagatcatggattggatctcttccccaatcctgaccattcctgggatcagttaccgtatgggtgccatgatccttgccgaaatcggggatttctcccgttttgattccccggataagatccttgcgtacgcggcgcttctccatccacctatcaatctggacagttggattcctcttattcccatatggaaaagcgaggctcacgctatctgcgttttgccctaatcaatgctgccaagtatgtctgccactgggatgaaacgttcggtgtatatcttcagaagaagatttctgaagggaagcactacaacgttgccatcactcacgctacaaagaaacttgtgcggttgatctatgcaatggaaaaatccggcaagccttacataaaaagggcataactttctctgctctataacactctcttcgagcaccggtatacgatgctctgtttgtcatgcgattttcaaggtacaaatatatctgaaatgcgtttccgcaattcattcataaaatcttcattttagacttgacttttaatagttagt

SEQ ID NO: 9740 - DNA, 1304 bp, unidentified
  source 1..1304: mol_type = unassigned DNA; note = element_f40bc8e
  misc_feature 1: note = core
  misc_feature 2..216: note = LE
  misc_feature 217..1086: note = CDS
  misc_feature 1087..1304: note = RE
  misc_feature 1099..1290: note = bridgeRNA
taatgggatggactacctcctccctctgaggttaactgaacaaaatatactcagcaggagcattatcatgaatgtcatttatctgggtattgatctggctaaaaatgtttttcagctttgtggattaaatcaggcaggtatgccggcttataagaaacgtactgatcgtaaaacgttctacagaccgtcgcgaatattccggcatgcctgattggtgtggaagcattaacaggagcattttactggcagcgtgaattcgaaaaactgggacataaagtaaaaatcatcagcccacagtacgtgaagccttttgttcacggacaaaaaaatgacagcaatgatgccctgactatcgctatcgcactgatgcaacccataatgaaatttgtcccaccaaaaacagtggagcagcaggatattcaggctttacaccgtgcaaggcagcgtattgtaaatcatcgcacagccacagtttgtcagattcggggactgttacttgatcggggaatagcgataggtgtcacggtgacaagggcacgtcgggaaatccccttgatccttgaggatgctgagaacgaactgagttcccgaatgcgcagaaccattgcggaattctatgatcttttcaatgatcttgagcgacgcattcatttttttgataaagaaattgaaaccgtcttcaggcagtccgaagcctgccagcgcattgccaaagttaaaggcattggccctaaaacagcaacagctgttgttgccgcgatcggcaaaggaactgaatttaaaaatggtcgtcactttgccgcatggcttggtctggttccacgacagcactcgagtggtgacaggcaggtactgatgaatatgacgaaaaaaggcgacaagcatttgcgaactttatttattcatggagccagggcagtcgttagagtagctgcaaataataatgatggttatttaaatcaatgggttaatcagctaaaagagcgacgaggatttaacaaaacgaccgttgcagtcgccaataaaaatgccagaattatttggtcaattcttcataatgaaacagagtacagaccggcagtgtaatagcacgcctttaaaagttgcagagtagtgaaaaatggtgacaggttgaacctgcacgatcggaacctgctttttatattggccttcgtggccgtccagttgttgaggcgattgtgtgcggattacccatttgggcacaggttttcctgatgccggatagatgtaagcaacaacctaaaacctgattcagtacttgcaaaacggagggagtccataga

SEQ ID NO: 9741 - DNA, 1312 bp, unidentified
  source 1..1312: mol_type = unassigned DNA; note = element_f4174f5
  misc_feature 1..3: note = core
  misc_feature 4..210: note = LE
  misc_feature 211..1176: note = CDS
  misc_feature 1177..1312: note = RE
  misc_feature 34..199: note = bridgeRNA
catcgtatattaatttaaatttgtaattttgtataaatatccaacatcaagtgtggaataagaccgaatgttcattggtcataaagactgttcaaaatgttccgcccccacacttcttacattagaaaccggatagctcattgggcatagaccccgtattttgcgatgatggctcacaatgttagatgttgtacttaaatatcaccttatatgaattatgtaggtattgatgtcagcaaggcgacttttgtagtcgcttattcatctgccaaaggcagtgaaacgaaaactttcgagaacaccatcaagggtgtccacaagttcatccagacaatcactccagaagacacacactgtgtcatggaagctactggtaactacagtatgctgcttgtttacttgttatccaaagctggtattacagtcagtatggaaaatcctctcaagataaagaacttcgcacgtgtcatgctctcagttgtcaagacagacgagattgacgcacgcatgatagccatgtatggtgagaagatgaatcctgcgccatttaaactccgtagcgattctttgatggtgctcaagcagaagcgcactgtattacggcaactgaagaagcaactcaatgctaacacaaaccttcaggaatctatggaagcactgccattcattgactctgtgtgcaagaagatcctcgacaagaccatgaagtttctaaggaaacaaatcaatgagatggaaaaagaactttcctcaattgcaaacattgagtacaggaagcagatggacttgttaacatccattaagggtatcggagtaacgttagctactgcgcttattgtcgcaactggtggattcacttactttgacaacgccaagcaactgactcgttaccttggattgtcgccgacatatcagcagtcgggtacatcagtcaaccgcaaaggacatataaaccgcaatggtgactcatacctacgcagtcaactctatgttgccgctttctcatccttacgctgtaacacggagtgtaaagcctgttttgatagacttcgtgccaatggcaaacctggtaaagttgctgtcattgccgtggcaaacaaacttataagacaggcttttgccgtagtcacgcagggcaaggaatacgttgacggcttcatttccgccaagaaataaaacaccccttgcggagggacgccgagcggcaaggggctgcgcagtcagccccgacgagcggacaggagaattatgcgctgttctgtgcataaatatttaaatcttcgttaattttattcaaaaatttattatagct

SEQ ID NO: 9742 - DNA, 1394 bp, unidentified
  source 1..1394: mol_type = unassigned DNA; note = element_f418739
  misc_feature 1: note = core
  misc_feature 2..87: note = LE
  misc_feature 88..1122: note = CDS
  misc_feature 1123..1394: note = RE
  misc_feature 1164..1386: note = bridgeRNA
caatgggatggacgcccccacccgtaacggcattcgcgtgccacagtggaagtgtcaccaaccactgaaccgaaaggggcgtccaccatgaagattacgactgttggcatcgaccttgccaagaacgtgttccaggtccacggtatcgacgagcatggcaaggcggtgttgaagaagcagctgcggcgcgaccagatggccgcgttcttcgtcaacctgccgccttgtctgatcggcatggaggcttgcggcagcgcgcaccactggggtcgcaagctgcagagcatgggccacaaggtgcggctgatggctccgcagttcgtcaagccttacgtcaagaccaacaagaacgatgcggccgacgcagaagccatctgcgaagcggtcgggcggccgaacatgcgctttgtcccggtgaagaacgtggagcaacaagcagtcctggcgcttcaccgggtgcggcagggattcgtgcgggctcgcaccgcgcaggcgaatcagatccgcgggctactgggcgagttgggcctcatcgtgccgcaggggatcggccatatcgccacgcgtgtccccgagctgatcgaagacggtgccaacgaactgccgggtgcgttccgactgctcatccagcgactgcttgatcacctcaaggagctggatcgtcaggtcgaggagctcgaagacaagattcatgcatggcatcgcagcagcgacctcagccgcaagctggccatgatccctggcatagggccgatcaccgccagcgcgctggttgcatcgatcggtgatgcgaagaacttcgacggaggccggcaggtcgctgcctggcttggcttggttccccggcagcattcctcgggtggaaagtcaaacctgctgggcatgagcaaacgtggcgacacctacctgcggacattgttgatccacggcgcgcgctcggtgatctaccgagtgagccagcggcccgacacatgcagttggatcagctctgtcgtcatccgacgaaacaagaacgtggccgcagtggcgctcgcgaacaagaatgctcgaatcgcgtgggcgtcgcttgcgcatgaccggcagttcgacgcggggtacgtgcgaagcgcagtagtggcctgagtcagagtaggcagcagcaacaacgtcagggagaacaaaccaccgattgctcaggcgatcatgaagtgatggcaagacaggtcagaccgtggttggcaaagcccgcgccggacgaggcactcagagtgcgtgtaagcgatcgaggcgtcaaccagcaaatcccatcagggacagtggctcaaaaggccgcattcaaagtccggatgtacgggtgcaatctttaccttcgagtcgttgcagattgagagcttggcatagggggcgtccatgta

SEQ ID NO: 9743 - DNA, 1524 bp, unidentified
  source 1..1524: mol_type = unassigned DNA; note = element_f421217
  misc_feature 1..3: note = core
  misc_feature 4..242: note = LE
  misc_feature 243..1409: note = CDS
  misc_feature 1410..1524: note = RE
  misc_feature 8..222: note = bridgeRNA
tttcgtattattaggtcagccagaaaaatctggttggcctttttttaggttcggtataagatggcggtagccgggagaacgagggcttttttgggagaaaaccccggaacaaaaactgttctctcactgccactcaataaccatgtttgagctggtagagacctagatctcgtatcacaagcgaagctatggcgttggagctatcgtgggaatgccggtgtaacttgtaaaggaatggtgaaatggaaccagttgtagggttggatgtgtcgaaaggaatgagtgttgctcaagcatttacttcgcgaaacgtagcggtggggaaatcgaaaactatcttgcacacggaggatggttttgaagaatttggtgaatggcttggagaactgcgccagaaaacgggaaaagaaccggtagttgttttagaagcaacagggcactatcatcgagggctggtggtttacatggaacgaagtggtttttgccacatggtcattaatcctctacaatccaaacgtgcaaaaggctctcaactacgaaaagtaaaaacagatgctgcagatgcatggcatttagcagagatgtactaccgtggcgatgttaagcctcatcgtaaaggggacgagcagctattagagctccagcacctcacaagacagcatgagttcataacagcgatgtatgtacaagccaagctaaatatgagggcgttgcttgaccaagtgtttccttcatacgaagctgtcttttatgatttgtattcctcaacagcgttgcgcgttttacatcaatatttaagcggtgtgacgatcacagaggaaacaattcgggaaaccgtacaaaggtcacatagtcaaacttggatcaaggggaagctggcacaactccaaagcattgctccaatcaaaggacagagccctgcacaaacaatagctttacaaagcatgctgagcttgctgattgcattccaagagcaactggggcacatggagcagcagattgaggaaacggtcgtcgtgatccccgaagtggcgcttcttaaaacaatccctggtgttggtgataaattagctgccgcgttggttgctgaaatcggagatgctaatcaatttggacatgccaaacagcttgtagcttatgcaggactcgaccctagtgttttcagttcaggcaagttcactgcttcaagcagcaaaatcaccaaacgaggttccaagcgtttaaggcgagcgttatatatagcggtgcaatgtggtttgcgcaaagggcaaaatgaacgaattaaggcctactatgataagaaaaagaaagagggcaagccctacaaggtggccgtgatcgcttgcgccaacaagcttctccatcacgtctatgccatcctgacccgaggcgagccctatcgcatgtaaccaataaattccataaacttccacgccaatggaggtttatttgtcatttcaaaaaacattataacaaaaattattttaagtaccaagatagagatgcttgacaaacattagctgg

SEQ ID NO: 9744 - DNA, 1381 bp, unidentified
  source 1..1381: mol_type = unassigned DNA; note = element_f43a6cf
  misc_feature 1..3: note = core
  misc_feature 4..85: note = LE
  misc_feature 86..1114: note = CDS
  misc_feature 1115..1381: note = RE
  misc_feature 1088..1368: note = bridgeRNA
tgatggagtggatgccccctcccgacggcatcgcaatgtgccagagtgatgttcgccagaacgtcacttagaggagagagcatccatgaaggaagttagcatcgttggcctggaccttgcaaagcgggtgtttcaggttcatgccgccagaagcgatggaagtgtggtcttgcgcaggaagctgtctcgcggccaattggtgcccttctttacggagctgccaaaatgcacggtagcgatggaagcctgtgccacagcgcactactgggcgcgcgagatcggtaaacttggccacgatgttcgcttgatcccgccagcttacgtgaagccgtttgtcaaacggcagaagaatgatgcggccgacgcagaaacgatcgttgaagcagcgacccggccgtcgatgcggttcgtcgctccgaagactgaatcccagcaggcctgctccatgctcttccggacgcgggacctcttcgttcgtcagcgaacgcagcttatcaatgcccttcgagcacatctggccgagcatggtgtcattgcacctcagggcattgcgaatctagccctgttggcggagattattgaagatcacgagtccggcctcgagctcatcgttgtagagaccgggcgactgtatctggaccaaatcgccgcactgtcctctcggatcgcatcgctggaaaaggcgctcagatcggaagcgaagcgttcgcagagtaccgctcgcctcatgtccatgcccggcatgggaccgattaccgccatggcagttgaggccttcgcgcccacaatgactaccttccgcggggggcgagactttgcggcctggctcggcctggtgccaaagcagcattcgagcggaggaaagcagattctcggcagaacatcgaagatgggacaacgcgacatccgccggcttctcatcattggtgcgatgaccgtcattcgatgggcatgccggaaagctccacccgagaactcgtggctggcacgaatgctggcgcgcaaacctcgcatgctcgtcgcaatcgccctcgccaacaaaatggctcgatccatctgggcaatgatgaccaggaacgaagattacaaggattccgccctggctgcagcgtaagatggttgagctgaagtcgggtcggatcgtcggcgtgtgaggaggtcagcgaacggtaaggacaaagattggtgagagtgggtctgggaatgcatccgggtcagtgagccacgagctcgtagagctgattttgcaccaggtccgcgtagctccataccggccagcggtcgtactcgagccgcataataggcctgatacatgaccgcacccgatcacacgttcaaaatcgttctaagaactgcttgcatgaacgggggcatccataca

SEQ ID NO: 9745 - DNA, 1384 bp, unidentified
  source 1..1384: mol_type = unassigned DNA; note = element_f43f9ef
  misc_feature 1..2: note = core
  misc_feature 3..88: note = LE
  misc_feature 89..1114: note = CDS
  misc_feature 1115..1384: note = RE
  misc_feature 1127..1371: note = bridgeRNA
tgatggggtggacggcccctgtgtccggcgtcgagcgcgccatagggtggtcgttgtttatgcggccacagaacaggaaccgttcgccatgaagactaccacgatcggcctcgacctcgccaagagcgtcttccaggtccacggcgtcgatgacgccgggacagtcacggtacgcaagaagttgcgtcgagcggaagtgttggcgttctttggagaactcccttgctgtctgatcgggatggaggcgtgcgcgacctcgcactactgggcgcgggaactgacggcgttgggtcatgaggtccggttgatgccgccgaactatgtaaagccctatgtccgtcgccagaagaacgacgctgccgacgccgaggcgatctgcgaggcggtgacgcgtccgaccatgcggttcgtgccgatcaagagcgcggaccggcagagcgtgctgacgctgcatcggacccgggagttgctggttcgccagcgcacaatgctgatcaacgccatccgcagccactgtgcggagtttgggctgatagcgccgcaaggcgccgggcgggtagacgaactgatcggtcgggtcggatcaacgggagacgacgcgatgcctgatctggcgcgatccacgctgctgatgttggcggaccagcttcaggcgttggctgtgcacatccatcagctcgaacggcggcttctggcctggcatcgccaggaccaaatcagccaaaggctggcgacgatccccggcgtcgggatcataagcgccacggcactgtccgccagcgtaaccgatccgtcgctgttccgctcggggcgggagttcgccgccttcctgggtctggttccgcgacagaactcctcgggaggcaaggatcgtctggggcgtatctccaagatgggagacggttatctgaggaaacttctggtgatcggcgcgacctcagttatgcggcgtatccgaaccggcgtcgctttagcctcggctgactgggttcgcacattgctcgaacgccgcccccctcgcgtggtgaccgtcgccatggccaacaagaccgcccgcatcgcctgggccgtcatgatgcgaggcgaggtctacagggcgccggccatgacctgacagagatcgcgacggcccgtcggccgtcgccctgaactgcagagggacgatagggaatgacggtgacgatctgaacgcggccgcaggccgggacaccccgaggtactgacggagccttgtgctcggtaacgtgtaagggacccaaccagcggactccatcagggccagcggctatctacgccgcacaaacaggccgaacagatgtccgcaccccgcagatccacccctcaaacccaaactaccccttgcagatcaggggccgtccacaga

SEQ ID NO: 9746 - DNA, 1436 bp, unidentified
  source 1..1436: mol_type = unassigned DNA; note = element_f440047
  misc_feature 1: note = core
  misc_feature 2..309: note = LE
  misc_feature 310..1101: note = CDS
  misc_feature 1102..1436: note = RE
  misc_feature 1210..1430: note = bridgeRNA
tactggcatggtccgccgcctaagccctccccgagggtgtagaggtaagcacaggaggtgttccatggagattcggacgatcggtattgatttggggaagacagtatttcactttgtggccgtcaacgcacgtggacaagtcgtggttcgcaagaagggttcacgaactcagcttctgcgctttactgcgaaccttcctcagtgcctgatcggcatggaggcctgcggaggagctcattttctggggcgtgctctgcgggaacaaggtcatgatgtgcgcctgatgccggcgcagtatgtgaagcgtacgtgaagacgaacaagaacgactacattgatgccgaagcgtgttcagaagcagtaacccgcccgacgatgcgttttgtgccgatcaagaccgacgatcagctcgatctgcagtcgctgcaccgggtgcgcgagcgttgggttgtgcgccgcactgcagtgatcaaccagatgcgcgggatgctgctggagcgcggtatcaccatccgcaagggacgccactatattgaggagtctctccccgctatcctggaggacccggacaacaagctgtccggtgcattgcgcgtacttctgacccagctgcggatggagatgcagtacctgcacgggcagatcgaggaaaccgacaacctgatcgagcgcatctgcggcgaacttgaacagtgcagacgcctggtcgcgatccccggaatcggaccgatcacagctaccgccacagtggcagccattggcaacggtgcagccttcaaaaagggccgcggattttctgcctggctgggagtggtgcccggcgaacactccaccggaggcaagcaaaagctgaccggcaccagcagacgaggaaacaaatacctgcgcaaactctttgtgcagggagcgcacaccgtgctgctgcagaaaaccaagcaatcttccggcttgagtacgtggctggttagtcttacatcccgcaagcgcaagcaggtggcaaccgtggcgctggccaataagatggcccgcatggcctgggctgtgctgtttagaggagaagcttatcgcccgccaacagcaccacaagtaatcgcagcctgatggcctgcacatgacgcctggcacatagcgccaggcttggaaatcgctgacgcgattcccacatctgcagaccaactgcgacgactgttctgagtttggagattcctgccaggtttgctggcgaaaacaggagatggcaaaaacggtcgatcccggcgctctcgagaacctgtatacggaaaatgcctttaaaggcagcgttactaaaaaggacgagggcgcagcgcattccattcaggccaggagttcgctactccaatcaaggccgaatacattcgcgcagaccaattctgtcatcctcactattcgcttgcaaaacggcggcggaccataca

SEQ ID NO: 9747 - DNA, 1368 bp, unidentified
  source 1..1368: mol_type = unassigned DNA; note = element_f446894
  misc_feature 1..3: note = core
  misc_feature 4..83: note = LE
  misc_feature 84..1121: note = CDS
  misc_feature 1122..1368: note = RE
  misc_feature 1135..1356: note = bridgeRNA
atgctgggtggacggccccctgacggcatcattgtgccaagctggccggtggcgaactcagtcagcgaaggagaccgtccgctttggagacgaccatcatcgggattgatattgcggcgagcgtgtttcagctgcacgcgcaggaccgttcgggcgaggttctgtggcggaagcgtctgcggcgcgaggagctgggagcgtttttggcgaagcaggcgccggcgctgatcggcatggaggcgtgcggctcggcgcatcactggggccgtgtgctgggtgggctcggtcacgaagtgcggctgatgcacgccaaatacgtcaaagcctatgtgaagcgcggcaggagcgacctgcgcgatgcggaggcgatctgtgaggcggtgcaacgccccgacatgcggtttgtgccgatcaagagcgtcgagcagcagaccgcgcgtgcgctggaacatgcgcgcgatctgctgatgaagcagcacacccagctgaccgatgccacgcgcgggttgttggccgaattgggcatcgtcgccagtcccggcctgcgcggcttcaagacgttggtcggcaagatcgatgccggggatagcgccatccctggcgcgctgctgagctgcgtgaagccgctggtcgagcagtggcgcgccttgcacgcgagcatcgacgcgcttgaagcgcgcatcgtggcgcaggccaacagcgacgagcgcatgcgccggctgcagacgatcccctcggtcgggccgatcattgcgcatgcgctggtgagcgcgatcggcgatccacgccgctgcgccaacgcgcgcgactgcgccgcctgggtcgggctgacgccgctgaccaacaactctgccgagaaaacccgcatcggccatatcagccgccagggcgatcacagcctgcgacgattgttggtgctcggcgccgccaacctggcgcgacgggccaaggccaagccgaacccggccaagccaaaccaggccaacgcctggctgcacggcatcatcgcgcgcagacccttcaaggtcgcaaccgtcgcacaggcggccaagaccgcacgcatcgcatgggcgctgttgtgctcaggcgaaacctatcgggcaatggcgccggccgcgtaggccgcgccgggcccggaccacgcaaggagcaaactgcaacgacggcaaacaggtcaggacctgaaccgggacactccgttctgcatcgcgcgcatcagcacgccgcaatgcttggaacccggttcgcgtaaccccatcggggccagcggtcatagccgagcgcacaaacggaggccggatacatgaacgctccagaccgctgcgccgacgtcgcacaaactccttgcctaacgggggccgtccatac

SEQ ID NO: 9748 - DNA, 1352 bp, unidentified
  source 1..1352: mol_type = unassigned DNA; note = element_f446ab2
  misc_feature 1: note = core
  misc_feature 2..67: note = LE
  misc_feature 68..1093: note = CDS
  misc_feature 1094..1352: note = RE
  misc_feature 1121..1349: note = bridgeRNA
taatgggatggtcacccccgcctctcagcgagtaggctggagataatttccaccggaggcaacttccatgcaaaacgtcacgttggttgggattgatctgggcaagcactcctttcacttgcatgggcaggacaaagccggcaaagccgtgtttcgcaggaagttctcacgtaagcagttggtggagttcttcgccactttccacgcctgcaccgtggtgatggaggcatgcgctggcgctcactggatggcacgcaagctcagtcaatttggacacaccgtcaagctgatctcaccgcaattcgtacgcccgttcgtcaagagcaacaagaatgacttcgttgatgcggaggccatctgcgaggccgctgcgcgaccttcaatgcggttcgtgagtccgaaaactgaatcgcagcaaacgcttgcagcattgcaccgcgttcgccaagccttggtacgtgaccgagtacgcactaccaatcagatgcacggattcctgctcgaattcgggataagcttgcccgttggccacgccgttgtgaagcgcctctccgtcgtactggctgaacatccgttaccgccgcgcctcgtggcgattctcgaacgcctgcacgcgcacttcaaatatcttacccagcagatcggcgatatcgagaaagagctcgatcggcaactagccgaagatccggttgggcaacgcctgctgacgattccaggagttggcccgatcaccgctagtctgcttgcgtcagaactcggcgacggaaagcagtaccgatgcggccgagacttcgccgccgcagtaggcctggtgcccaagcaatacagtacaggcggtagagcgaacctgctcgggatctccaagcgaggtgacaagaatatccgccacctgctggttcagtgtgcccgagcgtttatgcttcggctcgacaggcagtccggacgcgtgggcgattgggtccgggcaatgcttacgcggcgacattccagcgtagttgcgtgcgcgctggcgagcaagcttgcacgcattgcatgggcgattgcaaacgcgaacaccgttttcgagcggctggcgtccgttccggcctcgtgacggactattgcagatagtttgatgaagtatcaacccacctggttttgcgactgctgacaattgatgacgtgaacggctaaacggcccggcggaaaccctgaaaggttaacgagcttcctaaagctgcagctgttattaggaccgccaggcgcgattctcatcgtggcgcgaggagaattcctcacattgacgccggatagatttgtgcaagccacccacccattaacatcagtgttgcaaaaatgggggtgaccataga

SEQ ID NO: 9749 - DNA, 1589 bp, unidentified
  source 1..1589: mol_type = unassigned DNA; note = element_f44c8ba
  misc_feature 1: note = core
  misc_feature 2..79: note = LE
  misc_feature 80..1144: note = CDS
  misc_feature 1145..1589: note = RE
  misc_feature 1350..1580: note = bridgeRNA
taatgggatggtccggccgtgctcctgccccgccagcgagtaatgctggcatgggggcgaccagcacaaggagcacgccatgtctcagaaacgcaacactgcgattgccgtgattggcatcgatattggcaagaactcgttccacgtcgtgggtctcgatcagcgaggcgcgatcgtactgcggcagaaatggtcacggggccaggtggaaacacggctcgccaacatcccgccctgcctgatcggcatggaggcctgcgttggcgcacatcatctgagtcgcaggctcaagggtctcggtcacgatgcccggttgatgccggcgaaatacgtgcgtccctattcgaagggacagaagaatgacttccgcgatgccgaggccatcgccgaggcggtccaacgcccaacgatgagattcgtcgctacaaagaccgccgagcagctcgacttgcaagcgctgcaccgcgtgcgtgaacgcttggtcagtcagcgcaccggcgtcatcaatcagatccgcgcattcctgctggagcgcggcattgcggtgcgacaggggctacgcttcttgcgtgccgagctgccggacctccttgccacacgcaccgaggtcctgtcgccacgcatggtgcgggtgatcgaggatctggctggcgactggcgctggctggacgagcgcattgagagcctttcgaccgagatcgcagcgctcgcccatcgggatgcggcgtgcaatcggctgatgacggtgcccggcgtcgggccgatcatctcgagcgcgatggttgccgcaattggcactggagatgtgttctccaaaggccgcgacttcgccgcctggcttggactggtgcccaagcagatatcgactggagaccgcacgatcctcggcaagatatcgaggcgcggcaatcgctacctgcgcgtcctgttcgtgcaggcggcctgggtcgtgctgatcaggccaaagagctgggaacgctacgggctcaagccctggatcgaagcggctaagaagcggcttcaccacaacgttctcgcgatcgcgctcgccaacaagcttgcccgtatcgcctgggccgtcctcaacaaggagcgcaacttcgaatgcgtcagcatggacaagatggcgtcccgaccgacgtgagtgtcgcgccgtgctcgggtccgtcaaggcgtggcctggcagcgccagagcgagaggcgagccaagcgcgacggccagccttgacgacccttgcgcgcggcgtctcggcacaagcacgggccgggacgaaggaacggccgcagggcacgaacaaaggaactgcgcgagatgaggagctgccgatgacgtaagctaaacatctcttacccgccgaggtctgcgagaggatgagacgagatggaggatcggtcttcccggcgcgtgcgaacactggtgacccgaatggcccggtcgaggcctgtccgctaatgagatcgcacgcgcgctgatatccatagtggcccggagcacaactcgctccaatcagaggccggatacattgatgcaagaccgcaaatccgccagatcgaccaaaacctcttgcgacgcacggccggaccataca

SEQ ID NO: 9750 - DNA, 1468 bp, unidentified
  source 1..1468: mol_type = unassigned DNA; note = element_f452e6f
  misc_feature 1..5: note = core
  misc_feature 6..233: note = LE
  misc_feature 234..1451: note = CDS
  misc_feature 1452..1468: note = RE
  misc_feature 1..232: note = bridgeRNA
cccccttaccttccttgtaggccgtgagcaagactctcggcttgggttgctcgacagcacgggcagggctttctgcccctgtcacgcagatggcctggggggtgttgccacccgtgctgttgggcgcggttgacctctgacagggacatgcccgagccgggctgattcgtaaggtggttgacggcgacctcgcccgcgagctccctgcgaaccaaccagctccaggaggtgacatggccccagcggtgaccgagatcgacgtgttcgtcgggatcgacatggccaagcaagaccactacgcccaagcgatcagtcgcgacggcaccgaactgttcaagcgtccggtcctcaacgaccaggcgacgatcgaacagctcttatccgacgcagcggtccacgggcgcatcgtcgtggtcgtcgaccaaccagcgtcgggagcacaactgctgctgagcctcgctgcccaacaccaggtccccgtcgcgtacgtgaccgggctccagatgcgacgtgcagccgatctctacgccggctctgcgaagaccgaccccatcgacgcgttcgttctcgctgacttcgcacggcgcaacgctgatcggctcacctggctgtcggtcaccgacgatctgttggtcgagctccggatcctcaacggtcgcgacgtcgacctcgctgccgacgcgactcgcacgatcaaccggtgccgtgacgcgctcaccgccatctcgcctgcgttggagcgggttgtgggatctcggctgggccaagccggtgtccgcgacgtcctcgccaagtgggcgacgcccacggcgttgcgctcggcgggccaggcccggatacgcgcccgcatggcgaagcgatcgccgcggatcgccgccaaggtcaccgaggaggtctgggctgcgctcgacgcgcagacgatcacgctgccgggggaggccgcgtggggacggatcatcgctgatctgtgttcggacctcgaccgggtcatcagccaacgagaccagctcgctgtcgagatcgaagaggtgttcatggcacaccctctcggaaaggtcctggtgaccctgtgcgggttcgggcccaggaccggtgcacgaaccctcgccgagatcggtgacccgcaacgcttcgctgacggcggccgtctcgccgcctacgccggcctcgcacccgttgaccgacgttcggggcgaagcatcaactcgtcctcgcaatcgcgatccgggaaccaccgcctcaagaacgccatgttcctcgccgcgttcgtcgccgcccaacacgacgccgccgccaaggcgtactaccaacgcaaacgcgctgagggcaagaagcacaacgcagcggtcatctgcctcgcccgcaaacgctgcgacatcatcctcgccatgctcaagaccgccagcccctacgacctctcgagacacaccgccctccccgaagctgcttgacaacaagacagggacac

SEQ ID NO: 9751 - DNA, 1603 bp, unidentified
  source 1..1603: mol_type = unassigned DNA; note = element_f458bf7
  misc_feature 1..2: note = core
  misc_feature 3..278: note = LE
  misc_feature 279..1313: note = CDS
  misc_feature 1314..1603: note = RE
  misc_feature 14..298: note = bridgeRNA
ctactacaatatgtttatggttaatatcccttacagccagtaaggaattatccatcttgttgcttaagctgtataatgatggagcaatcggtatatcgtcttccaatcttggacttcgcgtccgtaaattagactgataaccagctcctcattcgcagcgttcgttttatgcaggttgaatcgccataggtgcattcgcgtcacaccacagtagattgaataggcaatgagtaaaactggtatttatccattgcaataatcttaaggagtgacaatttatgaacgcagtaggtatcgatgtttcaaaaggtaagagtatggttgctatcatgcgacctttcggtgaaattgtttccgcacctttcgaaatcaaacacacagccagtgatatccattcacttgtagaactcatcaactctgttgaaggggagtcccgaatcgtgatggagcacacaggacgttattatgaagtcctcgcccatcagctttcaaaggcaaatcttttcgttagtgccattaacccaaaacttatcaaagactttgataatgattctcttcgtaaagtgaaatctgataaagcggattctgttaagattgcccgatatgctcttgacaaatggcaaaatcttaaacagtataatgttatggatgaattacgcaatcagctcaaaaccatgaaccgtcagttcggcttttacatgaagcacaagacggctatgaaaaataatcttatcggcatccttgaccaaacctatcctggtgttaatacttactttgacagtcctgcacgcagtgacggcagccagaaatgggttgattttgcatctacatactggcatgtggactgtgtccgtaaaatgtctctgaatgcctttatcgaccattatcaaaactggtgcaaacgtaagaagtacaacttcagccaatccaaagctgaggaaatctatggaaaagcaaaggaacttgttcctgtacttcctaaggatgacattacaaagcttattatcaagcaggctgtaaaccagcttaacagtgcttctacaaccgttgaatcactacgcacacttatgaatgaaactgcatccaaactcccagagtatcctattgttatggcgatgaaaggggttggtgcttcgcttggtcctcaattgatggctgagattggtgatgtttcccgttttacccataaaggtgctattactgcttttgccggtgtagatcccggtgttaatgaatcgggaagttatgaacaaaaagtgttccaacttcaaaacgaggctcatctgatcttagaaagactttatttcaggtaatggatgtcttaataaaaacacacccacaggatgatcctgtgtatcagttcatagataagaaacgggcacaaggcaagccttattatgtctatatgactgcaggtgccaacaagtttctaagaatctattacggacgagtgaaagaatatctttcatctcttccagaatcctaatcatcattataattctcagaccagcactggtgtggtggtcttattttgatacctccttttcaacctgtataaaattttcaatgttcttcaatttagccttgactttttatttgcagg

SEQ ID NO: 9752 - DNA, 1416 bp, unidentified
  source 1..1416: mol_type = unassigned DNA; note = element_f45b2c8
  misc_feature 1: note = core
  misc_feature 2..224: note = LE
  misc_feature 225..1241: note = CDS
  misc_feature 1242..1416: note = RE
  misc_feature 18..233: note = bridgeRNA
ctgatagagggtgggccgcacggcgcacggggttgcccgtagcgtccgagggcctggtgagcggtctcgagaatgccctgccaccttgagttggcttgcgaaggaagcggccgctcgctgggttctcgctgcggcgtggctcgaaagaggcgagagcatccaaccctcatcaggtctgtccgccgtggcatcaccacagcagacagccaatgaggagaaccatcgtgtatgtcatcgggatcgacccccacaaggggtcgcacactgccgccgtcctcgacgtcggcgaacagcttgttggggagcttcgcgtcgtcgccgaccgtggccaacgggaccggttgctgcggttcgcggaaccgttcacaccacgcacatgggccatcgaggcggccggtggtttgggggcgctgctcgctcagcagctcgttgctgtcggtgagaccgtgctcgacgtgccgcccaccttgtcggctcgggtgcggctgctcgatgtgggccggaccgataagacggacccgcacgacgcccgctcagcggcgatcgtcgcgctgcgccacagcaggttgcggaccgtcacggcggtcgaccacagcgccgtgctgcgcctgcttgcggaccgccatcgcgacctcgtcgcgcaacgcacccgggtcatctgccggttgcacgccctgttgtgcctgctcatccccggtggcctgccccgcctgttgtccgcccaacgggccgccaacgcgctgcgaggactgcgcccgctcaccctggtcgacatcgaacgcaagcgcatggcgggcgagatgctcaccgacgtgcgtcgcctcgacacccaactcgctgccatcagaacccgcatcgctgacgccgtcgagtcctccggcaccaccgtcaccgaggtatacggcgtcggccccgtcgccgccgccctcatcgtcggccacaccggtgacgtctgtcggttccccaccgccgggcactacgcccgctacaacggctccgccccgatcgaagcgtccagcggcccacggatccgtcaccggctcaaccctcgcgggaaccgtcggctcaaccacgcccttcatgtcgcggccatcacccaggtcagccacgacacgcccggccgcgcctacttcgaccgcaagctcgccgaaggcaagagccgcaaagaagccctccgagccctcaagcgccgcatcagcgacgccgtctaccgccagctcctcatcgacagccgccgctgattcagcgggcccgggaggacaacgggaacgactccaatggccagcgtgaccggctctgcaccctgacggccggctcttcggtcaagtcactcccggacccaccacgacgctacgcccagcgccacggcgctgcttcgacgcgcccccaaaccgactccttgacacaaacaggctt

SEQ ID NO: 9753 - DNA, 1159 bp, unidentified
  source 1..1159: mol_type = unassigned DNA; note = element_f466069
  misc_feature 1..2: note = core
  misc_feature 3..191: note = LE
  misc_feature 192..1091: note = CDS
  misc_feature 1092..1159: note = RE
  misc_feature 7..160: note = bridgeRNA
catgtatcttgccccctgagggaggccccaccgccccggttgccgggccaccacgcccgcgggattgatcggtagccacccaccccggcctccccgccgcacagtatcccggtcgtcaaagaccgcatccacatggaaggcccacagggtcgggtggccacctccctcaggttaccaaaaggagagagcccatgaccttcgccggcattgacgtcagcaaaacccacctggacctggccctcgtctccaactcccccaaacccacccgcctccgcttccccaactcccctgaaggccgtcaagccctcctcgccgccctcgcccaccacaaccccgcctgggtcgccctggagcccaccagcgcctaccacctccccctcctcaagctcctggcagaaaaccgcctccaggtggccctggtcaacccctaccacctcgccgccttccgcaaggccaagggagaacgccagaagaccgaccgccaagacgccctcctcctcgcccgctacgcccaggtctaccacgaagacctccgggcctacaccctacccccagaaaccctccgggagctcaaagccctggtgggctaccgggaggacttggccgggcgggaaaggaccatcctcaaccagatggaggcggcggagtgggcggggagcaaggaggtcctcgccctcctccagaaggagctggcctgcgtgaaggggcttctcggggaggtggaggccaggatccaggccctcctcgccaccctccccgaggccgaggtcctgatggccctgcccggggtggggccccaggtggcggcagcggtgctggccctcctgcccccagagctctggggccgggcgaagagggcggcctcctacgcggggctcatccccgagcgggaggagtcgggaaagagcgtggagaggagtcagctctccaaaaagggcctcccctcctgcggcgaaagctctacatgggcgccctggtggcggtgcgccatgacccggagatgcgggccttctaccaccgcctgctctcgcggggaaagagaaagaagcaggcgttggtggccgtggcccacaagctcctcaggcggatgatgggaaggctcagggagtactacgcaacccagctagatcaaggggtcgcttgacaggcaagacagtat

SEQ ID NO: 9754 - DNA, 1370 bp, unidentified
  source 1..1370: mol_type = unassigned DNA; note = element_f474d7c
  misc_feature 1..3: note = core
  misc_feature 4..75: note = LE
  misc_feature 76..1104: note = CDS
  misc_feature 1105..1370: note = RE
  misc_feature 1108..1358: note = bridgeRNA
tgctggtgtggacggcctctcatcccaacggcttgatgacgcgtcagcgtcgcagccacgtgagaggagagcccggtgaacattcccgtccggatcggtatggatacctccaagtcgatctttcagcttcacggcgtcgatgagaacgaggtcgttgttgtccgtcggcaatttcggcgagcagaaatgatccgttattttgagaggcttccgccggccctcgtcgccatcgagtcctgcggcagctcgcatcattgggcgcgcctcctgcagtcgttcggccacgaggtaaagctgatccctccgcagtacgtgaaggcctacgtgaagcgcggcaagaacgatgcggcagacgccgaggccctttgcgaggcggtcacccggccgagcatgaggttcgtgccggtgaagtcgaaggagcggcaagcggcctgcatgctgatgactgtgcgggagcgcctagtcagcgcaaagtctcagctctcgaacgcgttcaggagttacgcggcggaattcggcatcatcgggcccgccggccggcagaacgtcaacgcgctgataaagcgggtgctcgaggatgacacccttccggagatggcacgggatctgtttcgtttccaggcgcaagagtatgcggctgtcgaagcccgccttgctgagatcgagagaaaggtgatgaagtggcatcgcgaggacgacgtcagccgtcgtctttcgacgatccccggcgtcggtccgatcgggtcgaccatgctcagtatgaaggcgccgccgccagagacgttcagatcgggccgtgacttcgctgcttggattgggctgacacctaaggaccattcgacagggagccgacagaggcacggcggcatcacgaaggccggggattcagccctccggccaacccttattgttggtgcgaccgcgttactgcggcacatccggaagggccgccacaagcctacgccgtggctcgccgctcttctggagcgaaagccaccgaagctggtggctgttgcgctggctaacaagttcgcccgcatcgcctggcgcttgatggtgtccggcggcgtctacacccggccgctggccgccatgcccacctgatccagaattggcaacgacgagcgaagccgctcggcggatagcccacgaacttgcaggacgcagtagatggaatgaccgatcggtcgatacgcgcgagcttccgaagattacactggcacctaccatgtcgcccatgtgctaggagcgggcgtagcgaacaccatctcggccagcgggcttgctcgcgcaaacaggccggacatctgaaagcaagcgatcaggtcaaaagtctgctagcatcctgacaagcgggggccgtccacatc

SEQ ID NO: 9755 - DNA, 1749 bp, unidentified
  source 1..1749: mol_type = unassigned DNA; note = element_f47629e
  misc_feature 1: note = core
  misc_feature 2..75: note = LE
  misc_feature 76..1104: note = CDS
  misc_feature 1105..1749: note = RE
  misc_feature 1517..1746: note = bridgeRNA
tactgagatggacccgacgccctcccttcggggagactgcgtaccccttgttatcgaatggcatggaggcccatcatggaagtcgacgttctcggtatcgatctggccaagctcgtgttccaactccacggcgcgacgcgcaccggcgttgtcgtgcaccgttcgaaggtcagccggccttctttcctggagtcgattcggcgcttgagtccgaagctcgtggtgatggaggcgtgcagttcggcccaccactgggctcgggtccttcagcgccaggggatcgaggtccgcttgatcagcccgcagtacgtcgcgccgttcgtgaagaccaacaagaacgaccgcaacgatgccgaggcgatcgtcgaggccgccagccggccgtcgatgcggttcgtttcgatcaagaccgttgagcagcaggacctgcaggcactgcaccgacttcgtcaactgctggtccagcagcgcaccgcaatcatcaaccaggtgcgcggtgtactggccgagcgcggcatcgttgtcgctcagtcgcccacagcgttccatcgggccatgccgacagtcctggcgggccaggacgatgagctctcgcagttctgccgcggcctgctggtagaactgctggagcatctgaagtcggtcgaggagaagatcgacagttgcgatgcaagggtcaaggtcttcatggccagctcacaggcctgcaagaggatcggcgagatcgacggtgtcggtcctctcactgccaccgcgatcgtggcggccgtgggagacgccagcgagttcaagaacggacggcacctggcggcctggctcggcctggtgccgcggcagtactcttcgggagggaagtccaagctctacggcatcagcaagcgaggcgacacgtacctgcgaacgctgctcatccacggggctcgagccgtcttgcgctatgtcgcaggcaagaccgactcgcagagcagatggcttcagcaactcatcgaacgacgcggctacaaccgcgccgcggtggcggtggccaacaagaacgcgcgcatcatccaagcactattgagcagcgagcgcgcctacgtgcggccggccgcggtgggatcctgatggacgccgctcgtcacctgaagcgccgcttgctccccaggctcgaatgcgcccatgcgcattcgatgcctgtggcgagcgtgcgaggccatcgtgccggcctcaaggatgcgcttcgccgggtgctcgcccgttcggtgctcgcacctgcggtgctgcgctccgctgcggcctgcgcgcccgtccttgaccccgccacgaggccgagcagctcatgcagatcgaagcaatcagctgccgccaagtcgactcgccccgcgtcgaaagcgcaccaatctgcacggcgatccacacggcccgatttcgggtgcccatgctaagtgcttgtcagccgtggacttcggccgccgaagcgcaccaatccgcacaagaagtacgaaccgcatcggaaaggagatcttcacacccagcgcaggtttgcgtagcactaccaacgtgatgacgaaccggtcagaccagcatctcgggatcctgcttttcgtgccggctgagcaatcgagccgccaatctgctgaggacgagatgcgcgaatctcatcgaggctgcgggcatgtgaacgctgtgcccttcaagcgagccggatacatgcgtgcagaccacttcccatcaccacgtagggcttgcaaagggcgtcgggtccataca

SEQ ID NO: 9756 - DNA, 1326 bp, unidentified
  source 1..1326: mol_type = unassigned DNA; note = element_f485f3d
  misc_feature 1: note = core
  misc_feature 2..513: note = LE
  misc_feature 514..1311: note = CDS
  misc_feature 1312..1326: note = RE
  misc_feature 19..260: note = bridgeRNA
ctgtgagactccggcgcagttccgtctggggaccttgccaggctcgcaccgatgctctttgcccgtgacccaagaccggaccgacccgctgcggcggtgtccttcctggtgatctgtccgggtgaggagctcggtgccggcctgacgccgtttgctggcctgatcagaagcctgtccgcctcggcgtgacccatcacagtcctgccgcgcggtgtgccccagaccgacacccgagccaatccccccacacgctggaggtacggacatgctcgcagatgagctggacttcgtcatcggcgtcgacagccatcgcgacgcccacgcgctcgccttcgtctcggcgagacgggcgcactgctcgccgaggccgagcttccggcaagcgcgcccggctaccggcgcgcgctcgcgctcgccgagtggctcgcgcctgctggccgcctctgggcgatcgagggcacgggcagcgacggcgccggcctgacccgcttcctcgccggccgcggcgagcgcgtgctcgagatcgagcgcagggcgcgcgagccgcgtcgggcaggagcgaagtcggaccgcatcgatgcgctgagagcagcgcgcgcggcgcttgcgcacgcgcgcctggcggttccgcgtgcggccgggcagcgcgagccgctgcgggcgctgctgagcacacgcgaaggcgccgtcggtgcccgccgcgccgccctcaatcagctgcgcgcgctgctggtcacggcgccggagccgctccgcgcacgcctgcgcgggctgagcgaggcgcggttgcttgcggcctgcacgcgcctgcgcccagcgaccagccgccatcccgggcagcgcgggcttgcgatcgcgctccgggcctgcgcgcgccgcgtgcggagcaccagtgccgaggccggagagctgaagcgggagctcgagctgctcgttggcgagctcgcaccgcagctccttgccgaggaggctgtggggccgatctgcgccgcccagctcgttgtctcctggtcgcacgccgggcgtttcgcgagcgaggccggcttcgcccgccatgccggagcggcgccgattcccgcctcctccggccaggtcgtgcgctcccggctcgaccgcgggggcgaccgtcagctgaaccgcgccctgcacacgatcctcgtcgcacggcacaagcggcacgcgccgacgatcgcctacatcgagcggcggcgcagcgagggcaagagcgtgcgcgaggcgcttcgttgtctcaagcgcttcctggctcgccacctcttccgagtgctcgaggctggtccgttggcgacttgactctcatagaagcat

SEQ ID NO: 9757 - DNA, 1334 bp, unidentified
  source 1..1334: mol_type = unassigned DNA; note = element_f49a165
  misc_feature 1..2: note = core
  misc_feature 3..82: note = LE
  misc_feature 83..1048: note = CDS
  misc_feature 1049..1334: note = RE
  misc_feature 1074..1322: note = bridgeRNA
tgatgatgtggacggcctctcctcaacggcatcatagtgccaaggcgtagtcgcaggagcgccacaaagagggagaccgtccgtgaagaagtttatcagagtcggtgtcgatctggccaagaattattttcaaatccacgcgctggcgagcgaagatggcacccccgttacacgcaagttgacgcgcgtgaagatgcgcgagtttttctcgcaaatcgagccgggtctcgttggcatggaggcctgcggctcggcgcactattgggcgcgtgaactcaaggcgatgggacacgaagtgctgttgatgccgccggcttacaccaagccctatgtcaagcgcggcaagaacgacgccgtcgacgcagacgcaatctgcgaagcgatgtcgcggccaggaatgcgcttcgtgccgatcaagagcgcggagcagcaggcgatgcttcgcggccatctttcggaattcggcattgtcgccgccaaggggatcggccgtgtcgacgagttgctcgatctggccgaaaacgatgcgacgcttccgaacgccgccagggcgagcgtgaaggttctggctcaggctcttgaggggctcgacaaagcgatcggcgatctggagaagcaaatctccagcgcccatgcgcaaaatgagatgagccggttgctggacaaggttcccggcatcgggaagctcatcgcttcggtgatcgcagccagcgtgccggacccgagcgtgttcaaatcgggacgcgattttgccgcctggctcggcctcacgccgaggcaaaactcgagtggcggcaagcagacgctcggagccataaccaagcagggcaaccgatacataaggaagatgctggtcttgggggcgacctcgctgctcaacgtcgttggaaagcgcaaaggcgccttgcgcgactggatcgtcgggctgctggcgaaaaagccggcgcggctggtcacggtggcgctagccaacaagctggcccggatcctctgggcgatgatgaagaccggcgaatgcttccgcactgagacgtttacaaaggcgtgaggaaacggcctgtcgccacgagtagcgttcacataggagattcataggttcgagtttggcgagcactaaacagacgtgatgaacgacacggtcgcgaccgaagattgggaacaacccgtttcatgccacgagtgaaaagctcgttctgatgatagggatcctgatcgtcggacttcatcaaggcccgcggacacatgctccgcaccagcaggccggacatatgaccgcagccgaccaaatcgttcgaaacatcaaaaaagtgcttgccatcggggccgtccacata

SEQ ID NO: 9758 - DNA, 1600 bp, unidentified
  source 1..1600: mol_type = unassigned DNA; note = element_f49ec82
  misc_feature 1..3: note = core
  misc_feature 4..270: note = LE
  misc_feature 271..1482: note = CDS
  misc_feature 1483..1600: note = RE
  misc_feature 13..290: note = bridgeRNA
tttgctaatataagattacaggcaaggcgcggcagccagccgtgtcttgttctatctcatgcctaagctacaataaggggagtaattggcctggcaaacttgactctggactatctacgtccgttaataaaactgtcagccatcctcttattgcagcgttcggtttaagcaggttgggctttgcgctcggtttaccaagcaaatagaatcggcaatgagaaaacgatggtcgccacattacagatatttcttttgcttggaggaatgctaatgaatgctgtaggaatcgatgtttcaaaagggaaaagtatggttgccgttatgcgaccgtttggagaactcgtggtaaaaccgtttgaagttcaccacactgccaatgagcttaaagaactggcagatcttctgcgtaacctggacggcgaagttcggattattatggagtttacaggtcgttattatcagcccatagcccggtacctcgttgaggccggtttctttgtgtgtgttgtccatgcgaaactcatacatgattttggaaacaactcaattcgtaaagtcaaaaccgatagagcagacgcaatcaagattgccaactatggcctttccaattggatttcccttaagcgatatacgcctgaggatgaaacccgattgctattgaaaacctgtaatcgccagtataatcagtacctgaaaatgaaagtggctctaaaaaacaatctggttgcaatccttgatcagactttctccggcttgaatgagatgtttaccagtcctgtgagagcagatgggcacgaaaaatgggttgatttcgcagaaaaattctggcactgcgaaatcgtttcttctatgagcaaaacgaaatttatctcccagtacagtaaatggtgccaaaagcatggatataatcgcagcgagagcaaggcaactgcgctctatgagcttgccttaaatcaggttgctacgttgccgcctacggaacaaacgaaggatttaattgttcaggccatctcccaactgaattttgtctctgtctcactggctgagttgcgcaggcagatgcaacagttggccgcatctttgccggagtaccctgtcgtccttgccatgagtggtgttggagagactttgggacctcaactcattgcggaaattggagatgtgcgccgcttttcccacaagggtgctctcgtagctttcgctggagtagatgcgcctccgtttcaatccggtgtctttgagtccgccagtcgaagcatatctaaacgtggctcaccggcattgcgtaaaaccctctttcaaattgtgaaaagcattctaaaaaattctccatctgatgatgctgtttaccagtttcttgacagaaagcgtgcggaagagaaacattattacgtttacatggttgctggctgtaacaagttcttgcgcatctattacgctcgtgtgaaagaatatctggtctctctggaagtagcatcttaatctaaagcgatcctgcttcatttggccagcgcaaaaatctcgggtgcggtggcttaattctttataccatttttgcttcctaaaatttattccttcccccttgactttcctttgcagg

SEQ ID NO: 9759 - DNA, 1444 bp, unidentified
  source 1..1444: mol_type = unassigned DNA; note = element_f4ac307
  misc_feature 1..4: note = core
  misc_feature 5..234: note = LE
  misc_feature 235..1428: note = CDS
  misc_feature 1429..1444: note = RE
  misc_feature 1..238: note = bridgeRNA
ccccgttacctttttcgtggctcctgagcaaggggcgctggtcgccaggctcggcatgacttatgcccccagtcgaactcatgatccggggggtggtgtcaccgggtttggcggcatcgagggaccgctgatagggacacggccgcctgcgagggtaggtctcgtcgtaacgtggctgccggccgtcgatgcctgactggtagaccaggaacgacgatacgaaagacacgatgcatgaacaacgagtacagcgtgtttcttggcctggacgtcggcaagaccgaccaccacgccgtcggcttggattctgtcggcaagcggctgcacgatgcgccgctgcccaacagcgagccgaaactgcgggcgatgttcgacaagctcgccgcccacggaccagtgctggtcgtggtcgatcagccggccacgatcggcgccctgccggtcaccgtggcccgggcctgcggacacgaggtcgcctacctgcccggactggcgatgcgccgaatcgccgacctgtatcccggcaacgccaaaaccgacgcccgcgacgccttcatcatcgccgacgccgcacgcaccctgccacacgcgctgcgccgcctcgacgtcggcgacggcgccctggccgagctcgacgtactggtcggctacgacgacgacctggccgccgaggccacccggctcagcaaccgcatccgaggactgctcaccggcatccacccagccctcgagcgtgtcctcggccccaaggccgcccaccccgccgtcttggagatcttgtcgcgttgcggcggaccgatcgggatcggcgccgccggacgccgcaaactcacctcgatcgccaccaaatacgcgccacgcatgggcgcgaaactggtcgacaacatcctcaccgcgctcgacgaacagaccgtcgtcgttcctggcaccgccgcggccgacaccgtgctgccccgtctcgctgaaagcctgaaaaccgtgctgcagcagcggaaaacggtcgccgccgaggtcgaggagatacttgatgcgcaccctcttgcccaggtcctgatctcgatgcccggcatcggcgtcaggaccgcagcccgcatcctcctcgagatcggcgacgcctccgcattcaagagcgcgggccacctcgccgcctacgccggcatcgcaccggtcacccaccactccggcagcagcatccgcggcgaacaccccgcccgcagcggcaaccgcaaactcaaacgcgccttcttcctcgccgccttcgccgccctgtccgatcccaccagccgcgcctactacgaccggaaacgcgccgaaggcaagaaacacaacgccgccctcatctgcctcgcacgacgccgctgcgacgtcttgttcgccatgctccgcaccaaaaccccctaccaaccaccagagctccgcaccgcttgacaaccacatagggaca

SEQ ID NO: 9760 - DNA, 1781 bp, unidentified
  source 1..1781: mol_type = unassigned DNA; note = element_f4cb833
  misc_feature 1..2: note = core
  misc_feature 3..71: note = LE
  misc_feature 72..1109: note = CDS
  misc_feature 1110..1781: note = RE
  misc_feature 1558..1768: note = bridgeRNA
tgttggggtggacggccccacggcatcgcgtgccaaagttgggttgtcagaaaccaacaccggagccgtccatgtcaaagattaagcgcattggcctcgacacgtccaaggccgtcttcaccctgcactgcgtcgacgaagatggtaaggcggtgctgcgaatcaatcttcgccgcgcgcagatggtcaccttcttcaagaacctggcgcctgccgagattgccctggaagcttgcggcagctcccatcactgggcccgggaactgaccgctctcggccacgaggtgcgtctgatcccgccgcaatatgtgaagcctttcgtgaaacgcgccaagaatgaccgtaacgatgccgaggccatttgcgaggccgccgggcagccggggatgcggtttgtgccgatgaaggccgccacccaacaggcccagggaatggtcctgaaagtgcgcgagacgctggtcaaccagcgtacccaactggtcaacgcgctccgcggtcatgctgccgaattcggcattatcgccgcgaaggggatcagccagatcaatcctttacttgaagagattgaggccgcgagcgccatcccgtccgacgccaaggacatgttggcactgctcggtcaggagatcgaacaccttgacacaaggctgaacgagattgatgtgaagttgagagccgcgcacaaggcctacgcgctcagccagcggctggccacaattccaggcgtcggtcggatcatcgcgctgacgttcgcgaccgagatcgatccgatggcgttcgaatccggccgtcatctggcggcctggatcgggttgacgccaaaagaacattcgaccggaggaaagcaacgcatgggcggtatcagccgcgccggcaatgaacggttgcgccgcttgcccgtgaccggcgccaccgcggtgatccggttcgccatccggccgggcaataagcacgcctgggaatggctgctgaagctgcttcagcacaagccgcgcaaacttgtcgcagtcgcgctggccaacaaaatagcgcggatcgcctgggcgatgatgaagagcggcgaggcctatcggcgtccgacggccatcgccgcgacggtcgcggcatgaccaacgtttcgtcacgtaacgtcatggagtggagccatgtcccgcccctcgatcagtgatgccccgatgaccggcgccgaacgccaggcacgttaccgtgctgcgcacgccgatggcgccccggtcgttcgcatccgccgtccggccgaccgacgcagccggatccagcgctggcgtgatgccgtcagcacgctgacaaacctcctgacggagtatgccagatggctggaagccctgccggacaatcagcaagatggcaccacggccgaggcgctacaggcgattgtcgagcttgatctatctgagcttcaggcgatcgaaccgcctcggggtttcggccgtgattgaccgaccaaatcgcccgaccggcacaaccgggatgggccacgaggacgcgtggcgaggtaatcggtcacagccgatcaccgcctgagccgcgcgtggatgccggggtgcaagagctgacagagatgacgatcggtcgaatcgacgatccggagaacccgttggaaccagtggcctcgaggtcgttggattgtttgggaccggatcgcggattccatctgggccagcggtcatgatgccgcgtcaacaggccgaacacatgatcgcagtcgacccacccgtcaaaattctcttcgaagctcttgaacccaaggggccgtccacaca

SEQ ID NO: 9761 - DNA, 1503 bp, unidentified
  source 1..1503: mol_type = unassigned DNA; note = element_f4ce3c9
  misc_feature 1..2: note = core
  misc_feature 3..257: note = LE
  misc_feature 258..1310: note = CDS
  misc_feature 1311..1503: note = RE
  misc_feature 34..225: note = bridgeRNA
ctcctatgtttgttttcaaacaaaaaaaggcaataaattagtcttttaagtgaaaaagagtgagagccatgggctataaaacagcttattaagtatgttggcgcgaagatatggcctcactcttttttaccctttagagtctgaacagaatgtaaggaatacggcaagtccgtatagccagaatatccagccaggagaatagacgaagaagggttattcacttgaataacattatttattcaatctattcaagaacaatgacgacaaacattttaaaacaggttgcgggtattgacatcgcacaaaaagaacttgtagttacattaggcaaaatggatgagcaaactgatattgaactgtttgcttacaaaacgttcccaaacaatgttaaagggtttaaaagtttaacggaatgggtatcaaaggttggtgttacacatgtacaatgccgatttgtgatggaagccactggcgtataccatgaatccctggcgtattttctgtttgacagcggttatgaagtaagcatcctactgccgaacaaaatcagcaactatgttaagactttagacattaaaaccattaccgataaaacagcatctcaggctattgcacggtttggattggaaaggaagctggacttatggaaaaagcctttaaaggtattcaaggacatgagacagttaacgagagagcgcggtcagctaatagtagaacggactatacttaaaaatcaattacatgccgaacaggctgaagccatgcctaattatagcagcatcaaccgggtaaatgagcgtatagcattgcttgataaacaggaaaaggcaattttggtagaattagctaccattattaagcaggaaaagaaattagccgaccaagtaaaaaatatcacttccataccgggggtaggaaagataactgctgtaattgtgcttgcagaaactaatggattcgaattgatccgaaataaaaaacaattggtaagctatgcaggcctggatataaaggagaaattatcaggtacatcggtaaaaggtaagcccaagatttctaagaagggaaacaagcatttgcgacatgctatgcatttaccggcactatctgctatacagcataacgagcgttttaaagcgatatttgtcaggttggtatcaaagcacggtattaaaatgaaggccgctgtggctatacatcgaaaattactggaattgatctatataatatggaaaacgaataaaccttttgacaaaaattatatgcaaaccactataccatttgatcagcaacccggtgaaaccaattaaaaaattgttattgttgtttgtggtgtgggaatgtgggaaactccttagagttttccatatttccacgcctttgccctatgacgggaattaaatagggcagccataaaaaatgaagctgccctaaactggctggcttttgccgccttaatatcaaagataaaaaaataaaattatttggattacaacacagaat

SEQ ID NO: 9762 - DNA, 1323 bp, unidentified
  source 1..1323: mol_type = unassigned DNA; note = element_f4d0634
  misc_feature 1: note = core
  misc_feature 2..322: note = LE
  misc_feature 323..1099: note = CDS
  misc_feature 1100..1323: note = RE
  misc_feature 1105..1319: note = bridgeRNA
taatgaaatggccagcccgatcccagcgaccgttctacgataggaagttcggtcgaacgtaaaggagggcgccatgaacgaggtcacgctgatcggtatcgatctgggcaagcatgtttttcatctgcacgcgcaggatgcgaagggtcacgaggtgttccgcaagaaactttcgcgcgcacagctgattccgtttttcagcaatctgaaggcggttaccgtggttatggaggcgtgccccggcgcgcactggctcgcacgcaagctcgatgcaatgggtcaccaggcaaagctgatttcggcctagtatgtgcgaccttttgtgaagagcaacaagaacgactacatcgacgccgaagcgatctgcgaagctgcatcccggcccgccatgcgctttgtcgagccgcgaaccgaagctcagcagctactggcagccttgcatcgggcgcgtgaaggcctggtgactgaacgcacggccaccatcaaccggatccacggcgtactgcttgagttcggcatcgtcgttcctttatcgagagccacgctacgtcggttgcctgatgtgcttgcggttcacgatctgccgccgcggttaatccagctcatccaccggcttcatgctcattatcggtacctcgaccagcagattgacgatgtcgagcgcgatctgacttcgcaactacacgaagacgagaacgctgcccggttgctgtcgattcccggtatcggaaccatcacggcgagccttctcgcgtcggaagtcggcaacgtcgcgcagtttgctggcggccggaacttcgcagcctcaatcggactggtgccaagacagcacagcacgggcggccgaagtgtcctgtgcggaatcagcaagcgtggcgacaagcacctgcgccatctgctcgtgcaaggcgcgcgcgccgttatccagcgtgcagaaaagcgtactgaccggctcggggagtggattcgctcaatgttgagacgacggcattcaaacgtggtcgcgtgtgccgtcgctaacaagctcgcgcgcatcgcctgggcggtgctaaccaggcacaccacatacgatgccgcacgcctgaagctcgcggactgatttatcgcttacccaaccaggttttgcgactgctggcaatctgatgatccaacggcacagcgaccggacgaagaacctgacaagttgtacagctcacagcagctgccgacattatgaggatcgaccggtgcgattttcatcgcggaacatggattccggatagatttgcgcaagccacgaggacgtcggaaccagaggttgcaaaattcgggctggccatagat

SEQ ID NO: 9763 - DNA, 1412 bp, unidentified
  source 1..1412: mol_type = unassigned DNA; note = element_f4d37e1
  misc_feature 1..2: note = core
  misc_feature 3..80: note = LE
  misc_feature 81..1127: note = CDS
  misc_feature 1128..1412: note = RE
  misc_feature 1126..1400: note = bridgeRNA
tgttggggtggacggctcccaacggcatcgcaatgtgccagattgagcttgtcgaaagactcaaacgagggaggccgtccgtggagcagattacccgtattggcgtcgacacgtcaaagaatgtctttcagttgcatggcgtgaacgcggaggaaaagcccgttctccgcaagaagctgacccgcacgcagatgcttgctttcttcaaggatctgccaccaaccgtcatcgcgatcgaagcatgcggcagcgctcatcactgggcgatgcaccttggctcactcgggcatgaggtgaaattgatcgctccgcagttggccaaaccgtacgtgaagcggggaaagaatgatgcggccgatgccgaggccctctgtgaggcgatgagccgcccgacgatgcgcttcgtgccggtcaagaccgcggaccagcaagcggctctgatgctggtaggtatgcgagacaggctggtccggaacagaacccagctggctaacgcaattcgcggttatgccgcagagttcgggcttacggcagctagaggcatatcgaggattgagctgcttcttggcgatatcgcctccgatggtagtttgccggagctatcccgtgaactatttgcgtttcatcggcgcgagtatgagctgttgcaggcagaaatcgaaaaagtcgaagccaaactcatggagtggcatcgcaacgatgaatgtagccagcgtcttgcccggataccgggcgtaggcccgattggcgcatccctgctgatgatgaaaacccctgatcccagactgttcaaatcggggcgtgacttcgcggcctggattggtctcacgcccagggatcattcaacggcaggtcgggctcgtcccggcggtatcacgcgcggtggagacgaacacttgcgaagcgtgctggtcgtgggcgccacctccgttctcaaaaatatcagggcggggcgcagcaagaactcgtcgccctggctcgtcaagcttttggaacggagccagaagcccaaacttgtggccgtcgctctggcgaacagaatcgcacgcatcgcctggaagctgatggtgagcggcgaaagctacagggcgataaccgcccaaccagttctgaaaaaggcagcgtgagagattggcctgtcatggttagcaatcatagaatgctaccgtgctgagctgatgtgggatcttgcaagaaacgagtaggtggtttgatcgatcgatccgtaacgtgagacactccgttagagtcagtggctgtcaaacagtcgccttcctgtttggaactcacctcgcggaaaccatcttggccagcggctatacacggccgcaaagacaggtcggacatatggtagcaagcgatctggtcaaaataaccgctcaaacgtcttgcaagagggagccgtccacata

SEQ ID NO: 9764 - DNA, 1539 bp, unidentified
  source 1..1539: mol_type = unassigned DNA; note = element_f4d54fd
  misc_feature 1..2: note = core
  misc_feature 3..253: note = LE
  misc_feature 254..1417: note = CDS
  misc_feature 1418..1539: note = RE
  misc_feature 3..233: note = bridgeRNA
cttgtatgattattctatacagaaaatcatactctcctttctgttttttactattttgtgattataatagactcagacctgtggactttatattaatttttctgtagcttgactacttgaaggagtttattgccactgttttatctgaatcatttatagttggatgtgcctagagctcttatgtcaatcaagtctatgatgataaaactaggtggattatcacagcgtcaatccagttgaaaggagatgtaccgtgatttaccttggtattgatatcgctaagagattgcatgttgccgctgcaatttcttcagacggcgaaatcatcatcgagccctttgaattctcaaatgatcatgatggcttttcaaagcttctttcttcacttcacaatatccagaaagaatatctcatcatcggtcttgaatcgacggctcactacggcaacaaccttgttgtatttctgttctctcatgggtttaacatcactgttatcaacccgattcaaacctctgttatgcgtaaaaacaacattcgaaaaactaagacggataaagtggatgccttgcttgtcgctaaaaccttactgctcaataacttcagacttgttaccaagcaggatattgacctcataaggttgaaggatctttgtcgatttagacaaaagctcatcaaagcaagaacatcagtcaaaattcaaatgaccacctatatcgaccaagtcttccctgaacttcagtatttctttaagtctggaattcaccacaaagcctgctatgctcttttgaaagaggcttcgtcacctgaagagattgcttccatgcatatgactcatctggctgctcttcttaataaagcttcacacggccactttaagaaagagaaggctcaagaattaagagttcttgcacagaagtctgtcggtactggtaacaaaacactatctattcaaatagcccaatccatctcacaagttgagctgtacgacagacaattaactgaggtgcatctagaaatcgaaaagacgatgaaatcactaaattcagtcataatgagtattccaggtatcggatatttaaatggtgccatgatacttggtgagaccggaaacatcacaagattttcagatccttcgaagttactcgcatttgctgggctagatccatccgtttatcaatcaggaaactttaaagctgcaaatacacgcatgtcaaagcgaggttctagagtacttaggtacgcattaatcaatgctgcacataacgtcgttctcaataacaaaacgtttaaagaatactatgacctcaaaatttcccaagggcgctcacactacaacgctttgggacactgtgcaggtaagttggtcagaatcatatacaagatgctaacctgcaatcttgagttcaacttagaataaacactcaaatggatttccaagaagcatccatttgagggatgcttagttaaggtcggccatctgctgatatcaaatgtttggctaaaatctcgccaatttatacttgactattcatagttggt

SEQ ID NO: 9765 - DNA, 1368 bp, unidentified
  source 1..1368: mol_type = unassigned DNA; note = element_f4d7492
  misc_feature 1..3: note = core
  misc_feature 4..86: note = LE
  misc_feature 87..1118: note = CDS
  misc_feature 1119..1368: note = RE
  misc_feature 1097..1355: note = bridgeRNA
tgatggggtggacggcccccgctgaacggcatcgagtgcctaaagtggtcgtcgttgtatgacgccacagagaggagccgtccgccatgcaagttaccaccgtcggtcttgatcttgcgaagcgcatatttcaggttcacggcgtcgatgccgccggcaaagttgtgatccgccgaaggcttcagcgatcagagatcgccgccttcttcgccgatcttccggcctgcctggtggggatcgaagcatgcgctaccgcacatcattgggcccggctaatcggagcatctggccatcaggtgcggctgatccccccgtcctacgtcaaaccctatgttcgtcgcagcaagaccgatgctgcagatgccgaggcgatctgcgaggcggtcgggcgaccgagcatgcgtttcgtaccggtgaagtccgcgcatcaacaagccgcgcttttgcatcatcgagcgcgcgacctattggttcggcaacgaaccatgctgatcaacgcaatccgcggtcacctcggcgagttcggcatcatcgcgccggcgggccggcaccgcgtcgctgacttattgaacctgttgcagggtgctgacgatgctgaggtaccagctttggcgcgagaggcgttgcagagcctgttcgccgagctgagcgcgctcgagatacgcatcaaggtggtcgaagcggtgatcatgcgcgagcacaggtcgaacgcggtgagtcggcggctgacgaccattccggggattgggccgatcactgcttcggccctcgccggcaccatcgcggatccttttgctttcaagtcaggccgcgaactcgcggcatggattgggctggtgccacgacagcactcgagcggtggcaagcagaagatgggccgtgtgtccaaacagggcgatcgctatctgcggcggttgttgaccgtgggtgctacagcggtcatgcggcggctgcccggcaagacagatgggctttcgctgtgggtcagagcgctgctggatcgacgtccgttccggttggtctcattggcacttgccaacaagatggcccgcattgcctgggcgataatggtgagaccagagacctacaaagcttcagcaatgaccgccgcggcctaaaacagctgcactaacgaagccgatcgcgagggtgacacggagctgatgtaaatcggtcgtgaccgaggattgggaaacccgataatggggcggggttcaaagcccgcggagttgatagggacccaatccgcggatcgcatcagggccagcggccatgcgcgccgcgtcgaacaggccggacacatgtctgcacccgaccgagcggacctcagcgaaagaaatcccttgcgcggtgggggccgtccacaca

SEQ ID NO: 9766 - DNA, 1520 bp, unidentified
  source 1..1520: mol_type = unassigned DNA; note = element_f4d9b3d
  misc_feature 1..3: note = core
  misc_feature 4..200: note = LE
  misc_feature 201..1241: note = CDS
  misc_feature 1242..1520: note = RE
  misc_feature 3..220: note = bridgeRNA
cttatattatatttagtgcagttagctactgccaaagcccaagtgatacacttggaataagccactgtggattagtttattttctccaatcgcttgacgatttctgaaaggctctaaccacagctttttgtttcaatgggtaatgagtttgataacgcaacaacgttttatctcctataaggtaacaaggcaaaaagttcgtggataaccaagtgtgcttgactatcttatatggaggtacttctatgctttatgttggcattgaggtcgctaaatacaaacacgatgtagctgtcttgaacgaccaaggaaaatgggttctcaaaccactcactttttcaaatagtcgtgccggttttgaaaccttactcaacaccctcagtcagttaaatcaagactaccttgtcgcacttgaagatacgggacactatgcctttaatctcttgcattttcttcatgaacaagaaatcacaacctatacctacaaccctcttctcatcaaggaatttgccaagtcactgtcacttcgtaaaacaaaaacagataagaaagacgctcgggtcattgcacttaagctgctggcagaccctaaacgggaacaatttcgtcatgacaataaacacgaagagttaaaaattctgaccagacatattaatcgtctcaaaaagaagcagtctgattggaaagtccaatacactcgttgcttagacattatcttccctgagctagacaaactcattggaaagcagtctgattatgcttatgagctcctatcacgctatcctaaccctcagaaaataagtgtggctgattttgaacagttactaaccatcaaacgactgactgtcccaaaaatacaagatattctcaaggtcgctcctcattctatcggaacgacttcgccagctcgggaatttgagctaatcgaaattattgagaatatcaagcactataataagctcatcactaaagctgaaaatagagtggatgagctgatggctgagatcaactcggtcatcactacagttacagggattggcaaccgactagggtctatcattttagctgaaatcagaaatattcatacttttgatagcccagctcaacttcaagcttttgcaggtctagaaccctcaatttatcaatcgggccaagtagacctttctggaaaaatggtcaagcgagggtcaccacatttacgttgggctttaatacaagctgccaaatcggtagcccgttagtcaccagcttttaagaggtacctgagaagtaagttagaacaagggaagcactacaacgttgccatcactcatatcgctaaaaaactgatcagattaattttctatatcctcaaaaacagctgtccctttgacgaaagcaaagtaagataaaacctaaaaacacactacttaaccttgaaaaattttggctatcgtcaaggtcttttcgttaggcaatcaaactctagtatcgaaacaaaaataaagttaggcaagtgattgacttttcttatagtttgt

SEQ ID NO: 9767 - DNA, 1447 bp, unidentified
  source 1..1447: mol_type = unassigned DNA; note = element_f4db548
  misc_feature 1..2: note = core
  misc_feature 3..229: note = LE
  misc_feature 230..1429: note = CDS
  misc_feature 1430..1447: note = RE
  misc_feature 9..230: note = bridgeRNA
ccgttacatttattgggtccccgaaggccggggatttggtcgctgaacccggtatgactttctcgccctgtcattgatgatccggggggtgttgtcgccgggttcggagacacttgctgaccgctgatagggacacggccgggcgatagcgtccaggtctctttgtaacgtgggtgccggcatcgggtgtcgtgactgcggccatatggtggtgcaaaggagcgccggtatggaacaggaattcgacatcttctgcgggctcgatgtcggcaagagcgaacatcatgcaaccgcgctcaacgccgccggggagcgggttttcgacaaaccgctgccgcaggacgaagcacggctccggatgctgtttaccgcactccaggagcacggacaggtcctggtggtggtcgaccagcccaacaccatcggggcgctgccggttgctgtggcccgggattgtggttgcgaggtggcttatctgccgggactggccatgcgcaaagcggcagacctctacccgggaaagtccaagaccgatgcccgtgacgccttcatcatcgcggccacggcgcgcgccatgccgcacactctgcgcgcggtcgaccgtgacagcgaggtcctctcggcgctgaaggtgctctccggatttgatgaggatctgacccacgaatgcacccgtgcgatcaaccggctccggtccctgctgctgcagatcttcccggccctggaacgggcctttcccggcaccgtccttacccgttccctggtcctggaaatgctgatcagatacgcgggcccgaccggtcttcgtgccgcgggacggtcgaatgtgctgcgctgggtccgcaaccacagccgcaaagacccggccgcgctcatcgacgccgtgttcgccgccctgggcgagcagacggtaaccgtcgccgggaccgaggcggtggagctggtcatcccgcgcgtcgccgcccagatcaaggaactcaaacgccaacggaccatcgtggccgaagaagtcgaaaagctcctggacgacttccctctttcccgggtcttgatgtccatgccgggagttggcatcaagaccgccgccacgatactcctgaccatcggcgacgggagcagcttccgcacctccggccacctcgccgcctacgcgggcatcgcaccggtcactcgacggtccggaacgtccatccgtggcgaattccctgcccgctccggcaacaaggaactcaagaacgcactcttccgatccgcctggatcgcctcctgccacgaccccgtttccaaggcctactacgaccggaaacgcgccgaagggaagaaacacaacgccgccgtcatttgtctggcacgccgccgctgcgacgtcatccatgccatgctccgcaacggcacactctacgaggaaaaagctccccaaacggcttgaccaaaagcatagggacac

SEQ ID NO: 9768 - DNA, 1456 bp, unidentified
  source 1..1456: mol_type = unassigned DNA; note = element_f4e09b6
  misc_feature 1..2: note = core
  misc_feature 3..220: note = LE
  misc_feature 221..1435: note = CDS
  misc_feature 1436..1456: note = RE
  misc_feature 7..217: note = bridgeRNA
ctaatggctctcgagcagtcgacggaacagactgctctccgagccaccggcgggtgagcactcaagcggccaggaccacgagtcctaaagctagatcgtgcccccgccgggaggcgaggagccgacggctggtgggatgtcgtgccgatagagcactgatccattagggcgccgcgtactcctccaggctcgaagttgtcgccgaggggaaggaggatgcgtgatcttcgtcgggatcgactggtcggaggcccatcacgacgtctgcgtgctcgacgtcgaggggcgggtggtggccaagggacgggttccggagggggtcgaagggttggcccggctgcacgtgctggtgggctcacacgccgaagagccatccgatgtcgtggtcggcatcgagctcgaccgcgggctgctggttggggcgctcgtggccgccgactacgaagtgcacgccgtgaaccccctgtcagtcgaccggtaccgcgaccgccaccggacctcgggggcaaagtcggaccccggagacgccagggtcctggcggatctcgtccggaccgaccgccacctgcaccggaaggtggccggggacaccgagctggcggaaggggtgaaggtcctcgcccgagcacaccagggcctgatctgggcccgccagcggcatctgaaccagctccgcaacgccctccgcgagttctacccggcggcccttcaggcgttcgggaccgacctggcctcggcagatgccctggccgtgctgagtgtggcccccacaccagccgagggacgatccatctccagtgctcggatcgctgcagcgctgaaacgagcaggtcgccgtcggagggtgagcgagcgtgcgagggagatccaggcggcgcttcggagccctcagctcgaggctccggaggtgctgaccagggcctacggcgaggtggtgcgctccaccgtgcgcatcgtggcggagatgaccgagcaggtcgagacgctccagcgggagctggaagcccgttttgaggaacacccggacgccgagatccttcgcagtcttcccggactcggctcggtcctcggcgcccgggtcctcgctgagttcggcgatgaccgaacccgctacgccgatcctaaggcccgcaagaactacgcgggcacctcgcccatcacgaaggcctcggggcgctcgagggtcgcgctggcgcgcttcgctcgcaaccgccggctcgccgacgccctggacatgtgggcgttctgctctctgatgagctcagacggtggacgtcgctactacagcgcccatcgggcgaggggaaagacccatcgacaggcactccggtccctcgcgaatcgatgggttggcatcctgcacgggtgcctgcggcaacgacagctctatcgggaagacgtcgcctggccgacctccgcggaggttgccgcttgacaagttaggaccgtgggatgt

SEQ ID NO: 9769 - DNA, 1169 bp, unidentified
  source 1..1169: mol_type = unassigned DNA; note = element_f4f69e2
  misc_feature 1..2: note = core
  misc_feature 3..204: note = LE
  misc_feature 205..1140: note = CDS
  misc_feature 1141..1169: note = RE
  misc_feature 39..214: note = bridgeRNA
cttgtatgtttaaagacactttaattacccgcccaaaggcgggtagactttaaccgagttgtacctgacgccacagcccgtttcccctctgggacaacaagcccgcgggagagcttatggcgtagcgtcagttttcctgttaacccgaacagctgccagggcggcatcagccagcccgtatcttacaaggccgggagacttgaaatgactgaacatgcaaccgtcggtatcgacattgccaaagacacttttgacgtattcatcgactcaactcgtcagcttctgcatctggataacacaccggaaggccatcagcagttgctgagtgcgctctctgccatcaccgtcaagcttgtcgtgatggaggcgactggccgatatcactcattgctggccgccacgcttgagttggccgggttacccgtggccgtggtcaatccacgccaggtgaaaaacttcgctcgtgcgttagggactctgtacaaaaccgaccagaatgatgcccgtgtcatctgcgagtttggccggagaatggagcccgaagtccgtcccacaccggacgaacagacgcagcgtctggccgggatggtgacccgccgtcgccaactggtcgataacaggaccatggagataaaccgctacaaaagctgcgatgatgtggtggtctcagtgggcatcaagcgacatatcgactggttgacggctgaaatccgggatgcagatgacgacatcgacaggcaaataaaagtgatgccgctgtggcgggaaaaggcgacgctgttggaggaagtcaaaggtatcgggccgacaacgatggcggtgcttctggcgatgttgccggagctggggacactgaatcggcacaagataagtgcgctggttggtgtgtgtccttacgcccacgacagtggaaaaatgaaagggaagcgaagtatctggggagggcgaagtgcagtgcgttcagcgctgtacatggcgaccttgtcagcagtgcggtacaacccgacaatccgggcgttctacgaacgcctgatagggcgtgggaaagcgttcaaggtggcggtgacggcttgtgtgagaaagctgctaactatcctgaatgcgatgctgcgggataataaaaaatgggtgacaaattaatcatcacccgttgactttaaacacagctg

SEQ ID NO: 9770 - DNA, 1472 bp, unidentified
  source 1..1472: mol_type = unassigned DNA; note = element_f4fef07
  misc_feature 1: note = core
  misc_feature 2..231: note = LE
  misc_feature 232..1455: note = CDS
  misc_feature 1456..1472: note = RE
  misc_feature 1..235: note = bridgeRNA
ccgttaccgttttcgcggctcctgatcaagggggctcctggtcgccaggtccggcatgactgatgcccccagtcgagcgcatgatccggggggtggtgtcaccgggcttggtgcatcgctggatcgctaatagggacacggccgcccgagtgcaggtctcgtcgtaacgtggatgccgaccaccggtgcgtgactggtgaccaggaccgacgcggcgaaagggcctggtatatggcgtgtgagcacggttacggcgtgttccttgggttcgatgtcggcaagggcgagcatcacgcggtggccctggctccggacggtacgcggttgcacgatgcggcgctgcccaacagcgaacccaagctgcgggaggtcttcgacaaactcgctgaccatgggcgcgtgctggtcgtggtggatcagccggcctcgatcggcgcgctgccggtggcggtcgcgcgggcgtgcgggcacgacgtggcctacctgcccgggctggcgatgcggcgtatcgccgacctctatccgggcaatgccaagaccgacgcccgtgatgccctggtcatcgccgacgcggcccgtaccctgccgcacacgctgcgccaggtcgatctcggcgacgacacgctagccgagatggaggtgctggtcggctacgatgatgacctcgccggagaggccacgcggttgtcgaaccgcatccgggggctgctgaccggcatccatccggcgttggaacgtgcgatcggcccggacatcacccaccgagcggtgttggagatcttggcccactgcggcgggccggccggcatccgcgccgccggtcgcgagcaggtcgccgcgatcgcggccgagcacgcgccgcgtaagcacgccaagcttgtcgatcgtgtctgggccgcgttggacgaacagaccgtcaccgtgcccggcaccaccgcagccgacacagtgctgccgcagctggccgagagcttgaaaaccgttctcgcacaacggaaaacgctagccgcccaggtggaggagttgcttgatgcgcaccctcttgccggggtcctgacttcgatgcccggcatcggggtcaggaccgcctcccgcatcctgctcgagatcggcgacgcatccagcttcgccagctcggcccacctggctgcctacgccggcatcgccccagttacgcacaaatcgggctcctcgatcaagggcgaacatccgacgcgagcaggcaatcgcaagctcaagcgagccttcttcctcgccgcgttcgctgccctgtccgaccccgtcagccgcgcctactacgacaagaaacgcgccgaagggaagaaacacaacgcggcgctgatctgcctcgcccgccgccgctgcgacgtcctgttcgccatgctccgcaacggcacctactaccaaccaccacaaccatcgaaggagaacgagaaactcgcgaccgccgcttgacctcacccatagggaca

SEQ ID NO: 9771 - DNA, 1535 bp, unidentified
  source 1..1535: mol_type = unassigned DNA; note = element_f501a13
  misc_feature 1..2: note = core
  misc_feature 3..242: note = LE
  misc_feature 243..1421: note = CDS
  misc_feature 1422..1535: note = RE
  misc_feature 3..220: note = bridgeRNA
ctcgtataataaagtagtagtttttagtgtccctctccaaggacatatgctacactgtaaatggtgctgtggattggttctcgcttcctaccgcatgacggtttcagaaaggctccaaccacagacctttgcagtattgttaatcagttagataccgcccgacggtttatttggaacgaggttacaaaagcaaagtatcctgtggataacagcatcaaaataaatctatcggaggcacttaaatgatttgcgttggaattgatgttgcaaaggacaagcacgactgtttaattatgagttcagaaggcgaagtcctcgcagatgtttttaccgtctctaacagtaaagaaggttttgaacatcttcttcaaacaatcaatacctgtacaggtatcggcaactcaaaaataaaggtagggcttgaggcaaccggacattacagttacaaccttctcgggtttcttcttgacaacggtctgaccacctttgtcataaaccctctgcataccaacctttaccgtaagagtcaatctcttagaaaaaccaagaccgaccgtgtggatgcaagaacgatcgcttctattctaatgtctgatatgagcctcaagccctacacaaacatagcataccacaattccgagttaaagtcactaacaagatacagatttgacaaggtaaaagaacgagccgcattaaaatcttctgttgcaagattagtcaacatcctatttcccgaattggaaaagttactgccgactttacacacagcctcgtcttatgcattgttaagcgaactgccaagtgcaaagcacattgccgaagtacaccttactcaccttacaaatttgctttatgttgcttctaaaggtcgttactccaaagacaaagccattcaaatccgtgaagctgcaagaaattccatcggtacatatatgcctgctaaagctttggaactcaagcacaccgttaaactcattaaagaatttaataacgagattgctgaaattgaatccgaaattcaatccataatggataagattgattcacctattacaactattccgggcattagcctgcgcatgggtgcaatgattattgctgaggtcggtgattttaacaactttgattcgcctgataaaattttagcttttgcaggtctttcaccgtctacttaccaatccggtcagcttaacaactgctatgcccacatggaaaagcgtggttcccgttatttgcgatatgctcttttcaatgcaaccaagcttgtttgctattggaatcctttattcgccgattatcttgccaaaaagcgttctgagggtaaacattacaatgttgctgtctcacacgctgccaagaaattagtccgccttatttttgctttgcaaaagtcaggtcaaccttacatggctaattcttgatttcactaattgtttgaaattcggcgtctttgacgcctgtttcgttatgccttttttaccgtcttgtattttttcatcagcccctctttttagacttgacttttaatagttagt

SEQ ID NO: 9772 - DNA, 1367 bp, unidentified
  source 1..1367: mol_type = unassigned DNA; note = element_f509086
  misc_feature 1..2: note = core
  misc_feature 3..82: note = LE
  misc_feature 83..1108: note = CDS
  misc_feature 1109..1367: note = RE
  misc_feature 1084..1354: note = bridgeRNA
tgatggggtggacgccccctcgacggcatcgatgtgccaaagtgaagggtgttgaacagccatcacgagagaggaagcgtccgtgaacgaagttagcacgattggactagatttagcgaagtatgtctttcaagaccatggagccgatgccaccggaaaggtcgtttttcgcaaacagctgcgccggaataagctgctggcattctttgccgagcagccggcttgcctcgtggcgatggaagcctgctcgggcgcgcattactgggctcgtgagattggcaagctcggccatgaagtgcggctgatcccaccggcttacgtgaagcccttcgtcaagcggcagaagaacgacatggccgatgcagaggcgatctgtgaagcagcgcagaggccgaccatgcgtttcgttcccgtcaagagtgaagagcagcaagcgagcgcggtggtgtttcggacccgcgacttgctgatccggcagcggacccaggcgatcaatgctttgcgtggtcatctcgccgaatacggggtgatcatggcaaagggaacggcccatgtcggagagcttgtcgagcgcgcaatggatccaaaaacaaatgtgcccgaagcggcacggttcgtactcgacatattgatcaagacgatggtgacgctggaaatgcagatcaagaaactcgacagcgagatcacccatcgcgcccgaaaagaaaaagatgcccgccgtttaatgacaatcccaggcgtgggaccaatgacggcgacggcgttgcttgcccttgcgcctgccgccggaagcttccggtgcggacgcgacttcgccgcatggctggggttgaccccgttgcagcgctccacgggcggcaaacagaagctgggtgcgacgtcgaaaatgggggagcgaacgttgcgacggttacttatcatcggcgcgactgcggtcgtgcagcaggcacggcggcgaggcacttcaccgtcatcgtggctcgggcgcatggttgcccgcaagccacctatgctggtagccaccgctcttgcaaacaagatggcccgcgtcgtctgggctctgatggccaacggtggggtctataaagctccggctgtggcggcatagccgtccggtcagaggtcgtcgagatgtaggaaggtcaaacggaaggtatggcgcaacagtcgagagacggggttgggaaaaccagtacatgcccaagtgctatctaagcacgccgctgtgatttggacctgatccgcgaactcccatacgggcccgcgacaaatgacggtcgcattaaaggccggacagatgtcagcccccgactacagcgcagcgcttgacgaaagattcttcttgcatccccgggggcgtccacaga

SEQ ID NO: 9773 - DNA, 1492 bp, unidentified
  source 1..1492: mol_type = unassigned DNA; note = element_f50bd3d
  misc_feature 1..2: note = core
  misc_feature 3..245: note = LE
  misc_feature 246..1472: note = CDS
  misc_feature 1473..1492: note = RE
  misc_feature 6..229: note = bridgeRNA
ctaatgggagctaccgggtcgggatgaggcaggctcggtgctggtagccgctggcaggtgagcactctccgcgcctggaccgagttcgagtcctttggtcagatcgtgcccctgccggtggtcgggagagctgactaccgatgggatgtcgtggccgtccatcgcgacgtgatcacttgaccattaggtcgtggtggatctcccgtgggctgccggacctgctggcggagcgtggggaggcctgggtgctgttcgtcggagacgaccgggcagaagatcatcatgatgtggaggtgcaggacgggaccggccgccggttgacgaagggccggctgccggaggggctcgccgggatcacccggctgcacgagctggtcggtgcgcacctggccgaggacgccgaccctgctgaggtggtggtcgggatcgagaccgaccgcgggccgtgggtgtcggcgctggtcgcggcgggctaccaggtgatcgcggtcaatccggtgcaggcggcccggtatcgggagcggtactcgacatccggggcgaaaagcgacgccggcgacgcgcacgcgctggcggacatggtccgtaccgaccgccaccagctgcggccggtcgccggcgacagcgacctggccgaggcggtgaaggtcaccgcccgggcccatcagacgctggtctgggaccgcacccggcaggtccaacggctgcgcgcggcgctggtcgagtcgttcccagccgcggtggccgtcttcgacgacctcgacgccgccgacacgttggaactgctcgagaaggcgccggctccggacctggcccggcggctgaccgtcgcgcagatctccgccgcgctcaagcgggcccgccgccgcggtgacctcgcgggcagggcgcgggcgatccgggccgggtttcaggccggtcagttgccggtccgtccggcgaccgccgccgcctacggcgcggtcgtgcgtgcccaggttgggctgatcggcacgctcaccaccgagatcggccggctcggcgcgcaggtcgatgcccattttggccagcacccggacgctgaggtcctgctgtcccagcccggtctggggccggtcctcgccgcccgggtgctcgccgagttcggagacgaccccgatcgctacgccgacgccaaggctcgcaagaactatgccgggaccagcccggtcacccgcgcctcggggaagaagaccgtcgtgatggcccgctacgcccgcaacgaccggctcgccgacgccctgcaccagcaggcgttcagcgcgctaaacgcctcacccggcgcccgcgcctactacgacgcgatccgcgcccgtggcaccggccaccacgccgcactacgccagctcggcaaccggctcgtcggtatcctccacggctgcctcaagacccacacccactatcaggaagcaaccgcctggccacagaacgtcgcatccgacgccgccgcttgacatccaaaaacatgggatgt

SEQ ID NO: 9774 - DNA, 1426 bp, unidentified
  source 1..1426: mol_type = unassigned DNA; note = element_f50dc3b
  misc_feature 1: note = core
  misc_feature 2..221: note = LE
  misc_feature 222..1244: note = CDS
  misc_feature 1245..1426: note = RE
  misc_feature 15..233: note = bridgeRNA
ctgatggatggttctggcgggcgttgagcgtgtgctcgtagcgtccggggatctggcgggtcgtctcgtgaagtgcctgctaccggtgtcggttggctttcgaacgaagcgtcggcccgccaggtttccctaggcggtggcgtggctcgcaagaggcaagcaccggttcgcatcaggagtgcctgcggccgccgttcccttcggttcctgaaggaggagccatggtgttgatcggtatcgacccgcacaaggccacccacaccgcggtggtgatcgacgaggccgagcacgagctcgcgcggatcaaggtcagggcagacaggtcgcaggtcgcggcgctgctggagttcgccgacgagttccggccgcggcggtgggcgatcgagtccgcaggcggactcgggttcctgctcgcccagcagctcgtgcgtgccggtgaggacgtcgtcgacgtccccgccactctcgcggcgagggtgcggttgctggggtctggtcgcgggagcaagaacgacccgaatgacgcgctctccacggcgatcgccgcattgcgcgacccgcacctgcgcacggtgatggtcgaggaccacgcgatggtgctgcggctgctcgcagatcgccatcaagacctgacttcgttgcggacccaggcggtctgccggctccatgcgccgatcgcggcgttgacaccgggcggggtgcagcgacggatctccgctgatggcgcggcatctcggctccgcgccatccacccaagcaacacggttgaagtggcgcgcaaggagatggcactcgagctcgtcgctgatgtccgacgcctggacaagaacatcgctgaggtgaagaagcggaccacggctgcggtcgcagcatcgggcaccagcctcaccgaggtctacggcgtcggtcccatcgttgccgcgctgctgatcgggcacaccggggacatcacccggttcccgaccaaggggcactacgcctcctacaacggcaccgcacccatcgaagcgtcctcagggaaggtcgtgcggcaccggctcaaccagcgcggcaaccgtcagctcaaccacgccctgcacatggccgccgtcacccagttgcgccgcgacaccccgggccgcgtctactacctgacgaagatcgacgaggggaagtcaccgaaggaagcccgccgggcgctcaagcggaagatcagcgacgcggtctaccgccaactccacgacgacgcccgaccccagacatgagtgggtccgggagggcaaccagggcacgtctctgactccagcgcgaccggccccacaccctgacagccggctcttcggataagccactcccggactcgccgccgaaagtacgcccctggcatcacccctgccaagaggccatctcgccatgcccgaagaaggtcttgacaagcaagaggctt

SEQ ID NO: 9775 - DNA, 1409 bp, unidentified
  source 1..1409: mol_type = unassigned DNA; note = element_f51dc97
  misc_feature 1: note = core
  misc_feature 2..89: note = LE
  misc_feature 90..1124: note = CDS
  misc_feature 1125..1409: note = RE
  misc_feature 1174..1404: note = bridgeRNA
caatggaatggacgcccctcctttaccggagcacagtgatcgctctgccacgaaggtggctcagcctcattcaccagcaggagttcaccatgcaagcgacgaccatcgggattgatctggccaagaacatctttcaggtccacggggcggatgcccatggcaagaagatcttcaacaaggccttgaagcgcgatcagatggcggccttcttcgtcaacctgccacccgctctggtgggcatggaggcttgtggcagcgcacattattgggcgcgcaagctgcagagcatggggcacacggtgcggctgatggcgccgcagttcgtcaagccctacgtcaaaggcaacaagcacgatgccgcagatgccgaagccatctgcgaagcagtaactcgccccaccatgcgctttgtgcccatcaagaacgctgagcagcaggcagtgctgtcgatgcaccgggtgcgtcaagggtttgttcgcgcacgcacggcacaggccaatcagatccggggcctgctgtcggagttcggcctgatcgttccgcagggtatagcgcacatcaccgggcgggtacctcccttgatcgaagatgccagcaatgagttgcccggtggcttgcgcatcctcatagatcgcttactcgagcacttcaaggcgttgcaggcgcagatccagcagctcgaagcccagatcctcgcctggcaccgtagcaatccggccagcaaacgactcgaacagatacccggcatcggtccgatcaccgccagcgcgttgatcgcttctctgggagatgctagaagcttcaaggatggccggcaggttgcagcctggctgggcctggttcccaagcagcattccagcggcggtaaacagaacctgctgggcatcagcaagcgtggcgacacttacctgcgcacgctgctcatccaaggcgctcgatcagtgatctaccacgcagataggcccagtcaagaggcaagtgcgacctgccagtgggtctgccgggtcgcccaaagacgcaataagaacatcgccgccgtggcgctggccaacaaaaacgcacgcatctgctgggccttgctgacaggcgacaaagactatgacgagcggagccagacagcctgaagaaccatatgtagcgctcgacaacccagcgatccagccgaccataggaagagaccacagattgctcaggcagtcatgcagtgatggcaagacaggttagaccggggccaagacagtccgataagagtaatgcaccttgagtgcgcttagccgatgggaccttggccagcgaattccatcagggaccgtggcagcgtgctgccgcaaaagtccggatatacgcttgcaatcttgaccttccttgcatcacgaattgaaggcttggcaaaccggggcgtccatata

SEQ ID NO: 9776 - DNA, 1397 bp, unidentified
  source 1..1397: mol_type = unassigned DNA; note = element_f522b5c
  misc_feature 1..2: note = core
  misc_feature 3..82: note = LE
  misc_feature 83..1126: note = CDS
  misc_feature 1127..1397: note = RE
  misc_feature 1142..1385: note = bridgeRNA
tgatgaggtggaacggcccgctccgacagcatcaagtgctaacgtggccgttgtttcaacgccaccaaggagggaccgttccgtgacgcagattaacaccatcgggctagatttggccaagcaggttttccaagttcacggcgcagacgccgaaggcgcgccgctgttcaacaggcggttgcgccgggccgaagtgctgcgcttcttcgagaagcagccaacctgtctcgtcggcctcgaggcctgcggcggggcacattactgggcgcgtgagatcgcagcactcggccatgacgtccggttgatcccgccggcctacgtcaagccctttgtcaagcgcggcaagaccgatgctgccgacgccgaggcgatcagcgaggcggtaacccgcaagaccatgcgctttgtgccgatcaagtcggccgagcaacaggcggcggcgatggtgctgaggacgcgagctctgctgctgcgccaaagaacacaagtgatcaacgccttgcgcgctcatatgtccgaattgggcatcattgcggctgccggcccggcgaaggtggcggcattagccgcgatcgtgcgtgacccgacagatgctcgcctgcctgcggcggcgcgcttcgccctgacggcccttgtcgaccaattagacactctgagcgaacaggtcgaacgacttgagcgcgagatcgtcaccgaggcaaagcatgacgaagacatgcgccgtctgaccacgatcccgggcgtcggcgcgatcacagcggcgaccgtcaaggcgctggttcccgatccggacgggttcaggtcgggccgtcaccttgccgcttggcttgggctcacgccgaggtcgcattcgagcggcggcaaggagctgttgggcggcatctcgaagatgggcaacacggagcttcgatctctccttgtaaatggcgctacctctgtcctgcgccatgccagaaacaacgacagggcactgccctggttgaccgcgttgctagcgcgtcggcccttcaaggtcgtcgccatcgcgcttgccaacaagatcgcgaggatcatctgggccctgctaacgaagggcgggacctatcggaaacctggtgggatggcggttcgtgcggcaaacgcctgagggcagagtaccgacacgagctaccggagaagagccaggaagaggcgaggtgcattgagcagacgatgattccacgggacgaaatcccgacgcgggagaggcttgcgcgacaatgtgcttcgagcacgtcagattgatcagccacccgcttcgcggacttcatcgaggccagcggtcatgggccgcgctgaaaggccggacatatgactgcaccgttcccgcgtgatgaaatcgactaaaaaagcccttgcaacgcgggccgttccacata

SEQ ID NO: 9777 - DNA, 1395 bp, unidentified
  source 1..1395: mol_type = unassigned DNA; note = element_f526c80
  misc_feature 1: note = core
  misc_feature 2..87: note = LE
  misc_feature 88..1104: note = CDS
  misc_feature 1105..1395: note = RE
  misc_feature 1149..1387: note = bridgeRNA
caatggaatggacacctcccacctaaacggcatcgcaatgtgccagactgaaggtctcatcaaacagtcgacagggggaggtgtgaaatggatattacgcgcattggcatagacttggcaaagcaagtgttccagattcacggcgtggaccgtcatggcaaggcggtagtgagaaagcaactcaggcgcagccagatgatggcgtactttagcaaactgccgccgacattgataggcatggaagcctgcggcagcgcccactactgggcgcgcgaacttgccaagctggggcatgacgcccgcctcatgtcgccacagttcgtaaagccgtacgtcaagagcggcaagaacgacgccaatgatgccgaagcgatttgcgaagcggtgagccgccccaacatgcgtttcgtgccggtcaaaagcatcgagcaacaagtcatgcaggccgaacaccgcatacgcgcgcggctcatcagggcacgcaccgcgctgggtaacgaaatacgcggactgctgggcgaattcggaatcatcctgcctacatcactgggcagcgtgcggcgagccctgcccgaactgctggaagacgccgagaacgggctcactggcgaattccggaggctgctctcccagctgggggaggaactccgccgtctggatgacggcatcaaggaatacgatgcccgcctcgtccagagaacgaaggaagacgaccgcatcaaacgtctcctggaaatagaaggaatcggcccggtctcggcctcagccctggtgtctgcggtcggtgacggcagtcagtttgccaaggggcgggacatggcggcctggctggggctggtgcctaaccagcactccagcggcggcaagaaccggctgggccacatcagcaagcgcggcgacaaatacgtgcgcatgctgctgatccacggcgcacgggcagtgctcaaggccgcggagagcaagacagatgggcgtagccgctgggtgactagcctggcccagcggcgcaacaagaacatcgcgactgtcgctctggcgaacaagaatgcacggatcgcgtgggctatattgagccgggacgaatcgtaccggcgggcggcctaacctgcctttgcgggcgcaccgcaacagagtttaagcaggagacatcaaacagcgattgcatggcaaaacgaattgatggcaaacaggtcagaccggcgtaggcaattcagcttattgcgagggctccctgccaggctgtaacggcaaagccgctagggcgatttgaagcttacgcgcgaattccatcatggctcgggtggttcgctacccaacaggaagccggatatacggaagcagttgcacccaaaaccatcaacgcgggttgcttgcaaaacgggaggtgtccatata

SEQ ID NO: 9778 - DNA, 1403 bp, unidentified
  source 1..1403: mol_type = unassigned DNA; note = element_f52d3f6
  misc_feature 1..2: note = core
  misc_feature 3..119: note = LE
  misc_feature 120..1127: note = CDS
  misc_feature 1128..1403: note = RE
  misc_feature 1163..1399: note = bridgeRNA
agatggtatggacgcctccccccggcaacgggcaagcagaatcccaacgggagagagcatcggcactcagatgtacagtggatgcgtcgaacatccacactcacgcaggaggtttccaaatgaagacgcccgtcatcggcatggatatcgccaagcatgtcttccagttgcatgcagtcgacgttgcttccgggaaggtcgagcgcgtgaaactcaagcgaagtgaggtggtggatttctttgcaaagagggagcgctcaatcgtggcgattgaagcctgcggcggtgctcatcactgggcccggcagttggggaagtttggtcacgacgtaaggctcattgcagcgcactctgtgagacccttcgtcttgcgaaacaaatcggatgcagccgacgcgcgcggtatctggaccgcggcccagcagccggaagcgcggtttgtcgccgttaaaagcgagacgcagcagtcgattctggcactgcaccggatgcgagcccaattgatgaaattccggatcatgcaaacgaatgctttgcgcggcatcctctatgagtttggcgaaattctctccgaaggcttccagccgttcacgaaggagatcgtgcctgcgttcgccagaatctccgatcggttacctgcaatgctagtcgaaagcctgcgcgaacagtgggcccgcgtacaggcgatcagcgaagatattgcgtcgctggagcggcgtctctcgaacgagctcagactcagcaccgaatgccgacgggttggggagatcccaggcgtcggtctgctgactgcaaccgccacagtagccgcgatcggtgaccccgctacgttccgctctggccgcgagtttgccgcatggctaggccttgttccacgccaaaccggaacgggcggccgcatacgacagcttggcctgagcaaaagaggtaacacctatctccgaacgctgctaatgcatggcacaagatcggtgatactccgcggcacccgaacaccgtggctcaatgacttgctggcgcgacgccccttcaatgttgttgttgccgccgtagcgaacaaactggcccgaaccatctgggcaatcctatcgcggcaaacacgatatgaggctcccgtcgacgcgtagcaaatgttgttcggcaacgcgttaccagttgtagattcccccaccaaggagcgcaagcaacgagttgcatgatggatgacaggttggaccgggacgaggtaagtctgattagagtcgtgaactctcgagttcgagtgttagttgagaccctcgccagcgaattccatatgggccagcaggccgaccagcctgcaatgacgggccggacataagcgtgctgccttacctgtagaccaaagtgcaaccccagcttgctatccgggaggcgtccatata

SEQ ID NO: 9779 - DNA, 1345 bp, unidentified
  source 1..1345: mol_type = unassigned DNA; note = element_f5317f7
  misc_feature 1..2: note = core
  misc_feature 3..80: note = LE
  misc_feature 81..1115: note = CDS
  misc_feature 1116..1345: note = RE
  misc_feature 1140..1340: note = bridgeRNA
tgatgtgatggacgccccctttttcagtggaaaatagtgccatcttttatccgatgcactgaatttcgggagaacatctcatgaatacgatcaaagtggtggatattgacctcgctaaaaacgtctttcaagtttgtgtctggatggaagacggttctgttgcttcgaaccaaaaaatttcacgacagaaatttcctgataccctacgggcttttccacctgaaaccctcatcgccatggaaacctgtgccacttctcattattggggacgaacgttgcagtctatgggctatcatgtccgaattgttcccacccagcatgtaaaagctttcagccatcatcaaaaaaacgatgccaatgatgcgctggctatctgtgaaacggcctgtcggcccggtctccattttgttcccatcaaaaccgtagaacagcaagatatcaaagcactgcgcagtgcccggcagctcatggtggaacagcgtactgctcttgctaatcaaatcagggcctttctcgctgagcagcgaataattgtgcccgtgggtattcagaaactccaacaacacctccctgatattttggaagaaggggataatgccctgtcttgtgtgttgcgtcgtttattgcatacgctgtgggaagagctgcagaatttgaacgtcagcattcatgaaatggataacgaaattacggcactttcccgtcagcaagcagggtatgagcacttgctgactattcccggtgttggtcccctgattgtggcggctttcgtgagtgacgtcaacgtatcccaatttactaatggccggcagctgtcagcctggtgtggtttggttccccggcaacacagttcgggcgggaaaagccgtctttcttctctgagcaaacatggcaaccgtcatctccgaacgttaattattcatggtgcccgcgcgatgatgcaggacgtacaaaaacgggatgatcctttaggcgagtggctaagaacactgattacccgatgtggccccatgaaagccgtagttgctttagctaacaagctgacccgaattatctggcgtattctgacagatgaggttgattatgatatgaaaaaagcttttgctatccattaagtgaattgaaacagacgctttaaccgagtttgcaaacactgatgaaaaaacggctatcggccctgcaataacctgagtaaaacctaggtagtcacataccgatgacggctgataaggaaacagggtgcggatgacatcatggcgcgggcaaataagccctttatgacgtcggatatatggtagcaaaccgtatcgactcaatgcttgcacaaccgggggacgtccatata

SEQ ID NO: 9780 - DNA, 1353 bp, unidentified
  source 1..1353: mol_type = unassigned DNA; note = element_f53479e
  misc_feature 1: note = core
  misc_feature 2..71: note = LE
  misc_feature 72..1103: note = CDS
  misc_feature 1104..1353: note = RE
  misc_feature 1105..1343: note = bridgeRNA
tatgggatggcccgccccttttccccgacatcgggtacgatgtcggtgtctgaagatgaaggagcgaaccgatgtctattgcgatccttggcgtcgacctaggcaagaactcgtgcagcattgtaggggtagatgcgaccggtgcggttgttacgcgccggtcgatgcgcaggcagacgcttatcgattacgtcttgaagcttccggcttgcattgttgctatggaagcctgctgtggggctcatcatctcggccgcttgttcgtggctcgaggacacgaggtccggctgatgtcgccagagtacgtgcgtccctacgtgaaggcacaaaagaacgacgaccgtgacgccgaagggatcgccgaggccgcctcgcggccgacgatgcgcttcgtcgacctcaagagcgaagagcaattggacatacagaccctgcaccggctgcggtcgcgcctggtcgccgagcgcacgaacctgatcaaccagctgcgcgcgatcctgctggagcgcggggtgatcttccctgccggccggcgcaagttcgagctggggctagacgagatgcttgccgagcacggcgggacggtatcgccccgtattcgccaactggcggccgacctgcgcgacgaatggcggacgctggacaccaggatcgaggcactcaacggcgagttcgtcgacctggtgcgcggcaatgatgcagcccgacggctgacgtcgatcccgggcgtgggtgtattgaacgcctccgccttggtcgcagcagtcggcaacgccagtggcttcgacaaggcacgcgatcttggttcctggctcggccttgttccccggcagcacacgaccggtggtaaaccccgcctgctcggcatctccaagcgcggtaatacctacctgcggaccttgctcatccatggtgcgcgcgcagcgctgccgtcgctctcgaaagctgatacgccgctgggaagatggttgaaagcgatgcttgagcgaggcgttcaccgcaatgcggttgtcgtagcgctggccaacaagctggcgcggatcgcatgggcaaccttgcgcaacggcaccaccttcgagcgtagctaccccgccgcggcgtgatcagatcggcaacgccctgagcggcgtgtagcccacggtgtttgcaggaaggatcgagcagatggcctgacagtcaatcggcgttcggaaagcccggtgaatgaattggcactcgatgccgtggtcattttggggctctggacgcgcggatgtccatcttggccgtgggtacacccacgagaccgcatacgttgacgcagactgatcagatcacctcaacatccagcttgcaaacggggcgggccatacg

SEQ ID NO: 9781 - DNA, 1386 bp, unidentified
  source 1..1386: mol_type = unassigned DNA; note = element_f53b030
  misc_feature 1..2: note = core
  misc_feature 3..77: note = LE
  misc_feature 78..1121: note = CDS
  misc_feature 1122..1386: note = RE
  misc_feature 1122..1373: note = bridgeRNA
tgttggggtggacggcccccacacggcatcgatgtgccaggatgaggtcggtgcgatctcaaacaagggagccgtccatggagcagcttattcgaatcggcatggatacgtccaagcaagtgtttcagctgcacggagtgaatgcggcggaagagccggtgctctgccggaagatgcggcgccgggagatggtgagattcttcgagcggctggagccgacgatcatcggcatcgaggcgtgcggtgcggcgcatcattgggggcgcgtgctgcaggagatgggtcaccaagtgaagctgctgccgccggagtacgcgaaggcctatgtgaagcgcagcaagaacgatgcggcggacgcggcggcgctgtgcgaggcgatgagccggccgacgatgcggttcgttgcggtgaagacggcggaccagcaagcggcgcagatgctggccggtactcgcgaccgcttggtccgccggcgcacgcagctgagcaatgccatccgcggctatgccaccgagttcggggtgattgccgggcggggccttgccaagatcgagccgctgttggcccgcctggacgaggagaagacgctgccgaagctggcccgcgagctgttcgcgacgcatgcccgggagtacgctcagctggcggcagagctggaagagatcgaggccaagctgatggcctggcatcggcagaacgaggcaagtcggcgcctggtgaggattcccggcatcgggccgatcggcgccacgctgctggcgatgaagacaccgcagccggaagctttccgatcgggtcggcagttcgccgcatggattggcttgacgccgaaggatcattcgacagcgggcaagacccggctcggtgccatcacgcgcgctggcgatgcgatgctgcgccaagtcctcgtggtcggcgcgaccgcggtgatccagcaggcgcggcgcggcaagggtcagccctcgccatggctcgtcgagttgctcaagcgcaagccgcccaagctcgcagccgttgcgctcgccaacaagacagcacgcatcgcctggaagctgatggtcagcggcgagcactacacgtcaaaccgggccagcgccgtgagcccggccgaggcggcataacgagagcggcgggacgcgatcggcatctcgccgaagccggagcttgctcgagacggagcagatggtgcgatcggtcgatccaaaacgcgagacagtccgtgggatccagcggtacccgatgccgcgacgatgttcggagctcgcgtcgcagaacccatctcggccagcggtccgcgcggccgcacccaacaggccggacatatggttgcaagcgatccgatccaaacctctgccaagctcttgcaagcagggggccgtccatata

SEQ ID NO: 9782 - DNA, 1452 bp, unidentified
  source 1..1452: mol_type = unassigned DNA; note = element_f540196
  misc_feature 1: note = core
  misc_feature 2..110: note = LE
  misc_feature 111..1136: note = CDS
  misc_feature 1137..1452: note = RE
  misc_feature 1170..1391: note = bridgeRNA
gaatgaaagggacttccccgtcccgaggccgcggcggaagccgcgattcggcatcaacgtgccatgatggtgtctcgaaccttccatcaacgccaacaagaggggaatccatgtctatagtgactgtcggaattgatctcgccaagaacgtcttcgccgtgcatggcgtggacaaagccggcaagcccgtgcttatcaagccgcgtgtcctgcgcgaccagctcgtgacactcatcgcccaattgccgccatgcctgatcgggatggaagcctgttcgggcgcgcatcactgggcgcgtgtatttcagcaacatggccataccgtcaagctcatggccccgaagctcgtggcgccctatcggatgtcgggcaagcgcggcaagaacgatgcagctgatgccgccgctatttgcgaggcggtgactcgtccgaatatgcgcttcgtgcccctgaaggacgaacaccagcaggccacactttgcctgcatcgcacacgacagggattcgtcgaagaacgcaccgcgatctacaaccggctacgtggcctgctcgccgagttcggcgtagtgctgccgcaaagtccggagcggctgcgcagagaaattacagcccagctcgatactttgcccggatgggcacgacgttgcatcagcgacctgctcgagcacgccggcagcattgaggatcggctcgccgaatacgaccgtgccatcggcgagattgcgcgtgaggacgagcgcagccggcggcttatgcagctacgcggcatcgggccgaccacggccagtgccctggtcgccagcatcggagctgggcatgacttcaggaatggccgccaggtggccgcgtggctcggactgacgccaggccagtacagcagcggcggaaaggatcggctgggcagcatcacgaaggctggcgacgcttatctgcgtagcctgctggtgctcggggcccgtgcggtcattgcgaatctcggtgaccggcaggaccggttcagccgctgggtcagaagtctcatcgagcgccgcgggttctggcgagcagccgtcgccatcgctgccaagaacgcgaggatggcgtgggcgacgctgaaatacggcgagaacttcaaacatgaaccggctacagcgtgaaactcacgcggagccaacggctgacaaaggcggagatgccatgagcggctaaacgatcactttgcactgccagcggtgatgtgaagcgggttggacccgcgcggggcatgcctgaaaatcgtacggggattccaatcccgtttagcgaacgaggccctcgcgcgcgtctttcatcagggtccgggccagcagcccaacatgaccggttgtagtacagcagtccttcaccttctcacttgcacctgcacggcaatgcagtaatgtttcaaaatgaaaaaccacgattgagcttgcgttcaacggggaagcccttgta

SEQ ID NO: 9783 - DNA, 1172 bp, unidentified
  source 1..1172: mol_type = unassigned DNA; note = element_f5498d8
  misc_feature 1..2: note = core
  misc_feature 3..212: note = LE
  misc_feature 213..1166: note = CDS
  misc_feature 1167..1172: note = RE
  misc_feature 21..218: note = bridgeRNA
cttgtaatagcaaaaccgattatcgtcctgttgttccgcaagggatgccctgccgcgaacggccatccgcggcagggcggctggcgatcggatcgagcccaccctgagccgcttgtggctgctctgtagcgtgatcgcgccagcatcttcatcagacccggatggttgcccgaacaaagttggttcgcttcacaaggcagggatcgacgaagatgacgaagactagcacagaaacggccggcatcgatacggccaaggacaagctcgacattgccgtgcatggccaggcccggcaatggcaggtggcaaatacggtggcagggtggcggcagctcgccgcggatttcgcccgggtcggcgtcgccaaggtcgggatcgaggctaccggcggttacgaacgcggcgtggtcgcgcatctgcggacggcaggactcgtcgtgctggtgctgcaaccaatccaggtcaaagcctttgcgcgacagcatctgcgccgcgccaagaacgatacgctggatgccatgctgatcgccgcctgcacagtgacgctcgatccgcccgaggtcgcgccggatccaagattcaacgcgctggcggacgatctcaccttcatcgaacagatcgaggaggacattgcccgcttcaagacccggcgcgaacatatcgacgacccgcggcggcgacggctcgtggacaatgacatcgtgcggctgaaggcgcgccggaccgccgagctggcgcgtctggcggcacggttgcgcaagcatccggatctggcgcgacggctcgatctggtgctcagcgttcccggtatcggtgagcggacggcattggcgatcatcgtccgcatgcccgaactcgggcaggtcagtcgggagcaggccgcagcgctcgccggccttgccccattcgacgacgacagcggcaagcgacgcggcgagcgtcacatcgccggcggacgcagccgcctgcgtcgttccttgttcgcagccgcgctaccggcctcattccgctggaacaaagccctttgcgagctctatggcaggcttaaagcacgcggaaaggcgcacaactcagccctcatcgcctgtgcccgaaagctccttatctacgccaacaccatcgtccagcgcggtacaccatgggtcgaaaagcaaccggctgtttaatggttg

SEQ ID NO: 9784 - DNA, 1186 bp, unidentified
  source 1..1186: mol_type = unassigned DNA; note = element_f55baba
  misc_feature 1..2: note = core
  misc_feature 3..208: note = LE
  misc_feature 209..1171: note = CDS
  misc_feature 1172..1186: note = RE
  misc_feature 6..213: note = bridgeRNA
cttgtatgtttaagccagaccagtacggtagagtctggccgctgttgaggcaggcagaccggcccgtgcagtttggtaggcgcttgggtgttcgagcccgtttctgagtacagaacgcacggccgccgtgctggtcttcctgaagcccgaacggttacgcgccccggctcgaccgagtgcgcatgcacaagcaagggatccgaagatcatgtctgcaacctcagtggtggtgggcatcgacgtcgcgaaggcgcacgtcgatgttgcggtgctgggcgccaagttcgatgcccagcggttcgataacaacgccgaggggcactcggcgctggcgacagccttgcagcctctgggggtggctctggtggcgatggaagccaccggcggctatgaggcggcgctcgcctgcgcactgcaggcggcggggctggccgtagcagtggtcaatccgcgccaggcacgagacttcgccaagtcgatggggcgcctggcaaagactgacacgatcgacgcgcgcatgctggctgagtttgccgcggtgctggtacgccgcgaagatctggccagtttcatccgcccgctggccgatgcccagcagcaggccttggctgcgatggtcacgcgccgccgtcagctgctgaccatgttgctgtctgaacgccagcgcctgcagctggccatccccgtggtgcgtccgagcatcgaggccatgatcgaggccatccgcaagcagctcgacgaagtcgaagtgcagatggttacccatgttcacgagcattacgccgcgctcgacaagctgctgcgctcggccagcggcatcggcccggtggccagcgccaccctcattgctgaactgcctgagcttggacgactcaaccggcgccagatcgccgcgctcgtcggggtcgcgccgatagccaacgactcgggcacaagccgcggccgacgccgcatccagggcgggcgcttcgagattcgccgcgtcctctacatggccgccttgaccgcttcccgccgcaaccccgccatcaagcccttctacgagcgcctcatcgcgatcggaaaacagcccaaggtcgctttggtcgcatgcatgcgcaagctgctcaccacgcttaacgccatggtccgcaccaacacgccttgggactattctcttcatctcgcttgactccgaagacggtta

SEQ ID NO: 9785 - DNA, 1423 bp, unidentified
  source 1..1423: mol_type = unassigned DNA; note = element_f55df5d
  misc_feature 1: note = core
  misc_feature 2..65: note = LE
  misc_feature 66..1115: note = CDS
  misc_feature 1116..1423: note = RE
  misc_feature 1201..1417: note = bridgeRNA
taattggtatggtccgccgcttcttgcccttcggggctataagaagtgagcacaggaggcggtccatggaaatcgacacaatcggcatcgatctggggaagacagtctttcaccttgttggcctcaacgtggctggcgaggtagtggtacggaggaagttctcgcgcctgcaattgctgcgcttcacggcgaacctgcgcgtcaggctcattggcatggagtcctgtggcggctcgcacttcctcggccgcagtctgcgcgagcagggccacgaggttcgcctgatgccggcgcagtacgtcaagccgtacgtgaagacgaacaagaacgattacatcgatgccgaagccatcgccgaagcggtggggcgagcgaacatgcggttcgtccccatcaagagcgatgagcagctggatatgcagtcgctgcaccgtgtacgcgaccgctgggttgcacgcagaacatcggtgatcaatcagatccgcgggctgctgctggagcgcggcatcaccttccgcaagggtcgccgacatgccgcagcttcgctgccggccgccctggaggatgccgataatcgtctgtccgggcttctgcgcatgctgctggcgcagttgcagggcgagctgcgacagttgcagagccagatcgatgactccgacgcgctgatcgcgaaggcagcaggagaacacgaaccttgccgtcgtctcatggcgattcctggcatcggaccgctgacggcgacggcggtcgcagcttccatcggcaacggcagcgagtttcgtaagggccgctcgtttgcggcctggctgggcttggtaccgaagcaggagtcaactggcggcaagcagaagctgctcggcatcagcaagcgtggcaaccactacctgcgcagactgtttgtgagcggagcacgcgctgtgctgcagtgcagggacaagcagtcagccggtctcagtgcctggctcggccagcttgcatcgcgagttcacaccaacgtcgcggccgtcgcactggccaacaagatggctcgcgtcgcatgggcggtgctggccaaaagtgaggcttatcggcctccgctgtcggcgatctcggcggaggcactggcctgcaattgacgcctggtaaagccaggcttggaaatcgctccgcgattcccacaatcgcagaccagcgacgacggattttcacaaaggttttctgccaggtctgctggcgaacagcgagatggcaaaatggtcgaacccggcgccctcgaaacctgtcatacggaacagccctctgaggcttccaaactagttaggacgagagcgcagcgcattccatcaaggtccagagcctcggctcacaaaaagaccggatacatttgcgcagaccaacccgtccatcttcacttttcgcttgcgacacggcggcggaccataca

SEQ ID NO: 9786 - DNA, 1399 bp, unidentified
  source 1..1399: mol_type = unassigned DNA; note = element_f5629cb
  misc_feature 1: note = core
  misc_feature 2..224: note = LE
  misc_feature 225..1385: note = CDS
  misc_feature 1386..1399: note = RE
  misc_feature 12..236: note = bridgeRNA
ctacttagcattggcgtcagggccagttcccggccaggatctggtccaggtgcccggtgggccgctctctaatcggctgcccgcctgaggttttggtgtggctctctaatggcttgcgtcctaccgggtgccgtgcggggtgtggctggaaaggggcgtgccctggctcgaagtagcggtgccttcccgcacgaacacctactcggttcgacggaaggacaccggtgacggtcatcatcggcatggacccccataaacgctcggccaccatcgaggtcatcgaccacgattcgaaggtgttggccatcggacgctacgacaccgacactgccggctataccgaaatgcgcactgctgtggaggatttcccggatcgagtgtgggcgatcgagggctgcgacgggatcggccgacacctggcgcaccgactggtgcacgacggggagacggtgatcgatgtaccggcgaaactgtcggcgcaggtgcgggtgttcgccaccggcaacggccgcaagaccgatccggtcgacgcgcactcggtcgcactggcggcgttgcgggctccgaatctgcggcggatccaggccgatccggagttggaggcgctgggaatgctggtcgatcgtcgcgacgagttgggccgtgcccgcaccgagctgatcaaccggatccatcgactgctgctcgagctggtgcctggtggcgccaagcgctggctgtcggcccgccaggcccgcgccttggcagaggaactcacgcccaccgggcccgcggcgcggctgcggttgcgggtagtcctggaattgatcagcgatctggaggtcgtcgacgcccgcataaaggccgcgaacaaggagttgcggcagttggttaccgcgaccgggtccacgctgatggagttgcccggcaccggtccgaccggcgcggcaaggttgctctccgacgtgggcgatatccaccgtttcgcaacccgggaccgattcgcgtcctggaacggcaccgcacccctggacgcgtcgtcgggagatcagaagcgacaccggctgtctcgtgccgggaaccgtaaggtcaaccgggtgctgcacatcatggccgtggttcagcagtgcggttacggcgacggccgcgcctacgtcacgcagcgcaaagccgaaggcaagacccacaaggaagcactacgtgccctgaaacgacgactgtccaacgtcgcctacgcccgcatgctcgccgaccaacggcgacgggagaaggcaagcccgggagggcaatcgggggcgtctgctgactcctgcgcgaccggcttgaccccgcatgccggttcttcggataagccacaacccggatccgccgcccaccagcttagcgaactacgaactgccccttgatactaaaggggagc

SEQ ID NO: 9787 - DNA, 1527 bp, unidentified
  source 1..1527: mol_type = unassigned DNA; note = element_f563c6b
  misc_feature 1: note = core
  misc_feature 2..274: note = LE
  misc_feature 275..1432: note = CDS
  misc_feature 1433..1527: note = RE
  misc_feature 17..264: note = bridgeRNA
ccattacagtctgagataagtcatcgatgaacttcggtggcgatcattcggcgcatggcctacagtttggccaagccccgaggggccgccgatcgggcgtcccctgatggccgtctgcccctgcccctcgagggcccggggggggtgttgccaccgaggacgctcgccgctccgaacgactgataggaaactgccgggcccggaggccacggccaggtaatgtgggtgtcgaggggagggcttccgatcggcctaccgattggaggataccaccatggcaccacccgccaggccgagggtcgtcatagggctcgacgtcgggaaatcggcgcactgggcgtgcgtcgtcacgcgcgagggcgagctcctggcaagcaggcccattcccaacagggaaaacgccatcgacgggctctacgctcggtacccgggcgcgctggtcgtcgtcgaccaggtccgcaacatcggctcgctcgcgctttcgcgcgccaagctcgccgggatgccgcgcgcgtacctgcccgggctcgccgcgcacggcgcctcgaggctgttcgccggagacgccaagaccgacgagcgcgacgcgatggtcatagccaagacggcgctgggcatacccgacgcgctgcttgcggtggccgacaggccgcccgaggtagaggccgccaggtcgctcgccgcgcaaagggactttttgacctgcgagaacacgcgcagcaagaacaggctccgcagcatattgctcgagtcgtgcccggaattcgaggcgcaagccgacctctcggacccggcgaccctcaagctcatggccgccgtcggcggcccatggtcgatatccgaggcctcgccgcagtccgtcggggcgctcacgcgcggctgcaggcgcgccaaagtggcggcgctggccggatccgtcgagtcgtcgagcaggccgcacccggcggccgtcgcctgcgaggaccgcgccgtccggctgctcgcgcgaaggatatcggagaacgacgccgagatcgggtcgctgacctccgagatatcggcgctgctttccgccgacgagacgtacaggtgcctgctcacggtgcccggcatagggccgcgaacggcatccgagctggtcatatccatagacatagccgacttcccaagccacgacaggctggcctcgtactgcgggctggcgccgcgcaaccggcggtccggcacgtcgatatcgtcggtgtccgcgtcgcggcagggcaacaagaggctgaagaacctgctcatattctcctgcaactgccttgcgcgcagccgcaaccgatggggcgaatattacgcgcgctgccgcgacaggggcatgccgcacggcaaggccctgaaggccgtggcgaggaagcggctcaaggtgatctacgcggtcatgagggacaaggttccgtacgcggcctaacggccggcagagatcgcaggtccggcagggcctgcgtcagcattgccaaaaacgcccatcgaaagggcgaatctcccttgacagaactataggaa

SEQ ID NO: 9788 - DNA, 1380 bp, unidentified
  source 1..1380: mol_type = unassigned DNA; note = element_f5669b3
  misc_feature 1: note = core
  misc_feature 2..93: note = LE
  misc_feature 94..1125: note = CDS
  misc_feature 1126..1380: note = RE
  misc_feature 1161..1375: note = bridgeRNA
caatgggatggactcctccttacccaatcggcatctatgtgctaagactgatatttgatagaaacagtcaatggaagtaagaaggagcccaccatgaagattaaccgagtcggtgttgatttggcaaagaacgtattccaattacacggtgttgaccgatcagacaaatttgtctggaaacgcaagctgaagcgcatgaattggttgaaagtcttgcttaaagagacagaccccagctgcgagattggcattgaagcctgtgccggcgcccatcactgggccaggatactgatgagcaagggctatcaggtcaagattatcgcccctcagttcgtcaccccctatgtaaaaagcaacaagaacgacgccaatgatgccgaagcgatctgcgaggccatgagtcggcccaatatgcgctttgtggcggtaaagactaccgagcagcaggatctgcaagccatgcatcgggtgttggatgagttgaaatcccatcgtacggccaagggaaatcagattaggggactggttgctgaatacggcctggtagcgcccagacagctgtatgcattgcgtcaggccattccggactggctggaggatgccgagaacggattgtctgatattttccgccagctgttagtgggactgcgggaagacctggtacggctggatgaacgcatagcagaagtgaatgatgccattgagcaaatagccagaacacacccagtcgcccagcgactgcaacaactccgcggcgtgggaccattggtatctacggctatgattgctagcgttggagccgggaagcaattcagccgaggtcgacagatggcggcctcgctagggataaccccaaaacagttcagttctggaggtaaagagcggttgcagggtatcagtaaacggggggatgcgtacctgcggcgtttactgatacatggtgcccgctcggttgttagtcatgccaagcacaaagacgacaggtacagtcgctggatgactgagttggcgcaaaggagccacaccaatgtcgccgctgttgccgtagccaacaagacggcgaggatggcgtgggcaatgatggttaacgaaactgactacgatcctgctttagcttcacgctaaatacgatccaataaactaaataggaaaacctgttttacgacgcaagctgaatgatggagaactggtcgaaccggcgttggtagaacccgtgaacacccgagcacttcgagtgcgttgaagcgattgggaaccagcgcgcggatagcccattatggcccggcatcgacgtgtgccacctcagaggccggatatacgtacgctgtcgagcctacccttcgtcaatcagagtgttgtaaaaaaggaggagtccatata

SEQ ID NO: 9789 - DNA, 1350 bp, unidentified
  source 1..1350: mol_type = unassigned DNA; note = element_f56a68a
  misc_feature 1: note = core
  misc_feature 2..74: note = LE
  misc_feature 75..1094: note = CDS
  misc_feature 1095..1350: note = RE
  misc_feature 1117..1347: note = bridgeRNA
taatgagatggtcacccccacaccctgtgagggctacgctttcacggggtgttttgttttcggaggccatcatcatgagcgagtcagcactgatcggtatcgatctcggcaaacatactttccacctgcacggccaggataagtcgggccgcgaggtgtttcgcaaaaaatgctcacgggcgcagatgatgcagtttttcggcaatgtgccgagctgtgtcgtggtgatggaggcctgtgcagggtcgcattttgtcgctcgccaactgatggcgatgggacacacggccaagctgatttccccgcagttcgttaagcccttcgtcaagggcaacaaaaatgacttcgtcgacgctgaggcgatctgtgaagccgcttcccgcccatccatgcgcttcgttacgcctaaaaccgaatcccagcaaaccctgtctgtgctgcatcggatgcgcgaatcgttggtgcatgaccgcaccaaaacggctaatcagatgcacggttttctgttggagtttggaatcagcctgcccaagggattggccatcatgaagcgtttggcgagcgttttggccgagcacgaattacccgttcggttaacgatgctgctgcagcgtctgcacgatcacttcgtttatggccagatcaaggaactggacaaagagctggccggccaactggccaacgatgatctgggcagtcgtttgctgagcatgccgtgtgtcggcccgatcaccgccagcctgctggctgtggagatgggcgatggtaaacagtaccgatgcggtcgcgactttgccgcctccgttggcttagtgcccagacagtacagcaccggcggcaaggcaaacttgctgggcatcagcaagcgtggcgacaagaacctgcgccgcctgctggtgcagtgcgccagggtctacctgcagcacatagaacgtcagaaaggggcgctggccgactgggtacgttcgctgctgacacgacgacattcaaatgtcgtggcctgtgccctggctaacaaactggcgcgtatcgcttgggcgatagccgctcgccatacgcaatatgaagcagggccagacgctttgaacgcctgaccctgcagttgttgcagtactacgattcatccttcaggttttgcgatagctgaacaaaagatgatgtgagcggccaaccggcctgacgaagatcctgacccgaaaatcggcttttgaagccgcgtcagttttaaggatcgccaggcgcgactctcatcgtggcgcggggcaagccccaattggacgccggatagatttaagcaagccaaccacttcatccgttaatcagtattgcaaaaaatggggtgaccataga

SEQ ID NO: 9790 - DNA, 1432 bp, unidentified
  source 1..1432: mol_type = unassigned DNA; note = element_f56ac50
  misc_feature 1: note = core
  misc_feature 2..138: note = LE
  misc_feature 139..1158: note = CDS
  misc_feature 1159..1432: note = RE
  misc_feature 1201..1431: note = bridgeRNA
gaatgagatgaacgcatcccacccatttgagagcggcgaagggttcggcaggtaaggtgtggattctcgcagacttccggcatcatggtgcccaacacgggatgcataaagctccctgataactggaggatccacgacatgaaatatacccctgttggcgtcgatatcgcaaaacatctgatgcaggttcacttcattaatgaacatacaggtgaagtcatcgataagcagataaagagcgacgcgctgctggaatacttcagcaatcgtgaaccttgcctgattggtatggaagcctgtggcggttcccagcactgggctcgtgagctggaaaaactggggcataaggtcaggctactccagggaaaattcgtcaaagccttcgtgatgggcaacaaaaatgacgtgatggatgcccgtgctatctggatggcggtccagcagccagctaaagccgttgccgtcaaaaccgaggaacagcaggcagtactgtcgctgcacaaaatgcgccgccagttagtgaagttccgcaccgcgcaaatcaacgcgctgcacggattgctgttggagttcggcgaaactgtgcgtaaaggccgggcgtcactggacaaggcgatgccagaagtgcttgagcgacttaaggaaaagctgccaccgttcctgatctaccagattgaagaccagcatcggcgcctcaatgacctggatatgcagatagagggtatagaaaaacagcttaccgcctgggcgaaacagaatgaagcctgtcggcggatcatggacatcccgggagttggcccactggttgctaccgcagcagttgccatcatgggagatgcgggaaccttccgctcaggacgggagttcgcagcctacataggtctggtgcctaagcaaacaggcaccggtgggaaagtgcgacttctgggcatcagtaagcgcggcgatgcctatatgcggacactgtttatccatggggccagggctgcgacgttgttggcaaaagagccaaacccgtgggtgacggaactgatgaaaagacggccaaccagtgtggccgttgtgggcatggccaacaagatagcgcgtacggtgtgggccttggtaacccataaccgcacctatgacaaaaaacacgtcagcatcaggccgttctgaccgatgaatgctggcaaaacattaactcttttaacaaaagggtgaatgctgaaaggttgctagggcagccgtagtgatgacaacgacaggtaagaccgggactcactaaacctggatgctgccttgagcttaaagctcgcggagggaatgaggggtgagtcagcgaatctcatcgaggcccgcagcgccggctgcaacaaggccggatatagagctgcaacctaccgtcaatgtcaacaccacgaatgtcttgcaaacgggatgcgttcatata

SEQ ID NO: 9791 - DNA, 1658 bp, unidentified
  source 1..1658: mol_type = unassigned DNA; note = element_f56fa31
  misc_feature 1: note = core
  misc_feature 2..274: note = LE
  misc_feature 275..1525: note = CDS
  misc_feature 1526..1658: note = RE
  misc_feature 13..294: note = bridgeRNA
cctgttactatatatttgccccttgatttatggcaaccagccataggcatgggacatctcgttgcctaaactgttagaatgggaaggtaatggtctgaccttcacctccaagggcttacacgtccgcaaggaagtcagtcagccatccttcgcattcgcagtgttcgatttgtgcaggtagagcctgagcgttcgtgtcagcaaacagatggaatcggcaatgggaaaagatggctttgatccattgcaaatcttgttgacaggagtgttgcatatgaacgcagcaggcattgatgtttccagcagaaaaagcaccgtatctgtactccgtccctttggcgaggttgtaaggctgccctttgacatagttcacagtgcggagggatttgcgtccctgatacggcagctgaaatccattgagggcgagacccggatcgtcatggagcatactggccgatactacgaaccggtggcgcagatccttcacgaggcgggattttacgtcagtacggtcaatccgctgctgatcagggagtacggcggaaattctctgcgcagagttaagacagacaaagccgacgccatgaagattgcccggtacgcccttgacaactggagcgaactgcgggattatactcctatggatacaattcgctatgatttgaaaaccctaaaccgccagtttcaactggcctccaaacagaaaacagcagcttccaacaacctcatcgctttactggaacagtcattccccggggttcgcaaatgctttgacagtccggtacgcaaggatggtacgcagaaatgggtggatttcgtctacaccttctggcacgctgactgcgtccgcaagaacagcctgaatgcttttaccgagcgttaccgcaaatggtgtaaacgtcacggctactttttcaaacagagtaatgcggcggaagtgtatgaactcgccagatctgttattacgctggttcccaaggggccagtggcgaaggtgcttgtgcagcaagcagccagccagctcaccagcatctcccgttctgtcgagacctaccgtgccgagatgaaccgtctggcctccatgctgccagaatatcctgtggttatgggactgtatggcgttggagaatcctttggcccgcagcttatggcggaaatcggtgatgtgcgccgctttgaccgcaagcaggctctcgttgcctttgctggaatagaccccatgccaaatcagtccggggaaaagaatgtgagaagcaacaaatcctcaaagagaggctcgccatatctgcgcaaaaccctgttcagtattatgatgtgcctgctccagtccgccccggctgatgaaccggtctttcaatttcttgaccgaaaacgcagcgaagggaaaccctattacgtctacatgacggcgggagccaacaagttcctgcgtcgttattacgcaaaggtcagggattatctcgccacgctggacaactttccacctgtggatatggattccactggcttgaaccacttgaactgaaatctgaatacttccggcagattagaccagcgttttgcggtggtctttttgttgtgcccttttattgctacctaccgcctgcaaaattttctttcgtcatgttccgattggggcttgactttttatttgcagg

SEQ ID NO: 9792 - DNA, 2137 bp, unidentified
  source 1..2137: mol_type = unassigned DNA; note = element_f57495d
  misc_feature 1..2: note = core
  misc_feature 3..370: note = LE
  misc_feature 371..1657: note = CDS
  misc_feature 1658..2137: note = RE
ctcactgacggacctcaccggtgaccctgcccggggcggcgccgggggaccgccatcgtgcgggacgtgaccggtatgtgactttcctgttgcgtgatgtgcattgcgcgggatgtggctggaggtccacagttagcgggtcggtggccatgatcaccgatgcaccccaggtgccaccagtcaccgccttgagcttctagacccttcagtgaggtccaggatcagttctgcggggctggtggttgcccgggacgcgcggatcgtctacaaagccatgcgcttcgagcgccgaacagtgagctgacgacagcgtcccggttccgtgagtaaaagggtgcctccccactgaataagcagcgaggaggctgtgatgaagtatgccctaacccaggtcctgcctgatgtccctgccgggcgggtgttcgccggcattgactgggccaccgctgatcacgtggcgtgcgtggtcgacatggccgggcgggtcatcgaccggttcagtgccgctcatgacaaggcagggatcgctgagctgatcacgcggctgcgcagggccggggtcagcgaggtcgcgatcgagcggggcgacggcgtgctcgtcgcggcgctgctggctgcgggcctgacggtggtggtgatcgcctcccggcaggtgaagaacctgcggtcgcggtacgggtcagctggcgccaaggacgaccggttcgatgcgttcgtgctggccgacacgctgcgcaccgaccgggcgcggctgcggccgctgatcccggatgcgcccgcgaccatcgcgctgcgggccgcggtgcgggcccgcaagaacctggtcacgcaccgggtggcggcatgcagccagctgcatgcccacctggccgtggcgttccccgccgcgatcgggctgttccgcgatctggacagcccgatcagcctggcattcctggcccgcttcggcagccaggacgccgccggccagctcgatgagcaggcaattgccggctggctgaagaccatcccggtgcggggccgcccggccccggtcagcgtgctgtgcgcgcggctgcgggccgcgcccgatggggtgaccggacaggaaggggccgccctggcaggcgtcaccgctgccctgaccgcgacggtggccatgctggccgcccaggtcaagaccctggagaccgggatcggcatccagctggccgcccaccccgacgcgcacatcttcacgtccttgccccgcacccggacactgcgcgctgcccggctgctggccgagatcggggactgccgggcacgtttccccgacccggagtccctcgccgccctcgccggggtcgccccggtcacccgccagtccggcacgcacacctcccgcaccttccggtgggcggtcagccgccagctccgcgacgccgtctgcgacttcgctgacggctcccggcacgccagcgcctgggccgcggccatctacgacgccgcccgcgcccgcggcaaagaccacccgcacgccgtccgcatcctggcccgcgcctggatctacatcatctggcgctgctggcaggaaggcaccgcctacgaccccgccaagcacaacgccctccagcgcatcctggaccagcagcaggccgcacctgcggtggctaccggctccggggacatccggtgaccgacgcgatcatcaccgcgctgcgtacctgcgcggccggcctccacccggacgaagccggcgtcgaactgctcatcagccatggcgggttcctgggccgccgcgacttcgccgggttcgtgcataccggcaccagcttcagcgacggcgaaaccctgatggcccagatcgactggcaggccgcgatcagcgccctgcacgacgggcagctgccggtctccggcggcgaacggcgcatcctccagctcgccgccagcatcgccgccggcttccctgtcggcctgcgcgagaccatccccggcctggacaaccggaacctgcacctggtgaccacagccatccggcacgccgcaggacaacaccccccgcaccactaaccccacccgcgcccagcccccgccggcgatcctggcgggagctactcacacgccgcgaaactggcaaaccactccgtccgccgccaaggtccgtacagagcta

SEQ ID NO: 9793 - DNA, 1589 bp, unidentified
  source 1..1589: mol_type = unassigned DNA; note = element_f574f5c
  misc_feature 1..4: note = core
  misc_feature 5..272: note = LE
  misc_feature 273..1472: note = CDS
  misc_feature 1473..1589: note = RE
  misc_feature 1..230: note = bridgeRNA
acccattaccatgtttggtaggtcccgaatggtcggggccgggtcgccggttccggtatgactttcctgccctgtcgtcgatgatccggggggtgttgtcgccgggagcggggacgttcgcagaccgctgataggaaccaggccggccgcatggacgcttcggggcgcatggcgcaggcctcccgtaatgtgggtgcggcgcgggcgtccggatccccttctccgcgggttccacggcgaccgaggacaccttcatgacgggagggacgacgatgacaccggacgacatcgacgtgtgggtcgggctggacgtgggcaagagcgcgcatcacgcgcacgccctcgaccatgacggcaacaccttgtacgacaagccgctcagacaggacgagaaggccatccgcacgatgctggagaagctctccgaacgcgggcgcgtgctcctggtcgtggaccagcccaacaccatcggctccctgcccctgaccgtggcccgcagcatgggcgtgcaggtcgcctacctgcccggcgccgccatgcgcaggaccgcgcagctcctgccaggcgccgcgaagaccgaccggagggacgcgtacgtgatcgcgtgggccgcgctcaaactccccgaaagcctgcgggacgcgggcccggacgacgagaccctcgccgccctgaagatcctcgcgggccacgacgaggacctcgcccacgaatccgcccgccacatcaaccgcctgcgcagcctgctcctgcagacccatcccgcgttcgaacgcgtcctgaagggcgaacgcgccacccgcgacgcgaccctcgcgctgctcgaacgctacggcggccccatgggcatgggcgcggccggcatcgaacaggtcaggcgatgggccgggaaagaaggactgcgcgccgggcgcatcatcgacgacatgttcaaggccatcggcgaacagaccgtcaccgtgcccggcacggccatggccgaaagcatcatcccctcgatagcccgcgacatcaagaccatcaaggaccggcggcgcgacctcgccgcgcaggtcgaacgcctgctggacggccaccctcttctcacggtcctgacgtcgatgccagggataggcgtcaggaccgcaagcaacatcctcctcggcatcggcggcgacgccgcccacttcaaatccgccgcccacctggccgcgtacgccggcatcgcccccgtcaccagccaatccggcaccagcatcaaaggcgaacggccagcccgcggcggcaacaaacgcctcaagaacgcgctatggcagtccgcgttcgtcgcctccaccaaacacccgccgtccatcgcctactacaaacgcaaacgcgaacaaggcaagcaccacaacgccgccgtcatctgcctcgcccgacgccgctgcgacgtgatctacagcatgctcaagaacggcaccctctaccaggaacaaaccctcgccgcatgaaaccaaccgacacaggccacggcagccgaccgccaaggccaaggcgaagcacgcccaccacaaccaaccccgacacgacacaacaacccctcacaaggttgacaaaaacataggaac

SEQ ID NO: 9794 - DNA, 1361 bp, unidentified
  source 1..1361: mol_type = unassigned DNA; note = element_f57ad83
  misc_feature 1: note = core
  misc_feature 2..67: note = LE
  misc_feature 68..1120: note = CDS
  misc_feature 1121..1361: note = RE
  misc_feature 1141..1355: note = bridgeRNA
taataggatggttcgccccgccgcctcgggcgataatcgtgtcaccgtcaataggggagatatgagcatgcaccatcaacccaaaatctgcgcagtctttggcatcgacatcggcaaatccctatttcacgtggtcggtctcgatacttccggcgcacccattcagaaagccaagtttcggcgcgagacccttctgcagttctttgcgcgagcggcgccgactcttgtcagcatggaggcctgcccagggtctcagtggctagccaggaaactaaaggaactcggtcacgaggtccgcatcatcccggcgcagttcgtcaaaccctacgtgaagtcgcataaaaacgatatcattgacgctgaggctatcgcggaagctgcaaccagacccacaatgcgcttcgtcgggatcaaggaggcgcaccagattgatctgcagatgctacaccgtgtccgcagccgactggtaaagggacggaccaatcttatctgtcagatgcgttcatactgtctggagcacggcgtcgctctccgccaaggcgccggggtgttcaaacttgatattgtccgcacgatcgatgacccggaaaatgatctgaccgagcgggcgcgcgttgtcctgcgggagctacaggcggaccttcttcgcttggaagagcggatcctcagcgtctccactgaaatcaagaacattgcggacagagatgagaccgcgcgtcggctaatgacgatccctggtgtcggaccacttggcgcaactgccatcctggcgtccatcggtgacccgtcgcgcttcaagaaagcacgagacgtggctgcatggctgggcctcgtgccgcggcaacactcgacaggtggcaagcagaccctgctcggcatcgcgaagcgaggaagtagttatgtcagaacgcttctgattcacggcgcacgatcggttctgatgcatttggaccgaacgaaggaccgccttggccaatgggcagacgaactgcgaggcaggatgcacgtcaacaaggttacggtcgccttggctgcaaaaatggcgagagtggtctgggtcgtgctcagcaagcccggagcaacatatgaacggcgcctgccagcaggcggtggcgcttaaccccatccggttcgaccggatcagaatgcgaggctcgaaatgatgacgaaaaggatgatcgacgcgccgtaaacccgttccgaaagcgggttttgtgcccgaacaagctaattgggaacggcgcgtgcggatctcatcatggcctggctggaaaaccagctcactcgcgagaggccggatacatttatgcaatcctgcacgtcatcaggaagaaccttgcacaggcggggcgaaccataca

SEQ ID NO: 9795 - DNA, 1267 bp, unidentified
  source 1..1267: mol_type = unassigned DNA; note = element_f57da8c
  misc_feature 1: note = core
  misc_feature 2..244: note = LE
  misc_feature 245..1246: note = CDS
  misc_feature 1247..1267: note = RE
  misc_feature 71..222: note = bridgeRNA
accttagatttgcagcggcaaaccgaaactgaaatagaaatggtaaatttgcagtgaaaaaataaatattgaaagaaaggaagacagagagtgaaccattttgcgccaggggaaatacccgtgttcatattaggactctccgcctttcccgtccggagacctgtataaaaatataacacctgttgttaaggtagttaggttagggacgagttcctttctctcgttgtttgtcaactacaaagttatgcaaaatttttatttcatcggcatagatgtctcgaaaaagaaactggacatctgtgtaatgtcaaattcaaaggtcctcaaagaggaacaagtaagtaatcacccgcaggccatcgccactgtgatagccggcataaaagaagaactgagcatgagcaacgactgtttcatcatctgcgcggagcacaccggccagtacacatatcctctgatatgtgcatgcaagtcggtaggcagcaagctgtggcttgaaaacgcctcgcagataaaatactgttccggcgtaacacgcggtaaaaatgacaaagtggacgcccgccgcattgccgagtatgccatgcgcttcttcgataaagccaagccctaccagcgtcccatagaggaacttatgcgcctcaagcagctggaggcggagcgctcgctctaccttacggatctggcgaaatacaaagcgcagctgtcagaccaggaaggcttcatggaggataaaatcttcaagcgcaaggcaaagcgtctgaaggagatgatcaagtctcttgaaaagacgttgaaagagattgcccaagagatggctgatgtcatctattcttcggaagagctatcccgacagatgagattgcttaagtctgtggaaggtgtcggaccggttgtcgctatgaacatgattatagctactgaagcctttacacgcttcgacaatcccagacagttcaactgttacgtcggagtcgctccattcgcatacacatccggctcgagccaacactctcgaaacagagtgtctcaacgggccgtaaaatacataaaatgcctccttcacatggctgccgtggcgattgcccataagaagacaggcgatctgaaaacatattttgaaagaaaagtcgccgaaggaaaaaacaaaatgaccgtattaaacgcagtgcgagcaaagctcgtggctagaatgttcgccgtaatcagaaataatcgagtttatcaacctattttatcagtttaggcttgcacaaatcataaaaat

SEQ ID NO: 9796 - DNA, 1619 bp, unidentified
  source 1..1619: mol_type = unassigned DNA; note = element_f57ed4a
  misc_feature 1..3: note = core
  misc_feature 4..294: note = LE
  misc_feature 295..1461: note = CDS
  misc_feature 1462..1619: note = RE
tcacgtataataacgttatccttattttaaggggtagcgttattatttttcctttctgtctaaagattgtgtcggtggggttagctacccacctgatataatggacaaggcgctgcggatttgttccttatttcactacggctttgaccggttcgaggtgactcaaaccgcaggcatttgtctttaaccggtaatcagttagttaacgcttagacgtttcgatttacgtgagtacgcagacaaatgaccttcgggcaaacagcgacgcctaataaatcttttggaggtatttctatgaattatgccggcatcgatatttcaaagtacaagcatgatatctgtgtcctcaattctttcggcgaagttacctgtgatgcgctttctttcacgaatgacgccaccggattcgccgatttgcttaacatcctttcccaaagcaaccaagatgaaataaggataggatttgaagcaaccgctcattactctctgaacctgaaactgttccttgaaaagaacggctattcttttatggaactgaaccctttgcttgtcaataagtttgtcaaggggcaaacactccgccggacaaccaccgacaagctatgcgcaaatgcaattgcgcgttatatgcttcaagtcgaatacaaaccctatccggcttcattttaccacaactactcgctaaaatcattaacaaggctgcgtgacaggctcgtccggcagcgtagcgggtatttggtccggctgacaaatgtgctcgaccatgtctttccggaatttaaaccatttttcggaaatcggttttcatcaaccgctttgcacatactctcgaattacggttccccggaagccatagcgaatatgaattcccgttcattcgacattctgcgccgtaagtcccacggtaattttacgatggataagttcgtcaaactcaaatctctggcgaaaaataccgtaggcgggtggaacgacatcttcaaaattgaacttgaaaccctgtttgatatctacactcaaattgacggtaagatcaacgtactcgaagcggaaatcaccggcatcatatcggaaattaatcctcctacgctttcaatcaaagggattggcccaatttccgcggcaatcattgtttccgaattgggcgacatccgccgcttttcttcaccggataaagtgctgtcattcgcaggtctggaacccgggtattttcaatccggtacaagcgagttttccggacgcatggtcaagcgtggatcttccattctgcgttacactatcattaattgttgccggtcaatgcgcttgcataatgaggttttctctacatattactacaagaagatcgccgaggggaaacctcatcgtgtcgtactcagccatatggcgaagaaacttgtgcgcttgatttataggcttgaaacaaccggtgcgctgttcaattctgccattcagcggtagccgccgctgaatgggtttttatggcgttatgtcaaggttcattttttaagcgaaggttgaaaattgcttctcaccgtcgttctgtttagtatgcctatttttatgtgcggaaattattttattttcttctaaaaaaactcttgacttctaatagttag

SEQ ID NO: 9797 - DNA, 1100 bp, unidentified
  source 1..1100: mol_type = unassigned DNA; note = element_f57f3fd
  misc_feature 1..2: note = core
  misc_feature 3..161: note = LE
  misc_feature 162..1085: note = CDS
  misc_feature 1086..1100: note = RE
  misc_feature 1..157: note = bridgeRNA
cctgtctgtttgagatgtggcattgtgtttgagcggaggggaacccgtccccccatgggtcccatcccgtctgagagcaagggtccccttcgcttggtcgtcaacctgaacagttgcttgggcctgccacgagcccgcacgacatggacaggagctttaccatgccacagatcatcgtcggctgcgatctttcccgcgccttcatcgacgtctgcatcaatgccgggcgcaggacgtcgaggatcgagaacaccaagtccggcatcacgcaatggatcgtaacgcttgagacctccgctcttgtcgtcttcgaggccaccagcggatgcgatgctgtcctcatgcaagtccttgcggagcacggcgtcacctatgcccgcgtcaacccacggcaggcacgcgagttcgcccgcgcgctcggcgtgcttgccaagaccgacaaggtcgatgccagggtgctggcccagatggggcagcgccttcccctgaccatcaccaagccgcaggagccacaaaggaaacggctcgccgatttcctcaggcgacgcaagcagttggtcgaagcccgaaaggccgagaagctgcgccggcatagcgccgggcaaccggaattgcttcacgacatcgacagcatgatcgccatcttcgaccgcaggatcgagaaactggacaagcagatcgcggccatcatcggcgaaagccgtgaccttgcggcgcaggcccatctcctgtctgctgtgcccggtatcggccccaccgtgctggcaaccctgcttggagaattgcccgaactcggcactctcgatcgaagacgtatcgcctctcttgcaggactcgcgccgcatgcgcgtgaaagcggaacatggaagggcacaaggcgcatctggggtgggcggagaaaggttcgcgaggctctgtacattgcagccctaaccgcaacccggcgcgtccctaccctcattgccatgcgggatcgaatgcgtgccgccggcaaggcccccaaaaccatcctcatcgctgctggacgacaactcctcgtcatcctcaacgccatgatccggagcaaccggccgatcaggctataagttcaaacacagttg

SEQ ID NO: 9798 - DNA, 1416 bp, unidentified
  source 1..1416: mol_type = unassigned DNA; note = element_f5926f5
  misc_feature 1..3: note = core
  misc_feature 4..81: note = LE
  misc_feature 82..1131: note = CDS
  misc_feature 1132..1416: note = RE
  misc_feature 1141..1403: note = bridgeRNA
tgatgtcgtgaatggcgccctccaccagcgtcagacgtgccagaatgggcattttggagaaccgaagaggagccactcgtcatgcctgagattgtcacgatcggccttgatatcgcgaagaacgtcttccagctgaacggcgtcgacagaagtggaacgatcgtcctgcgcaagccgctgcgccgcagccagatcctaggcttcttcagaacccttccaccttgcctgatcgggatggaggcgtgcgcgacggctcatcactgggcccgcacgctcatggcttttggtcacgacgtccgactgatccctccggcctgtgtcaaaccctatctgcgtcggcagaagaacgatgccgcggacgcggctgcgatctgcgaggccgtcacacggccgtcgatgcgcttcgttccagtcaagagcccgcaacagcagagcaccctgatgctgcacggcgcccgagatctcctgatcgggcagcggacggccctgatcaatgccctgcgtggtcactttgccgagctgggcatcgtggtggcgcagggcgctcgcaacacgcgccagctgatcgcctatcttcaggatgacgccagtcccgatctccccgtcacagctcggttggcgctccagcctctggcggcgatactgcttgggatcgaggcgcagatcgccaagctcgacaaggccattctggccgctcaccgcagcgatccggtcagcctcaggctcgtcaccatccccggggtcggtccgatcgtggcttcttgtctctcagccagcatcccggacgccagcctgttccaaggcagtcgggagtttgccgcctatctcggcctcgtgccccggcagcactcaaccggcggcaaagcaaggctgggctccatctccaagatgggcaaccgccatctgcgcaagctgcttgtggtcggagcgcacgcggcgctctacagcatgaagtcgggcaagacccggacggcgctggcggactgggcccggtctctgttggccaggaagcccttcaaggtggtggccgtcgccttggccaacaagatggcccggatcgcctgggcggtgatggccaggagcacggcttacgagcccgggagcaagggagctgccgtgtcggcggcctaatagacggagagctcagactattcgcccttagggcaacccagttggcagggtgatgatgatgtgatgtgaagccaaagcggacatggaccgccggaactggacaaccctggcatcgtcttgcgtcagccaagcgcgataatttgagagggaccagctccagcgtaaaacatcagggccggcggtcatgaagcaccgcgttcaaaggccggagacatgacttgcacccgccccgctaggccgaaacgtcatcaacaatcacgttgccaaacgggcgccatccagaca

SEQ ID NO: 9799 - DNA, 1828 bp, unidentified
  source 1..1828: mol_type = unassigned DNA; note = element_f5a24d9
  misc_feature 1..2: note = core
  misc_feature 3..368: note = LE
  misc_feature 369..1703: note = CDS
  misc_feature 1704..1828: note = RE
  misc_feature 128..302: note = bridgeRNA
ctagtataataatgatatagcaacaagagctatagttaataagttacaaagacaagtcaaacagatagctgaaggggaatattccttccaccatcagatgctgtcaataaaaagatttatcatgtctgaggtttccttaatgcaccagacaaaatattgaggtataatcatcgaaggcaggatcattgacgtttcctccttgggaaccagtggttttccactggccatacctcttagaaagtctgtcagtccattcggtggtgatttatgttttggctggttgggaagccccaggctatacctgtataagccgctaggttgtgtatccgccttttggaaatggatgcctgccggaaaggatatataccatgcaataccagaaagtacttcagatgcttaactgcataccttatctctcagtcggacttgatgtcggcgcagatttcacctggatgtccatcatgctccccaatggcacgcttaccggtaagccgtttaagatcatacattccgatccgcagtcccgggagctcgccgtcacaaaaataaaggaagcacaggaaatgtattctctcaaaagccgctgcttcctcgagtctaccgggatataccacatcccgcttctgtgcttcctacatgataagggttttgactgctccgtcattaatcctatcattactaagaatagcacaaattcgaacataaggaaactgcataatgataaatttgattcaaaaaaggcagcaagggttgggcttgatgcttctcttaagacttctatcgtccctgatgacgaaatcatcgaccttcggaacctggtgcgcgactactattactacaaagatctgcagtctgctgttgtcctgaaactgaatgcggaacttaaggtgtcctttcccgcatacctgcaggtattcagcaaaatcacgacactgacttcccttaaacttcttgaatcatacccccttgctacggacatgcttgccgcagcaaaggacgagattgtcaaaacaatcagggaaactgcacattttggtgaaaaatatgccctctccaaatatgaggccatttttatcgctgcagaagacgccgctgtttttggacgtgcactcccaagtaatgccctccgaatcaggctgtatatagaaacttaccgtgagtaccagaaacatcttgattccatacttgaagagcttcataaagcagtggatggattacagggaaaaccggtccataaccagatctgccttatccagtccctgcggggtgtaggtttcctgagcgcagttgtgctgattgcagaaatgggttcctttgaactgttttcttcccctaaaaaactttatgcctactttggactggatcctgctgtaaaacagtcaggcaaattcaatggggacagggtacatatgtccaagaggggttccagccttgccagacgcatcctgcatatggcggcactcaataaccttaaagttgataggggtacgaaaatgcccgtaaacccagtcattcatagttactataccgacaaatgcaggagcaagaaaaaaaatgtggctgtcggggctgtgatgcataaaatctgcaacatcatttttgccatgctcagggataataagccgtttgaaatgatcacaccacaggagcattgtaaacgctatgaagttgaccatccttcaaaaccagacaatgcagcctaaatgccagacataattttaaatttccacacaggtgggtttattaaagttacccttttttagaaactggcacaaataaatttttttaataaatttctcaaattacttattgacatttcttagctgga

SEQ ID NO: 9800 - DNA, 1152 bp, unidentified
  source 1..1152: mol_type = unassigned DNA; note = element_f5a739b
  misc_feature 1..3: note = core
  misc_feature 4..211: note = LE
  misc_feature 212..1129: note = CDS
  misc_feature 1130..1152: note = RE
  misc_feature 23..191: note = bridgeRNA
gcttgtgtctagatcaggggataaactctgaagtgagaggggtggatggcaagctgtgagtccgcggtgcttaaagcacgagtgggagcaaagctgccatccacctttccactctggcccataagcccgaacagttggacgagcgccactcgaatcacaagcgtgggcaaagccagagcgctctcactcatgagtgtaagagggttttgccatgatttcctgggtcggcatcgatatctctaaaacaaacctcgttgtctgggttcagccacagaacgaaggcttcgacgtttcaaacacttcgcaaggctttgttgaactgatcgagcatttgagttgttacgaggtctgtcgggtattgctggaagccactggtggctatgaacgaagggtcatggcggcattgcaagacgcgaacttcaacgtgctcaggatcaatcctcgtcgggccagggccttcgctgtagcaatgggcaagaatgccaagaccgaccccatcgacgcggctgttctggctgatttcgccgaagtcctgcacgcgtctcgtgacaaagtcatttcgcctgaacgtgaagccctgcgcgagctggttcaactgcgcgagcactttgtccagcagcgggacgataacaaacgcaggcttcagcaggctcagttgccaactgcaatcacagcgatcaaagaacatattcgttatctgcaaacgcagatcaagcagctcgagaaagccatcaatcaaagcatgcgcgacctggatgcagaaaaagccgagcggctgatttctgttaaaggcatcggcacggtggctactgccagtttgctggtttacttgcccgagctcggtgagcttgatcgccgggagattgcggccctggcgggaatcgcaccctacaatgacgacagcggcaatcacagcggaaaacgtcagatcttcggaggaagagcccgagttagacgtgctctctacatgtcctgctgggtcgtgatccgccatcaggcagatttcaaggcgcgctatgaggctctacgggagagaggcaagagcgcgaaagtcgcgctcatcgcctgcatgcggatactgctgatcaggctgaatgccatgctgcgagacggcaccgaatggcggtgacgaatggtaggggcaagacagtt

SEQ ID NO: 9801 - DNA, 1622 bp, unidentified
  source 1..1622: mol_type = unassigned DNA; note = element_f5afab7
  misc_feature 1..2: note = core
  misc_feature 3..274: note = LE
  misc_feature 275..1489: note = CDS
  misc_feature 1490..1622: note = RE
  misc_feature 13..294: note = bridgeRNA
ctcctacaatataaaatacggtaaaggcacggtagccagccgtgtctttttccgtttcgtgcctagctgttagaataagagcggactggcctgacacagatggccctgaactattcgttcgcaaaggagtccgtcagccgccctcttgttcgcagcgttcgatttacgcaggttgtgccgccacatggtgcgttcgtgttactcaggagattgaatcggcaacgaagaatgggcggtccgccaaagctaaaagtcaatctataggaggttatacatgaacgctgttggaatcgatgtgtcaaaaggaaagagtatggtggcagccctgcgtccgatgggtgaagtagcgattgcgccacaggaaattccacatacggaagtggatttggagagattagcctacgacatcatctcattgggcgaagatactcgcgttgtcatggaggcaacagggcgataccatgagcctgtagctcagatgctccacgaaatggggatttttgttgccgttctcaatccattgctcatcaagcaaagcggtggcggaaatatccgcaaagtgaagtccgataaggccgatgccctcaaaattgccaaatatgggcttgacaactggagtgatttgcgggaacatactcccatggatgcactcagacaacaattgaaactgttcagtcgtcagtacaacctgtatatgcaaacatcggtgtctttgcaaaacaatctcatctcgctactagacaagacttggccggggataaacgaagagttcaaaagccccatgcgaaccgatggcagcgtgaaatgggtcgattttgtcacgaccttttggcactgtgattgcattcgctatgccggtcaggacaatttcaccgaacgctaccgcaaatggtgcaagcggaagggctacaacttttcacaggacaaagcggaggaactgtacatagtaagcgcgggtcattttcctaccttgccaaagagtagtggaacaaaactcctaatcacgaccgccgcaaaagaactcacagccgctttaagcggaattgccatcatccgtgccgaaatgattcgccttgcacagcagttgccggaacacggcacagtacttgccatgtacggtgtaggcgaaatcacggcagcacagctcatggctgaaattggcgatgtgcggcgctttgctaaccgtggatcgattgtcgcctttgctggtgttgatccgtccgtgaaccagtcgggctcataccaacaacgaagcaccacttccacaaagcgcggctctccgcacttgcgcaaaactctctttcaagtggtttctacctacatcaaacgttcccccatggacgagcctgtgtaccagttcctggacaagaaacgctctgagggcaagccctactacgtctacatgaccgccggagcaaacaagttcctgcgcatttactacgtacgcgtcaaggagtgcctcgatgtgttggatgaacctgaagcatagagtgtagcctcgctttccctactggtcggcgcaaaaacggatgaggtggcggcctgttttgttatacctactttgaggcgcttagaatttgcctaacttctttcgttttagggcttgacttttatttgcagga

SEQ ID NO: 9802 - DNA, 1398 bp, unidentified
  source 1..1398: mol_type = unassigned DNA; note = element_f5bd5cb
  misc_feature 1: note = core
  misc_feature 2..229: note = LE
  misc_feature 230..1387: note = CDS
  misc_feature 1388..1398: note = RE
  misc_feature 14..244: note = bridgeRNA
ctacttgtttgaatctcccctaggcctggggtcggccaaccttgggtctaggtgtctggcgggttggctcgcgatcgggctgcccactcgaggttggggtgtggctcgctaatggttcgcctcccgtcaggcatcgcgtgcgaggagtggctcgagagggatctgccacgctcgaagtagcgctgccctcctcgtgttcttccagacgatgagagaacggagggctggtgtggccaaggtcgtgatcggtgttgatccgcacaagcggctcaatgccgtggttgtgttgaaccatcggggcaaggtgctggcacgccggcagttccccaacacgtcagacgggttcggggagctggccacgttcagtcatcggtggcgaccacgcacgtgggccatcgagggctgcaacggtgtcggcaaacacgtggcccagcggctggtcgccgccggtgaacgggtcctggacgtgtctactcgacgagcggcgctggtgcgggtgttcgccggcggcaacggccgcaagaacgacgacgtcgacgcacactccatcgccctggtcggcctgcacacacccgatctccccgaagtgcgcgccgatgaccgtcgagtggcgttgcgtctggtctcgaaccggcgcaaggaactcatcggcctgcgcacccagtgcgtgaaccgcctccaccgtgacctggtagccctgctgcccggcggcgctccgcgggccttgaccgccaccaaggccaaggccctgctggccgccgtgcggcctcgtgacgagatcggccgactccgccggcagctcgccgccgaccagctggccgatctggtggccctggaccgcaagctctccgccatcgaggcccagctgaaggagctggtgaaaaccacccccacctcactgcccgagctctacggcgtcggaccggtcatcaccgggatcatcctcggcgaggtcggcgatgtcgcccggttcaagaacaggcatcacttcgccagctacaacggcaccgcccccgacgacaaaggcagcgccggacaccccgcctactgcgtgaacatcaaaggcaaccgcaagctgaaccacgccatccacatggtcgccatcacccagatccgcaacccccgcagccccggccgcgcccactacgaccgcaaactcaccgaaaccaagaccaccaaagaagccctccgcgccctcaagcggcgcatctccgacgtcatctaccgccaactgtgcctcgacgccgaacacgaagcgggcccgggagggcaaacggggacgactcttcaatccagcgtgaccggcccaaccccgacgaccggctcttcggacaagccacaacccggacccgaacccgagcctaggcccctagcccccaccggttgacagaggggtgc

SEQ ID NO: 9803 - DNA, 1380 bp, unidentified
  source 1..1380: mol_type = unassigned DNA; note = element_f5cce67
  misc_feature 1: note = core
  misc_feature 2..70: note = LE
  misc_feature 71..1102: note = CDS
  misc_feature 1103..1380: note = RE
  misc_feature 1138..1375: note = bridgeRNA
caatggtatggaccccgccgccctcgggcggcgacctttcgagcatcgatcgaagagaaggagacatgccatggagatcgtgcggataggattggatctcgcaaagaacgtgttcgaggtctgtggcgtcgatgccgaggacggcgtggtccttcgtaagacgctgcggcgtgatgcggtgccgcagtttttctcggaattgccgccctgcattgtgggaatggaagcctgcagcggcgcgcactactgggccagggtgctgtccgatctcgggcatgaggtgcgactggtttcgccgcagttcgttgcgccgtacgtcaaatccaacaagagcgaccggaacgacgccgaggcgatctgcgaggcggttggcagaccgtcgatgcggtttgtgccgccgaaatcctctgagcaactggagatgcaagccgtccaccgcatccgccagcgcctggtgtcggaccggaccagaatggtaaatcagatccgcggcctgctggcggaacatggggtcgtgatcggccgtgacatctcccgcctcaggcgcgctcttgcgcagatcgcggacggggcttccgacgggctcggcgtcgtgatccgggggctggcgtgcgacgttcgtgaggaactgcaggacctcgaccagcgtatcgccacctacaatcggcgcatccgcgacctcttccaggcgagcgagatgtgccggcggatcggcgagatcgaaggcatcggaccgatcaccgcgatggctctggtcgcggcgatcggggaacggacctgcttccggaacggacgccagtttgccgcctggctcggactggttcccaggcagagatcgagcggtggcaagtcccggctgttcgggatcagcaaacgcggcgatcggtatctgcgtacattgatgatccatggcgcgcgggctgttctcggcaaggccggctgcaagaccgacgccaggagccagtggatcggccgcatgcgggaaagacggcacccgaacctcgtcgcagttgcgctcgccaataagaacgccaggatcgtctggtctgtgttgtcgagcggggaaggttaccgtccatcgccgcccgcgccggcagcctgaccgaacagccagagaaagaaaaggagacagaccgagacattgcagcaacctggcaagggatggtgacagcacacgaaccgttgcttctcgaacctgatctgtggaccggcagggccgatgcccatgccttggagccgttgagggagaagcacgcggaaacccatcggggctcgcggcgacgatgtatcgggccgctcaaagaagccggatatacgtcagcaatcgtgatcgccaaaccagacccaatcagaccgttgcaatcaggcggggtccatata

SEQ ID NO: 9804 - DNA, 1265 bp, unidentified
  source 1..1265: mol_type = unassigned DNA; note = element_f5ce319
  misc_feature 1..2: note = core
  misc_feature 3..86: note = LE
  misc_feature 87..1049: note = CDS
  misc_feature 1050..1265: note = RE
  misc_feature 1013..1247: note = bridgeRNA
tgatggagtggatgcccctcccgcccgtgccgaggcgtggcacagtggcagtagcaggatgagctgcggtgaaatggaggaaggacatgaacaacgtcgccatcatcggcatcgatctggcgaagcgcgtcttccacgcgcacggagcacacatcgacggcagcgtcgcgttcaggaagcggttgatccgggctcaaatgcttccgttcctgtcgacgcagccgcgttgcgtggtcgttatggaggcatgcgccaggctcatgaatggggccgcgcgatccagcagctcggacgtgcggctcatcccacccagctacgtcaagccatatgcaaagcggcagaagaacgatacggcggacacggaggccattgccgaagcagggtctcggccgacaatgcgcttcgtcgccgtgaagaccgaggaacagcagccgcgctccatggtcttccggacgcgcgatctgctcgtgcgccaaagggacgcaactgatcaacgccctgcgcggccacctcgcagagcacggtctcgttgtgccgcaaggaccggctcacctgaagtctctggtcaaagcactggacgcgaccgatgtcgcaattccgcagctggttcgcgatatcggccggatctacctcgagcagatcgaacagccgaacgccaaagttgccgatctcgaaaaaacgcctcgtcgcgaagctcaattcggcgaagaaacacgccgcttgcagacgatgccgggcataggcccgatcacagccatggctggtggaggtattcgcaccacctatgcagacgcttcaagcgtggtcgcgactttgccgcctggcttggactcgtgccggttcagcactcaaccggcggcaagcagcggctcgggcgcacctcgaagacggccatggcggtgatacgatgggcgtcccgccgcggcgcacggcctggctcgtggctcagccgcatgatggaccgcaagccgctgatcttggtcgccgaggccttggcaaacaagatggcgcgcgggatcaggagaggtgggcatgtgaggaggtcatgaacggcaagggcgaatgatcggactgatcgggaccaggaaaagcaccgaggctccaagagcgaaaagctcgctgaattgatttgcgcctgttccgcgtatctccatgacggccggcggcaaccacatggccgtatcgacaggcccgacacatgaccgcacctgatcacatgcccggcggcacgaatttgcccttgcatgaaccggggcatccacaca

SEQ ID NO: 9805 - DNA, 1488 bp, unidentified
  source 1..1488: mol_type = unassigned DNA; note = element_f5d4679
  misc_feature 1..2: note = core
  misc_feature 3..244: note = LE
  misc_feature 245..1468: note = CDS
  misc_feature 1469..1488: note = RE
  misc_feature 6..239: note = bridgeRNA
ctaatgggacataccgggcagccgtgaggcaggctcggttccggtagccgccagcaggtgagcactcgaggcccctggacgcaggacgagtcctaaggtcagaccgtgcccctgccggtggtcgggagagcggaccacagatgggatgtcgtgcccgctgatcgtggcgtgagcacttgaccattagggtgtggtggatctcctggaggctgccggacctggtgccgagagacgggagacccggatgctgttcgtcggtgacgactgggcgcaggaccaccacgatgtggaggtgcaggacgagacgggtcggcgactggcgaagggccggctgccggagggcgtggccgggatcgcccggctgcacgcgctgatcgggcggcacctggccgaggacgccggcccggagcaggtcgtggtcgggatcgagaccgaccgcggcccgtgggtgcgggcgctcgtcgcggcgggctaccaggtgatcgcggtgaacccgttgcaggcggcgcggtaccgggagcggtactcgacgtcgggtgccaagagcgacgccggcgacgcgcacagcctggcggacatggtccgtacggaccgtcaccagctgcggccggtcgctggggacagtgacaccgccgaggcggtgaagatcgtggcgcgggcgcatcagaacctgatctgggaccggacccgccagacccagcggctgcgctcggcgctcctggagttcttcccggccgcgctggccgcgttcgacgacctcgatacccctgacgcgctggagcttctcgcgaaggcgccgtcgccggccgaggccgcgaggctgaccgttgcgcagatcagcgccgcgctcaggcacgcccgccggcggaagatccccgagagggcggccgcgatccgggcggcgctgcgggccgagcagctgcccgtcacgccggcggcgaccaccgcctacgccgcggtcgtgcgcgcccaggccgggctgctcgcagccctcaacggcgagatcgcccggctcgaggagcaggtcgcggaccattttgaccagcacccggacgcgaagatcctgctgtcccagcccggcctgggaccggtcctcgcggcccgggtgctcgccgagttcggtgacgacccgacgcgctacgccgacgcgaaggcacggaagaactacgccggcacgagcccgatcacccgcgcctccgggaagaagaagacggtcctggcccgctacgcacgcaacaaccggctcgccgacgcgctacatcagcaggcgctctcggccctgagcgcatccccgggcgcccggtcgtactacgacgcgatccgcgcgcgcggcacgtcgcaccacgccgcgctgcgccagctcggcaaccggctcgtcggaatcctgcacggctgcctcaagacccacaccccctacagtgaggcaaccgcatggacacagaaagcaacactcgacgtcgccgcttgacaacgaaaaccatgggatgt

SEQ ID NO: 9806 - DNA, 1362 bp, unidentified
  source 1..1362: mol_type = unassigned DNA; note = element_f5d7349
  misc_feature 1..2: note = core
  misc_feature 3..208: note = LE
  misc_feature 209..1132: note = CDS
  misc_feature 1133..1362: note = RE
  misc_feature 12..191: note = bridgeRNA
cttatctgtttggaatctggcagcgtaggcgtcgagagccggcgtgggccgccgtaggagcctggatctcgacgatcgacttgtagcttggcgcccacgccggaatctcccttggtccgcccgaacagttgctcgaggtagcactcgaagtgataagactgggcaagcgggggagctctcgacctatccagcctagcggagatttcccatgagcggaatcgggatcgatgtgtgcaaaaaatacctggatgttgcggtctttcaaggccaggcccgtcagttcaccaacaccgcagccggtcactgcaagttggtgagatggctgaatacgatgtctgtgaagcaggtggtgctggaggccaccggcggctacgagctggccgcactggatgccctgcaccaggctgcactaccggtcgcccgtgccaatgcgcagcgggcgcgcagcttggccaacaccttggggaaggccaagatcgacaggctggatgcggccatgctggcctacatggcagagaaaatagaccttcatccctacgttccgctggagccatggcagcgccacctgggcgagcatgttcgtgcccgccggcaggtcatcgagctgttgaagatggcaaagcagcagctgctgccagtggcggacaagcctctgcgaaagatgcttcagggcaacatcaaacagctcgtgcgcagcgtggcgcggctggatgtgctgatcgccgagcagctgaagacgctgctcatccaacaccctcacttggcggcgttgaagacgctcaagggcgtgggcccggtgttgctggcggtactgatgtgccggttgccagagctgggaacccttggcggaaagcagatcgccagattggtaggcgtcgccccgctgtcgcacgacagcggcaccgtgcgtggcaaacgcgggatcaaaggaggccgagccgacgtccggaaggcgctctacatggcggccatgtccgccgcccgtcacgagccgcgtctgcgtgatttttacaggtcgctgcgtgcacgtggcaaggaaggaaaggtggccctggtagcggtgatgcgcaagatgctggtcatcctcaatgcgcgcgtgcgcgatgaaagagcggccatgcgcccagcctgaacgccttgggcggacaacatgaagggcaaaagcgtgccggccaacggccggcacctaccgcttaccgcgcgcgcaggaaaccgcccggaggcggcgggcaggtcggtgcggggccgttggagccccggacgggcggaaacaagaccccatggatgggttcccggcgtgtcccgcaccggcgtgcccgccgcctcagccacggatcaggcgggcgctggtcaacacagttg

SEQ ID NO: 9807 - DNA, 1489 bp, unidentified
  source 1..1489: mol_type = unassigned DNA; note = element_f5dc253
  misc_feature 1..2: note = core
  misc_feature 3..245: note = LE
  misc_feature 246..1469: note = CDS
  misc_feature 1470..1489: note = RE
  misc_feature 6..241: note = bridgeRNA
ctaatgagttctgggagtaagccatccggcagactccgagcggtagccgccggcaggtgagcactcgtgtgtcctggacttcgagtcctgacgaaagacagtgcccctgccggtcaggccgggagagttgatcgctgatgggatgtcgtgcccgccgcgtgcggcgtgagcactgtgttcatcaggtcgctgatagttctcccgctggctgctcacggtgatcggcatggagggcgggagaggcgttgcgactgttcgtcggggacgactgggcggaagaccaccacgacgtggaggtgatggatgcctcgggccgccggctgggcaaggcccggctgcccgagggcgtggcggggatgacccggctgcacgcgatgatcggcgagcaggtcggggacgaccccgatgcggtcgaggtgctggtcgggatcgagaccgaccggggcccgtgggcgcgggcactggtcgccgccggctaccaggtgttcgcgatcaatccgttgcaggcgtcccgctaccgtgaacggcacgccgtgtccggagccaagagcgacgccgccgacgcgcacgtgctcgcggacatggtccgcaccgactcccaccagttgcggccagtggccggggacaccgccctggtcgaggcggtcagggtcgtgacccgcacccacaagacactgatctgggaacggacccggcacacccagcggctgcggcacgcgttgctcgactacttccccgccgcgctggccgctttcgacgacctggacgccgccgacaccctggaactgctggccaaggcgcccaccccggccgaggcggcccggctgacggccagccagatcgccgcggcgctcaaacgcgcccgccgccgcgacgtggccgccaagaccgcggcgatccaggccgcgttgcgggccgagcacctcggccagcccgacgtcgtgaccaccgcctacgccgcttcgacccgcgccctggtcgcggtcctggccgtactggacgagcaggtcaagactctcgaggagcgggtcgaagcccattttggccggcacccggccgctaagaccgtcctcagccagccggggctggggccggtcctcggcgcccgggtgctcgcggagttcggcgacgaccccgaccgctacgccaccgccaaagcccgcaagaactacgccggcacctccccgatcacgcgagcctccgggaagaagaggaccgtcgcggcccgcttcgtccacaacgaccggctcgtcgacgccctcatgacccaggcgttctgcagcctgcgcgtgtccccgggcgcccgtgcctactacgaccggcaacgagaacgcggagccaaccacaacgcggccctgcgccagctcgccaaccgactcgtcggcatcctgcacggctgcctcaagaccggcaccctctacgacgagacgacagcctggtcgcatcacgtcgaacagatcgcggcttgacacttcagctcctgggatgt

SEQ ID NO: 9808 - DNA, 1383 bp, unidentified
  source 1..1383: mol_type = unassigned DNA; note = element_f5e3855
  misc_feature 1..2: note = core
  misc_feature 3..86: note = LE
  misc_feature 87..1115: note = CDS
  misc_feature 1116..1383: note = RE
  misc_feature 1089..1370: note = bridgeRNA
tgatggagtggatgcctccctcccctacggcatcgcaatgtgccaagctttggacgttgaaaccaagctaatcgaaggaggcatccatgaaagagattaccattatcggcgtcgaccttgcaaagaacgttttccagcttcacggcgctgcggccgatggttcagtcgtcttccgcaagaaactgacgcgggttcagtttcacaagttcatgttgggtcatcctgcctgcattgtggccatggaggcttgcggcagttcgcattactgggcgcgcgagatggcccagatgggtcatgatccgcgactgattgcgccccgctacgtcaagcccttcgtcaaacgccacaagaacgacgctgccgatgcagaggctattgtcgaggctgcgctgcgtccaaccatgcgctttgtggaaccaaagacgcaggtgcagcagggaggggcggttttgttccgaacccgttcgctgttcattcgtcagcgcaccgaagccgtaaacgcgctaagagcgcatctctatgaatttggctatatcgcaccggtcggcattcagaacgtgaagcagttggttttggtcgtagaggctgacagcagcgaactacccgagattgttcggttcgcttgcaaggaagctattgaacagatcacgcagctgaccgaacggctggcggctttggacaaggaaattgcccgtctctcgggtcagggcaaggtggccaagcgattgcgaaccatgccgggcgtcggcccgatcacggcgcttgcagtcgaaacctttgcccccgtgatggaaaactttcgatgtgggcgcgactttgcggcatggcttggtctcgtgcccttgcagcgatcgactggcggcaagcagatattgggcaagacctcgaagatggggcagcgcgatatcccgcgattgctcattatcggggcgatggccgtggtgggttcgtcggctagaagaggcgcgcccaaggggtcttggctggaaaaaatgctggcccgcaaaccccgcatgctggtcgccattgcgctggccaacaaaatggcgcggggcctttgggccatgttgacgaaaaacgaagaataccgggggccggttatgacagggttataaagctaccttgtcatagttagccgcccggatgtgtgaggaaggcgatgaccagcatgggcaaatgatcgatcagatcgggatcaggaaaaccaggggaagccaaagcgccatcttgagcgcgtcatggctgatttggacctgatccgcgtatctccataccggcccgcggcgtgtgaaaagccgcacagagaggcctgacacatgaccgcactcgatcacatgctcaaaaagtcaaaattttccttgcacaatgggaggcatccacaca

SEQ ID NO: 9809 - DNA, 1613 bp, unidentified
  source 1..1613: mol_type = unassigned DNA; note = element_f5e87de
  misc_feature 1..3: note = core
  misc_feature 4..274: note = LE
  misc_feature 275..1276: note = CDS
  misc_feature 1277..1613: note = RE
  misc_feature 14..294: note = bridgeRNA
ctactacaatgtatttatggttaataccccttacagccagtaaggaattatccatcttgttgcttaagctgttagaatgagtaaggcaataggtctggccgaatcctcccaggactttacgtccgtaaaatagtcagccaaccagccctcattcgcagcattcgttttacgcaggttgaacccaaaggcgttcgtgtgacacccagtagattgaacaggcaatgagtaaatctggtattgaccgttgctaattctttttaaaggagtatctgttatgaacgctgttggtattgatgtctccaaaggtaagagcactgtcaccatccgcagacccggtgatgttgtcatcatgcctccacatgacattccccacatacagtccgcgatcaatgacctgatcgaacagatcaggaacctagacggggagaccagggtctgcatggagcacaccggaagatactacgagcctgttgccacttggctttctgacgctggtatctttgtcagcgccgtaaatcctatcctcatccgagatttcggtgatgattccctgcgtactcccaaaaccgacaaggctgattctaaaaaaatcgctcgttatacccttgaccgctgggcaaaactgaagcagtatggaagcatggataaaacacgcaaccaactaaaaaccatgaaccgccagttcggtttctacatggcacagaagacctccatgaagaacaacctcattgccctgcttgaccaaacctatccgggtgccaatgacttctttgacagtccttcacgcagtgacggcagccagaaatgggtggacttcgtccatacctactggcatgtggactgtgtgcgctacaagtctctggatgcttttacggagcactatcagaactggtgcagacgcaagggttataacttcagcgctcagaaagcggagaatatctatcagttctcctctgatctgatcgccgtattcccaaaggatgatggcacaaaactgctgatacggcaggctgtggcaatgctgaatactgcatccgcaaccgtagaatccctccggctcaggatggacgagaccgcttccctgctgccggaatatcctgttgtcatggcaatgaacggcgttggcactacccttggcccacagctcatggccgagatcggggatgtgacacgtttcacgcaccgcggggcactgaccgcttttgccggtgttgaccccggaaagaacgattccggacagcatatccagaaaagtgtacctacaaccaagaagtgatcgccatgtctgcgcaaaactcttttccagatcatggacggcttaatcaagcgttcccctgatgacgatgccgtttatgctttcatggacaaaaaacgggcgcagggcaaaccttattacgtctacatgactgccggtgcaaacaagttcctacgcatttattacggacgggtgaaggaatatctttctacgcttgcagaagccgaagaaatctaaagaataccctcactttcccagcagaccagcgtcctacggtggtctttttgtagtacctatttttcaacccgtataaaattttcaaagttcatcaatttttacttgactttttatttgcaga

SEQ ID NO: 9810 - DNA, 1397 bp, unidentified
  source 1..1397: mol_type = unassigned DNA; note = element_f5ed673
  misc_feature 1..2: note = core
  misc_feature 3..78: note = LE
  misc_feature 79..1131: note = CDS
  misc_feature 1132..1397: note = RE
  misc_feature 1133..1384: note = bridgeRNA
tgttggggtggacggcccccgacggcatccagtgtgccagaatgaggtcgttgaagatctcagacagaggggccgcccgtggaaaaacttattcgaattggtgtcgatacgtcaaaggccgtttttcaactgcatggtgttgatgaagccgagcagccggtgctgcgccgcaagctaaggcggcgccagttcatgatctatttcagcacgctcccgccggcgctggtggctatggaagcctgcggcgcttcatatcattgggcgcgccaacttcaggccttgggccacgaagtggtgctgatcccaccgcagtatgtgaagccgtatgtgcagcgcggcaaatccgatgcggcggatgccgaggccatttgcgaagctgctagccgtcccaaactccgcaagaatttcgtgccgatcaagagcccagaacagcaaggcgcgcaaatgctgacgaagctgcgcgcgcagttcatcagcagacggacacagatctcgaattcgatccggggttacgctgccgagttcgggataaccgcgcccaaagggctcgcacatctcagcgaggtgctggctgatatccgcgccgaggcatcgattccggccttggtggtggatttgatggaaatgctttctcgagattttgccaggatcgatgcggaggtcggtcttctggataagaagctcatggcgctacaccgcggcaacgaaatgagccggcgattggctggcgtgccaggcatcggtccgatcggcgcaacgctgctgtcagtcaaagtcgtagatgcgaagggattcaaatcgggccgcgattttgctgcgtggcttggactgacgccgaaaaaccattccaccgcgggtaaaaatcgcctcggcgtgataacacgcgctggtgatgaaatgctgcgaagcgttttggtggcaggggccacggcagtaatcgccgacatgaggcgcggcgggagccgcagctggccctggttgaaggcgttgatcgcgcgcaagccgccaaaactcgtggcgatcgcgctcgcgaacaagctcgcgcgcatcgcatggaagcttatggtcagcggtgagcgataccaacccatcattgctgcgccatcgatcgacgtcgccatgccggcgtaaaagagcttagcgtcaacaacattgacgctagggccggaacttgcacaaacagaagaggtggtgtgatcggcgcaagccggaatatgtgagacattccgctcggttcaccggcagcaaatgccgttctcgtgtttggagctcactgtccagcgaagcccatcttggccagcagtcgaaagactcagcaacaggccggacatatgagcgcaagcgatccgatcagtgtcactcaatctgtttcttgcaagcagggggccgtccacata

SEQ ID NO: 9811 - DNA, 1340 bp, unidentified
  source 1..1340: mol_type = unassigned DNA; note = element_f5fe448
  misc_feature 1..2: note = core
  misc_feature 3..244: note = LE
  misc_feature 245..1222: note = CDS
  misc_feature 1223..1340: note = RE
  misc_feature 3..220: note = bridgeRNA
cttgtattatctatagtagtagttattaaagcccctctccaagggctgtgctacactgtaagggatgctgtggattggtggcagtttcctaccataagatggtttctgaaaggttccaaccacagccccttacaattttgttaatcagttagataccgccagacggttgatgtagaacaaggctacaaaggtaaggtgcactgtggaaacagcatcacaatcctaaccgccgaaggtttttgctatggtagtttctgttggtttggtattgatgtctcgaaggataagcacgattgccctgcgtacaaacctctaccgaaagagcctcagcctgagcaaaaccaaaaccgaccgggtagatgcacgaacgattgcacatatgctgttatccgatgcgggcctcaaaccctacacagatacagcataccacaacgaggagctaaagtcactgaccagataccgttttgacaaggtgaaagagcgggcaaaactgaaatcttctgtttcccgattggtctgcatcctgtttcccgaactggaaaaggtggttcccacacttcacatggtctccgtttacgcacttccggaagagttccccggcgccaaacagatcgccgcagcccatttgacaaggctgaaagcactgcttgaatccgcctccaaaggtcactataaacgggatatggctttggaaatccgagatgcagccagaaattctattggctctcggatgcctgccaagtcccttgaattgcagcacaccatccgcctcatccgggaactggatgccgagattgctgagattgaggagcagatccagtccttgatggaagaactcgattctcccattaccaccatcccgggcttgggcttccgtatggccgctatgatcctggctgaggttgacgacttcactcgctttgattcctcagacaagctgttggcttatgccggaatgtctccttctacctaccagtcagggcagctcaaaaactgctatcctcatatggagaagcgaggctcacgctatctacgctatgacctttacaacgcaaccaaatacgtctgccactgggatccgaactttaccgtttatcgcgctaagaagagcgcggagggaaaacactacaatgtcgcactttcccatgctgctaagaaactggtgcgtttggttttcgctatggaaaaatcacaacagccttattggagtttggcagtataaatctacctcgttagcctgtgccggggttcttacgaacctctgctttgctataccctttcgagagccatctgtttttctaccaccgccatcctttgagtgttgacatctaatagttaat

SEQ ID NO: 9812 - DNA, 1439 bp, unidentified
  source 1..1439: mol_type = unassigned DNA; note = element_f601f29
  misc_feature 1..2: note = core
  misc_feature 3..233: note = LE
  misc_feature 234..1424: note = CDS
  misc_feature 1425..1439: note = RE
  misc_feature 11..224: note = bridgeRNA
gtcctaccttccaagcgtgggtctgagctggtcattcgtaagatcggcggacccaggggtttcgggtatggctgtgagcttgtcgccgttggatggctcaaagaacttggccgcccggagccccgcgacgactcgaccgctcattgggatacgcgactcgatcgctgtgtaggacaacgtcggcgaggtcgtctgcgggatcagtgtgtgacgacgagctggcggaggtgaccgtgccccagatctgggccggagtggacatcggcaaggaacaccaccactgcgtggtggtcgacgagcggggcgaacgcctcctttcccgccgggtcttcaacgacgagtcggtcctgctggagctgatcgcggacgtcctcgcgctctccgaggatacgttgtgggcggtggacatcaatcacggcggtgccgccctgctcatcagcctcctgctcagccacgaacagccgatggtctacatcaacggcctcgccgtacaccaggcttcggccgcctaccgaggccagggcaagacggacgagaaggacgcgttcgtcatcgccgaccaggcacgcatgcgcaaggacctcggtcttctgcgacccggcgacgagatagccgtcgacctgcggaccctgaccgcccgccgcctcgacctggtcaacgaccggacccgccagaccaaccgtctgcgggctcaactgccggcgttcttacccgcgttggagcgtgcgctgaatctgagcaagaagggcccggttgttctcctcaccagctaccaggtgccggccgccatccatcgcagcggggccacgcggatcggaacctggctgaggaaccgcaaggtgaagaacgcggccgcgctcgctgagacagctgtcgaggcagccagggcccagcacactgctctgcctggagaaaccctcgcggccgccatcgtcgctcgcattgccaagggggtgctggccctcgacgaggagatcgccgaactcgacgcgctcatccaagcccggttcaacgagcaccgacacgcaacggtgatccggagcctgcccggcatgggcaccctcctcagcgccgagttcatcgccgccaccggtggcgacctggatgccttcggcacggccgaccgcctcgcgtccttcgccggcctttcacccgtgccgcgggactccggtcgcgtcagtggcaacatgcgccgcccgcgccgctaccaccgcggcctgctccgtgccttctacctctccgcgatggccagcctgagaacctgctccgcctcccaggcttactacgggcgcaagcggaacgagaggaaggggcacaagcaggccctgctcgctctggcccgccgacgagccaacgtcttgtgggccatgctccgcgacggagagtgctatgaggccctaccaaccgtcacggcaccggcttgacatcgtcattgggaa

SEQ ID NO: 9813 - DNA, 1431 bp, unidentified
  source 1..1431: mol_type = unassigned DNA; note = element_f602b96
  misc_feature 1..2: note = core
  misc_feature 3..84: note = LE
  misc_feature 85..1158: note = CDS
  misc_feature 1159..1431: note = RE
  misc_feature 1179..1418: note = bridgeRNA
tgatgaggtggacggcgccccgaacggcatcaagcgtgccaagatggtcgtcgttgaaagcgccatctggaagggaggccgtccgtgggcaagtctatcatcgacaactcgtctgtcacgcgcgtcgggcttgatctggccaagagggtcttccgcattcacgcggtcgacgcgatgggcttcgtcgtcattgcgcgctcggtcaaccgccgaacgcttttgaagtttttcgacgcgcttccccggtgcgtcgtggcgatggaggcctgctcctctgcgcatcactgggggcggcaattgctggaactcggctttgccgtgaggctcatcccgccggcgcacgtgaagccctacgtccgacgcaacaagaacgacgcagccgacgcggcggcgatctgcgaggcggcggggcggccgggccagcggttcgttccggtgcgctctgtcgagaaccaggcggcgctgatgcgccatcgggcgcgcgagctcatggtcgggcaacgcacggcggcgctcaacgccctgcgctgccatctgggggagatcggggtcatcgccgcgcagggggtgcagaacgcctacgctctcaagcggctggcgggcgacggcttcgacgacagcggcgagatcgttgttcccgattgcgttcgcctcgccctcgccccgctcgtccgacagatcgacgtgctcgacgaagcgatcgagacgatcgacagggagctcgaagcctccgccagggccgacgagaccgcgaggcggctgatgaccattcccgggatcggcccgatcaccgccacggcgcttctcgccacgatccaggacttcgccgcattttccagaggacgggagttcgccgccttcctcggactgaccccgcgagagcattcgagcggcggcaagccgcggctcgggcggatcaccaagatgggcgaccgctacctgcgcaagcttctggtccaaggtgcctgctcggccctcggccaccgcaaagggcataacgacgccctgcgccgctgggcgagcggactgctcgagcgcaagaccgtcgagtacaagttcaagctcgctgcggtggcgctcgccaacaagctggcgcggatcgtctatgcgctcgcgaccaaaggcggcgattacgacgaccggccggtcgcggcctgaatgaacggctcggcaagaagagttttcgccgcaaggcgatccgcatcgagggcgacggcgaagtgatgtgaaccaacggattcggctcggaagcccgggaaaacggcaggcgccgtcacaagcgcgtcaaactgatcgggcgaagagccatgcggaccagcatcagggccagcgggacagtcgtgtcccgcgacaacaggccgaagacatgaccgccccgaaccgttcgcaaagcctcaaccaaacccttgacctcggggcgccgtccagaca

SEQ ID NO: 9814 - DNA, 1442 bp, unidentified
  source 1..1442: mol_type = unassigned DNA; note = element_f60cbc0
  misc_feature 1..2: note = core
  misc_feature 3..220: note = LE
  misc_feature 221..1435: note = CDS
  misc_feature 1436..1442: note = RE
ctcctaccatgaattcatgtatagcggggtataatcatgaaccatggaaaggcaggaggactcactacttcttggatcttggaatcctcacttcagtctgtcccatgcctcccgaatcatgatgagttgattggatctttgaatccttgtcaagctggaggattgatccggaggctggcggggtatctgcttttcccatttcattgctgggggtgcggagatgtctgagacaagggacaagggatctttcagtggttttctggggattgatatctcgaagggaacgtttgacggatgctgtatcgacagggaaggtaaggtgctctttcatgtttccctgcccatgaacagggctggctttgagaagctaattactcaggtctgtgctatctcgatgccgcaggggtcgatcctgattgggatggaatccacggcctgctaccacgtcagtctgttctcgtttctgatggcgctgggctatagcgtctcggtgatcaatcccctgctgatctcaaacttcacgaagctgcaattacggaagaccaaaacagacaagaaggatgccaccgtgattgcccggtttctttcagcgcatggagattccctgccgcaaatgatggctgaatcccatatcgccgacctacgggagctttctcgtcaaagagagagcctgctgcatcagatgacagcccttaagtgtgacatcaagagggtgctttccatgaccttcccggaactggaacggacgatgggcatcttcacacggaccacgcttcgacttctgggtcagtttccctctgctcgttccctggcacaggccacccggaaagagctggccccattgctccatcatgcctccaggggaagaagcacacccgtgtccgttgatacccttttaaagctcgcccggtcttccgtaggaacggcaaatccctcccgggagatgatcctccggcagaaggcgtcgatcctggttcacctcgaagagcacctgcgggagatgaccaacaccttgatcgagctctgccagtccgccctggagcgggatgtcgagatcctgacctccatccggggcattggggacaagacggccgcaaccttcctgattgagatggggggtgagatccagaacttcgaaacccacaacaagttgattgccatggccggactggacccgtcagtctatcagtccggccagtatgacgggcacagtaggatcaccaagcggggcaaccggcatctcaggagggtgatctggctaatgacgatccgggtgatccagttcaatgatctcttcaagagctattaccgtaagcggatcgaggacggacttcccttcaaaaaggccgttcttgccaccgctcataaattaatccggatcatctttgtcttgctgacccgacgaacaatgttctgtcatcaggtgacttcatgatagttga

SEQ ID NO: 9815 - DNA, 1363 bp, unidentified
  source 1..1363: mol_type = unassigned DNA; note = element_f61d8cb
  misc_feature 1: note = core
  misc_feature 2..244: note = LE
  misc_feature 245..1129: note = CDS
  misc_feature 1130..1363: note = RE
  misc_feature 1125..1315: note = bridgeRNA
gaatggaagggacttcccctgattatgcgcctgattaactcttgtgcaatcatggggtacacatcgtcccggaggaattcgttatgactatcacgactgtcggtatcgatcttgctaaaaatgtgtttgctgttcacggtgttgatcaaaatggtagaactgttctggttaagcctaaagtatcgcgtgctgcacttcctgagttaattgcaagtttgcctccctgtgttatcgggatggaagcatgctccgggctcactactgggcaagattgtttcggcagtatggtcatgagccacgtctgatggctgctaagtttgtatcgccttatcgtatggccggaaaatcaggaaaaaatgatgcagctgatgctcaggctatctgtgaagctgttcgtcgtccgcatatgcggttcgtaccagtgaaagacgaaagccagcaggccatgcagtgtttacatcgtacccgtcagggttttatcgaagagaaaacagcaacgtataatcgtctgcgaggattgatatctgaattcggtgtcatcgcgccacaaagtgctgatgccctgcgccacatggtttctgtgcagaagagctctttaccgcttcaggttcagcaatgtgttgatgatttgatggaacacgttgatcgcattgaagctaacatcactgaatatgaccgaattttgtcccacatagccaaaacagatcatcgcagtcagcggctgatggagctaaagggcgttggtcccacaacggcctgtgcactggtcgccagtatcggtaatgcacatgattttaaaaatggacgtcaactggcagcctggctggggctgacgccatcacaatacagcagcgggggaaagtcgaaactcggcaggatcacaaaagccggtgattcgtatctgcgaacgcttctggttcaggggctcgttcagtgcttattggcgccgggaaaaggactgactcattcagccgttgggtttgtatgttggttgagcgcagagggtactggcgggctgttgtggccatcgccgccaaaaatgcgcggctgtgttgggcatcactacattacggtgatgatttccggctgtactcagtcaactaaagctcgaagctgtataaccatctgacctgcaattcgttgatgataaagggttagaccccgtgaggcctatctggctattgtacaggatatacgtatccgcttaacgaacaagaacctcacgcgcgtctttcatcagggcccgaatcgatgacgattcatcatggccgtttatagtaccgcagtctctcccctttatttttactgaagagcagacagaaaccataaataccggctttgacatgccggggaagtccttata

SEQ ID NO: 9816 - DNA, 1348 bp, unidentified
  source 1..1348: mol_type = unassigned DNA; note = element_f648975
  misc_feature 1: note = core
  misc_feature 2..58: note = LE
  misc_feature 59..1108: note = CDS
  misc_feature 1109..1348: note = RE
  misc_feature 1121..1342: note = bridgeRNA
taatgggatgacctgcctcgccctacctcgacgaaggggggaacacaggaggaagatcatgaccaagaatgagcaagggaatgccgccgtctatggcgttgatctcgggaagaccatcttccacgttgtcgggctcgatgagcgcggcgctgtcgtccagcgcttgaagtttcgacgggagaagcttctggccttcttcgaagacgctgggaaggcgctcatcgggatggaggcctgtccgggttcacagtggttggcgcgcaagcttcaggccatgggacaccgggtgcggattattccggcacagttcgtgaggccctacgtgaagtcgaacaagaacgacaccatcgatgctgaggccattgccgaggcggtgacgcgtccgacaatgcgctttacccaggtgcgctcgaccgagcaggttgacctccaggccctccaccgcatccgggaccagctggtcacaagccggacccggctcatcaaccaggcccgcgctttctgcatcgagtacgggatcgcaatccgtcaaggaactggtctgttccgccgcgacctgccgctggtcttggacgacgagacgaacgacctgaccccggccatgcgccggatgctgcggcagatcttcgacgatgtgatccgccttgatcaacggatcgccgaggtgacacgggaggtggaagcccttgcagcacgcgatgatcgggcacggcgcctcatgtctatcccgggtatcggtcctctagcggcaaccgccctcctggctgccattggcgatggccggcagttccgacgtgcccgcgatctagccgcttggttgggccttgtcccgcgggagcattccaccggaggcaagacgaccctactcggcatcagcaaacgcggcaatcgttttatcagacgcctgctgatccatggcgccagatcctgtgtggtccatcttgatcgaggccgtgatcgtctcggcggctggatcgatgccctgcggggcaggatgcacctgaacaaagtgacggtcgccttggccgcgaagatcgctcgaacagcgtgggcgatcatcacgcagccgggcgcaatctacgagcgtcgagatccggccgtcagctgatcctgacggtctacagaaagcgaggttcgggagagtgatgacgaaacagtcgatcagcggatcgtaagccctgtacaaaaaggcgtgctcctgcacgaaccactatgtgggaacgatacgcgcggatctcatcatggcctggctgcaaccgcagctcactcgcgagaggccggatacatttaggcggactaccatcgtcagaacgatcacgacccttgcccgggcgaggcaggtcataca

SEQ ID NO: 9817 - DNA, 1245 bp, unidentified
  source 1..1245: mol_type = unassigned DNA; note = element_f64a3d9
  misc_feature 1..3: note = core
  misc_feature 4..233: note = LE
  misc_feature 234..1223: note = CDS
  misc_feature 1224..1245: note = RE
  misc_feature 7..210: note = bridgeRNA
gctattagattagcattctgtaaaatcaggtatttttattaagatatatctgaagaaccagaggaggtaaggagaactatctcggcaattaagtcaggacttatcccgagcattagtccttaactcctttgggttctcgaactgtttagaatgctaagctttaaggcttaataatagcgttagttgcgagcccttactggtcctttcagaatttattaactctaatctaagttatggaaaatctgtttatcggagtagacatttcaaaagacacttttgatgtttgcatcatcaatcaagaccatcaaattattagaaaggatttagtttttgacaactcttctaaagggatcaaagtcttcttttctgaaataggattactaaaggtcgaaggacattgggtttgtatggaagacactgggcattatggggctcttttaatttctaaacttcttgccgctggtgtacctacatcggttgtaaacccacttgaaatcaagaggtcatctggaattactagagggaagtcggatccaattgatgcttttcgaattgctagttatgccgccacctttaagcataagctggaagaatacattctaccaagtcaagagcttcaaaaactcaaagcgatgatgtcgcaacgggagcttatgattaaaatgtccgtacaggcaaaaaacaacttgaaatcacaacttgtgctgcaacaaagcgtcaatataagagaactacttaaaatttctaaaaagacgattgttgatctagaaagtaatattaaaaagcttgataaagctatgcaggagctattaaatagccaggaaaacttgaaagaaagctatgataagataacaaaagtgattggtgttggtccaatcacagcgatcaaatgcatcgttgaaactaggaacttcaccaagttcacatctccgagaaaattcagctgtcattgcggtgtagctccattttcttatcaatcagggacaagcgttaagggaaggtctaagacaagtaaactacgtgataaggctctaaaaagcgtattgtttaatgctgcggcaacagcaattaatcacgatccgcaactaaaaatctattacaaaagaaaagtagatgaggggaagcacaagctctctgtgataaatgctgtagcgaacaaaataatattaagaatatttgctgttgcaatgagagatgaaccatttgtgaaatttatgcaataaaagcttgttttaatcttagaat

SEQ ID NO: 9818 - DNA, 1205 bp, unidentified
  source 1..1205: mol_type = unassigned DNA; note = element_f64b909
  misc_feature 1..4: note = core
  misc_feature 5..230: note = LE
  misc_feature 231..1187: note = CDS
  misc_feature 1188..1205: note = RE
  misc_feature 43..208: note = bridgeRNA
cttgtatggataatacatccatcttaattactatttaaacccctttcgggtaatgtgagacccaggcttaagcagcaacttaagctttccttgtcgtagttcgattgagcaaaggctcctctgttgagagaccgataacaagaacgaacgcgataaaggactccaagcaccacactcgaatagtctactgggtctcgaacccgcattatgcaagtaagagttagcttattatgaatacaaaaacaaagcaaaacataaacgtaggtgttgataccggaaagtaccaactcgatatttatatccgtccattggacatttacttcactgttccaaatgatgataaaggcattaaagaagccgtcaaaacgattaagaaatacaagcctgagcgcatcgtaattgaagccactggtaggcttgaaatgccctttattttggcttgcgctaatgccaatttacctttcacaatcgctaaccctattcatgttaaacggtttgcgggagcaataggtcaacgagccaaaaccgataagcttgatgcgcaattaattgcgcattatagtgaagcgattaaacctaaattatcacagcttaagccagataccatgcaggcaatgagtgatttagtgactcgacgtaaccagttgcttacgatgcaaacaatggagaaaaatcgcttacaaataatgcccaaagcactggcgatgacaatcaaaccagtactaactttatttaataatcagataaaaaagattgaagaaaaaatcgttaaactcattgaaagctgccctgaataccaagctaaaaatatgatattacagagtatgactggtattggaaaaatagctgctgcatcaatcatcagtaacctacctgaactgggttacatcaacagcaaacaagcaagtagcctgattggtgttgccccaatgaaccgagaaagtggtcgatataaaggccatcgaaaaattcagggtggtcgacctcaagtgagaacggttttatacatggcgatgatgtcagcgatgcaatcaaacccagttttcaaagtaacatatcaacgtttattggcagcagggaaacccaaaaaagtagccatcatcgcctgtattagaaagatgattgtgatattaaattcgatgctaagagacggtgtagtgtgggaagcgccaaaagttaataattaactattgacgccatagtct

SEQ ID NO: 9819 - DNA, 1418 bp, unidentified
  source 1..1418: mol_type = unassigned DNA; note = element_f654425
  misc_feature 1..2: note = core
  misc_feature 3..293: note = LE
  misc_feature 294..1403: note = CDS
  misc_feature 1404..1418: note = RE
  misc_feature 1..292: note = bridgeRNA
cagtgagactgtcggaaccggtattccctgaggatccttgactcgcagggtgatggatgcgacaggatgctggtgccgggtgcgcccagggttcttgaccctcactccgatcgacagctgtgtctttccccggatctgtcagtccccaggcgtacccagtgaggcgctaggcctcgccgccggagtgacctaaggagagcctgcgccaagtgtgctcatcactgtcttgtccgccggtggtcgatgcccggggccgtgccccttgcacatcggatggaccggaggaaaacgacatgaccagaacgcccgaaaccagcgagccggaccaggcaccgacgcccgtcttcgccggcgtcgacacgcacaaagaactccacgtcgccgccgtcatcgatgccggcgagacagtgctgggcactaagagcttcccgacaacacgcaccggctaccgggcaatgctcgcctggatcggcgatttcggtgacttggcccggatcggtgtcgagggcaccggatcctatggtgccggcctgacccgacaccttgccaaagccggtgtcatgatccttgaggtcgaccggcccgaccggtctgaccgccgccgtaaaggcaaggacgacgatctggacgcaatcaatgcagcccgcgccgcactgcatggccgacgcaccagcatcccaaaaagcaaggacggcgccgtcgaagctctgcgcgtgctgcgcatcacccgcgcgcacgcggtccgggagcgccgcagcgccctgcaactccttcggatgtcgatcgtctccgcgccggaggtgcttcgcgaccaagtccgccacctgacccggatgcagctcatccgcaccctcgctgcatggcggccggacgtatcaaacgcgaccgaccccatcaccgcctaccgggtctcgatgaagtccctggcccgccgctacctggaactcaccgacgagataaccgacctggacgagctcatcaaccccatcgtccaagccctcgcaccccaactcctcgaacgcgtcggaatcggcatcgaagtcgctggacagttcctcgtaacggccggtgacaaccccgagcggatgaaatccgaagccgcattcgcgatgctctgcggcgcttcacccctacccgcgtcctccggaatgacacaacggcaccgactcaaccgcggcggcgaccgccaagccaaccgcgccctgcacctcgccgtcatcagccggatcaggctcgacccgagaacgcagacgtacgtcgcgaaaaagaccgccgaggggcactccaagatggagatcatccgctgcctgaagcgatacctcgcccgagaggtctacttcatcctcaaccccggccaccagcacatcgtcccgaacaccaggcaacaccgaaacgccgcttgacacttaggagagcat

SEQ ID NO: 9820 - DNA, 1278 bp, unidentified
  source 1..1278: mol_type = unassigned DNA; note = element_f658ff0
  misc_feature 1: note = core
  misc_feature 2..213: note = LE
  misc_feature 214..1266: note = CDS
  misc_feature 1267..1278: note = RE
  misc_feature 5..218: note = bridgeRNA
actcagtctaagatcgcctctgaacgtcggatcgatctgacccgtgctgggattggcgaagctgccttggcgttgacctgtcgatcggattccggcgttccccgagcgttgccgggctcaccgtctgtgacctgataggagctttgttctgcaccgtgagtgtcctgtcctacgagtggggttggcgatgtgcccactacgacgaaaacacgcatggaacaaaacaacgaagtgattctgggcgtcgacacgcatctggatgcgcatgtcggggctgtgattagcgagacgggcaaacttcttggaacgctgtcggtatcgaccgatacggcagggtatctcaacctggtgagctgggcgcattcgttcggtcatctgcgccgcgccggcgtagaagggaccggcacctacggcgcgggtttggcccgcgtgctacgcgatcacgagattgaggtgctggaagtcaatcgccctgaccgggcgatgcgccggtcccgaggaaagtccgatcccactgatgcggaaaacgccgcccgcgcggttctttctggcagagcaacggctgttcccaaggagcagtccggcgctgccgaagcaatgcgcgccgtctccgttgccagacgcagcgcggtcaaagcgaaaacgcaagccatcaatcagttgcgcgctttactagtcagcgcgccacaggaaattcgcgaacgccttctgaaaacgaagacggcggaatgcgttgcgagctgtgcccgcctgcgctcgttgggcgacacgcccatgttgcaaacgttgacgaccacgttgcgcttgctggccaagcgctggctggcgctggcagaggagctcaatacgctcgatgccatgcttgatcgcctgaccagccaacacgctagccggcttcgtgacagattcggtgttggcccacagaccgctgcagtgcttgtcgccgtcgcagacgacaatcccgaacgcctgaaaagtgaggctgcgctggcggcgctttgtggcacgagcccgttgcaggcatcgtctggcaaaacggtccggcatcgcttgaacagaggtggcgaccggtctgcaaacaatgccttgtggaccattgcaatggtgcgcatgagaagcgatcctcggacccgtgcttacgtcgagcgccggaccaaagaaggcatgtcgaacaaggaaattcatcgctgcctgaagcgctatatcgtgagggagttgtacccgctcatcctggccgatctggccgattcgacgcgcgtcccttgacataggagcgtc

SEQ ID NO: 9821 - DNA, 1394 bp, unidentified
  source 1..1394: mol_type = unassigned DNA; note = element_f667c3c
  misc_feature 1: note = core
  misc_feature 2..84: note = LE
  misc_feature 85..1128: note = CDS
  misc_feature 1129..1394: note = RE
  misc_feature 1164..1386: note = bridgeRNA
taatggaatggacgccccttcctaaaccggcgatgccggtgccagactgagagtgtcaacgtacaactctcgaggggcgttaccatgagcatcgctacaatcggcttggatctagccaaacaagtttttcaacttcactgtgtggatgcgcagggcaaaacagtcctaagcaaacaactctcccgacaacaactcgcaccattcttcgccaacttaccatcttgtttgattggcatggaggcctgtggcagtgcgcatttctgggcaagaaagctagaatcatttggtcatacagtgaagctgatggcatctcagtttgtgaagccctatgttaaaggcagtaaaacggatatggccgatgcggaggctatttgcgaggcggtgactcggccaaatatgcgttttgtggcaatcaagttgccggagcaacaagccatgctcgcagttcatcgggcgcgtgccagttttgtcaaagccagaactgctcaagccaatcaaatgcgaggtttgttggctgaattcggcattgtgatgccgctggggttatcaacattgcgccggcgtattcccgaagtactggaagatgccgaaaacggcttacctgcaatgatgcgcgacttaatccagcgacttttgaatcacttgaatgaattggatcaacaagtacttgaatacgataaggtcattatgcagtggcatcgtctgaacgaatcatcgctacggattgcagcactaccaggcgtgggccccattaccgcaactgcgattattgcgagcgtcgccgacgcgaaatcatttgaagatggtcggcagttggcagcttggcttggcctcgttccacgacagcattccagtggcggtaaaccggtattgctcggcattagtaaacggggcgatgtttatcttcgcaccttactcattcacggtgctcgcgccatcatcgcgcattttgaacgtcaacgcgaacgagctgacccgtggctgcaacgcatgcttgggcgctgtcatcgcaatgttgctgtcgttgcgctcgccaataagaatgctcggatcatttgggcgctgctagccaaagatcgtcggtatgaggccgattaccatgctgtttcaccagttgccagaccctaggcggggctaaacaccgtctacaaaagaaaccgtttccttcgattgcgcaggcaatcatgacattgatggcgatataggtcagaccgtgattgagcgaacctgatttgtgcttggcacttcgagtgcgctttgttgtttaggactcaatcagcggaaatccatcagggacagaggcagtgcttcgttaaagtccggatatatggctgcaatcgactttgtatctcatcgatgaattgaatgcttggcaaagtgggggcgtccatata

SEQ ID NO: 9822 - DNA, 1894 bp, unidentified
  source 1..1894: mol_type = unassigned DNA; note = element_f671e01
  misc_feature 1..2: note = core
  misc_feature 3..512: note = LE
  misc_feature 513..1745: note = CDS
  misc_feature 1746..1894: note = RE
  misc_feature 186..472: note = bridgeRNA
ctcgtataatagtttttgttaaggttttatataagaatttccagttaaacacttacgtgttcaccttaaactcactgaaaattcacttcaaagacatcttcaaagatttcttcgaaggctctctaaaaaacatacataaggtatatgcttaatacttagtattaagcggccttgcggccactgtacattgaaaaattaatcttttttgctattgaacttaactaatgctcgtgaaacaatataattaagctattgaggacggttctgctttctcctgttgaaccttttatggttgcttctttcaaagtcagttcccctgtcctgatgttagctttaaaccgctgggtgtttttctctcaaagcactctcctgtatggcagttcaaggagtcgtgcatagtgctttaagaggtgtattctaattgcgaggatgttgatgcatcaggtagcacgggcattagttaagttcaatagctttaatttaataataaatcaaagaaggaggtgatttcattgtcaaattcattattggtaggtattgatgttagtcttaaagacaacaaagttcgtatcctccatcctgatggaaccagcctttcaaaatttactgttttaaactctgttactggtgcaaaagcttttactcaaagagttgcagcagttgcagaaaaacataattttgattcaattgtaataggtcttgaatctacttcagtctacggcgatccacttgtttacttcttaaagcaagacgccgcaattaatagattcaatactaaaatccatgtacttaaccccacacaggtcaataagtttaagcaaatgtaccctgaccttcccaaaaccgatgatatagacgcttggatcatagctgaacatctacgcttcggtcgtatcaataaggaggtctacatggatgataagtataaggctcttcaaaagcttacaagagccagataccatacagttcaaagccttacaaaagaaaagaactggttccttaacaatctattcttgaaattttcttcacttgctcaagagaagattttttcagatagatttggagctacatccagcagcatcattgaagatttcttttctgtagatgaaatttcttatatgccaatcgaagaattggtagagttcatcaacaaaaaaggtaaaggacattttgagaaccctgttgaagttgctgccgctgttcaaaaagcagcaagaagttcatatcgtctccccaagacggttacggactctgttaatcaggttctctctgtatcttttttagctataaaagcctacaaagaacagcttaagatctttgataaggcaatcgaggaacagatcaagctaattcctaatactttgacctcaatcaaaggaattggtcctgtttactctgctggaataatagcagaaattggtgatattcatcgtttcaatgatcaagctgcattggcaaaatttgcgggcattgcctggacaaaacaccagtcaggcaattttacggctgcatataccaaattaattaaatctggtaatagatatttgcgttattacctcatggaagccactaacaaagtgagattgcacgatcacgagttaaaacgcttctatgataaaaaatacagccaaaccccaaaaactgcacataagagagcacttgtactaactgccagaaaatttgtccgacttgtttatgctctgctgcatagcaatcggctttatgttccaccaaaaggaaattaattttcttttggttgtaccatatcctaccatatttaacatttgattttggtaggtttattagggtgatgttcttttgcgtcttttttacaaaaactatacgttttcagcctttattttttccatttatctcttgacattttaccgctgga

SEQ ID NO: 9823 - DNA, 1336 bp, unidentified
  source 1..1336: mol_type = unassigned DNA; note = element_f677c7f
  misc_feature 1: note = core
  misc_feature 2..71: note = LE
  misc_feature 72..1100: note = CDS
  misc_feature 1101..1336: note = RE
  misc_feature 1116..1330: note = bridgeRNA
taattagatggtccgccgcggatcatcccgagatgggatgatccagcaacacacagtggaggatcactcgcatgcatatcgcgtcggtcggcatcgatctggggaaaacgacctttcacctggtggcactggacgagcacggcaagatcatcatcaagagtaagttctctcgccagcagttgctcgccttcacggcgaacctgccggccagtttggttggcatcgaagcctgctctggcgcgcacttcataggtgcagctctgcgagagcaagggcacgatgttcgtctcatcccggcacagttcgtaaagccctttctaaagtcgaacaagaacgacttcctcgatgccgaggcgatcgccgaagcggtagcgcgcgagaacatgcgcttcgtgccgattaagaccgacgatcagctcgatctgcaagcactccatcgagtacgggaccggctggtgcatcgtcggacggcactgatcaaccagatccgaggttttctgctggaacgcgggatcgtcttcccggcaggcgcgtcgaacctgcgcaatcgcatggccgcgatactggaagacgcggagcagaacctgacgcctcggatgcgcaaggtgctcgctcatctctggcaagagtggaaggatctgaacgctgagatcgactcggtcagcaatgagatcgattccatcgcggagagcgatcccgcgtgccagcggttgcgaaagattcccggagtgggcccgctggtggcgacagcgacggtagctgcgattggaaacggcgccgcctttcgcaaaggacgggagtttgccgcctggctcggcctgattccacgacagcactcgaccggaggcaaggcgcgactgctcggcatcagcaaacgagggagcgtctatctgcgtcgcatgttcatccacggcgcacgcgcgatgctgctgcgagtgaagtacgacactggccgattggggcagtgggcgcatgaactggagctgcgagcaccacggaacaaggtcgtcgtggcagtcgccaacaaactggcgcgcatcgcctgggcggtgctctcgacaggcaacgagtacaggaacgcggcgatcgcagccgcgtagtagggccaggttctgaaagtctgctaaggagaggctaagacgaaacaacagtcaaacggcgtgctgcaaaaccttgctacgctaagggtcgaaacagaccggtcgccttattaggagcagcacgcgcggatcatcatcatggcccggagcaaaagctccaaccagaggccggatacatttacgcagactgtgcttcgttcattactcgcccttgcagtcacgcggcggaccataca

SEQ ID NO: 9824 - DNA, 1362 bp, unidentified
  source 1..1362: mol_type = unassigned DNA; note = element_f678735
  misc_feature 1..3: note = core
  misc_feature 4..82: note = LE
  misc_feature 83..1111: note = CDS
  misc_feature 1112..1362: note = RE
  misc_feature 1107..1348: note = bridgeRNA
tgatggggtggacggcccctgctcaccggcatcgaagtgccataaggtggtcgtcgtgcaacgccacaagagggggccgtccatggataagattagcatcatcgggttggatttggcgaagggggttttccaggtccacggcatcgacgcggatggggaggtggcggttcggcgccagctccgccgagcccaggtgctcgggtttttcgcgcggcttgagccatgcctgatcggcatggaggcctgcgccacgtcgcattactgggctcgggagatggtggcgctggggcacgaggttcggctgatcccaccagcgcacgtgaagccctacgtccggcgcggccgcaagaacgacgccaacgacgcggcggcgatctgcgaggcgttgcagagcaagcggatcaccgtcgttccggtcaagtcgccggagcagcaagccgggctggtgcttcaccgggcccgcaacctgctggtgacccagcgcacgatgctcgccaacgcggtgcggtcgcacctcgccgaattcggcaccatcgaagcgcaaggagaaaaagggcttggcaagctgatcgtgctggctttggacgccaacgccccagggctgccggccttcgcgcgggaagggctggccatgctcgccgcccagttgcgcgaggccgaagcgaagatcgacgcgctgaaccagcaaatccgggcgctgcaccagagcgacgaggcgagccgccgggtggccaccatccccggcatcggcccgcacatcgccagcgccctcgtgaccgcgatcggccacccgcagcgcttctcgagcgggcgcgacctctcggcatggctgggcctggtgccgtcgcagaattccactggcggcaagacggcgctcgggccgatcaccaaaaccggggaccgctatttgcgatccctgctcgtgctgggcgccaccgcgatgctcaggaggcgcaaccacggattcgcgccttggctcgacgcgctgctcggccgcatgtcggcgcgcaaggcgaccgtcgcgctcgccaacaagatggcccgcatcgtctgggccatcctcgtcaagggcggcatctaccagccgccccaggtcgcgaccgccgcctgatccaagcgcgagacacaggggaccagaagcgagggcgaagacagcgtgatggcgaccgaccaactccacgaccgcagaacccttgtaccgtcacggccgtctcaggtcgcgggaatgatttgggagcgtgtcgcggatcacatcatggccagcggtcgttcagccgcgaaaacaggccggacacatgactgcaacagcctggtcgctcgcatcgttgatttttcccttgccaagcaggggccgtccacaca

SEQ ID NO: 9825 - DNA, 1381 bp, unidentified
  source 1..1381: mol_type = unassigned DNA; note = element_f680c06
  misc_feature 1..2: note = core
  misc_feature 3..85: note = LE
  misc_feature 86..1111: note = CDS
  misc_feature 1112..1381: note = RE
  misc_feature 1111..1368: note = bridgeRNA
tgatgtggtggacggcgcccgctcccggcaccgaggtgccatagcgtgatcgtcgtatgacgaatcacacgaaggagccgtccccatgcagattgctacgatcggtttggatatagcgaagaacgtgttccaggttcacggtatcgacgcggccgagaacgttatggtcagaaagcaacttcgccgcagccaggtgatggcgttcttcaaagccttggcgccatgcctggttggcatggaagcctgtgccacctcgcactattgggcgcgtgagctgacgaagctcgggcatcaggtccgcctgatgccggcgaaggacgtgaaggcgtacgtcaagcgcaacaagaacgatgcggccgatgctgaagccatctgtgaggcggtgcgacgcccaatcatgcgctttgtgcaggtcaagtcggcggagcaacaggcgcaattgatgcagcatcgggcacgcgatctgctcattcggcagcggacccagttgatcaatgcattacgggctcatttggccgagctcggcgttgcagcggcgcagggccgcgccggggtcaaggagttgctgacgcttattaccggagaagaagatcaaggcttacctgtggatgcgcgagccagcttgatggttctggccgcccagcttcaggccgtgcagacgatgatcggctcgctcgagaagcggatcgtcaagcagcatcgcgcgaacaaggagagcaagcggctgcaaaccatccccggcgtcggggttatcggggccagcacgatcactgcggttgttccggatccgacggtttttcgttcgggccgtgactttgcagcctggattgggctggttccccgcgaagattcaaccggcggcaagcgcaagctcggaccgatctcaaaacagggcgaccgctacctgcggcgcatcctggttgtgggagcccattccgtgctccggctcgccaagcagaacccggagaaatatccctggatcacaagactgctggcgcggcgaccattcaaggtcgtggccatcgctcttgccaacaagatagcccgcgtcgcctgggcgctattggccaggggcggaacctaccgggcgcctcagatcgcgacagcgtgacacgaaacgagagtataggttgcgttgtgtttcatgaactgcaggggtgatcacggcattgatgcgaaacggttgagaccgtcaatcgggaaaacccgcgaatgtgccacgcgatacttgagcgcgagctaatgtttgggacccgatcagcggattacatcagggccagcagccacaacggctgcatccaaaggccgaatacatggctgcacccgaacccttcgccgaaatgcccgatttttcccttgcaccgcgggcgccgtccataca

SEQ ID NO: 9826 - DNA, 1211 bp, unidentified
  source 1..1211: mol_type = unassigned DNA; note = element_f69b1e4
  misc_feature 1..2: note = core
  misc_feature 3..191: note = LE
  misc_feature 192..1178: note = CDS
  misc_feature 1179..1211: note = RE
  misc_feature 12..200: note = bridgeRNA
cttgtatctcttcttgatgagtgtttagctagcacttgtcacatcgggaagacagtgagctcgtacccaaccagagtgtgaaaatgctgtgacgtagattgagccctgacttcctaacctccattaaactgaatggtatcctagcgccccaactaagggtgacgctgcatgtacaaggggagtagatagagatgaaagcttttattggcattgatgtgggtaaagaaaagttagatatttcctggctacgcgatgtagtcaaaagtaaaaagaaaacgaagatttttaaaaataacccgcagggctatcaagagttagttgcctggttgataaagaatacaaatttagaagcacaagatattgttattacaacagagcccataggtgtttatagcgagccgctgatgtatttcctatatgagcaaggatttattttattacatgtaaatcctggtaaagcaaaacagtacgcaagttcattagggcttgtccataagacagacaagtcagacgccacaatgcttgctcgttatggtcatgaccaacagcactcacttttaagttggcagcctgagcctgttgaagcgagagagttaaaagtaatggcgcgtagacttgaagcacttgagcaagacttacgtcgcgaagaaaatcgttatgaagctgttggtttctcaggtgcatctactcgagttactcagtcaattgaagatatgatagctgcactaaaaactgagataggcaagctaaaaaatgacattgatgagcatattgatagacacccacaattaaaaaagaaccgccaattgcttcaaagtatcaaaggtgttggagatgtaatatcacgtatgatggtgtccttgatggcatgtaaacagtttaaaaatgccaagcaattagcttgttacttaggcttaatacctaagcttaatgagtcaggcaaacgggctggaaaaacaaccttaagcaaagaagggcctgggtatataagggctaaattgtatatggctgctgtagtagctgtacaacataatccagatataaaagcccaaaataagcgattagtggagcaaggtaaaacaaaaatgcaggcaattggtgctgcaatgagaaagctgacacatatctgttttggtgttgtgaagaatcaaactgaatatcagccccaagctatttaaagaaagcttgaggctggttagaagagatggtat

SEQ ID NO: 9827 - DNA, 1610 bp, unidentified
  source 1..1610: mol_type = unassigned DNA; note = element_f6a000f
  misc_feature 1..2: note = core
  misc_feature 3..270: note = LE
  misc_feature 271..1491: note = CDS
  misc_feature 1492..1610: note = RE
  misc_feature 12..290: note = bridgeRNA
ctgatataatatatttgaccggaaaaagtgcgggatttggttttgcacttttcaagttccgttacctaagctataatggaagggtatttaaggtctgacgtttgcctccttgggcttttacgtccgtattaaagacagtcagccgtccttccgttatagcgttcggtttatgcaggttgggcttcgcgtccgtataacgaatcagattgaatcggcaatggataaggtcggtcgccttgattacaaattcttttcttggaggttacacttatgaacgctgtcggtatcgacgtctcgaaaggcaagtctaccgtagccgtcctgcgcccgttcggagaaatcgttgcttccccgttcgacgtatcacacagtccaaaggaactttcggagctcgtcactctccttaaaactttggacggcgatacgaaagtcgttatggaatatacaggcaattactatcttcccatagccctgtttctccgtaacaacggtttatttgtttccgtagtcaatcccattttggtgaaagattacagcaccaaatctttaaccgtccgcaaggttaagaccgataaaaaagattcgcttaaacttgcttcatttgcgctcgatcgttggaaagaactttcgcctttctccgctcaatccgaagctcggcttctgctcaaatcctacaaccgacaatacaaccaatacaataaactcaaagttatgttaaagaataatcttattgcgcttctcgaccaaacctttcccggcgcaaatactttgttctctacaccgacaagaaaggcagacggtcacgaaaaatggggggattttgttctcaaataccctcacgccgagtgtatctcgaaaaaatcactttcctctttctctaaaagctatctctcttggtgtagcaaatttggctacaacttctccgaacgcaagtcaagaaccgtttatgatttcgcttgcaactgctcgccgtctttatcttttacggaaagtacagccttgcttgtttcaaacgctatctctcaactcaactgcattaacgaaacgcttgcctcattaacgtccgagatgaacaagatcgccgctacgttaccggaatactgtaccgttatgtccatgttcggcgttggttccgttctcggttcccagctcatcgcagaaatcggcgacgttacccgtttctctaacaagaaagctctcgttggttttgccgggttagacgcctctccttttcagtccggaaactttaatccgcaatcccgctctatccccaaacgcggttccgccgctttgcgcaaaacattgcttcagatcatgtccgttattttgcaaaactctcccacgaataattccgttttccggttcatggacaagaaacgcgccgaaggaaaacattacttcgtttacatgactgctgctgccaacaagtttttgagaatctactatgctcgtgtgacggagcatttgaaatctctccaacccgccgtttaaccgttatcctgctcgttttaggtctgcgctcttgtgcggagacttttttgtgttacgctttttacctcaaaaattttttcgattttcttcgcttcaacgcttgacttttatttgcaggt

SEQ ID NO: 9828 - DNA, 1246 bp, unidentified
  source 1..1246: mol_type = unassigned DNA; note = element_f6a1ea0
  misc_feature 1: note = core
  misc_feature 2..83: note = LE
  misc_feature 84..986: note = CDS
  misc_feature 987..1246: note = RE
  misc_feature 1007..1199: note = bridgeRNA
gaatggaagggacttcccctggatatgcgcctgattaactcttgtgcaatcatggggtaaacatagccccagagggattcgttatgaccattaccactgtcggtatcgatcttgctaaaaatgtgttcgctgtccactgcgttgaccagaatggaaaaactgttttggtaaaacccagggtatcacgtgcagcacttcctgaactgattgctggtttgccaccctgtgttatcgggatggaagtatgctccggggcgcattactgggcaagactgtttcggcagtatggccataaacctcgtctgatggctacaaagtttgtatctccttatcgcatggccggtaaatcagggaaaaatgatgcggctgatgcccaggctatctgcgaagctgtccgtcgtccgcatatgcggtttgtgccagtaaaggatgagagtcagcagacgatgcaatgggttgctgaacagaagaattctttgccacttcaggttcagcaatgtgttgatgatttgctggaacacattgatcgcattgatgataacattactgaatatgaccgaattctgtcccgtatggcaaaatccgatcaccgcagccagccactgatggaactgaaagggattggtcccacaacggcctgtgcgctggtcgccagtatcggtaatgcgcatgattttaaaaatgggcgtcaactggccgcctggctggggcttacaccatcgcagtacagtagtggcggaaaatcaaagcttggcaggataacgaaagcgggcgattcatatctgcgaacgcttctggttcagggtgcccgttcggttctgattagcgcagagaaaaggactgactcattcagccgttgggtttgtacgttggttgagcgcagaggatactggcgtgctgttgtggccattgccgccaaaaatgcgaggctgtgctgggcatcattgcattacggggatgatttcaggctgtactcagccagctaaagcacgaaacggaataaccatcttacctgcaactcgttgatgataaagggttagaccccgtgaggtatatctgaatattgtacaggatatacgtatccgtttaacgaacaagagcctcacgcgcgtctttcatcagggcccgaatcgataacgattcatcatggccgtttatagtaccgcagtctctcccctttatttttactgaagtgcagacaagaaaccgtaaacaccggcgttgacatgccggggaagcccttata

SEQ ID NO: 9829 - DNA, 1167 bp, unidentified
  source 1..1167: mol_type = unassigned DNA; note = element_f6a53a3
  misc_feature 1..2: note = core
  misc_feature 3..207: note = LE
  misc_feature 208..1155: note = CDS
  misc_feature 1156..1167: note = RE
  misc_feature 12..213: note = bridgeRNA
cttgtcttatgattttcctgtcctgatcgagcaagatgaggacaccgccagcgagacgcgagctcgctggcggtgggaggggacgggtcgttccgatgcagaccggtgcgggtcgagctagagtcggaccgcccctctcttttcctcgtggcctgaacggatacccgggcgtgatggcccgtatgacaagccaaggacgcggaaaagatgcatcatcctataccacagaccgccggcatcgacattgccaaagatcagctcgatgtttgtctctatcccgatggagccacgcgccgcttccccaacgacgccaagggtcatcgcgccctcatcgcctggctggccgcgtactccattcagcgcgtggtcttcgagccaaccggcgcgtatcaccgcgtgctggagcgcagccttgccagtgccgacctgccgctggcgaagatcaatccccgccacgcccgccgcttcgcccaagccttaggtcagcttgccaaaaccgatcggctcgatgcggcgctgctggcacgctttggagctctgctcgagcctccgacccggcctgtgctcagccccacgctggaggccatgaaggaactgttggtcgcccgccaggccttgatcaaggatcgcaccgctgctctcaaccggcagaaggtggtcggctctcccttgttgcggcgtcagctcgaacagcggctgcgccaagttgcccgccacctggctgcgatcgacgcccagcttcacagcttgtgtctgggtgatgcggatctcaccccgcgcctggcgattctcatgagcattcctggcattgctcaagccactgccttgagcctgctcgtcgagatgcctgaactcggcagcctcgatcagagccaggtggccagcctcgccggcttggctccggtggcgcgcgacagcggggcttcccgcgggcgccgcacgatccggggcggccgcgcccatctgcgtcaggcgctgtacatgccggcgctggttgcggcccgcttcaacccggatctgaaagctaagtaccaagccctacgcgcggcgggcaagccggtgaaagtcgccctgacggccatcatgcgaaagctcatcatcctggccaatgcgctcttgcgagatcagcgaaactggtctccaaaacccgcttgatcaatacggata

SEQ ID NO: 9830 - DNA, 1348 bp, unidentified
  source 1..1348: mol_type = unassigned DNA; note = element_f6a9bf1
  misc_feature 1..2: note = core
  misc_feature 3..64: note = LE
  misc_feature 65..1093: note = CDS
  misc_feature 1094..1348: note = RE
  misc_feature 1118..1336: note = bridgeRNA
tgatgccgtggacggctccctaccacccgccgcagtttaggcgcggctgagatggaggagcgccatgggagaggttgtcacggtgggattggacatcgccaagtcggtgttccaggtgcacggggtcgatgctgagggccaggtgatcgtgcagcgccggctcacgcgggcgaagctggtcccgttcttcgagaagctgccgccctgccgggtggggatcgaggcctgcgccaccgcgcaccattggggccgtcggctgaccgagctcggccacgaggtgaagctgatgccgccagcgtatgtgaagccctacctgaagcgacagaagaacgacgcggccgatgctgaagcgatctacgaggcggtcacgcggcccagcatgcgcttcgtcgaggtgaaggcgccggagcagcagagcgtgctggtgatccaccggacccggatgacgctgatgcgccaccggatcgagctctccaacacgatccgggcgcacatggcggagtttggtctggtggcgccgatcggccggcgcgggctgcagggtctgatcgagatcgtccgcgacgagaccgacgcgcgtgtcccggcgagcgcgcggatctgcctgaagctgctggccgagcagctcgacgtggtgaaccggcatgcgctggagactgaccggatgatcctggcgagcgcacgtgcgaccgaggtcggccgccggctgatggcggtgcccggcgtcgggccggtgctggcgagcgcgatggtggcgagcgtgccggatccgcacgccttcaagtccggccggaacctggccgcgtggatcgggctcgtgccgcgacagaactccaccggcggcaaggcgcggctgggcgggatcaccaaacagggcaaccgctacctgcgccagctgctggtggtcggcgcgctggcggtcatccgttacgccgagcgacacgggacccggcggccctggctcgggcagctgatggcgcggcgaacgaccaagatcgcggccgtggcgctggccaacaagaccgcccggatgatctgggcgatcatgaccagcggcgaggcctaccgggagccggtgctgcaggccgcgtaaggaatcaggcgcctcggcgtcggacaagcttgggaagggcgacgaaggagtgatgtgatccggtcgaaccgggaagcgggaaaacccattgcgccagcgggcctcagagcccgtgcttttggtcgggacccagcctcgcggagggcatcatggccagcggcccatgcgccgcaccaacaggtcgaagacatggccgcaccgaccagccgtcacagagctccagatcacccttgccaacggggagccgtccagaca

SEQ ID NO: 9831 - DNA, 1170 bp, unidentified
  source 1..1170: mol_type = unassigned DNA; note = element_f6ad077
  misc_feature 1..3: note = core
  misc_feature 4..177: note = LE
  misc_feature 178..1149: note = CDS
  misc_feature 1150..1170: note = RE
  misc_feature 35..198: note = bridgeRNA
cttgtatcttggttcttcgttatcatgagcagcgaatagatttggcaaagcgtatgcagcctggtgccccttagggtttaagcccgtatgtaagcaaatggcgcatacgctgagccactcatctgaaacccgaacagttgtccgtaattcataacgcatttgcaaggatgggtaataatgagtcagccaaatccgctttgtgtgggtattgatgtttctaaaacaactctggacattgctactgctaacaacgagtttgctcagtttactgctggtaacgacaccgatggttttgagctcatcattgctgaattgagaaagcattcggtggcgctggttttgatggaggctacaggtgggcttgaagctgctgtagcctgttcacttcaggctgaaggttttgatatcgcggtcatcaatcccagacaggccaggaatttctctcgtgctatgggatatctggcaaagaccgacaggattgatgcaaaagtgttgtctcaaatgaccgaggtaataaaccgtcatccagaacgggagcgctttatcaaagctatacccgacgccgaacggcaaattcttgccgctatggtggtacgtagacgccagttgataacaatgttggttgcggaacggaacagacttcaccctgcacatcctcagaacagaaagagtatcaataccatcataaaagccctggaggatgaactttcccgaattgacgaggcgatgaataatcacattaaaactcatttcaaagagcttgcagctcgtttgagcagcattaagggggttggtgcaatgacagttgccacattgctctctgaagtacctgaactgggaagtctttcacgtcgagagattagtgcacttataggtgtggctcctgtaaacagagactccggaacaatgcgtggtagacgaactatttttggcgggagagctggcgtaagaactgcgctttatatggctgcgcttgtcgcgaccagatttaatcccgtaataaaagatttttatacgcgactcattacagctggaaaagtgaggaaagttgctcttgttgcctgcatgcgcaagctgttaaccattctgaatgcaatgatccgaaagaatgaagaatggagtgattcataccacaagttttcattataaatatcatgctcaagacagttg

SEQ ID NO: 9832 - DNA, 1652 bp, unidentified
  source 1..1652: mol_type = unassigned DNA; note = element_f6ae744
  misc_feature 1..2: note = core
  misc_feature 3..292: note = LE
  misc_feature 293..1477: note = CDS
  misc_feature 1478..1652: note = RE
  misc_feature 58..270: note = bridgeRNA
ctggtatattataaatgactcatttaatagtcatttacagtatacttttcctttctatcaaccctttaaaccgtggttgattacggttttgttaatctgtaaaattgaataatgtgaatgtggatttgtattattccttgtggcttgactactttaaggaggttcttaccacaccttattcctaaataatgatgagttagatgagtctttgaattcgtattttgaaccaggttttgtggtttaagtgttgtggataccattttcacgtattttaaagaaaggattttatatcatgaaattagttggaatcgacattggaaagaataaacacttcttttgtatcatggataaagataccggagaacttatcgttcaccctgcttctttctctaatgataaacatggctttgatctgcttattcaaaatcttaaaccttactctaaaaaatctatcttaattggtatggaagataccggacactatcattttgctttgttgagatttcttctggatagaaacttctccgttgctcttatcaatcctacaaccactgatttttcccgtaaaatgcaaggtggtattaccaaaaatgataagctcgacactttgactatttgtgatgtcctggatactccagaacgtaaaaagcagtatcgtatcacgaaagttaacagcttcgatctttatgaacagaaacagttaaccagacatcatcataatctgaaggaagagctcaatgtctactcaaaccgcctgcaaaggtgtattgatattgtattccctgaattcaacagtctgtttgattccaaatatagccgtgtatatatggcggtgcttaaaacttttggcagtgctgaagctatcgctaatgctgatataagaaggattcgtcgatgctttgaatacaaaggcagaggaagacgtatttctttaacccctgaaatgcttaaggatcgtgcaaaatcctctgttggaattccttcatcagcagacgttattcagatcagacatctggtcgatcaaatagaattgatccatgagcaaattactgaaatagataaaaaaatagaagagttctcgctcaagacaaactctcctatcctctccataccaggaatttctcatttctctggtacttctattttagcggaattaggagatataagcaactattctaatgcaagaaaaatcataaaggctgcaggggtggccccttaccattacgaatcaagtcagtttgctgcacagcatacagctattgccaagaaaggatcaaagtatcttcgaaagaccttgtatcagatcatactgacagttattcgatgcaatcctgtattcaaggaatactatcagcttaagatctctcaaggcaagggacatcgctgtgctcaaggacactgtgtaagaaagctgcttagagttatctatcatttagtcactacgaatcagccatttaatcctgatttgttaagataaataattaacttcaaacaaattttagaaattcccttcatcaaggttgttttcatcatgcccaaaaagtacaaatcactattcacttttcaaagaacagctccagctaacatacaaaactagaaattttatattttcaaactttttcatctaattctcttgatttttatatagttag

SEQ ID NO: 9833 - DNA, 1465 bp, unidentified
  source 1..1465: mol_type = unassigned DNA; note = element_f6b0fc8
  misc_feature 1..2: note = core
  misc_feature 3..235: note = LE
  misc_feature 236..1255: note = CDS
  misc_feature 1256..1465: note = RE
  misc_feature 14..184: note = bridgeRNA
cttgtatcttgcgaactgaggcgtgacgataggttacgtttcggcggagaggccgttcccacccgaggccagagtgatctgagcctgttgtttagaccggcccccgcccctctctttttacgccgtggagaatcggaggccgttgagcctgcatgttcaaggtcggcgggtagagtaagtccgtgagcgcggacaggggcggttgccgagattaatcgtaccctcaaggagcgccatgagcaagccgatccagcccattcaagcgatggtattctgcggcattgatgtgagtgccgcgagcctggccgtagccgttcaacaggaagatcaacgattcgaagagcgtgtttttgataactcgggcggcgggcacaaggcgctgatcggctggttgcacaagctgaaggcgcgggtgcgtgtatcgctggaggcgaccggcatttattcgctggaccttgcattggcgctggacggggccgatggcatcgaagtcgcggtactgaatccgaagctgattcaccgctttgcgcagacgctacgccggtcaaagaccgactcggccgatgcgcaggttctggctgaatacagcgctcggatgcccttcacgccgtggtgtgcgcctgagctgagcgggctcgaattgcgcgctatcagccgtcatatccaaagtctggtcgtggagcacacgcgacaaaacaatcgccttcacgccgcggaaaagtcaacgtctacgcccgcttgcgtggtgaacgacttgaaacgttcgatggcttcgctgaagctgcgcatcgcacggctgcgcggtgaggcactggaactggttcggagcgatgaggcgatgcgggagcgcttcgagctgttgatcggcataccggggatcgccgcaatcagtgcgctgcagttgctcggagaactggctccgctctcgccggagatgagtgtgcggcagtgggtggcgcacagcggacttgatccggcgcatcgggagtcgggaacctcggtgcacaagccgtcgcgcatcagccgggccggcaaccggcatctgcggcgggcgctctacatgccggctctggttgcggcgcgccgcgatccgcacttgaaggcgttctacgaaaccctgctaagtcgccacaaggccaagttgcaggccctgatcgcggtggcgcgaaagctgctgcacgcaatctacggaattttcaaaaaccaaatgccctatgatgggagcaaactcttcccgcagttgcagatcgcataagagctacaatcgccccatccagtgaaacggaagcgggctctgctgggaagcaaccatgccgagggttaactggatgggctcatcctgacgatgaaccgagggccgggcgggagatccccgcccggccccgacagacatcggagggatagaccctcatgccttgaaaatccaacccttccccaccaaaatacttgacgcaaaagagagaat

SEQ ID NO: 9834 - DNA, 1511 bp, unidentified
  source 1..1511: mol_type = unassigned DNA; note = element_f6b21d2
  misc_feature 1..2: note = core
  misc_feature 3..290: note = LE
  misc_feature 291..1490: note = CDS
  misc_feature 1491..1511: note = RE
  misc_feature 7..211: note = bridgeRNA
ctgatggggataccttctcttcgcacggtggatccccggcagggagtgcttggacagcttgtcccgtgaggacttggttgagacagcgcccctgccgggccccggcgaaggcctgatgcccaggagggtgtcgtccctggaggactgttcatcagcacggcacagtgccttccccgatccgccgtgaaaggggaaacagtccgacggtgaagggatggcaggtgctgggcgtcggtatcgactgggcagaacaatttcatgacattgcgttggggacaccagagaaaggagtgattcaacagttccggattgagcacagcccggcgggagtcgagcggctggttacgaggtgtctggcgctggaggcagatccggctgaggtccgggtggtgctggagacccggcacggcttgctggtcgaggcactgatcgacgccgggttcaccgtcgtgccggtcaacccggatctggtcgcgcgccgccgcgggccggcgcgcaagaaggacgacgccgaggacgcccggatctgctgcctgctcgcgctggatcggcacaccacgctgcgccaactcatcccgcatggccagatcgcgggcgagctgcgcgcgatcgcccgcgatgacgagcgcgccgctcgtgatcatgtccgcctgctcaaccggctgcgcgctgacctgcagatcacctacccggccgcgctcatcctggctgctggtgatctcggcgcgcccaccatgttgcggctgctgcagcgctggcccacccagccggaactggcgaaagtcacacgcgaggagctggtcggcttcgcccgcgccagccaccacggctggcccgagcgcttcgccgagcgcatcgctgaggccctggccgccccggctctcccggtccgggagcacctggtgcgggccaaggccaccggtatccgcctggccgccacccagttgcttgccctgcacggggcccgccgcagctgggaacggcgcatggccgagctgctgctgggcgggccccggagcggggtcgagcacaccgtgaaggacccggacccggggaaggcgttcccgggcggcgagatctacctgagcatgcctggcctgggtgatcgtctcgccgcccgggtcgcgggcgagatcggcgatgccatccaccaataccagacgcccagcgcactgcaatgctacgccggaaccgccccggttacccggcggtcgggcaaaagcgacttcgtcgtcgcccgccgcctggcgcacaatcagtacctcggcgacgccgtgcaccaatgggccttttccagcctcacccgcagcgcctgggcccgggaattctacgacgagaaaatcaccgcgggcaaaagccaccacaacgcccttcgtactttgagcaaccgctggctggagatcctctggcactgcctgaccaagggcatcgtctacgacgaggcaacccaccaggccaaccgcaaccgcgcccgcggacacgccgcgtgacagggggttgacagagggtgt

SEQ ID NO: 9835 - DNA, 1384 bp, unidentified
  source 1..1384: mol_type = unassigned DNA; note = element_f6b2948
  misc_feature 1..2: note = core
  misc_feature 3..84: note = LE
  misc_feature 85..1113: note = CDS
  misc_feature 1114..1384: note = RE
  misc_feature 1087..1371: note = bridgeRNA
tgatggcgtggatgcccctcccgacggcatcgcaatgtgccattgtggtgagtgttaaagccatcacaaaaggaaggagcatccatgtccgaagttactattatcggtgtcgacttggcaaagcgcgttttccagttacacggtgcacaacatgacggttcggtcgcgtttcgtaagaagctttcacgaggtcagtttctcgcgttcttggcgcagcagcctaaatgcctgatcgccatggaggcttgtgcaacggcgcatggctggggtcgggaatttgagaagttgggccacgacgtgcgcctgatcccgccagtctatgtgaagccgttcgtcaaacgccaaaagaacgatgtggccgatgcagaggccatcgtagaggctgcattgcgtccgaccatgcgctttgtcgccgtgaagtccgaagatcagcaggcccgcgccatgctgtttcgcacgcggcagatgttcgttggtcagcgcacccagatgatcaatgctttacgtggccatctcgccgaacacggcctagtcgcggcccgagggcccgcccatctcaagacgcttgcggacgcaattgccgatagtggcacggcgctgcacccggaagttcgagacctcagccaaatatatctggagcaaatagaggggttgaatgcgcgtgtcgcagagctcgacgcaaagatgagatgtgccgctaagaaagcggactcggtccgccgcgcacagaccatgccgggcgtaggccctgtaacggctcttgcgatcgagacgtttgcacctgacctggccaccttcaaacgcggtcgcgattttgctgcgtggcttgggctcgtgcctaagcagcactcgacaggcggcaaggcccggctcgggaagacgtcgaagatgggacagcgcgacatacgcacccttctggtctctggagccatggcagttcttcaggctgtcgagcggttcgacaccccgaacaatggttggctgaagcgcctgctaacccgcaagccacgcatggttgccgcaatcgcgctggccaacaagatggcgcgtggcctctgggccatgatgacgaaacaagaggattaccggaatccggtggcgacgatggcgtagcgaagattgcgcgtcacgacgtcccggtaagttgggggtgtgaggaggtcactgaacagtaagggcaaaggatcgatcagatccgggtcagagaaagcagcatttgcgcaggagccacgagctcggtctgttgatatgcctctggtccgcgcatcgccataccggcccgcggtcacatcagaaccgcacacagaggcctgatacatgaccgcacccgatcacacgctcgcgccgttcaaaaaccacttgcatcaatgggggcatccataca

SEQ ID NO: 9836 - DNA, 1390 bp, unidentified
  source 1..1390: mol_type = unassigned DNA; note = element_f6bb993
  misc_feature 1: note = core
  misc_feature 2..314: note = LE
  misc_feature 315..1127: note = CDS
  misc_feature 1128..1390: note = RE
  misc_feature 1157..1381: note = bridgeRNA
taatgggatggtccggccgtgttcctgccccgcccgcgattaaagctggtcaggggcgcccacgacaaggagcacgccatgtcccagaccgcccaaactgccatctccgtcatcggcatcgatatcggcaagaactcgttccacattgtaggccacgatgagcgtggtgccatcgtgctgcgccagaagtggtcgcgcggccaagtggaggcccgatttgccaacttgccgccgtgcttagtcggatggaggcctgtgtcggtgcacaccatctcagtcgcaaactcaatggcctcggacacgatgcccggctgatgccggcgaagtacgttcggccctattcgaagggacagaagaacgacttccgcgatgccgaggcgatcgccgaggcggtgcagcggccgacgatgaagttcgtagctaccaagacgacggatcaactcgacctgcaggccttgcaccgggtgcgcgagcggctggtcagtcagcgcaccggcatcatcaatcagatccgcgccttcctgctggagcgcggtatcgcggtgcgacaagggcaacgcttcttgcgcgccgagctgccgcgcctcctggccatgccacccgatgttctgtcgcctcggatggcgcatgtcatcgaggacttagctggcgactggcggcggctcgatcagcgtatcgaaggtctgtcagcagagatcgaagccatcgcgtgccaggactccggttgcgagcggctgatgagcgtgcccggcatcgggccgatcatctccagcgcgatggtggccgcgatcggcaccggtgatgccttcaccaaaggccgtgactttgccgcctggttggggctcgtcccaagacagatgtcgaccggcgaccgcaccatcctgggtaagatatccaagcgcggcaatcgctatctgcgcgtcctgttcgtgcaggcggcctgggttgtgttgatcaagccccagagctgggagcgccacgggctcaagacctggatcgaggcggccaagaagcggctgcaccgcaacgttctggcgatcgcgctcgccaacaaactcgcccgcatcgcctggagcgtgttggctcgcggtcggggcttcgaggcgagcaagcttcaggtcgcgtaaccgtcaaaccggcatagccaacgccagtcatccaccgaggtctgcgagagaacaacatgaaatggaggttcggtcttcccggcgcctgcgaacactggtggcacaaatggcccattgaggcctttccgctaatgagatcgcaggcgcgctgatatccatgatggcccggggcacaacgctccaatcgaaggccggatacattgatgcaagaccgctaccgccagatcaggaagttctcttgcgacgcacggccggaccataca

SEQ ID NO: 9837 - DNA, 1371 bp, unidentified
  source 1..1371: mol_type = unassigned DNA; note = element_f6bf4fd
  misc_feature 1..2: note = core
  misc_feature 3..78: note = LE
  misc_feature 79..1104: note = CDS
  misc_feature 1105..1371: note = RE
  misc_feature 1138..1368: note = bridgeRNA
ttaatgagatggtcagcctgaccgaaacagcccgatcggcttacgctgatcgggctgtttccttttcgggagatcgtcatggacaccatctcgttgatcggaatcgatcttggcaagcattgctttcacctgcacgcccagtcggcatcgggtcgtacggttttgcgcaagaagctcacgcgcaagcagatgttcacgctgctcagcaatgttccgagttgcaccgtggcgatggaagcttgtgccggcgctcactgggtcgcgcgccggctccaggcactgggacatcaggccagactgatctcgccgcagtacgtcaagcctttcctgcaaggcaacaagaacgatttcgccgatgcgcaagcgatctgcgaggccgcgtcgcgcccgagcatgcggttcgtcagcccgcacaacgagacacagcagatgatctcagccctacaccgggtgcgcgaggccctggtacgcgaccgtaccggcacggtcaatcagattcatgcatttctactggagtttggggtgagtctgcccaagggggcggcggtcattcgccggctaccaggtgtactggccgcgtatgatctgccaccgcagttggtcgcgctgcttgagcgtctgcaggcgcatttcaaatacctggatgagcaggtcaggcagatcgagagcgaactgatccggcagcttcgagaggatgagcgtagccagcgcctgctggagattccgggcatcggcccgatcacggccagcgtgctggcaacggaattgggcgatgtccggcaattcgcttgcgcacgccagttcgcggcctctatcgggctcgtcccgcgccaatacagtaccggcggcaagccaacgctgctgggcatcagcaagcgcggcgacaagaatttgagacgactgctggtgcagtgcgcacgcaccgtcatgctgcaaatcgagcggcgcaccgaccgcctgggcatctgggttcgcggcctgctaacgcgacggcattccaacgtggtcgcctgtgcactggccaataaactggcgaggatcgcctgggccatcctcgccaaaggcacgcactaccagggcgaacaggctgtagcagcagcctgacgtcaccacgtcgctcatatcgtccgatttacctagtcacttctggttttgcgacgcgaaatacgtgaagacataaacggctcaacggccgggcaagcaacctgaaaaaaacaccagcgctccgatgctgcggcttttatgaggtttgcccggcgcggctctcatcatggcgcggggaacgcgttctcatcacgacgccggatagatttgcgcatgcccaatttacgtcaacaccgactcgcttgcaaaagtcaggctgaccataga

SEQ ID NO: 9838 - DNA, 1460 bp, unidentified
  source 1..1460: mol_type = unassigned DNA; note = element_f6c48e0
  misc_feature 1..5: note = core
  misc_feature 6..237: note = LE
  misc_feature 238..1443: note = CDS
  misc_feature 1444..1460: note = RE
  misc_feature 13..234: note = bridgeRNA
cccccgttactatatacagaccttgatcctcaaggttttggccagccaagttcggcatgattgttgccccccagtcgcccatgatccggggggtgttgtcaccgaacttggtgggtggctggtgatcgctgatagggacttggtccagaggacattctgaggccatccgtaacgtggatgccgagacctgctaccgcaagccgttggccattagaacctcttgtagcgggaggtcgcatggacgcgattgaacattacgatgctgtagatgtctttattggcgttgacgtcggcaagggcgaacaccatgccgttgcacttagcagagctggtaaacgcttgttcgataagacccttccgaatgacgaaacgagactgcgcgcactaatttgcagcctcaaggaacatggcaaactactgctggttgttgaccagccatccaccattggtgcgctgccggtgaccgtcgccagagctgaaggcattctggtggcctacctccccggccttgccatgcgccgaattgcggatctgcacgttggcgaagccaagaccgatgcacgagatgccgccatcatcgcggaagcggcacgctcaataccgcatgcgctgcgctcacttcgtctcgacgatgagcagctggcggagctaactatgctctgtggttttgacgatgatctggcagaccatattacccagacaagtaaccgaattcgcggacttctgacacaaattcatccagcgctggagcgcgttcttggcccgcgacttgatcacccggctgtgctggatctgctgcaacgacatccttcaccggctagccttgccgccaccagcgaaaagagccttgcgaacaaactcagcaagcttgcaccgcgaatgggaaaaggcttggcccatgaaatttttctggctctttccgagcagacggtggttgtgccaggaacaaacgccgccacaattgtcttgccgcgcctggcgcaccagctcgcggcattacgcggtcagcgcggtgaagtcgcacaagaggttgaacgactggtgcaagcacaccctctttactcagtcctgaccagcatgcctggagtcggcgtcaggacagctgcccgactccttacagaggtcgccgcaaaagcgttttcctctgctgctcatcttgcggcttatgctgggctggcgccagttacccgtagatccggctcatcgattcgaggtgaacacccatcacgacgaggaaataaggtactcaagcgagcgttgttcttatccgcctttgcggcgctacgagacccgatatcgcgggcttactatgcccgaaagatcagccaaggcaaacggcacaaccaagcgctgatcgcgctcgctaggcgtcgctgcgatgtcatgtacgccatgatgcgggacgggacgctttattgccccgcgccactggtcaacgcttgacgaaggacatagggaca

SEQ ID NO: 9839 - DNA, 1159 bp, unidentified
  source 1..1159: mol_type = unassigned DNA; note = element_f6cb70c
  misc_feature 1..2: note = core
  misc_feature 3..187: note = LE
  misc_feature 188..1147: note = CDS
  misc_feature 1148..1159: note = RE
  misc_feature 40..189: note = bridgeRNA
cttctgtatctgggctttgctaaactgggcccgtcaccggccccggccagggccgatggcggggtggtgcgcgacgtctgacccttgtggcatgaccacgtttcttagcctgtcggcaccgcctctcttcatcgtctcgaacagttgattgcggccttttaggaccgcgcaccagaaggaagagagcatggacaacctatcacatggccgcgttatcggcatagatgtcagccgcgattggcttgacgttcattgcctcccggatggacactgctgcagagtgccaaacactccggcaggtcatgctgccgtagcggatcttgcccaagaccgggatgccgttgtctgctttgaatcgactggcggtcaggaatggcagttgtgggcgcttctggagacggaaggcgttgcagcccgccaggtgccccctgctcaggtgaaggcgtttgcgcaaagccgtggcacacgcgccaagaccgaccggatcgatgccgcactcatcgcccgcttttttgcattccggcccgaagcaggccgcagtcttcccacagaaaagctacgttttctcagagccctgacgtcaaaaagagcgcagcttgtcgagatgcgcaaacggcttctggcgcaaatccgcgcgcatcagaaactgggcaccgccgcaatgttcgaggacatcgacaccgagatgaagcaacggatcgacagcctgatcaaggaactggaagaccggatcacccaggccatcgccagtgacgatcgcctttcggaaaccgccgtcgtccttcgttccatcccggggatcggcccggttgtcagcgcaatgctaatcgcagaaatgcccgagatcggcaccatcaccggcgaagaggctgcggcactcactggattggctccggtcgcgcacgacagcggaacccttcgcgggaaacgggccatcgctggaggtcgccgggctctgcggcacgtgatgttccaggcggcattggtggcggcacatcacaacccaagcctgaaatccttcgcagatcgcctccgcaaggctggaaaaccgcacaaggtcgtcatcaccgccgttgccaggaagctcgttatcgtcgcgaacgccctgtgcaagagccgtcagaaatggaccgccgcgacggcctgagagatacagttg

SEQ ID NO: 9840 - DNA, 1226 bp, unidentified
  source 1..1226: mol_type = unassigned DNA; note = element_f6d7171
  misc_feature 1..2: note = core
  misc_feature 3..221: note = LE
  misc_feature 222..1052: note = CDS
  misc_feature 1053..1226: note = RE
  misc_feature 12..189: note = bridgeRNA
cttgtatcttggagcttgtagtgattagcttccactatatgcaaattgtagagtttgtaatagacctaaggcttttagtctgtgcaagagataaaacctacaatttgccctaaccacttgcacaactctggacggtaactaagcactttgatgctgtatttacaagaaaagacggtggttatgctaaaacaataattggatagataaagcaggtaaagattatgttttatcttggtattgatgttgctaaagctaaaattgattgctgtttaattttagaaaattctgcaagtaaaaagaaaaccaaaacttttgcaaatacaccaaaaggttttgagcaacttcaaacctggctaaagcagcatgctgcaacttctacgcagaccattatcttaatggaagccacatctatttatcatgaactcttggctaaatatttatttgatgcgggctatcaagtttgtgtaaccaatcctaccagagctcgatattttgctcagagtatgtctaagccgaataaaacagacaaggtggatagcgaagttctagctcgatttgcgatgactgccgatctacatttttggcaacatttaccccaacatattcaattgctgaatgctttgctggatagaagagctgtcctttgtgaagatttacaacgtgaaaagaatcgtttggaaaaagtagagtctaccttctcgatggaacctgtacttcagtctatccataagagtattaggcagttaaacaagtacattcagggtatcgaccagcaaattgatgatcatattgatcagactcctgatttaaaaaatgataaagaactgctcagcagtattccagctattgcagatcgaaccagtttattaatgctcagtttcttgcgtagccatacttttgaaaaagccagtcaagcgaccgcctttatgggcttggtccccattcaaaagcaatcgggtagctccattcatggcagaagccgtttatctaaagctggctcttccaaaatacgtgccggtttatatggcagctattgtcgcaactcggcataatccccacattagagggatgaatgaaaggttattggccaatggtgaaaccaaaatgatggcgattggagctgcgatgaggaagttggttcatctttgttatggtgtactcaaacaccaacaaccttattattgagcatgaattctcaataatttgcttaacgtttcagacggtat

SEQ ID NO: 9841 - DNA, 1435 bp, unidentified
  source 1..1435: mol_type = unassigned DNA; note = element_f6e8086
  misc_feature 1..4: note = core
  misc_feature 5..514: note = LE
  misc_feature 515..1426: note = CDS
  misc_feature 1427..1435: note = RE
ctcattggatgagtattgaacttgcaggtcatgttggcctgttcgtcgggaacggcgagggacggcctcgatgtcttgccacatgatggcctgtttgagctggtcgccctcgtcgttgccgggcagcgtgatcggcacaagagagcagccccaccgagggccgaacaatgaggaaccgacggtcggcccggctccagcggcgatgtctcgcctggaggtcaacggatgttctgtggatgggattggggttcgactcagcacggggtatgcctcatcgacgatggcggtcttgtggtcaagacctggatggtcgagcacaccgagaaggacctctcagcggtcctcgccgagctcgcaatgctaggtgatccgacactgattccagtcgcgatcgaacgcggcgaaggtctagtcgtcggactgatcgccggggctggtcatcctgtgttgatggtccagccagcagccttcaaagcggcccggccccggtgggggtcggccggcgcgaagtcagatgccgctgatgcattcatgctcgccgactacccgaaccgacaagcaccgccttcgaagggtcgagcctgtcgctgcggccacccgcgaactcgccgccctggttcgggctcggatgtcgctggtcgaagcccgcacggcagcctcgaatcagttgtgggccatcctcgccgaacactggccgggcgcggcggcggtgtttcagaagctgacatcccaggtagcgctggcgttcttggccgactacccgactccgcagtcagcggcgcttctcggcgaagggcggatgcgtcagttctgccggcgacacagctatcggggcggcaagtccccggcagagctggtcgggcgcctgcgatccgccccggtcacggcaaacccgctcgcacccaaagtgctcgaatcgatcgtgcgcggatccatcgcccagatcagcctgctcaccaccgagatcgcgcacctcgaagacgcgctggcagaggcgttggccgcccaccccaagacgccgctgctcaagagcctgcctcgagttgccaacgtcagcctggccgcgctcatcgccgagatcggtcccctgctcgaacgatgccagaaccccgaacaggtcgccgcgctgtgtggtgcagcaccggttaccaaggcctccggcaagtcccgcaccgtcggctttcgctacaccgccaacaggccagcacgcgtcgcgatcaccagcttcgccgacaactcccgacactcctccgcctgggctaacgactgctaccgacgagcacgctcacgcggcgcccgacacccacacgccgtcaggatcctcgcccgcgggtgggtgcgagtgatctggacctgctggaccaccgacaccgcctacgatccatcccgacaccgcggcgaacaacgccttgtcggcgcgacttgaccaagagag

SEQ ID NO: 9842 - DNA, 1352 bp, unidentified
  source 1..1352: mol_type = unassigned DNA; note = element_f6ed963
  misc_feature 1..3: note = core
  misc_feature 4..81: note = LE
  misc_feature 82..1104: note = CDS
  misc_feature 1105..1352: note = RE
  misc_feature 1083..1339: note = bridgeRNA
tgatggggtggatggcccccgttgcggcatgtcggtgccagaatggtggtcggtgaaacgcaccattgaggggagccatccatgagcgagattaagacgatagggctggatttggcgaaacacgtttttcaggtccacggcatcaatgcggccggggaatgcgttctgcgcaaacggcttcggcggggtcaggtcatctccttctttgccgaattgccgcgttgtctggttggactcgaagcctgcgcgacggcgcactactgggcgcgggagctgcaggcagccggccacgaggtccggctgatgccggcgcaatatgtgaaggcatacgtcaagcgcaacaaaaccgatgcggcggatgccgaggcgatctgcgaagcggtgcggcggccgacgatgcggttcgtcccgatcaagacggccgagcagcaagcggcggtccttctacaccgcggcagggagagactggtgcggcagcgtaccacgctggtgaatgcgcttcgtgcgcatctggccgagttcggcgtagtcgcaccagccgggctgcgcaacgtcagccagctaatcgctatcgtgcgcgacgcgagcgaccggcgtttgccggatctagcgcgcccggttctgcgggtgctggcgacgcaggtcgagctggcgcaggcagccgtggcgaaggtggagaaagagctgacggcctggcaccggagcaacccgctaagccagcgcttggcgacgatccccggcattggcccgatcatcgccaccgcgatcgctgcgatggtggtggagccgagcgggtttgccagcgctcgcgagtttgcggcgtggctaggcctggtgccgcgacagcactccactggcggcaaagcgcgcctgggcggcatctcgaagcgcggtaaccggtatttgcgccgcctgctgatcaatggtgcgagcgccaatctgctgcgctcgaaggcgaccaatgccgatccctgggtgatcgggcttcgccggcggcggccgagcctcgtcgtggccgtcgctctggcgaacaagacggctcgcatcgcctgggcggtgatgcaccggcaggaagactaccgatctttggccgcagcggcataaggcgctacggcccgagcttgcgagagaagtgaaacgtgatggtgacagtcggtcgttccgacgcaatcgagagaagcctgccgcttcatcgggacctcgatcccgttcgagtgatgagcgctcgattggcggaacccatcagggccagcagtccgcccggattgcatcaacaggccggacacatgactgcaagcgacgactgcacctcgccgatcataatctcttgcagggcgggggccatccacaca

SEQ ID NO: 9843 - DNA, 1312 bp, unidentified
  source 1..1312: mol_type = unassigned DNA; note = element_f6ee3d5
  misc_feature 1: note = core
  misc_feature 2..226: note = LE
  misc_feature 227..1297: note = CDS
  misc_feature 1298..1312: note = RE
  misc_feature 1..225: note = bridgeRNA
cagagatgatgttggtgagcacctcccgccggggtctgacccaccgcctgactgacttcgggtccttaacgagatttgtcggccctggtcgggaggtgctcatgcactcatcaggcgtggcgttgtgacttcataggagcctggccagaggccccatctctgtcttgtccgcgttgcccggctggtgcgtgccgccctgcccccagtcacgaacgacaggacgacgatgccctccattacacctgacgacgccgcgatcgacgtcttcggtggcgtcgacacccaccaggacacccacaccgccgcagtgatcgacctggtcgggcgggtgctgggcacccagcagttccccgccactgcggccggatactgcgccttgctggcctggatgcgtgcactcggccgcctcggcggtgtaggcgtcgagggcaccggcgcctacggcgccgggctcacccggctactacgcgatcaagacgtcacggtgatcgaagtcgaccggcctgaccgcaagacccgccgctttcagggcaagtccgacccgatcgacgccatccaggccgccaaggccgcccttgccggggagcgcaccggtgttccccaacagcgtgacggccgggtcgaggccctacgcaacctgcgcgtgtctcggcgcagcgccatcgaccagcgcgccgacacccagcgtcagatcaaaaccctgatcgtcaccgccgccgacgacctgcgcactcagctccgcggcctgagtgtctcgaacctggttgccacctgcgcgaacctacgacccgagcgtgccgacgccggctccccggtcaccgccacgaagatcgcgctacgctcgctggcccgccgccaccagcagctcaccatcgagatcgccgacctcgacgaactcctggagccattgaccgccgcgatcaaccccggcctgcgcgccgcgaacggcgtcggcgccgatgtcgccggccaactcctggtcaccgccggggaaaaccatgaccggctcggctccgagccggcgttcgccatgctgtgcggcgtcgcgccgatccctgcatcgtcgggcaagaccacccgccaccgcctcaaccgcggcggcgaccgccaagccaacaaagccctctaccgcgtcgtactctgccgcctgcgctgggaccctgacacccgcgcctacgccgaacgacgcaccaaagaaggcctttccaaaaaagaaatcatccgctgcctcaaacgctacgtcgcccgcgagctctaccaactcatcacatcaaacgacctcgaactcgccgcttgacatccataggagcat

SEQ ID NO: 9844 - DNA, 1376 bp, unidentified
  source 1..1376: mol_type = unassigned DNA; note = element_f6f31b9
  misc_feature 1: note = core
  misc_feature 2..90: note = LE
  misc_feature 91..1122: note = CDS
  misc_feature 1123..1376: note = RE
  misc_feature 1149..1371: note = bridgeRNA
caatggtatggactcctcctcccctaaccggcatctaggtgccagactggagttgttactcttagtcacaaggcaaagaaggagtccgatatgaagcttattcgagttggtgttgatttggcgaagaatgtattccagttacacggtgttgatcgtcatgggagggcggtctggaggcgccgactgacacgtaagcaatggctgtcagcgttgatggcgcaagcagatcctgcttgggagagtggcatggaggcgtgtgccggtgcgcatcatttggcgcgtacgttgcagtcacgaggctacactgttcgcctaattccgccacagtttgtgaagccgtacgtgaagagcaacaagaatgacgccaatgacgccgaagcgatatgtgaagctatgagtcggccgagcatgcgttttgtggcggtaaaaagtatcgctcaacaggacattcaggcgacccatcgcattcgcgcggaactgatgatgcagcgcagggccaaggcgaatcagatccgcggcctggtggccgagtacggtctggtcgcaccactgacactgcgtgccttacgcagtaccatcccggtctggttggaggaggctgagaacggactgaccgattatttccgctcattactgaatggcttgtggtccgacttgatcctgctggacgatcgggtgctcgagatggaccgagtgatcgagcgacttgccaacagcaacgaagtgacccgccgactgcagcaactgcgtggtgttggcccgatggtggccacggcattggttgccgccgtgggtaacgctgagcagtgtcccaaaggccggcaaatggccgctgcactggggctaacaccacggcaatacagttccggcgggaaacaacgcttgctgggtatcagtaaacgtggcgatgcttatctgcgaacactgctgatacacggtgccagagcggtggtgagccaagccaggcacagagaagatcgactcagccggtgggtcacgggtatcgccacccggcgccatccgaacgtggcggcggttgcactggctaataagacggcacgtatggcttgggccatgctgcgtaatgaaaccgattacgatcctgacttcgcgatgagctgaagccagggagaaaggagatcctcaattacgattgctacagcaaactgaacaatggcaaacaggtcgaaccggcgtcggtcaaacccgcctagttccgtgtacttgaagtacgtaggaccgattgggaactgacgcgcgaataacccattatggcccggcatcaacgtatgccaactcaagaggccggatatacgttcgcagtcgtgccatatctgccatcaacagattgcttgcaatgaggaggagtccatata

SEQ ID NO: 9845 - DNA, 1218 bp, unidentified
  source 1..1218: mol_type = unassigned DNA; note = element_f6f3487
  misc_feature 1..3: note = core
  misc_feature 4..432: note = LE
  misc_feature 433..1203: note = CDS
  misc_feature 1204..1218: note = RE
  misc_feature 12..195: note = bridgeRNA
cttgtatcttgaatgttgggatggttagctaccatcccatgagagacgggtgagtttctgcggctccataggtgtagaccctgttcaaaagactaaacccccgtctctctcctctgacgccatcgcggacactggacggtagcccagggctgattgcgcttgcatgcacaaggtaagtgggcgcagttggcatacttctttattgaggggtatgaaccatgatctatctgggcattgatgtcttcaagctgaagctggactgcacgttgctgctggacccagacacgacaagcgcaagacgaaagttgtggctaatagccgggatggggtgcgagaactgatccggtgttgcgtcaagcacgggtggacgccggccaggtccacgccgttctggaagccacaggcccgtatcacgagtaggccgcgaccactttgcatgacaacggtgtcgcggtatcgatcgccaacccggccaacgtgcgcgatttcagtcgggcgctggccatgcgatccaagacggatgcgctcgacagtttggtcctggctcgctacggtgtagcgatgcggccagcggcatggcagccgccacccccacatgtgcgcgaactacgtgccttgataacccaactggaggagctatccaaggaccgcctacgcacgatccaccgccaggagaagattgaggttagcgcggtctcggagctggtggagcgttcgatcagcgacaccttggacttctatgacagggagatcgcttggccaacgaaggcgatcgacgaccacattgaccgccaccccgacctgaaggatgacaccaggttgttgtcctccatacctggggtaggtcccaaggtggctcgaacgattctcagagtgatccgcacataccagttcaaatgcgcagaggatcgggccgcttatctgggcttggttcctgttcaacgccaatcagaatcgtcgctacgaggacgcagtcgtacgtccaaagcgggcccggctgacgtacgggcgatcgtttacatggctggcatcgttgcctcgaaacacaatccccacgtccgagcgttgtatcaacgattgttggccgcgggcaagaccaagatgccggccattggcgcctgcatgcgcaaagtggttcatctgcgctttggcgtgctgaagacgcggcaggtttataggccggactacgcattttctacttgacgaccaagacggtat

SEQ ID NO: 9846 - DNA, 1587 bp, unidentified
  source 1..1587: mol_type = unassigned DNA; note = element_f6fb869
  misc_feature 1: note = core
  misc_feature 2..339: note = LE
  misc_feature 340..1572: note = CDS
  misc_feature 1573..1587: note = RE
  misc_feature 59..233: note = bridgeRNA
cgttagcttgtaggtggcctcggagtctataaggatgaaggggttggccggtccggttcctgggcatgatcgtttgcccccagtcacttgatgatccggggggtgttgtcacccggggctggtcgcggcggatcgtggatcgctggtagaggcacgacagtcccaacctgctccccgagtagatgggtggagggcttgttttctaacgtggatgccgagcatgaaccgcccaccgaccctgttcatcattgctggtgagcatgctgggactggccactggccagggcagcgacatgctgtccttggtgacaggcccatagcttcacatggaggggtttcatgaccgcattcgatttggtcagcttcgcgctgttcatcggcttagatgtcggcaaatccgaacaccacgccaccgccctgaccagctctggtgagcgggtctatgacaaggcgctgcccaacgatgagtccaagctacgtagcctgctggacgagctcacctcggcccacggtgccgcactgttggtcgtcgatcagcccgccacgatcggtgccctgccggttgctgtcgcccgcgccgtcgaggccgtggaggtcgcctacctgccggggttgacgatgcgccggatggcagacttacacgccggctcagcgaagaccgacgccagggacgcattcatcatcgccgagaccgcccggacgatgccctctgcgctgcgccaggtcgcagcctctgatgagcaggtcgccgaactggcggtgttggctggtttcgatgatgacctgctgggacagaccaccgccgctcgtaaccggctgcgcgggctactgacccagatccaccccggcctggagcggacgatcggcccgaaactccaccaccggggcgtgctcgatgccttgacccggtggccgaccccgcacgcgctgcagaaggccggacgggcccatgtgcgcaaccggatcgccaagcacaacccccggctcgccaggccggtctctgaggcgatcttcgacgccctcgacgcccagaccgtcgtggtggccggcactggtgctgccgccacgatcgtgccgatcctggcgggccagctcaccgagctctacacccaacgcgagaccgtcacagcccaagttgaagcactggtggaggcccaccctcttcaccaggtcctgacctcaatgcctggggtcggcgtcaggaccaccgcacgcatcctcaccgaggtcatcggcaaggatttcaagaccccagggcacctggcctcctacgccggcatcgcacccaccacccgtcgatccggaagttccattcgtggcgagttcgccaaccgcggtggtaacaagaggctgaaatccaccctgttcaacagcgctttcgcctcgctctcacacccgccatcaagggcctactacgacaagaaaagagccgagcacaaaacccacaagcaagccatcatcgccctcgcccgccgacgcctggacaccctctacgccatgctccgcgacggcaccttctaccaagaaccagacaacgcccgcggcagcactgaccaccgcttagcagcttgacgaaaaccatagagg

SEQ ID NO: 9847 - DNA, 1504 bp, unidentified
  source 1..1504: mol_type = unassigned DNA; note = element_f716172
  misc_feature 1..2: note = core
  misc_feature 3..282: note = LE
  misc_feature 283..1473: note = CDS
  misc_feature 1474..1504: note = RE
  misc_feature 43..233: note = bridgeRNA
ccgttaccttcctcgtagccccgatcggaggcaggatcggggtggctggcctgtcgggcccggcatggttctttccccccagtcgttgatgatccggggggtgttgccaccgggacccgataggcgccagaggatcgctgatagggaccaggccacgcggcaccacaacggcgccgacccggccgttcgtaacgtggatgccgagctctggagccgcaggacagaccggccgatccccgcccaccccagtatcggaggaacccatgttcccaggccacgacagtgtcgaggtgttcatcggcatcgacgtcggaaagactgctcaccacgcccgtagcgatcgaccgcgccggcaagaagctcttggacaagcccctgcctcaggacgaggcgaagctccgtgctctcatccagaaggtctctggccatggccagatcctcgtgatcgtcgaccagcccgccacgatcggcgcactgccacttgccgtcgcccgcgacatgggcgtgatggtcggatacctccctgggctggccatgcggcgcatcgccgatctccacccgggcgaggccaagaccgatgcccgcgacgcggcgatcatcgccgaggccgcccgcaccatgccccgcactctgcgctctatcgtcctggccgacgagcaggccgctgagctgacaatgctctgcggtttcgacgacgacctcgtcaagcagatcacggccacctcgaaccggatccggggactgctcacccagatccatcccgcgctcgaacgagtcatcggcccacgtctcgagcatcccgcgatgcccgcccttctcaagcggtatcccagcccgactacgatccggaaggccgggaagagccgcgtggagacgctgctgcgtaagcacgcgccccgcaaaggcgaggcctgggtcgaggcgatcttcgaggcgctgggcgagcagaccgtgaccgttgccggcaccgacgcggccgcgatcgtgctacgtcaactcgcgactcagctcgcccagctacggaccgcccgcggggagatcttcgagcaggtcgaggcgctggtggaggcgcaccctctttgcgacctcctgacgtccatgccggcggtcggcgtcaggaccgctgcccggatcatcaccgaggtgatcggcaagcacttcgagaccgcaggacacctcgcctcctacgccggcctcacccccgtgacttggagatccggcacctcgatcagaggcgatcatccctccaggaagggcaacaagaacctcaaacgcgccctgttcctctccgcgttcgccgcactaaaggtccccatctcccgcgcctactacgaccgcaagatcgcccagcacaagaagcacaaccaagcactcatcgccctcgccagacgacgctgcaacgtcctcttcgccatgctccgcgacggaaccttctactcagcccccacccccgaactcactaccgcagcctgacccgcccccttgacgaaaaccatagggacac

SEQ ID NO: 9848 - DNA, 1196 bp, unidentified
  source 1..1196: mol_type = unassigned DNA; note = element_f717e12
  misc_feature 1..2: note = core
  misc_feature 3..224: note = LE
  misc_feature 225..1181: note = CDS
  misc_feature 1182..1196: note = RE
  misc_feature 6..203: note = bridgeRNA
cttatatcttgatcatcaaccagtactggaacatgatccccggttgatcaccgggtggctgtggatgagatggtgtcagcccctgggttttaaaacccgtccgatagattcatcctccagggccttcattcgccctgcaaaccgtatggtatcttgtgcctgtgagcatgtattgataaggatggttacggcgattctttctcatctgcaatgaggatcacatcatgacggcttttgttggtattgatattgccagccagaaatttgatgttgctgttttatatggcaaaaatagttataaatgtagttcttttcctaattcaacacagggatttattgccttcacaaactggcttcaggtttatggagaggttcatatctgcatggaagcgaccggtgcttatagtacgcctctggcgacttttcttgatgagatatcagtcccggtaagtgtggaaaatccggccagaatacacgcttttgctcagagcgaacttacccgtaataagacagataaaagtgacgcaaaaatgatagcgcgttactgtcggttatatcatccgccattgtggaaacctgcacctctttatattcgtcagttactttccctcatgtccagattggataatctgaaagaaatgctgagaatggaacagaaccggttgttaaccgcagatgtaattattactgtgtcgttacaggaaaacattaattcattgtcacgacaaatagttgttattcaacaagctgttaaagagcatatcaatgctaacaaagaactgaagaaaaacaaagcattacttacttcaattccaggagttggtgacatcctgagttgtatgtttctcgcttatgtcggagatatttctaagttcagcaataataaaaaattagttgcctgggttggattaaacccgatgcagcaagaatctggtttatggaaggggcgtagcaaaatatctaaaaaaggcaatgttgaattaaggaaagcactctatatgccagccgttgccgcattaacacataatccgatactgattgacttaaaaaacagattaaaagtaaaaaacaagtcagggaaaagtattgtctgcgccgggatgaaaaaactattgcaactaatgtatggagttctgaaatcaggtgtaccttttgacgcaaaaaaatcatttgctaactgaacgtaaagacggtat

SEQ ID NO: 9849 - DNA, 1361 bp, unidentified
  source 1..1361: mol_type = unassigned DNA; note = element_f71ae32
  misc_feature 1..2: note = core
  misc_feature 3..79: note = LE
  misc_feature 80..1117: note = CDS
  misc_feature 1118..1361: note = RE
  misc_feature 1128..1346: note = bridgeRNA
agataattggactcccccacaccttgaggtgtagggtaatatactgttaccacacaaatatattataaagagtcctgatatgtatcgtactagagttggtgttgatttagcaaaagaagttattcaagtttgtatttataggaacaaaaaggtgcagtcaaatagtgaaatgacaccgaccgaatttctttcttggttagttaatgccaaaccggtaacgataatatttgaagcgtgtggtacctcgaattactggagacaaaaagcgattgaagccggtcatgatgcccgtttgatttcagctaagttggtatcagttgtacgacaaaatcaaaagactgataaaaatgatgctctggctattgttcaaacgtcattactacctgatgtcacctttattggcggtaaaacagttgagcagcaacaactacaatcgattaaaagattacgagagttagccgttaaacaccagggtgccagtcagaagcagttagtgtctttattattagaaatgaatattcgtatttctaatcgcaaaggcggcattatatctgccatcgagggcgtattagaggatgctaccaatggtttgtctgtagaatgtcgagccgctatttttacgtccaaagaacatttacaaagtttaatcaaagctgtacaccgttatgatgagtgtttagagaaatcagttattgctcatgctgattgtaaaaagctactcaagctggaaggcgttggcaccatgaatgcgattaacttatatattgcactagggtgttgggatataggtgttttcactaaaggaaaagatgcttcagcatgcattgggttaacaccaatacagcattcatcaggtggtcttgtgaaattaggctcaataggaaagcattgtaaaaatagtatattgagaagtcagttggtttgcggcgcaatggccgcggttactcaagctgtgaatagagaagccaaaactaaaaaagacgtttggattaaagggctcgttgagcgacgaggcaaaaaatgtgctgcggtggcacttgctaataaaacggtaagaacggcttatgcgatgttgaccaaaggtagtgaatataaagctgagctattgacagcttaaaaagaattgaatagaaaaagtagttcaaaagcgttcacacaacaaaaatgcaaaacgaagataaaaatcagctagtttagtcagtagccaacagagagcttttagctcgcttaacagatttgacaattagttcgcgtaaatatcaaagagccagagatagcttctcagtttagagctcgtacataagtacgcatttatttctttgtattattatttttgttgttgacaagggggagtccacata

SEQ ID NO: 9850 - DNA, 1616 bp, unidentified
  source 1..1616: mol_type = unassigned DNA; note = element_f734f89
  misc_feature 1..3: note = core
  misc_feature 4..274: note = LE
  misc_feature 275..1495: note = CDS
  misc_feature 1496..1616: note = RE
  misc_feature 16..294: note = bridgeRNA
actactactatgtatttagtggttggtattcctgtcttccagacaggatgtcatcctcttattgcttaagctgttagaatgaataaggcaatcggtctggccaactgaaacttggaacaagcgtccgttgcgaagtcagccaaccagccattcattcgcagcgttcgttttacgcaggttgaacctcgcgttcgtgtaaaacacccagtagattgaataggcaatgaggaaactggtatcgaccattgctaatacatctcaaaggagtagttttatgaacgcagttggtattgatgtttctaagggcaagagcacggttactatccgtagaccaggtgatgaagttattcttcctccatgtgatatccgtcatacacgttctgccattgatgctttgatcagcgagatcaagagccttaatggagagacaaaggtatgtatggaatgtactggcaggtattacgagcctatggcaacatggctaacggatgctggtatttttgttagtaccgttaatccgatactcattaaagcttatagtgatgatgattctctccgtgctccaaagaccgataaagctgattctaaaaagatcgccaaatatacacttgaccgttgggcgaaattaaagcagtatggtcgtatggatgaaatacgtaaccaactcaaaacaatgaaccgccagtttggattctatatggatcagaaaacttcgatgaagaataatctcatcgctcttcttgaccaaacgttccctggtgctaatgacttctttgacagccctgcacgctccgatggtagccaaaagtgggtggactttgtctacacttactggcatgttgactgtgtgacaggaaagacacttgatgcatttacagatcactatcataaatggtgcagtcgtaagggatataacttcagctcggctaaggccaaggctatctacgacgtttcaaaagaacttattgcagtttttccaaaagatgacgttacaaagatgatagtccatcaggctgtccaccttctaaatgccgcatccaaaaacgtagagatgctcagggctaaaatggatgaatctgcatccaaactacctgaataccctattgtgatgaatatgaacggcgttggatcaacacttggtcctcaactcatggcagagattggagacgttatgcgcttcgaaaagcgcggttctcttacagcatttgcaggcgtggatccaggcaaaaatgaatcagggcaatatgtacaaaaaagcgtacgcacatcaaagaaaggatctccaaatttaagaaaaacactatttcaaattatggatagcctaattcaacgtgctccagctggagatgctgtctatgacttcatggacaaaaaacgtgctcaaggtaagccttactatgtctatatgactgctggagctaataagtttcttcgcatctactatgggcgtgttaaggagtatctagaatcgcttgatgccaaccaaacagaataatcactaacatctctcaccatcacagaccggcaaatatggcggtctttttataatatcaaaaattcaacctgtataaagttttcaaagttcataaattttctacttgactttttatttgcag

SEQ ID NO: 9851 - DNA, 1224 bp, unidentified
  source 1..1224: mol_type = unassigned DNA; note = element_f739bf1
  misc_feature 1..2: note = core
  misc_feature 3..243: note = LE
  misc_feature 244..1209: note = CDS
  misc_feature 1210..1224: note = RE
  misc_feature 21..194: note = bridgeRNA
ctggtatattaccgtcatccactcgttacccattgaatcctgggttgtggaagacgagaaccatttcggagcgagaccgtcctccgctaggactttcaggtccgaaagtaagttgggtccgctccgaaatcggcgctccgcggttcgaatagtcactggggacaaaaccccgtattcaccagcgtgaacaggaacgccgtcggtcctcggggctcgttcttcgtgattcaaggaggttccttcatgagccgaatcctggttggcgtcgatgtctgcaaggattttctcgacgcccatgcgcgacccaccggtgtccaaaagcgcttcgacaacacgcccgccggcatcgaacaactcgtcgcttgggttcgacccctggcgcccgagcgggtcatctttgagtcgaccggcccttatcagaaagccgcggtgggcgctttgctcacggccgacttgcccgccgtcgtggtcaacgcccgacaggtccgggacttcgccaaggggaccggacaactcgccaaaaccgacgccatcgacgccggcatcctcgctcatttcggcgaggtggtcgccacggtggtgcggcctctgccgtcgcaggaaatcctggaatttcgcgagatctgcgaccgccgcggccagctcgtccgcatgctcgcctccgagaaaaaccatcgccacgccgcatccggcgcctcgcccaaggtcatcaaaaacattgacaagcacatcgccttcctccagcgccagatcgacgatctcgaagagcgcatggagcgcatcgtcgccgactccgaaaccttccaagccaaagacgaaatcctccaatccatcgtcggcatcggcccacaagtctcccgcactctcttggttcacttgcccgaactcggaacggggacgcgacgatcgatcgccgccctcgccggcctcgctcccttcgccgacgacagcggaacctcgagccgcatccgacacatccgcggcggtcgggccaaagtccgcatcgcactctaccaggccgccgtcgctgccatccgctactgcactaccatgaaacgcttctacgcctcgctcaaggcgcgcggcaaagccaccaaagtcgccctcatcgccgtcgctcgaaagctcctcgtcctggccaacgccctgctccgaaccgggatctcttaccaacacccgacaaactccgtttgtctaaaaaacgcttgacacgctatatagtca

SEQ ID NO: 9852 - DNA, 1333 bp, unidentified
  source 1..1333: mol_type = unassigned DNA; note = element_f73cf7a
  misc_feature 1..2: note = core
  misc_feature 3..77: note = LE
  misc_feature 78..1094: note = CDS
  misc_feature 1095..1333: note = RE
  misc_feature 1073..1322: note = bridgeRNA
tgttggggtggacggcccaacggcatcgaatgtgccaatatagggtcgaacaaccaacccaatgaaagggccgcccgatggaatttaaacgcatttcgatcgacacgtccaagcatgtttttacgatccatggggtcgacctgcaggagcgtccgatcctgcagcgcgagatcaggcgcgcccaggtcgagccattcttcgccaaattggcgccaacagaggtggttctcgaagcctgcgccggctcgcaccattgggggcgggtgctcggcggcatgggccaccgggttaggttgattccgccacaatatgtgaagccgttcgtcaagcggagcaaaaacgaccgcaatgacgcggaagcaatcagcgaggcggcgtcacgtccgagcatgcgcacggttccggttaaatcggcggacgagcaagctgcgacgatcatcgtgaagcatcgggagctcatggtgaaccaacggacacaggcgatcaacgcgttgcgagggcatgcagcggaatttggcatcgttgccgccaagggctgcgcgaacgtcacagcattgcttgccgttctgtctgccgaggagatgattccagctattgcaaaggcgatgttcgagcaaatgggccggcatgtgacggatctcgaggcaaaaatcgacgcgttggaaagacaactgctcgaacagcacaaggccaacgccgtcagcgcgcgcctcgccgcaatccccggcgtcgggccaatcaccgcgatcaccatggcgctgaccgtcaacccaacgaactttgagactgggcggcattttgcggcctggctcgggctgactccacgagaacattcgaccggcggcaagcatcgcttggggcggatcagtaaggcaggcagtgagaggctgcggcagctgctcgtggttggggctatggcggtgatccgctacgccaaaccaggcagtaaatcggccactgcatggctgttgcaattgctggagcgtcggccgcgcaaggtcgcggcggtcgctatggccaacaagatggcccggatcatctgggccatgatggcgcgtggtgaagcgtatcggcgtcagccggtagccgcctaatccgcgcgccggtgccgagggtttaagtgctgagcaagagatgataatcggtcgaaccgacgaatgacaaaatccgaccaattccaaggcattctatgccgttgccctgattggatgtcgttcgcggaacccatctgggccagcggccgtgccgcgtaaacaggccgaacgcatgaccgctttcgaaccgccatcaaatcttgcaaattcccacttgaactctacgggccgtccacgca

SEQ ID NO: 9853 - DNA, 1363 bp, unidentified
  source 1..1363: mol_type = unassigned DNA; note = element_f74d4fc
  misc_feature 1..2: note = core
  misc_feature 3..73: note = LE
  misc_feature 74..1099: note = CDS
  misc_feature 1100..1363: note = RE
  misc_feature 1131..1360: note = bridgeRNA
ttaatgagatggtcagcccgatccccacacagcggactacgctgtgtggggattgtgcttttgggagaccatcatggatgctgcctcgctgatcggaatcgaccttgggaagcattgcttccacctgcatgcgcaggatgcgtcgggccgcatggtatttcgcaagaagctaacgcgcagccagatgctgacgctgctgggcaacgtgccctgctgcacggtggtcatggaagcgtgcgccggagcccactgggtggcgcgacggattcagtcgttcgggcatcaggccaagctaatttctccgcagttcgtcaaacctttcctgactggcaacaagaacgattttgccgatgcacaggcgatctgtgaggcagcatcgcgcccgagcatgcggttcgtcagtccgcacaacgaagcccagcaagtggtttcggctttgcatagggtacgcgaagggctggttcgagaccgaactggcacgatcaaccagattcatgcattcctgctggagttcggtgtgagcctgcccaagggcaccgcagtgatccggcggttgccggccgtgctggccagcgagtctttaccaccacggctgatcgcactgctcgaggggctccaggcccacttcaagtacctggacgaacagattgtccagctcgagcgcgagttgatgcagcaactgcgggaggacgagcgcagccagcgtctgctcgaaattccgggcattggcccgatcacggccagcgtgctggggaccgaattgggcgatgcccagcagttcgtttctgcgcgccagttcgcggcatcaatcgggctggtaccgcgccagtacagtaccggcggcaagccgacgttactgggaatcagcaagcggggggacaagaatctgaggcggctgctggtgcagtgcgctcgaaccatcatccaacacatcgagcggcgtagcgaccggctgggagtgtgggtgcgtagcctgttgagccgacggcattccaacgtggtggcctgcgcgttggccaataagttggcgaggattgcctgggccatcctcgccagagggacacactaccaaggcgaacaggctgttgccgcagcctgacgctctgcgccgcttcagtgccgtttttacccagtcacttcctggttttgcgacgcgagatacctgaagacataaacgacacaacggccgggcaagcaccctgaaacgaaaaacagcgctcgacgctgaggtttttataagggttgcccggcgcggctctcatcatggggcgggaacctgttcccaccacgaccccggatagatttgcgcacgtccaatttatgccaacaccttctcgcttgcaaaaatcgggctgaccataga

SEQ ID NO: 9854 - DNA, 1111 bp, unidentified
  source 1..1111: mol_type = unassigned DNA; note = element_f74dc26
  misc_feature 1..2: note = core
  misc_feature 3..163: note = LE
  misc_feature 164..1105: note = CDS
  misc_feature 1106..1111: note = RE
  misc_feature 1..165: note = bridgeRNA
ccctgtgtctgaaaagcctgtcataatgatggtgggcgggaagccgttgggtccttggcgcttgacgccgtgagccggctcggtctcccgcccgttccattcaacaacctgaacagttgcacgaggctgcgccaacagacctcgcatcacagggacaggcaccgtgatcatatcctctcgttgcgtcggaatcgacgtctccaaacatcatctcgatattttcgatgaggccgtcggtgtatcggaacgcatcgacaacgcgacacacgccatcacacagctggtggcgcgttggcgatgcgatgcgctggtcgtcttcgaggctacgggggtctacgacctcgagcttcgtgaggcactgcatcgggccggcatccgctttgcccgtatcaatccggcccgtgcccgcgactttgcccgtgccagcggccaactcgccaagaccgatccgatcgatgcgcagatgctggcggccttcgcccgcgccatgaagcccgccaccgagcaggccgcgacacccgcccgcaacgctttggcaaagcttgcaaaacggcgggaccaactggttgctatgcgagcccaggaaaagaaccgccgcagcgaagccgaggaccgcgccatggcggaacgcatcgctcgcctcatcgaggtcctcaattatgagatcgctgaaatcgagaccgagatcaatgcgctcgtcaaagccgagccggagcttgcggacgatgcacagctgatgcgctcggtgcccggcgtggggcccgtcgcctgcatgcaactcctcacccagatgcccgaacttgggcgtctcgggccgaaggaagtggccgctcttgccggcctggctcccttcaatgtcgatagcggggcttatcgaggcaagcgcaagatcggcggcggacgaaagcgcgtccgcgacgccctctacatggctgctctcaacgccattcgccgcgccgaccgcttcaaggccttttacgaccggctgcgccaagccggcaaaccagcgaagctcgccctcattgctgtcgccaggaagctgctgaccatcctcaacgctatgctgcgcgaccgaaaaatctataaggtcgcaccgtcaacataacagttg

SEQ ID NO: 9855 - DNA, 1563 bp, unidentified
  source 1..1563: mol_type = unassigned DNA; note = element_f74f041
  misc_feature 1: note = core
  misc_feature 2..260: note = LE
  misc_feature 261..1460: note = CDS
  misc_feature 1461..1563: note = RE
  misc_feature 42..229: note = bridgeRNA
cgttacctttttagcagccccttaaagagtaagaattggggttgttggcctgtcggtcccggcatgattaagtcccccagtcatccatgatccggggggtgttgtcactgggattcgataggcgccggggatatcactaatggggaccgggccagcacagtgacacagcgtgtaggtcagccgtaacgtggatgccgagccttgccgccgcaggacaagccaacaccgaaatgagtggcactgtttcagggaggtttgcgttgatcaagaaccatgacgaagtcgatattttcataggcgttgacgtcggcaaaagcaatcaccacgcggtcgccatcgaccgggctggcaagaggatcctggaccgggccctgccccaggacgaggcgaaaatccgggcgatcatcaaggccgtcgccgacaaaggcaccgtgctgctcgtcgtggatcagccctccacgattggtgccttgcctgtggccgtggcccgagctgagggcatcctggtcggctacattccgggactggcgatgcgccgcatcgccgaccttcacccgggcgaggccaagacagatgctcgagatgctgccatcattgctgaagcggcacggtccctgccgcacacgttgcgttccatcgtcttcgctgacgagcaggcggcggagctgtcgatgctgtgtggtttcgatgatgatctggcgaagcaggccacggcaacgtcgaaccggatcaggggcttgttgacgcagattcacccagccctggaacgggtcatcggagagcatctagaccaccccgccatggcggaactgctgatcaaatacccttcgccggagaagctccgcaaggcaggccaggcgcgggtgactaccctgctggccaagcatgctccgcgggcggggaaacgctgggcagcggatatcatcacggccctgggtgagcagaccgtggtcgtctccggcaccggcgctgccggcatcgtcctggcccaactggccccgatgctcaaacaactgcgcaccgcgagggacgaactcctcacccaagttgaggccctcgtggaggcccaccctcttgaccaggtcctgacctccatgccggcggtcggtgtcaggaccgcagcacgcatcatcaccgaagtcgccggcaaagaattccaaagctccgggcacctggcctcctacgcagggctcgccccggtgacatggcgctccgggacctcgatccgcggcgaccacccctcacgcaagggcaacaaaaccctgaagcgggcgttcttcctctccgccttcgcggcattgaaagacccgctctcacgggcctactacgaccgcaaacgcgccgagggcaagaagcacaaccaagccctcatcgcccttgcacgccgccgctgtgacgtcctgttcgccatgctccgcgacggcactctctacgacgccccaacaccgaaaaccacataaccacccgcagctacccgccggcggcatcagcctgcccaaaaaacggtcccaaactttctagaaaagactggtcaaccccttgacgaaaaacatagggacaccc

SEQ ID NO: 9856 - DNA, 1385 bp, unidentified
  source 1..1385: mol_type = unassigned DNA; note = element_f750e16
  misc_feature 1..2: note = core
  misc_feature 3..81: note = LE
  misc_feature 82..1107: note = CDS
  misc_feature 1108..1385: note = RE
  misc_feature 1126..1373: note = bridgeRNA
tgatggtgtggacggccccaccctaacggcatcaagtgccaagacgtggtcgctggagcgccaccaacggggagaccgtccgtgagagagtttatcagaatcggcgtcgatttggccaagaatgtctttcaacttcatggggtcgagcgggtgggcggatcgccgtttcagcgcaagttgacccgggccaagttccgagcgttctttgctcagttgaggccttgtcgcgtgggcatggaggcttgcggatcggcgcattattgggcgcgcgtcctgagagcgatggggcacgaggtcgttctgatcgcgcccgcctacgccaaaccctacgtcaagcgcggcaagaacgacgcggccgacgcggcggcgatctgcgaggcgatgtcgcggcccgagatgcgcttcgtgccaatcaagagcgtcgaccagcaggccgtgttgatgttgcacaagacccgggatctgctggtcaagcagcgaaccatgaccgtcaacgcgttgcgcggccatctccaggagttcggcctgatcgcggccaagggcatccatcgggtccaggaactggtcgccctcgcgctggcggacgaaggtcttcccgaagaggccaagcaagccgccgctctgttggcctggcagagcgagcaactcaatatgaagatcgacgggttggagaagacaatcgccgcagccagcgcgaagcatccgatgagccgcttgctgcaagaaattcccgccatcggaccgctgatcgcctcggcgatggcggcgagccttcccgatcccagcgtcttcaaatcggggcgcgacttcgccgcgtcgctgggcttgacgccgagccagcattccagcggaggaaaggaaaagctcggagcgatcaccaagaggggcaatcgatacttgcgtaagatgctcgtcgtcggctgcacctcggtgctgcgcgtggcccacaaacgcaaaggcgccctggccgaatggatcgtggcgctgaaggccaagaagcccgagcgcgtggccgcggtggctctggccaacaaactggcccgcatatgttgggcagtcctatcgaccggcgaggccttccgcgaagagctttacgccagagcctgaagccgaatccaaagacagaacttagccaggagccgatcaacccttcaacgtttggcaagcgcaccgacgtgatgatccaaaacggtcgccaccgaaagccgaggacaacccgccagccgtcacgaacctcgagttcgccgcgatgatagggaccgaggccgtcggaaatcatcagggccagcggtcaaggccgcacacaaaggccggacatatgaccgcagccgaccaagccgatcaaaacgtcaaaatcgctcttgccaatcggggccgtccacata

SEQ ID NO: 9857 - DNA, 1380 bp, unidentified
  source 1..1380: mol_type = unassigned DNA; note = element_f758f03
  misc_feature 1..2: note = core
  misc_feature 3..86: note = LE
  misc_feature 87..896: note = CDS
  misc_feature 897..1380: note = RE
  misc_feature 1149..1368: note = bridgeRNA
tgatgctgtggacggctcctccaccggcacgtgagtgccatgaatgtgggcgctgttaaggttcccacgattcagaggagctagctatgcagacgatcacgacaatcggtctcgacatcgccaagtcggtgttccaagtgcacggagttgatgccaccggccaggtggtcatccgccggcagttgaagcggcgctctgtcctgacgttctttcagaagctgccaccatgcctggttggcatagaggcctgcgcctcgtcgcaccattggtcgcgcgaactccaggcactcggtcatatcgttcggctgatgccgccggcttacgtgaagccctatgtcaaacggcagaagaacgacatggctgacgccgaggcgatttgcgaagcggtcaccagagccaacatgcggttcgttccgaccaagacgcctgagcagcagagctgcctgatgcttcaccgcacgcgccatctgttcatccgccagcagaccgcggtgattaattcgatccgagcgcatctcgccgagtttggcattgtcgccccggtcgggcgcaaaggagtgaccgaactgctgcatgttgttgccgacccgagcgacaaaagggtgcctgaggttgcccgtgcgtgtcttgccgcgctcggcactcaactgctcagcctcaagcagcagatcctggagtttgatcggatgatcttggcctggcaccggtccaacgaaaccagcaagcgccttcattacatccccggggtaggtccgatgctggcaaccgctctggtcgcgagtgttgctgaccccaggacctttcgatcaggacggaacttctcggcctggattgggctcgttcccaagcagcactcaagtgggggcaaggacaggctcggcagcatcagcaaatagggtgaccgctatctgcgcagcctgttcgtggccggtgcactcgccgtcatccgctacgccaagatccacggcaccaagcatcggccctggctcacggcgttgttggcgcggcgccatgcaaaggttgccgccatcgcgcttgccaacaagatcgcgcggatggcctgggccatgatggccaagggcgagcgctacaaggaacccatcgcgcttgcgcggtgaacgagatcgcgccgggcatccggcgtgatgtgaaggttgggagggcgaacagcacgtaatgcagagccggtcgatccggcgatcaggacaccccacttgtgccagcgcattgtcgaatgcgggttgttgaccgggacctgatccgcggagggcattatggccagcggtcatgtgaaccgcacctacaggccgaacacatggctgcaccgaccaacgctgcatacgtgaagaaagtccttgccaactcggagccgtccacaca

SEQ ID NO: 9858 - DNA, 1476 bp, unidentified
  source 1..1476: mol_type = unassigned DNA; note = element_f764a37
  misc_feature 1..2: note = core
  misc_feature 3..257: note = LE
  misc_feature 258..1454: note = CDS
  misc_feature 1455..1476: note = RE
tctaccatcggattctgtgcagtgacggggacacccccggcgcggtagactgacctcgacgggggtgtggcttgcggggtccgcgggctcttcggagacaccgctcgattctgaaatgccgcccccgtcatctgtgccatccaggaaagtccgaagggatggtgctaaggcactcacgcgacgcttgagtggcctgtggctctgaacagtagacgagaccgcctggatgagcgaactcgcgctgcaaggaggcacgcatggagtctcagcttcgcgttggcatcgatgtcggttgccacgcacaccgggttgggatcgccgatcccacaggctcgatcctggaggagttcgatatctcgcacagcgaggccggcttccaggagttctttcgtcgagtcgaggaacgaagagcaaagcttgggttccccgttgccgtggcgatggaggggtacaacggctacgcccgtcccctcgaccgtctcgtccaggagaaaggctaccggttgttcaacgtcaacaacctgaagctcgcccggttcaaggaagtctttcctggcgcggcgaagaccgacccgatcgacgcgcggaagatcctcgagctgttccaccttcgcgagcagctgccgatggcgaaggacgtgctgcaggaggtcctgcccgcgcccgaggtgaacgagaagctgaagagattgagccggcggcgacgccaactcgtcaccgagaagctgcgcgtcctgaaccgaatgcaggtcgatctccaagcggtctctcctgaactcctcgcggcaacgcacgatgccgacaacctgtggttcctccggttcctcagcttccgcgacgaccttcagcaactggccaagctgcgtcgagcgacgatccggcagatcccgagcgtgggagcgaagtacgccaaggtcatcgaggaatggcaggccaaggcgacgttctccgacgaagtcgagtacgtgggaccgatgatcgttgacgacgcgaagcgaatcctcgagctacaccagcagatccacacgctcgatgaggcgttggcaaagctggcaatgcagtcggagatcgcgtgccgtctctcgacgattccggggttcgggaagacgtcgattgccgaactcgcgggagagatcgggactgtatcgcggttctccggtgaagcgagtcttgccctgtacatgggaatgagtccattgacgcgccagtctggacagatctctagagccaaggctccgcgtcaggtcaacactcgctgtcgcgcggcgatgatgacgactgtggcacggcacatcgggtgcgtccctcagtcgagagcgtactacgaccgcaagcgcgcccagggcaagacacacaatcaggcgattcgagctctcggtcggcacatggttcgtgtcatctgggccatgctgcgtgacggacgcgactacgagccacgaggtgataccgcgtagcttgacaatccaagaggaatgt

SEQ ID NO: 9859 - DNA, 1577 bp, unidentified
  source 1..1577: mol_type = unassigned DNA; note = element_f76c3e2
  misc_feature 1..2: note = core
  misc_feature 3..279: note = LE
  misc_feature 280..1446: note = CDS
  misc_feature 1447..1577: note = RE
  misc_feature 3..255: note = bridgeRNA
cttgtatgatgtattcataaccgaatacaccacttttcctttctttttcttgatattgtggttcaatacaattcagatactgtggacttttgatttttccctgtagctttgactactcgactggagtgtattgccgctacctttatctgaattgtttataagctggatgttgccagtggctgctgttgcagcccagagtacttatttctatcaagtctacatagataaccgcaggcggatatcacagtatcagacttaatgaaagggaggtgttcctcaatgatttacgcaggcattgatattgccaaactcaaccactatgcagctgtcctttcttcggacggcaccgtactcactgagccgtttaaatttacaaatgacggtgatggattcaaacggttatctgaagagctttctgattatgctcccgaaccggtcatcatcggtcttgagtcaacggcacactatggcgacaaccttgtccgttaccttgttgctaatgattacaaagtgtgtgtgctcaaccctattcagacttcgtcaaggcggaaagatcgtatccgcaagacgaagactgacaaagtcgacgctgtagtaatcgctgaaaccttaatgatgctgagagatcgcaggtatgtgaccttctatgatcttgatctgatggatctcaaaacacttggacgtttccgtcagaagtccctgaagcagcggacaaggctaaaaatccagctgacttcatttgtggatcaggtgttcccggaactgcagtatttctttaaatccggattgcatcaaaaatctgtctatgcgctccttaaagaggcgcctacgccgaaaactattgcttctatgcacatgactcaccttagccatatcttacagaccgcttcccatggtcactttgataaagagacagcaagacaattaagagctcttgcacagaagtctgtcggcaacagcgacagtactgtatctattcagataactcagaccatctcacaaatcgagttactggatagccaaatcgaaaaggttgaggctgaaatgacggaaatcatgaaattcaatgattctcccatcatgaccattccgggtattggatatatcaacggcggaatgatacttggagagatcggcgatatacaccgtttctctaagccccatcagctgcttgcatatgctggtctggatccttctgtaaaacaatcaggaaactttaacgccagccgcaccaggatgtccaaaaggggctccaaagtgctcagatatgcccttatgaacgcagctcataatgttgtaaagaacaatgccacctttaaggagtattacgataaaaagatggctgaaggccggactcactacaatgcacttgggcactgtgccggcaaactcgtccgtatcatctggaaaatgatgaccgatgacatagactttaacctcgactaactaagaggcttaccaatatatcgagatctttaaaatgcacctttagggagctttattaaagttaccctttttgaccccaatatcgaaaaaataattttttgctaatttaggcttgacttttcatagctggt

SEQ ID NO: 9860 - DNA, 1151 bp, unidentified
  source 1..1151: mol_type = unassigned DNA; note = element_f77ea40
  misc_feature 1..2: note = core
  misc_feature 3..200: note = LE
  misc_feature 201..1139: note = CDS
  misc_feature 1140..1151: note = RE
  misc_feature 14..206: note = bridgeRNA
cttgtcttatggcattttcatctgatctggtcagattgggaccgccgccgggaatgatacctcccggcggcggcgagggcaggaccgtgacttcgcaggcgcgttggcgccgttcctgagtgaggtcgccctcgtctttcccatcggcctgaacggatacaggggctttgaggcccgcatgacaagcagaggcaggaaagatgacacagattaccatcggcgtggatgtttcgaaagacactctggatgtccacctccatcctgacggattgcaccgtcagttttccaatgacacccccggcttccgcgcgatcctcgactgggtcgagggccagcctgtttcccgcctcgtctttgaggcaagcggggcctatcaccgcgccttcgagcgcgcgatgggggaagccgggattgctctgtgcaaggtcaacccagcacgggcccgccggtttgcagaggccacaggccagagcgccaagaccgaccggatcgacgcggccatgctggcccggatgggggccgttctggagccggacacccattcggcaccttcagaaacagcgtgcgagctcaaagagctgcacatgatgcgggcagccctcgtcaaggacaggacggcggcgaagaaccgggctgcaacgctcaccctgccgcttctgaaacgccagctgcgccagaggctggcggcgatcgaccgtcaggtcaggcagatcgaacaggccatgcgcacgctcattgagaccgaccccgaactgatccgcaaacgggacatcctcatctcgatccccggtatcgccgaacgctccgccttcgccctcatcaccggcatgccggaactcggcgaccttgacagccaggctgccggcgccctctcgggaaccgcgccgcgaacccgccagtcaggcaaatggaccggcaaggcgttcgtgcagggcggccgcgcacatgtccggcgcgcactctacatgcctgcgctcgccgccgcccggttcaaccccgacctcaaccagacctacaaaagcctgaccgcacgtggaaagcctcccaaactcgctctcaccgccgtcatgcgaaagctcatcgtcctcgcaaatgccctcatccgcgacaatcgaaattggaccccgaaacctcattgaccaacacggata

SEQ ID NO: 9861 - DNA, 1238 bp, unidentified
  source 1..1238: mol_type = unassigned DNA; note = element_f77f0de
  misc_feature 1..2: note = core
  misc_feature 3..230: note = LE
  misc_feature 231..1223: note = CDS
  misc_feature 1224..1238: note = RE
  misc_feature 38..191: note = bridgeRNA
cttgtatcttcagtttctgagcttcggagcttcacggtatacggcgaaggtgggcgctcagggaaggccgtgctgcctagaagccacgagcttgttcgttagatcggcctccccgccctcttcgcctatgccgtggagtatccgaggccatgagcctgcatccacaaggttggtaggcgttggtgcagggtcggggggaccggaggccgagcgtacgatgggaggggcggatgcgtaaagagaccgaggcggggattgacgtaagcaaggatgtgctcgacgtggccgtgcgacgggaccggcagcgcctggagaccgcgcgcttcgccaatgaccccgccggccaccaggccctggcgcggtggctgacgaagcgcggccgcgcggtgcgcgtggtgctggagtcgaccggcacctacagcttggacgtcgccctggccttgcatcgggtccggggcatggccgtgatggtcgccaatccgcgcgccgtgaagcagttcgccggtgcgctcatgcagcggtcgaagaccgatctgactgcggccgctgcgctccgcgagtatgcggcgcgcatgccgtttgtggtctggcagccgcccgccgccgaggtcctggccctccgcggcattgcgcggcggatcgcggcgctcgtggtcgagcgcacccgggaacgcaaccggctccatgcggtgcaggcgaccgcggagcggctggcggtcgtcgtcaacgacatcgaagtgaacatccgccacctcgagcgccgcatcgagctcctcactgcggacgcggtcaccctgatccgcgaacacgccgacctccaccgcgcgttcgagcggctgacgtcggtgccgggcatcgccacgcacagcgccgtgcaactgttgcccgagctgctcgtgctgcccgacgacatgaccgtgcgccagtgggtcgcgcacgccgggctcgatccccgcgcctgccaatccggtacctccgtcgacaagcccgcccgcatctcgaaagtgggcaacgcgcacatccgccgggcgctcttcatgccggcgctcgtcgcggtgcagcacgagccgcacgtcaaggccttcttcgaccagctcgtcggccgcgggaagaagcccctccaggcctacgtcgccgtgatgcgcaagctgctgcacgcgatctacggaatgttcgcgacgaggacgaccttcgtcgcggagaagttctatgctgtctcttgacaaccgagggagtat

SEQ ID NO: 9862 - DNA, 1185 bp, unidentified
  source 1..1185: mol_type = unassigned DNA; note = element_f7878bb
  misc_feature 1..2: note = core
  misc_feature 3..207: note = LE
  misc_feature 208..1170: note = CDS
  misc_feature 1171..1185: note = RE
  misc_feature 6..212: note = bridgeRNA
cttgtatgttcagaccaggccagaacggtagagtctgggcgccgttgaggcggccagaccggtccgtgcagcttggtagtggctaggtgatcgagcccgtttctgagtacagagcgcacggccgccgtgctggccttcctgaagcccgaacggttacgcgcgccggcctgaccgagcgcgcatgcacaagcaagggatccgaagaccatgtctgcttcctcagtggtggtgggcatcgacgtggccaaggcgcatgtcgatgtcgcggtgctgggcgccaagttcgatgcccagcggtttgacaaccaggccgagggccactcggcgttgatagcggctttgaagccgctggaggtggcgctggtggtgatggaggccaccggcggctacgagaccgaactggcttgcgcgctgcaggccgccggcctgccggtggcggtggtgaaccctcgccaggcgcgcgacttcgccaagtcgatgggccgcctggccaagaccgacgcggtggacgcgcgcatgctggccgagttcgccgcagtgctgctgcgccgcgacgatctggctcgcttcctgcgtccgctggccgagccgcagcagcagtggctggctgcgctggtcacgcgccgccggcagttgctggccatgctgctcgccgagcgccagcgcctgcagatcacgcccaagggcttgcacccgagcatcgaagccatcatggctgccatccaggcgcagctcgacgacatcgaggcccagacggtcggccacgtgcgcgagcacttcaccgaactcgaccggttgctgcagtcggccagtggcatcggcccggtggccagcgccacgctggtggccgagttgcccgagctcgggcggctgaaccggcgcgagatcgccgcgctggtgggcgtggctccgatggccaacgactccggcgcaagccggggccgacgacgcatccagggcgggcgcttcgacgtgcgccgcgtgctgtacatggccgcgctgaccgccagccgccgcaaccccgtcatcaaggccttctacgagcgcctgatcgccgcgggcaaatgccccaaggtcgcgctggtggccagcatgcgcaagctgctgaccacgctcaatgccatggtcagaaccaacaaaccttgggacaactcgcttcacggcgcttgactcggaagacggata

SEQ ID NO: 9863 - DNA, 1354 bp, unidentified
  source 1..1354: mol_type = unassigned DNA; note = element_f78c65e
  misc_feature 1..2: note = core
  misc_feature 3..76: note = LE
  misc_feature 77..1102: note = CDS
  misc_feature 1103..1354: note = RE
  misc_feature 1078..1341: note = bridgeRNA
tgatggggtggacgccccctcacggcatcgctgtgccaaagtggtgtcgttgatcattacttgaacggaggcgtccatgttggaagttagcacaatcgggttggatctggcgaagaacgtgttccagatgcacggcgcggatggatcgggagccgtggccttccgcaagaaactgcgtcgtgaccaagtgctcaagtttcttgccgcgcagcctgcttgcacggtggccatggaggcctgcgccggcggtcattactgggcgcgggagattgcgaagcttgggcacgatgcccggctaatcgctccgggatatgtgaagcctttcgtgaagcggcagaagaacgatgccgctgacgctgaggcgatctgcgaagcaacccagaggcctaccatgcggttcgtagcggcaaagagcgaagagcagcaggccgcggcaatggtgttccgcgttcgcgatcttatggttcgtcagcggacccagaccatcaatgcgatacggggccatcttgccgaattcggactcgtggctgcacagggtctcttccatgccgccaagcttgtcgcggcgattgaggacaaaggtaccgccatccccgaagctgcccgtccgatcctgtctctgctcgttgcacagctgcgggcgctggatgagagagtggccgtgctcgaccgcgagatcgcccggcgtgccaaggaggatgcagaagccaggcgattaatgactattcccggcatagggccgatcaccgcgacggcacttgctgctctggctccatcggcgacaaccttcaagagggggcgggacttcgcggcctggctcggcctcacgccgctgcaacgctcctcaggcggcaagcagaagctcggcgagacgtcccggatgggtgaacgaactctgcgacggctgctgatcatcggggcgagcgccgccgtgcgctgggccatgcggaagggatcgacgggggatccttggctctcgcggatgcttgagcgcaagccgcccatgctggtgatcgtcgccctggccaacaagacggcgcgcatcgcgtgggcgttgatggcgaaagggggaacttatagggccccggcggtagcgggataatatcgctgctgggcttgaaggtgtgagaaggtccaaaggagagtatggcgccacggtcaacgagacgggatcgggaaaaccagatcatggatacgcgccttgagcgcgccagattgttttggacccgctccgcgaactcccatacaggcccgcggcatgtgacagccgcaacagaggccggacacatgtcagcaccgaccacgctccgtgctcttcgaaagattctcttgcaccaacgggggcgtccacaca

SEQ ID NO: 9864 - DNA, 1520 bp, unidentified
  source 1..1520: mol_type = unassigned DNA; note = element_f795005
  misc_feature 1: note = core
  misc_feature 2..112: note = LE
  misc_feature 113..1141: note = CDS
  misc_feature 1142..1520: note = RE
  misc_feature 1181..1488: note = bridgeRNA
gaatgaaagggacttccccgtcccgagcggcccgcgagcttgcgggagacggcaactgagtgccacgatgggaagtgcgaaatctcatcaactcactcgaaaggggaagtccatgaccatcgtaaccgtaggaatcgaccttgcaaagaacgtgtttgccgttcacggcgtggatgctgctggtaaacctattctggtgcgccccaacgtggcgcggggcaacctgctggaactcatcaccgccttgcccccgtgtttgatcggcatggaggcgtgctccggcgcccaccactgggctcgggaattcgagaagctcggccacaccgtgcgcctgatggcccccaagttcgtcgccccctaccgcctctcaggcaaacgcggcaagaacgatgccgccgacgctgcagccatctgtgaagccgtcacccggccccagatgcgttttgtgccgctcaagaccatcgagcagcaaggccagctgatggtgcaccgcgcccgccagggattcgtggaacaacgcaccgccaccctcaaccgcatccgtggcctgctgtcggaactggggctggtgctgcccctgaaggctgccaccgtacggcgcgaagcactggcccgccttgaagagttgcccggctgggccaacaccgtcatcggcgacctcctgagtgaagtcacccggctcgatgaacgcatcgccgagtacgaccgccacatcgccttcatggcccgccacagcacccaggcacagcagctgatgcaactcggcggcattggccagaccaccgccatggccatcctcagcaccgtgggcaatggctgcgactttgcttgcgggcgcagcttcagtgcctggctgggcctggtgcccgggcaatacagctcgggcggcaagcagagattggggcgcatcaccaaagccggagacgcctacctgcgcagcctgctggtactgggagccagggcggtgctcgccgccgccatgaagaatgacaagcccaggcaagatgcgatcagccgctgggccctcagcctggccgagcgccgggggtactggcgcgcggtagtggccattgccgccaagaacgcccgcatgtgctgggccgtgttgcagcgaggggatgccttcaagatgcccgcgtgagtgcagtcgcaaagcaagtaccaaggcaaaacagaccagaaatccgccgcgtgaaggcagtcgttgatgtgcaaagggttggacctgcgccggggaatgctcggtgaactctgggggagccatgggagaaatcccgatacccggctaacgaatggagccccaggcgcgcgtctttcatcagggtttgctgccacaaaagcaggcagcgttaatgaccgtttgtagtctcgccgtccgcaccgtttgccaagaaacatcgacacgctgcaggcacaaggttggaagctgggctgaaaccgatgaaaaccatgcttgggccgatcgctgcgcgatcaacccagggtgaggtgttgcttgcgaatgtggggaagcccttgta

SEQ ID NO: 9865 - DNA, 1558 bp, unidentified
  source 1..1558: mol_type = unassigned DNA; note = element_f7a303f
  misc_feature 1: note = core
  misc_feature 2..267: note = LE
  misc_feature 268..1440: note = CDS
  misc_feature 1441..1558: note = RE
  misc_feature 14..248: note = bridgeRNA
tgtatgataaatatataaaatatttatctatacaacctcctttcatagtttattttatttaacattttttatataatttatttatactgtggactttttatttttacttaaagagcttttgctactttttaaaggagactactgccacactcttttaactcatatacttatagttggataagttcttaaactttcatatatcgcaagaatgtattgttttttaagatgtggactccacagttattaattttttaaggatgtgatcttatgtttttacttggtattgatattgctaaacttaatcatgttgcttcttatatcgattcttctactaatgaagttattttttctaattttaaattcaaaaatgattttaaaggttttagcgctcttttaaataaaatcaaaagttttgatgctaaaaatcttattattggtttagaatcaacttctcattatggcgaaaatcttattaattttttatttagacatgattttaaagttgcacttattaatcctttacaaacttcacatctgagaaaagctaatattagagatgctaaaaatgataatctggactctcttaatattgctaaatctttactttttactaaacttaactttgtttctgaaaaaaacattgaatgtttttctctaaaaaaacttactagatttaggaataacttaattaagcaaagaagtaaagctaaaattcaattaacatctttacttgatttactttttccagaattacaatatctttttaaaagtaaaattcatagcaaagcaatctactctcttcttaaaaaatatccttcaacagaggaaatagcagccctaaaagatgatgaaatttctaatcttttatatgcttcttcaaaaggacatttcaaaaaagaaaagtccattgagcttaagagtcttgctaaaaccactgttggtatcaaggatacttcaatctcattacatttaattcagttaatagaattaattgaattatataccaagcaaattaaagatattgaaattaaaataactgatacagtcaataaattagacacaacacttctatcagttccaggaataagcattattgcctgcgctattatattaggtgaaacgaataattttgaaaatttttctagttctaaaaaattacttgcatttgccggtcttgatccaaagataagacaatcaggtaattttaatgcttcatcttgtagaatgtctaaaaagggttctccatatttaagatatgctttaatctttactgcttggaatattgttagacattcagaaaaatttaataaatattattttttaaagcgctcacaaggtaaatcacattacaatgctcttggtcatgttgcacataaactagtaagaattttatttacactgataaagaaaaatatttcttatcaagaagaaaaattataataatatctattaagattttattatatgaaaaatcaagagtctcataactctaattttgttatgtctaaatttcttatttgaaatttttttttaaaagttcttgacatttcatagttgg

SEQ ID NO: 9866 - DNA, 1235 bp, unidentified
  source 1..1235: mol_type = unassigned DNA; note = element_f7b22df
  misc_feature 1..2: note = core
  misc_feature 3..221: note = LE
  misc_feature 222..1208: note = CDS
  misc_feature 1209..1235: note = RE
  misc_feature 12..190: note = bridgeRNA
cttgtatcttacccctcatagtgattagctatcactatattgcaaattacagagtttcgtgtactagcaaaacataaagtttgggtttgagataaaacctgtaatttgccctaaccacttacacaactctggacggtaactaagcactctgatgctgtattcacaagaaaagacagtggttatgtttaaacaataattgggtaaatcaggcaggtaagattatgttttatcttggtattgatgttgctaaagctaaaattgattgctgtttaattttagacaattctacaagtaagaagaagacaaaaaccttttcgaatacacaaaacggttttgagcaacttcaaatttggctaaatcaccatgctgctacttctatgcagaccattacattaatggaagccacttctatttatcatgaactcttagctcaatatttatttaaagcaggttatcaggtctgcgtaaccaatcctgctagagctcgatattttgctcagagtatgtccaagctgaataaaacagacaaggtagatagcgaagttttagccagatttgcaatgacagcagatctacatttttggcaacctctgcctgaacatattcaattgcttaatgcattgctagagagaagagctgtcctttacgacgatttacaacgtgaaaagaatcgtttggaaaaagcaaagtctacttttactatggagcctgtactggaatctattcataatagtattacgcaattaaacaaacacatacaaaatattgatcagcagattgataatcatattgatcaaaatccagatttaaaaaatgacaaagatctgctcagtagtattcctgccattgcagaccgaaccagcttattaatgcttagtttcttacgtagccacacttttgaaaaagctagccaagcagcagcctttatcggcttggttccaattcaaaaacaatcaggtagctccattcgtggtagaagccacttatctaaagcaggctcttccaaaatacgtgctggtttatatatggcagccgttgtcgcaactcgacataaccctcatatcaaagaaatgaatgaacgcttattagcgaatggtaaaactaagatgatggtgattggagctgcgatgaggaagttagtccatctttgttatggtgtactcaaacaccaacaaccttatcaagcaaattattgcatcaattcttaataatttgcttgacggtggagacggtat

SEQ ID NO: 9867 - DNA, 1371 bp, unidentified
  source 1..1371: mol_type = unassigned DNA; note = element_f7b727f
  misc_feature 1: note = core
  misc_feature 2..83: note = LE
  misc_feature 84..1103: note = CDS
  misc_feature 1104..1371: note = RE
  misc_feature 1138..1368: note = bridgeRNA
tactgagatggacccggcgccccttcggggaagcgcgatactactgaatgtcgtcttcaccagaccacatcgggaggttcatcatggaaatcgaaattctcggcatcgacctggccaaacacgtttttcaactgcacggcgcggatcgcagtggacgtgcggtgcatcgctccaaagtcgctcgcggcgcgttagccgagacggttcacaagcttcatccacaaatcgttgccatggaagcttgcagctcagctcatcactgggcgcgtcgtttcatagcgttgggtattgaggttcggttaatcagtccgcaatatgtgtcaccgttcgtgaagacgaacaagaacgaccgcaacgacgctgaggcaatcgttgaggccgcaggtcggccgacgatgcgctttgtcagcattaagtcggtcgagcaagaagatatccaggccgtccatcggatgcgtgccattctggtgcgccagcggactgccgtgatcaatcaggttaggggcctgctcgcagagcgaggtctgatcattgctcgtactccgcaagctttcaagcacgccatccatgaggtgttgagcaatgagggttcggaattgaccggcttctgccaggcgctcctcaccgagatgttgcaacatctgcaggcgctagaagcgcgaattcactggcttgaggtatcaattaagaacttcgtaaaatcatcgcagctgtgtcgcaagatcactgctgtcgagggcgttggtccccttactgcaactgcgatcgtgggtgctgtgggtgacgctaagcaattttctaacggacgtcacttggctgcttggttaggattggtgccacgtcaatactcatcaggtgggaaggcacgattgcagggcatcagcaagcgaggcgacacctatttacgaacgctattgattcacggcgcgagaaccgttttgcaatatgctgcgggtaaaactgacaagcgtagtcgctggctgcagcaactaatcgctcgacgtggctacaattgtgcggcggtggctctagccaacaagaatgcacgtgttatccaagtcttattgagcgggaatgcagcgtatagaccggctgccttctgaacgcgagatcgtgaatctgttgtttcacccagcgcaggtttgcgtagctcttaaatgtgatgacgaaattggttgaaccagcatcctgaaccctgctttcagtgccggctgattaatctcaagccgttggtttgctcaggacaggatgcgcggatctcatcgaggctgcgggcgtgcgtcaggaaatgcccacaagcaagccggatacatgcatgcagaccgtttccaatcacagcaaagagcttgcaaaacgcgtcgggtccataca

SEQ ID NO: 9868 - DNA, 1386 bp, unidentified
  source 1..1386: mol_type = unassigned DNA; note = element_f7bb27c
  misc_feature 1: note = core
  misc_feature 2..89: note = LE
  misc_feature 90..1118: note = CDS
  misc_feature 1119..1386: note = RE
  misc_feature 1157..1378: note = bridgeRNA
caatgggatggacgcccctacccgcaccggcatcgtatgtgccaaagtgggcgtatcaccaaccacttgaaccgagcgaggcgtccatcatgaagattacgacactaggtatcgatctggcaaagcaagtatttcaactgcacggcgtcgatgaacagggcaaaaccgttttaagaaaacagctcaaacgtgaccagatggccacattcttcgcaaccttgcctacctgcctgattggcctggaagcatgtggcagtgcccattattgggcccgtaaattagagtcgttcgggcacaccgtacggttgattgcccctcaatttgttaagccctacgttaaaactaacaagaacgatgccgccgacgcagaagccatctgcgaggccgtggcccggcccaatatgcgatttgtgcccatcaaaaatgtcgaacagcagtctgtattggccctgcaccgtgcgcgacaagggttcgtgcgggcacggaccgcacaggctaatcagattcgggggttactggctgagtttgggataatcatccctcagggaatcgctcacctgtacacgcgtgtgcccgtgttgctcgatcaacaaagcgagcaactgacaggtccatttcgattgcttatacagcgactcctggagcatttaaaagagctggataaacaggtcaacgaattggagcagcagattaaagcctggcataaggccaatgaagcaagctgtcgacttgagcagatcgccggcattggtcccattactgccagtgccctggtcgcaacgattggcaatgccaagaacttcaccaacgcccggcaattggctgcgtggctaggcttagtgcccaaacaacactccagcggtggcaaacaagtgctcctgggaatcagcaaacgaggcgaccaatatctgcgtaccttgttgatccacggagcgcgtgcggtgatctatcgtgctcggctcgcagccgagcaaaccggctggctacaacgactcttgcaacgatgtcaccccaacgtcgccgccgtggcactcgctaacaaaaatgcccgaatcgtctgggcgttactggccaaccagcgatccttccagcgtgattatgcggctgacggcacataggcacacggccccagtctaaaccacccttaaccccttcccccgattgctcaagcaagcatgacatgatggcaagataggtcagaccgtggttggtcaagcccgatgtcccccaggcactgtttagtgcgtttgtccgattgaggcaccaaccagcagaacccatcagggaccgccgctcgcgcggcaatcaagtccgaatgtacgggtgcaatctcgaccaactgatcaacatggattgagtgcttggcaaaaaaggggcgtccatgta

SEQ ID NO: 9869 - DNA, 1378 bp, unidentified
  source 1..1378: mol_type = unassigned DNA; note = element_f7c8199
  misc_feature 1..2: note = core
  misc_feature 3..80: note = LE
  misc_feature 81..1115: note = CDS
  misc_feature 1116..1378: note = RE
  misc_feature 1150..1364: note = bridgeRNA
gatggggtggatggctcccgctcccggcgttgcagcgccacagtggtgctgtcacgcagcacgagcttggagcgaccacgatggagatcacgactgtcggcatcgacttggccaagaatgtcttccaggtgcacgctatcagcggaacaggagaggtcctcgctcgtcgagcactgaggcgagctcaggtcatacccttcttccgcaggctttctccctgcctggtcggcatggaggcctgcggcacgagccatcactgggcgcgcgaactgacctctctggggcatactgtgcgattgatgccgccggcctacgtcaagccatacgtgaagcgaggcaagaccgacgccgctgatgcggaggcgatctgcgaggcggtcacgcgccggaccatgcgcttcgtcccggtcaagtctgtcgagcagcaggccgcgctggcccttcatcggacccgcgacctcctcgttcgtcagcgtacgcaactcatcaacatgatccgggggctcctggccgagttcggcatcgatatcccgaagggcatcacccacgccctggcctttgtgcgacgcgctgtggccggtggcgcgcatgaggttctcgatctcgccgccaaggtgatcagcgccttggccgagcaagcgatcgaagttcagaaccgcatccgccagctcgaacgagacttgctggtctggtaccgatcgaacgatctcgcgcggcgcattgccaccgtccccggcgtgggcctgctcggagcgagcgcgctggcggccactgtcaccgatccgacccagttccgctccgggcgccagttcgcggcctggctgggactgacgccgctcaacaactccagcggcggcaaggagcgccttggccgcatctccaaaatgggcgatcaatacctgcggcgccttctggtcacgggcatgacgtcgctggtcagacgcaacaagcaccaccccgatgcagcggatcctcgcgtgaacgcgctactcacccgcaagccgatacggctcgtcaccgtcgccctggcgaaccgggcagcgcgggcgatctgggccatcatggttcggggcgagatttatcgcatgccagcgcccagcgtggcagcagcctgaggatcagtagcaaatcagcgcgctacacgcgcgaaggaggttgcgaggaccctgtgatgatggcgcaccggtcagactggggatgaggacaacccgcctaacgtcgagggcataaaagcccgcaaagcagaatgggaccttatccacggaaaccatcagggccagcggtcaatgaccgcgcgaacaggccggacacaagactgcacccgaccatcacgccaaaccgtcacagaccccttgcaacgcgggagccatccacacaa

SEQ ID NO: 9870 - DNA, 1623 bp, unidentified
  source 1..1623: mol_type = unassigned DNA; note = element_f7c9f8a
  misc_feature 1: note = core
  misc_feature 2..284: note = LE
  misc_feature 285..1496: note = CDS
  misc_feature 1497..1623: note = RE
  misc_feature 13..304: note = bridgeRNA
cctgttactataaatttatggtgatggacacgacatccagccgtgtctgtttccaacttgttgcctaagctgttagaatgaaagagcaatgggtctgacggaatcctccaaggactacacacgtccgtattaaagtcagtcagccatcctttcattcgcagcgttcgatttatgcaggtagaactgccagccttccggtgcgttcgtgtcatcaaacagatagaatcggcaatgggaaaacggtggctcgccaattgcgaaatctatgatcaaggagaaaacttatgaacgcagcaggaatcgatgtatccaagggaaagagcatgattgccgtcgcccgcccctttggagaagtagcagtcaaaccctacgaagtacgccataccgccagcgaactcaggaagctggcacgcaccctgaaaagcctggacggtgagacgcgggtcattctcgagcacaccggtcggtattatgaacccgtcgcgcagatgctccatgatgccggaatctttgtcagtgcggtcaatccgcttctgattaaggagtacggcaacaattctctccgcagggttaagaccgataaggcggactccctgaaaattgcccgttacggtcttgacaattgggctgaattgagagaacatactcccatggacaccattcgctatcagttaaaaaacctgaaccggcagtacagtctatataccaggaacaagacggccctgaaaaacaatctcattgcccttctggaccagacctatcccggtgtgaatgctctctttgacagccctgtccgtgaggacggcagccagaagtgggtggactttgccgcgtctttctggcatgtggactgtgtaagaaaccgaaccgaaacggcctttgccgagcgttaccgcaagtggtgtaaacgccacgggtacaatttccgcacggtcaaagcctccggaatccattcagaatccaaagagctgattgctatgcttccgaaagatcagactgcacgcttactggttcaggaggccattgctcagctcaattccgtttccagaaccgttgaagtcttgcgctctgagatgcaccgtcttgcagagcagctgcctgagtaccctgtcgtgatgaagctgtacggcgtcggcggatccatcggtccccagctcatggccgagatcggtgatgtacgccgtttcgcccacaaaggcgcacttaccgcgtttgccggtgtcgatccaatgccgaaccagtccggtgaccacgaggcaaagagcacttcctcttccaaacgaggttcgcccgatttaagaaaaacactctttattctcatgaccatactccttcagaaagcgccccctgacgatcctgtctttcagttccttgataagaaacgctctgagggcaaaccgtattacgtctacatgactgcgggctgcaacaaatttcttcgcatctactatggacgtgtccgggagtatctgaatttcctggattcggcagaatagctttctgatatctgtctctgaagctggcgtaacatctcaaatacggcggcttatttgtggtgctcttttttctgcctgcatattttttctgaatttcttatttttctattgactttttatttgcagg

SEQ ID NO: 9871 - DNA, 1444 bp, unidentified
  source 1..1444: mol_type = unassigned DNA; note = element_f7cc895
  misc_feature 1..2: note = core
  misc_feature 3..150: note = LE
  misc_feature 151..1170: note = CDS
  misc_feature 1171..1444: note = RE
  misc_feature 1207..1444: note = bridgeRNA
aaatgtaatgaacgcatcccacctctttaacacggtgcaaaacgatgaatgaaggtaaagggctgaggggtgtggagcctcgcagatttccggcatcattgtgcccaatacggggtgcataaagctccctcagactggaggctccacagcatgaaatatataccggttggcgttgatatcgcaaaacatctgattcaggttcacttcgttgatgagcacacaggtgaagtcgttgataaacaggtgcgtcgtcaggatcttctgacattttttagcaacagaaagccctgtctgattggtatggaatcctgtggtggttctcaacactgggctcgtgagttgacaaagcaagggcaccaggtgcgcctgatgcaggggcgattcgtcaaggccttcgttatgggcaacaaaaatgacgtgatggatgcccgtgctatctggatagcggtacaacagcccggcaaggcgatagccgtaaaaacggaagagcaacagtccgtcctggttcttcaccattcacgcagacaactggtgaagttcagaactgcacagataaatgctctgcacggaaccctgctggaatttggtgaaaccattcacaaggggcgggcagccatggacaaagaattaccggcagccctggagcgaatgaagatgagactaccgccgtatctcatctcattgcttgaagagcagtacaacaggctgaatgagctggactcgctgatagatggtattgaaaaacagcttatcagtgtggcccggcaaagtgagacctgcaaacgccttatggaaattcctggagtaggaccattaatcgctacggcagctgtagcttcgatgggagaagcccgggcttttaaatccggcagagagtttgctgcttatgtcggtctggtgccgaaacaaacaggctcaggtgggaaggtccgtctgctggggataagtaagcgaggagatacctaccttcggacattatttatccatggagcaaggtcggcctcattgctggtaaaagatcctaatccctggataacggagttaaaaaaacgtcgccctgctgcagtggcgatagtggccatggctaacaaacttgcccggatggtatgggcgataacggcaaacaatcgtcagtacgataaaaattatgtcagtgtcagaccgtattaatagctgataccgataaacattaactcttaataaagggtgaatgctgaaaggttgctctggcagccatagtgatgacaacgacaggtaagaccgtggttcataaaacctgaatgatgaattggacttaaggtccgcaggagaaatgaggatatgaaccagcgaattacatcggggctcgcagcttaatagttgcaacaaagccggatataaaactgcaacctacctcgtcagggtcaaaacaatggaagccgttgcaaacgggatgcgttcatat

SEQ ID NO: 9872 - DNA, 1703 bp, unidentified
  source 1..1703: mol_type = unassigned DNA; note = element_f7dd917
  misc_feature 1..2: note = core
  misc_feature 3..339: note = LE
  misc_feature 340..1566: note = CDS
  misc_feature 1567..1703: note = RE
  misc_feature 44..315: note = bridgeRNA
ctcgtataatatatttatcaacaaaaatatctcattagttcagctgagtcaatcggtttggcagtgtccgtgatataattgacgtagtcaatcaggcaaatagttcttttgctccttgttgaaccttttggttgcttcataaaaagtctgttcccctgacgcggaagttaacttcaaaccggctggctgtttgtcggagctacagcttgcctttttgcagtgaggctcacatcgggctgtctccgagtgaattctgatacgcgagggtgttgatgctccgcgatcacgggcattgccaagccgattgactgacaatccattacgaaagaaggtgattctatgaacccgctttacgttggcattgacgtcagcagcaaaactaatgttgtttaccttatgaagcctgacggctccaaaatcagcaacttttccgttgccaattctcttgacggttccaaaaaactcgtcaaaaacatcttgtcagcattagacaagcattccctcggcgaggtcgtcatcggtcttgaagctacctctgtctacggcgataatctcgtgtattttctgcgtgaggacggctcgcttgccgctcaccaaaacagaatccacgttcttaatccgaaacaggtgaagaaattcaaggaagcctacaacgacctgcctaagaatgattttgttgactcgtttgtcatcgctgattgtctgcgtttcggaagaatcaacaaggcggtttatcttgacgattaccgttacgatgctctgaaagctttgaccagagccagattttacgccgttcaaaaccttgttaaggaaaaacagcgtttaatcaacattattttcaagaagtattcttctttaacgcaggacaagattttctccgatacatacggtgctaccgcttgcgcgatatacactgaatttgaatcggcggacactcttgtcaacatggacttaaacgaactgacagagttcatcaagaagaaaggtaaaaaccgcttcgatgaccctgacgctgtcgcaaaagccattcagaaagctgcccgaagctcctaccgcttaccaaaaacggtaaacgattcggtaaatcaggtgctttccatatctattaactccatcagggcaactgaggctcaaatcaaagccttggaaaaagctattgccgaacagatggctttaataccaaatactttacagtccattccgggtgtcggtcctgtctatgcggcaggcattatcgcggagatcggtgaaatcaaccgtttcaacagtcaagctgctttagcgaaatatgccggtcttgcatggaagcaaaaacagtcgggtgatttcgagtccgaaaacactcatctgattcataccggcaaccgctttttaaaatattacttgtgtgaagctgccttttctcttgtgagatgtgacacagagtacaaccgcttctaccacctcaaatacaaagaggtaaacaagtatcaacacaaacgcgccctcgctttaactgcccgtaaatttgtgcggttggtctttcgactgctgaaagacaatcgcctgtatatttcaaagtcctgaggactttgactaagcttatgccctgctgaaaaaattttttcagcccggggtttaggtgggagttccgtttttttctctgaaacggtgtttttattcccatttttctcgattttctatcttgacatttcaccgctgga

SEQ ID NO: 9873 - DNA, 1182 bp, unidentified
  source 1..1182: mol_type = unassigned DNA; note = element_f7e6e00
  misc_feature 1..2: note = core
  misc_feature 3..201: note = LE
  misc_feature 202..1179: note = CDS
  misc_feature 1180..1182: note = RE
  misc_feature 26..184: note = bridgeRNA
tcctttagatttgttttattaatttagaatgagaaggagacagaagtaaactacacttcgctcagagccaaggctcatatttcgattcagacttctgtctccctttcatcagtgcctcagatagaaattagggctagagacccattatcaaggagttgagttagctgatggaattctcatttcacttcttaaaacaaatttatgaaaaagatttttattggtatcgacatcagtaatctgacattggatatttgtatcaaaaaagatggtcagctccaatactttacaatccataaccagataaaagctattaaggctttctttaaaaaacacactactgaaggaaatgtaatagctatggagaacacgggccgttataactggaacctttatgaggtgctggctagctcaaatttccaagtgtacgttattcccccggtacatttaaaaatgagtctggggctttccagagggaaaaatgataaggttgatgcgcttcgtatttgcagctacatcgaaaagaatcaagctgaaagtataatatggaaaccctcttcaatagttgtacgccagcttaaagtattgttaaccgagcgccaatcaaggataaaaatgaaaagtcaacttatcagacaacaatacgactaccggcttatgaaaacattggcattggataaagaccttttaagcctcaataaacagctaatcaaagctatagagatacaaatactgaagattgaagcagatatcgagaaaagcatcctgggcgatcaggaacttaaaaaacaatctgagctaattaaatctgttccaggtgtgggaaaagtagtttcctggactttaatagctaaaacagaaggattcactacaattagtgacccaaggaaattggcctgttactgtggggtggctccctttgattatcaatcaggaacatcaatcaggggaagatccagggtatcgatgtttgccgataaaaatatgaaaaccctactgcatttggcagcaatgagtgccataaggcttaataatgaactaaagatgtactaccaaagaaaagttggggaaggaaaaaataaaatgagtgttctaaatgctgttagaaacaaaatcattcatcgagtatttgccgtaattaaaaaccaaaccatttataaaaatgatttggttttatcatagaaa

SEQ ID NO: 9874 - DNA, 1632 bp, unidentified
  source 1..1632: mol_type = unassigned DNA; note = element_f7ea257
  misc_feature 1: note = core
  misc_feature 2..274: note = LE
  misc_feature 275..1513: note = CDS
  misc_feature 1514..1632: note = RE
  misc_feature 12..294: note = bridgeRNA
cctgttactatatatttgggtgaggacatggccgccagccatgtctttatccatcttattgcctaaactgttagaatgagaggacaatgggcctgacgggagtatccaaggaccttgcgtccgtttgcaagtcagtcagccatcctcttattcgcagcgttcgatttatgcaggtagagccgccatccggcgcgttcgtgtcatcaaacagatagaatcggcagtgagaaaagggtggttcgccaattgtaaatctgtgaacggagtgtgggttatgaacgcagtcggaattgatgtttccaaaggaaaaagcatggtgtcggtccttcgtccctttggagagttggtggcaaagccctttgaagtgcgccacacctccagcgaactcagcgagctggcaaagcggctgaaaagcctggagggtgaaacgagagtggttttggagcacacaggacggtactatgagccggtggcccagctgcttcatgacgccggagttttcgtcagtgcggtcaatccgctgctcatcaaggaatacgggaacaactctctgcgtaaggtgaaaacagacagggcggattctcttaagattgcccgatatggacttgacaactggacagagctgcgtcaacatactcctatggatacgattcgataccagctgaaaagcatgaaccggcaatacggtctgtacaccaagaacaagacggcgatgaaaaacaatctcattgccctgcttgaccagacctatcccggtgtgaacaccctttttggaagccccgtccgggaggacggcagccagaagtgggtggattttgctgcgtccttctggcatgtggactgtgtgagaggtatcggacaggccgccttcgtggagcgttaccgcaaatggtgcaagcggcacggctacaacctcaggtccgataaagccgcccagattcacacagaagccaaagaactgattgccatgctgcctaaaaactcgctatctaaggtgatggtacaggaagcaattgctcaattaaacactgtctccaaaacggtcgaggtgttccgtgctgaaatgaatcggcttgccaaagaacttccggaatatgagactgtcatgagcctgtacggtgccggaaagtcgctggggccgcagctgatggcagaaatcggagatatccgtcgctttgcacacaagggctcactgacggcgtttgccggtgttgatcccggtgcaaatcagtctggaacctacgatgcaaagagcactcgtacatccaagcgagggtcgcctgagctacgcaagacgctctttgtactcatgacggtgctgctccaaagtgcgccgcccgatgaccccgtgtttcaatttctggacaagaaacgtggggagggaaagccctattacgtctacatgaccgctggctgtaacaagttcctgcgcatctactacggcagggtaaaagagtttatgaacacgttggatacgcccgtggatatggattcaaccgctctttcccaataacatagtctccgcctcacttcaggtcagcgtttcggcggtggccttttggtgttgtacgtttttccgcagcagacttgctactatttttctgaatttaggcttgactttttatttgcagg

SEQ ID NO: 9875 - DNA, 1376 bp, unidentified
  source 1..1376: mol_type = unassigned DNA; note = element_f7efa83
  misc_feature 1..3: note = core
  misc_feature 4..301: note = LE
  misc_feature 302..1108: note = CDS
  misc_feature 1109..1376: note = RE
  misc_feature 1109..1363: note = bridgeRNA
tgatggggtggacggccccgacctacggcatcgcaatgtgccatgctggagctgttagacagcagcaacggaaggaaccgtccacgatgactcttacaacaatcggcattgatctggccaaatctgtttttcagcttcacggcgttgacgcgcatggtgaagtcctgttccgcaagaaactgcgccggaatggcgttctggatttcctgcgcgacctgccaccctgcctggtcgggctggaagctgcgccacagcccatttctgggcccgcgagatcggcgcattgggccataaggtgaagatgatcccgccggcctatgtgaagccctacgtcaagcgtcagaagaatgatgtggctgatgctgaggcgatctgcgaggcggtgacgcggcccaccatgcgatttgttccggtcaagagtgcgcagcgccagggtgtgatgatgctgcaccggacgcgcgatctcctgatgcgccaacgcaccatggtgctcaatgcgatccgcggccatctggccgagttcggcatcatcacagcgcagggtccacacaagctggccgctctgctcgaagcgatgcgcgatgaggagatgcccggcttgccagacatcgctcgctcggccctgagcagcctgatggcccagctcgataatctggcggctgagatccgtgcactggagcgtcggctcatggcctggcaccgcgaagatgaaaccagtcagcgactggagaccatacctggcgtaggcctgatcacggcgaccgcactgtccgcgagcatacccgacccatcggtgttcaagtccggacgccagttcgccgccttccttgggctggtgccacgccagaactcgtcgggtggtaaggaccgtctggggtgcatatcaaagatgggcgatggatatctgcgcaggcttcttgtggtgggggcgacctcggtcatccggcgcgttggcaccaacacgtcggcaacgggcaactgggtcaggcgtctgctggagcgcaagccggcacgcgtagccactgtggcgatggccaacaagaccgcgcgcatcgcctgggcggtgctggcacgcggcgagacctatcgggcacctgcaatggtgtgaaacagagcatgcggtagcccacacggcaccgctgaagagatgcgagggcagatgtaagtgatgatgatcaaacggggccgcagctgaggaaaacccgaggcgttgtcagggcgtaagagctcgatcctctgagagggatctcagcacgcggacttcatcagggccagcggtcatcgctaccgcgtcaataggccggacacatgaccgcaacccgcaatgatcaaaagtcacccaaatcaacccttgctaaacgggggccgtccacaca

SEQ ID NO: 9876 - DNA, 1598 bp, unidentified
  source 1..1598: mol_type = unassigned DNA; note = element_f7efe0a
  misc_feature 1..3: note = core
  misc_feature 4..136: note = LE
  misc_feature 137..1171: note = CDS
  misc_feature 1172..1598: note = RE
  misc_feature 1202..1381: note = bridgeRNA
aacatggggtaatcgcggcgcgatctcctcaggccattttctcagttgttgctggtaggggtggttgcccccgataagatgggaatacgggctcacgattggaaccgggcccaaacatcatttgttggaggcaaccatgaaccagtatatcgggctcgacatttctttgaaagagactgcgatctcaatccggcaagacggcaaacgcatctggcgcgggaaatgcccttcggaccctacacttctggcggggatgatccgcaagcacgccccgcacgcaagacgcgtcgtcttcgaaacggggccgttgtcgacgtggttctatcacgccctgatagccaaagggatgcctgcgatctgcattgaggcacggcatgcgcaaaaagtgttgaacgaaacactcaacaagaccgatgccaatgatgcggacggattggcgcaactggcggaagccggcttctacaaggccgtccgggttaaggcattcgacagcatgctgacgcgcacgctggttggggcacgcaatcatctcctgaatatctcgatccagctcagcaaccagattcacggcctgatgaagacattcggccttatcgttcccaagggaaccggccgcgtgttcgacggccaagtgaaggcactgctggatggccatgacagcctggcgcggatcatattgcccctgctcgatgcttggcgagacatacgtaggcatgcggccgaacttgaccggcagctggtcttagcggcgcggcagagtcacgctgcgaagcgtctgatgacgatcccgggcatcggcgccatcacggccctatcctacgtcgcggcgattgaagatccggccaacttcagaacatcgcgctcggtgggcgcctggctcgggctgacgacacgacgctaccagtcaggcgaggtcgactatgacggccatatctcgcgaagaggcgatagccatctacgaggactgctttacgaagcggcgacggttctgctgacgagaaccggcaccagggccgaatgcaatctcagggcctgggggctgaagctgcgtgaacggttagggttcaaacgcgctgcggtggcggtcgctcgcaagctcgctgtcatcatgcatagcatgctcacgacaggagaagagttcaatgcatcggctggcgccgatctcgcataaacgaagcgccagcttcctccctcagcgtgtcaaatctcgatttgacgaactgagcgtccctgctgtggacgtgggttgggtcattccgttcgtgacgctgcagcaaattgaagactgcgcacaaaacataggaaggtcctgcctgcgaaaacccatcgtgcggcgactgttgtcgaccgcggagacaacgctgctcccggcactggaccgttctagagatatatgactgccgaggatggcgaaccacgaagccgctcactcgctacagcactattgagggtgcgatcgcgaacggcttcgttactaccgggcccagccagccggccacgatcgctggcgccaatcaatttgaatcgggttgctattccgcaacccgcaaggatgcgcaatggcaggaattctcttgacggacaggtggcgattagac

SEQ ID NO: 9877 - DNA, 1552 bp, unidentified
  source 1..1552: mol_type = unassigned DNA; note = element_f7fa31b
  misc_feature 1..2: note = core
  misc_feature 3..80: note = LE
  misc_feature 81..1262: note = CDS
  misc_feature 1263..1552: note = RE
  misc_feature 1296..1496: note = bridgeRNA
agactgtatgactttccgtgagacagatgctggcctggcgtgaagtatttaacgcgggttaacatcactgccagagccgcatgggtgggcttgagccgcaccccggcatttccctcacggaggccagcatgaacaacaatagcacgttgtatgtcggattagatgtccacaaagaatcgattactgttgcctatgccatcaactcagaaccggttgaactaatgggcaaaatcggtaccaccccgacggacattgagcgcctgtgcaaacggctgacatcaaaagcaggacaagttcaggttgtttatgaagccggcccctgtggttacggcctttatcgccgactgatgaagaaaggttttgactgcatggtctgtgcaccttccctgatcccaaaaaagccgggtgagcgtgtaaaaactgaccgacgcgatgccgccaggctggtgcgttcattacgagccggagacctatcggcggtctatgtacccgatgttaaagacgaagctttcagggacctggcccgtgcctgggcttctgcccgggatgatttgcgacatgcacggcagcgtttgaaatcctttctgttgactcacggtattcactatgtcggacgggcagactggagggcggcacatcgacgctggttaagcaaatattcgttcgaagacgcctggcggcaactggcatttgatgaacaccggcgcacaatagaagatcgcttggctcagtgtgaacgcctagaggccgcgctacgggaagcggttactgagtggaggctgtatccggtagtcctcgcactacaggccatgcggggtatccagtttatcaccgcggtggggttaatttctgaactcggcgacctgtcccgttttgaacaccctcgccagctgatggcatggtttggcgtcacgccttcggagcactcatcagggggaacacggcgtcagggaagcataaccaaaacaggtaatagctatgcaagaaaattgctggtcgaggcagcatggagttaccggcatactgcacgcataagtccccagctacaaattcggcaggagaatttaccaaagcccattatcgatcgggcatgggatgcgcaggtaaggttatgccggagatgccacaggctcgttgcaaaagggaagaatgctaatattgccattgtggccgtcgcccgggagctggccggctttatctgggatattggccggctggcgatgtcgctatcgttggaaccccataacacacggatggcataggagaataagaaacgagagaacctgtattatcgaagagagtttcctgaaggcggcgtagcccggtacaagagcaacccacggctacgcttcgcgacagcagagcaacgctaattcgcgtcgtaagaaagtggcaggctcaaatgacggacctctgtaatgcggtatccaacccgcgaatatcagcgtgattcaccgtcggatttactgctacgtcgccctcaggaaatttagcctattaataaagaaaacagccaaaccagcgattttggtttgacacggaaagtcatatc

SEQ ID NO: 9878 - DNA, 1613 bp, unidentified
  source 1..1613: mol_type = unassigned DNA; note = element_f7fd3bd
  misc_feature 1..2: note = core
  misc_feature 3..248: note = LE
  misc_feature 249..1484: note = CDS
  misc_feature 1485..1613: note = RE
  misc_feature 7..223: note = bridgeRNA
ttcgtattattaggtcagccagagaaatctggttgactattttttattcaatttatagattgatagtagccgggttagaacgtatgccctcgtgggataagatcccgacaactaacatgttcaccctctacttgttaacacatgattaggctggttgggacattgggatcccgtataacaagcgaacatatgaatgacaagctagatagaggttaccggtcagtccattgaattaggaggagataataatgaatccagttgttggtctggatgtcgcaaaaggtgaaagtcagattcaaatgttcttggataaaaaaatgccctataaaaacagtgtaaaagtagcacatacaattgaaggattggaagagttacactcttatttactagatttagagcgtcaaacagggatgaaaccaccaattgtattagaagcaacaggtcactaccatgcccctgttgtacagtttttagaagcaagagagtacattgtcatcatcgtaaatccactagtatcttatcgagcaaaaagctctaatttacgaaaaaccaaaacggatgccattgatgcttttcacttaggtgagatgtattacaaggaggatttagagcctcagaaaaagcgtggtattcaattattgaaccttcggcatctaacaagacaacatgaaaatatgacaggaattatggttcaaacaaagcttcaattccaagccgtattagatcaagtatttcctgagtataaaggtgtttttggtgatttatacgctgagatttcattaaagactttacaggcctaccctacttcagaagcagtcagaggtacaggtgtagaagagattgcagggtttattgatgaacactgtaaagcacgttcgtttaattgggcacatgaaaaagccgaagaattaatattagctgcggaacgcaacccatttcagtcaactctttatcaaagtcttttggtcagtttaaatatgtatattgatttacttcaagcctaccgccaacaactttctacgttggagcgtgagatcgatcagttagcggcacaacttgaagaatatgaactactccaaacaattcccggtgtaggtgaaaaaatcgctgcaacgattatttctgaaatcggggaaattgatcggtttagtcatccgaaaaaattagttgcctttgcgggacttgatccaagtgtgtttgaatctggacgctttaaaggcacgaataatcacattactaaacgtggctcagctagacttcgccacatgctttttacagctgttcgttgttccattcgagacagtaggaaaaagaaaacaactgatgaaaccattgcgcgaaataagagattacgagacttctatgatgtaaaacgtgaagaaggtaaaccttataaagtagctattattgcatgtgctaataagcttttacactggatttatgcgatgttaaaaactaaaacaccgttccaagtaacaatttagtaacaacattttcaaatacaacaaaaaccttccaaattagattcggagggttatttgagttgcgcatttttagtatagcatgaagtatttttattttaaaagatttttattgacaatctattagccggt

SEQ ID NO: 9879 - DNA, 1379 bp, unidentified
  source 1..1379: mol_type = unassigned DNA; note = element_f80960d
  misc_feature 1..2: note = core
  misc_feature 3..86: note = LE
  misc_feature 87..1118: note = CDS
  misc_feature 1119..1379: note = RE
  misc_feature 1151..1367: note = bridgeRNA
tgatgctgtggacggctcctccaccggcgcgagagcgccaaggagtgggcgccgtttgaggctcccacgattcggaggagcagcctatgcagtcaatttcgacaatcggtctggatatcgcgaagtcggtctttcaagtgcatggcgttgatgcggccggccaggtggtcatccgccgtcagttaaggcggcagcaggtcgtggcatttttccagaagttgccgccatgcctggtggggattgaggcttgcgcttcatcgcaccattggtcccgtgagctgaagacattggggcatacggtgcgattgatgcctccggcctatgtgaagccctacgtcaagcgacagaagaacgacagcacggatgcggaggcgatttgcgaggcggtcacgagacccaacatgcggtttgtcccaaccaagacggtcgagcaacagagctgtctgatgcttcatcgagcacgccatctgttcattcgccagcagactgccgtcatcaattcaatccgcgcctatcttgccgagttcgggattgtcgcccccatcgggcgcaggggtgtcgagcagctgctggaagtcgtcgccgatacagctgaccgccggctcccagaggtggcccgcgcgtgtcttgcggctctcggcagccaattgcgggccttgaaggcccacatcctggagttcgaccgacgcatcatcgcctggcatcgatcacatgcgacgagcaaacggctggacgctatccccggcgtcgggccggcgctggcaacagcgctagtcgcgagcgttgccgatgccaacgccttccgatcgggtcgggacttctcggcctgggttgggctcgtgccgaagcagaactcgagcggaggcaaggacaagcttggcagtatcagcaagcaaggcgatcgctatttgcgcagcctgttcacggcaggcgcactcgctgtgatccgctatgccaagatccatggcacggggcatcggcgctggctcactgcattactggcgcggcgccccaccaaggtcgctgccatcgcactcgccaacaagctcgccaggatggcttgggcgatgatggccaggaacgaatgctacaaggaacccgccgctcttacggcgtgaacgagatcgcagccggtcatccgggtgtgacgtaacggttggaagggcgaacagcactaatgcagcgccggtcgatccggcgatcaggacaacccacttgggccacagcatcgtcgaatgcgtgctattgaccgggacctgatccgcggagggcattatggccagcggtcacgtgaaccgcgctaacaggccgaacacatggctgctccgaccaacgccgcaagtgaagattctccttgccaacccggagccgtccacaca

SEQ ID NO: 9880 - DNA, 1482 bp, unidentified
  source 1..1482: mol_type = unassigned DNA; note = element_f80a6b6
  misc_feature 1: note = core
  misc_feature 2..109: note = LE
  misc_feature 110..1126: note = CDS
  misc_feature 1127..1482: note = RE
  misc_feature 1168..1394: note = bridgeRNA
gaatgaaagggacttccccgtcccgaaccagccgcgttgcggcagacggcaaccaggtgccacgatgggaagtacggtttctcatcaactcattcggaaggggaagtccatgacgattctgaccgtgggtatcgatctcgccaagaatgtttttgcggtgcatggcgtcaacgaggccggcaaggccgagctggttcgaccggccgtaccgcgcgacaagctccatgagctcatcgccagcctggcgccctgcgtgatcggcatggaggcctgctcgggcgctcaccactgggcacggctgttccaggcctcgggccacacggtgcggttgatcgcgccgaagttcgtgacgccctaccgcatgacgggcaagcacggcaagaacgacgcggccgacgccgctgcgatctgcgaggccatccagcgcccacacatgcgcttcgtgcccatcaagagcctgccacagcagtcggtcctgatggtgcaccgcgctcgccaggggttcgtcgagcagcgcaccgccacgttcaaccgcatccgcggcctgctcagtgagtttggcatcgtgctgccactgaaggccgcgaccgtgcggcggcgcgcttgcgagtgcctggaagacctgcccggctacgccaacaccgtcatcggtgacctgctcagcgaggtcacccggctggacgagcgtatcgcgcagtacgacgtccacattcaggccatgtccaaggacgatgcacgtgcgcagcagctgatgcagctcggaggcgttgggcctactaccgccacctgcctgcttgccatgatcggcaacgggcatgacttcgattgcgggcggcaattcgccgcctggctgggcttggcgccagggcagtacagctcgggcggcaagacccggctggggcgcatcaccaaggcaggcgacgcctacctgcgcagtctgctcgtcctgggtgccaaggcgctgctcgcggcggccaaacacaagtcggacagcatcagccgatgggcggtggccttggccgagcggcgaggctactggcgggcggtcgtggccatcgcagccaagaacgcgcgcatggcctgggcggtgctgcgacgaggccaggcgtttgcactgccggcgtagctgccccacctcgccaaccatcgaaacccaggagaacactgaaccaccgccgtgtgacggcaagcgttgatgacaacaggtttggacctgcgcggggcgtgaccgatgagcttaagggcggcgcaagacttgccggctaacgaatgggtcccccgcgtgcgtccttcatcagggtccgtggcatcgcgcgccacacgaatgaccgtttgtagtttggccagtccgcaccttgttgtcttcgccagcgcgcgccggcgccacggctgcaggtcttgaagggaatgcagatgaagaaatggcccgctgagcgggccatcagggatgcgtttggcttgacaactgggggagcccttgta

SEQ ID NO: 9881 - DNA, 1446 bp, unidentified
  source 1..1446: mol_type = unassigned DNA; note = element_f810241
  misc_feature 1: note = core
  misc_feature 2..79: note = LE
  misc_feature 80..1135: note = CDS
  misc_feature 1136..1446: note = RE
  misc_feature 1211..1437: note = bridgeRNA
taatgggatggtccggccgtgctcctgccccgcttgcctgtaagctgtggggcttcgagccacgcaaggagcacgtctcatgtcacggtcttctttctctgccgcgatcgtcaccctgggcatcgatctgggcaagaacagcttccacctcatcgggcaggacgagcgcggcgccatcgtgctgcggatcaagctctcccgtacccaactcccgcagcgcctggccaacattccaccgtgcctgatcggcatggaagcctgcgccggggcccatcacatcggccgccagctccaagcgctcggccatgacgtgcgcctgatcccagcccaatacgtcaaaccgttcctcaaggggcacaagaatgactatcgggatgccgaggcgattgcggaggcggtgcagcggcccaccatgtccttcgtggcgatcaagacgcccgaccagatggacctgctcgccttgcaccgggtgcgctcgcgcctggtgggtcagcgcaccggcgtgaccaaccagatccgtggtctgttgctcgagcgcggcatcaccgtgcgccagggcttcgcacccttgcggcaggcgctgcccggcattctgggttcgtcctctgacgtcctctcgccccggctggtgcgcctcatcgctgacctgatggaggactggcaccggctggatgagcgcatcgccgatgtctccactgagatcgaagcgctcgccgcccaggacgagcactgtcagcgcctgatgagcgtcccgggcgtggggccgatcatctcatccgccatggtggcggcgatcggcacgggtgccgggttcaaacaggggcgcgacttcggggcttggcttgggttggtgccgaagcagacctcaacgggcgaccgcacgatcctgggccgcctgtccaagcgcggcaacacgtatctgcggacgctgttcgtgcaggcggctcacatcgtgttagtgagtcgcccgcatgcagcaaggctctctctgtggccgtggatcgagaccgcaggccggaggctgcatcgcaacatgctggtgattgctctggccaacaagctcgcccgcatcgcgtgggccgtgctggcccgcggccatgcgtaccaaccgaggagcatctctcatgccgcgtaagagcccttcagacacaatcgacagccatcagccctgaggagacgacgatgaagtcgatgatctaatcagcggctgtcccgccgaggtctgcgagatgacgaaggagatggacgaacggtctgcccggcgcaaccacaagacttggtgccaaagtggcccatagaggtcttactactagtcagtcctggatgcgcgcggatttccatgctggcccggagctgaggctccacacagaggcctaatacattgatgcagctctcacgtttgtcagtctgccaacatcatcttgcgacgcacggccggaccataca

SEQ ID NO: 9882 - DNA, 1518 bp, unidentified
  source 1..1518: mol_type = unassigned DNA; note = element_f81131e
  misc_feature 1..2: note = core
  misc_feature 3..243: note = LE
  misc_feature 244..1410: note = CDS
  misc_feature 1411..1518: note = RE
  misc_feature 3..224: note = bridgeRNA
cttgtatactcaatactgtaatagtagattgaatataacttcctttctattgttataatatcattaggcactgtggatttgtttcatgtgtatgtagcttgactaccatcggaggctcctaccacagttcctatttttttaaccatcaataagttagttagcgctagacgctttatcacaaggttatggtaaataggatctcgtgtcaaacatcagtgccaaacttaaatggaggtgattcacatgtacttagtcggtatcgatatttctaagtacaaacacaactgtttcatagctactgaagcaggtgtgatcctcaaagaattcatctttgagaacaatcgttctggttttaaattgtttcataagtccttaaagaatctcgatcaaactcaggatataagaataggtcttgagtcaacaggacactatggcaccaatttaaaacagtttatcgcagcatccggttatacgtatatcgagtttaatccttacttaacacaccagttcgccaaagctatgtcgttaagaagaacaaaaacggataaagtagatgcaagaactatttctaatatgctaggttctgttgactacaagaccttacatactagattttaccacatcaatgaattaaaacaactcgttagagatcgtgatgacatcctaatgaatcgttctaaaacattagtgaagttaaccaatgtattagatattgtctttcctgagtttaagcctttttttaacaagcgatttggcacaacagcaagattcattctcaaaaagtacaaatcagcaaagaagatttcaacattaaccatgttagattttgattctttgaggtcactatcgaaaggcaagttcacttacgcaagatttagtcatttgaaatcactcgctaaagacaccgttggtgttcaatcacccgtttacacaggtcgcattgtaagtctattaaaggattatgattattttgatcaatcgttagagcatattgatcaaaatatcatttctctctttagtaacgttgaaacaaaattaacaacaattcctggattaggtatcatccaagcagcaactatctacgctgaaacaggtgatatccgtcgctttccgaatcctcaaaaacttatcgcgtttgcaggattcgatacatctattaatcaatctggtatcagtgaacatcatggtaaacttgtcaaacacggttctctgcttcttagaaagactatctgggtatatgcattaactgctttaaagtctatgccgatatttcatgattattatcgtaaaaagagacaagaaggtaaaatccataaggtcgctttaactcacgtatgtcgtaagcttattcgaatgatatatcatattgaatatcaccaaatcgattttaatgagcaactaatgaaataattagatcaagaagtagctgcttgatatctgattcatatttatatgagacttcctatggaggtcttttcgtatagagatatttttaatgcttgacttttaatagttagt

SEQ ID NO: 9883 - DNA, 1310 bp, unidentified
  source 1..1310: mol_type = unassigned DNA; note = element_f814aac
  misc_feature 1..2: note = core
  misc_feature 3..253: note = LE
  misc_feature 254..1267: note = CDS
  misc_feature 1268..1310: note = RE
  misc_feature 20..256: note = bridgeRNA
ccgacttatatgagtgtcagcggcgtgacggggttcggctacccgttatgttccgtagcagaccggagggctgactcgcgtaattcctgtcacccactcgtcgggttgaccctcatggggtgtgtcgaccctccggtctgcgttcgcggagtgactgaagagaggcgtgaccccaagctgctgtgagaggtacttgaagtcggattgtcctccgcggattccccaatccgagcagagaagggaaccgccttccatgatcgtcatcggcatcgatccccacaagtccagccacactgccaccgcggtcgacccggccaccaacaccgacctcggctcgatccgcatcgacgccactctcaccggatatcggacgctgatcgcctgggccaagtcctggccgacacgccaatgggcggtcgagaacgccgagggactcggccaccacctggcccagtggcttctgggcccgggtgagaccgtgctcgatatcccgactaccgccaccgcccggatccgggaactctcccgcggcggccgacggaagaacgaccgcatcgacgcagccgcagcggcctgtgttgccgcgttgcagggcgacgcccgcccggtggacccggagggcccgaccgatatcctggcgctgctcgacgaacgtcgaacgaatatgtctcacagtcgtacccgtctcgtcaatcagttgcacgcgttgctgcggcagttgttcgcgggcggtgcgccgacctcgctgaccgcggcctcggccaccaccctattgcggggcttccgtgcccgaagcgaggtggaccgaactcgcgtcggtctgtgccgggatctgatcgccgacatccgccgcctcgatgaccagctcgcggcgaacgagaagcagatggcccatacgctcgacgagcacggcacccgtctgcgggaggtggacgggatcggtgcggtgaccgcggcccggctgatcggccgcacgggacgcgccagcagattcccgaccgccgcggcctacgccaactacaacggttccgcgccggtgcagatcgccaccgcctctcccgctacggcgaccgacaactcaacagcgcgctctacaccatcgcggtggtccagatccggatgcccgccagcgccggccgagcgtactacgacaagaaaatcgatgaaggcaaaccgcccgcagcggcgaggcgcgccctcaaacggcacctatccgatcacgtctggcgcatcatgctcgccgacgagaaacgtcgctgccgactaaacgaagcggactccgcaagcgcggcttgacaaatagagaggca

SEQ ID NO: 9884 - DNA, 1826 bp, unidentified
  source 1..1826: mol_type = unassigned DNA; note = element_f81cf2c
  misc_feature 1..2: note = core
  misc_feature 3..251: note = LE
  misc_feature 252..1469: note = CDS
  misc_feature 1470..1826: note = RE
  misc_feature 53..232: note = bridgeRNA
cttatacattaaactaagattgtcccccctcaacggagggactcggtggaccgtacagccaccggatggtgggcgagggaggaaaggatacctgctcctagcggctcgaccgtttcggaaagattgaccttcctcctcgtcagtcctggggctaatcgaccatagaaggatgcgcctcgagcgccgtgtataaggccacgacctcccaggatctctcccgtatctctagaaagcgaccgttgagtatgactatgtggtatgccggcatcgattgggctgatcaacatcatgacgccgtggtgatcgacgaggcggggaagcgcgtcgggacgacccgtgtggctcacagcgccgcggggctggacacgctggtaacgttccttaaaggaatcggggatgtcgccgaccaccccgaccatctggcctgcatcgtcgagaccaaccggggcgtgctcatcagcgccctgctcgacgcgggcctgcccgtctatccggtcaatcccaagaccgtcgatcggcaccgcaaacctgcgggcgcaaagaccgacgccatcgacgcctatttgctggcgcgcacgggccggagcgacctggccgacctgcgccgtttgatcccagatagccccctgatcgccgagttgcgggtgctcacgcgcgaccaggacaccttgatccagagccagacccgcctggtcaaccagctcacggcctgcttgaaggcctactaccctgtggccgtggacctcttcggcaagctgcagcagccgaccacgctggccttcctgcaagcctttccggccctggagcaggcgcgggcggcctcggtggagcagatcagcacggtgctcaagggagccgggcatcccacggcagaggtcaaggcccggcagatccacgcacgcctgcgccaaccgcagttggcggccgacccgatcgtgacgcgcaccaaggcgcgcctgatgctgacgctggtggggcaattggtcgtgctcatccccgagattgccgcctatgatgaggagatcacgcgcctttttaagctgcattctgacagcagggccttcgcgagcctcccgcgggccgggacgcggttggcgccgcgattgctggcggaatggggcgacgaccgggggcgctacaccgacgcgggaagtgtgcaggccctcgccggcaccgcgccggtgcccttccagagtggcaacttcgccaaagcgcatcgccggtacgcctgtaacaagcccttgcgcaacgccttgcagcagtttgcctggcagagcacccaaaaggaagcctgggccttgacctactaccagcgcaagcgcaccgcgggcaagagccacgccatggccgtgcgcgcgctggccaatcagtgggtccgcctcatctacgccttgtggagcaaacgcgagacgtacgacccggcaaccttcctggccgcccagcaggcccacgcgccccgcgccgcgtaacgggcgtccctcccgccgccccgtcgtcgtcaccacccgtcgccgccccaagagcgccgggcgtgccgtcgtgccctccgccaccccgcctgcgctcctgaggacgcggggtgggggggcgcgcagcccccacgcgcgtgcccccgacaagcgcaggcgccgcggcttgacgaccccggcggggtcccctgctagcctgcggagcccgagggagcggacggcagcgtagcagacgcagcaggggtgccgggcgacgtcaagccccagccggagcgtgcctgccctcaccggacacctccagcctcttatgtccacacaggagagtgacatttttatttaccccttgacatagaaggt

SEQ ID NO: 9885 - DNA, 1451 bp, unidentified
  source 1..1451: mol_type = unassigned DNA; note = element_f8209ef
  misc_feature 1..2: note = core
  misc_feature 3..228: note = LE
  misc_feature 229..1434: note = CDS
  misc_feature 1435..1451: note = RE
tctaccattggattttgtgcggagacggggacacctccgttgatgtagactgaccacgacgggggtgtggctcatggggtccgtggtctctgaccactcggctctgaaatgccgcccccgtcttcgtctgccatccaggagagtccgacgggatggtgccatttgtggctctgagcagtagacgagaccgcctggatgagcgaactcagactgcaaggaggcacacgtatggatccccacctctgcgttggcgtcgatgtcggctacagaactcaccgagttggcatcgctcacccggacggctcgttgctcgaggagttcgacatctcccacagcaacgccggcttccaggagttcttccggcgcgtcgaggcacgccggtgtaagctgtcgctgcctgttgcagtggcgatggaggggtacaacgggtatgcacgccctctcgatcgcctggtccaggagaaaggctaccggctgtacaacgtcaacaacctcaagctcgcccgattcaaggaagtcttccccggtgccgccaagaccgacccgatcgacacccgcaagatcctcgagctgtttcggctcaaggatcagctccccctcgccaaggacgccatccaggaagtggtcggtgcacccgcggtgaacgagaagctcaagcgactcagccgtcgcagacgccatctcgtgaccgagaagatgcgcgtgctgaatcggatgcaagccgatctccaagccgtctgtccagagctgctggccgcgacaaacgatgcggacaacctgtggttcctccggctgctaaccttccgtgatgacctcaggcagctggcacgtctacgccgctcgacgatcttgcagatccctggtgttggccagaagtacgcccgcttgattcggcagtggcaagccaaggcgcagttctcaggggaggtcgagtacgttggcccgatggtcatccaggacgcaagacggaccctggagctacgagcacagatccatgcactggacgaggccatggccgatctggcggagcagtcagagatcgccaggcggctgtcgacaatccccggcttcggcaagacgtcgatcgcggagctggcaggggagatcgggacgttagagcggttcgcatccgaagcgagtttggcactgtacctggggatgtgtccgctcacgcgccagtccggtcaaatgtgcacagcgcgggcccctcgacaggtgaacacgcgttgcaaggccgcgatgatgacaaccgtcgctagacacatcggctgtgttcctcaatccggggtgtactacgaccgcaagcgcgctgagggcaagactcacaaccaggcgatccgatcgctggggcggcacttggtacgcgtcatctgggcgatgcttcgagacggacgagactacgagatccgggaggatacccacccctcgacttgaaaattcaagggggatgt

SEQ ID NO: 9886 - DNA, 1435 bp, unidentified
  source 1..1435: mol_type = unassigned DNA; note = element_f826222
  misc_feature 1..2: note = core
  misc_feature 3..151: note = LE
  misc_feature 152..919: note = CDS
  misc_feature 920..1435: note = RE
  misc_feature 1206..1435: note = bridgeRNA
agaatgagatgaacgccccccactcatcaggcccggagcacgatgatgaatgaagggaaaatacttgaaggtgtggagcctctcagattttcggcatcaaagtgcccaatatggaatgcataaagcttcctctgactggagactccacatcatgaaatatacaccggttggcgttgatatcgcaaagcacctgattcagattcacttcattgatgaacactctggtgaagtggttgacaggcagttgcgtagcaaagactttctgatgttcttcagtaacagagagccctgcctggttggcatggaagcctgtggcggctctcagcactgggcacgggaactggaaaagttgggacacaaagtccggctgatgcagggacgtttcgtcaaggcgttcgtcatgggcaacaagaatgatgtcatggatgcacgggctatctggatggcggttcagcagcccggcaaaacaatagcggtaaaaaccgaagagcagcaatccgtgctggtcctgcaccgttcgcgcagacaactggtaaaattccgaactgcgcagattaatgctttacacgggacgttgctggagttcggtgaaactatccataagggccggacagcaatggacagggagttgccggcagctctggataggctgaaaacgaccttgccaccctatctcatcgctgtacttgaggatcagtatcgcaggctcagcgagctggacaagctgattgatggtcttgaaaaacagcttcacagcgtggcgaaacagaatgaagcctgcaggcgactgatggaaataccgggtgttggccctctgatcgctacggcagcggtcgccactatgggagaagcatcggcgtttaaatccggacgcgagttcgcagcctatatcggtctggtgccaaagcagacggggtaaggggggaaagtacgtttactgggaataagtaaacgaggtgatacttacctgcgaactctttttattcacggagcacgggccgcatcaatgtgtacaaaagaacccggcccgtggattacagagctaaggaaacgacgtccgacagcggtggccattgttgcgatggcaaacaaactggcgaggacagtatgggcaataacggctcatgaccgaagatacgaaaaaaatcataccagtatcagaccgtattaatcgctgataccagtaaatattaactctcaatgggtgaaggctgaaaggttgctatggtggcccgagtgatgacaaagacggtaagaccgtgacctgataaacctgtatggttacctggacgtaaagtccgcccggagaataaggatcaggtcagcgaatctcatagtggcccgcagctctgactgcaacaaggccggatacagagctgcaactactcgtcaatgtcaaacaacggaagccttgcaaacggggaggcgttcatac

SEQ ID NO: 9887 - DNA, 1542 bp, unidentified
  source 1..1542: mol_type = unassigned DNA; note = element_f82bb98
  misc_feature 1: note = core
  misc_feature 2..271: note = LE
  misc_feature 272..1447: note = CDS
  misc_feature 1448..1542: note = RE
  misc_feature 30..261: note = bridgeRNA
cattacagtttgagccggccctcgggtcggctccttttgttttccaggggaagagaaatacgattggaaccggccccgaggggccgctggccgaccgccccggacggccctgtcgccctgcctctcgcgaaggcccgggggggtgttgccgccggggacgggtcgccgcggtcggcgactgatagagacatgccggggggtgcccacggctccgtaatgtggttgtcgcgcccgcggtccgcggtcagccaacttgcggaaaggatacaccatgggaaagaaggagaaggcctcggcggcggtcgtcggcttcgacgtcgggaagtcgtcccaccgcgcctgcgccgtggccccggacggcgccgcgctgttcaacagggaggtcgccaaccgcccgggcgagatcgaccgcgcgctcgccgacgccgggccgggggccagggtcgtggtcgaccagaagaggaacatcggcgcgctcgtcgtcgcccgcgccagggccgcgggcaacccggtgttctacctgccggggatcgccatgaagaaggcccgcgacatgttcccggcgacggcgaagaccgacgagatcgacgccgaggtcatcgcccgcacggcgatggggatgccctggacgttgcgcgaggtcgccgaggaggcgcccgccacgaccgcgctcaggatgctcgcctcgcagcgcgacttcgcggtgcgctcgcgcaccaaggcggccaacaggctgcgcgcggtgctcctcgaggcggaccccgccttcgaggccgccgtcgacccgtcgagccgctggcaactcgccgtcctcgctgagctcggcggcgccttcggcatcagggccgccgggctcaggaggttccggtcggtcgccgagcgctcctgcggcgcgcgcagggaagcctccgaccgcctctgggccgcggcggtcgcgtcggcgtcctccggcaggcccgagctcgccgcggagtccgagctcgtgcgctccctggccgccaggattctctccgacggcggcgaggcggcgaggctcgacgggctcatctccgactcgctggccggcgacgagacgtacgaggcgctgctcacggtgccgggcgtggggcccaggaccgcggcggcgctcgtgacgctcgtggacgcgtcgctgttccggagccacgacgagctcgccgcctacacggggctcgcgccctgcaacaggcagtcgggcacgtccctcaactcgacctctccgtctcggggcggcaacagggccctcaagaacctgctcgtctactcctgcacctccctcgtgggcaccaaggggcgcttcgggaggtactacgccgagtgccgggcccggggcatgcgtcacaacaaggccctcaaggcggttgcccgcaagcgcctgaaggtcatctttgcggtgatgcgcgacagggtcccgtaccgggagggctagcgggggccgacattcagggggctaggcccctcggggggccggcgtcagcatggctcgatttgaggagtcgaggggttgacaaaaccatagagaca

SEQ ID NO: 9888 - DNA, 1402 bp, unidentified
  source 1..1402: mol_type = unassigned DNA; note = element_f82faaa
  misc_feature 1: note = core
  misc_feature 2..75: note = LE
  misc_feature 76..1131: note = CDS
  misc_feature 1132..1402: note = RE
  misc_feature 1167..1392: note = bridgeRNA
taatggcatggaccggccgtgctcccgggcggagcatgggagtacgggattgtcccgcagccacggagccatgtcatgacacagcagaccacagctgagaccattgcgaccatcggcatcgacctgggcaagaacaccttccacctgatcggcatggatgcccgcggcaagattgtgctgcgccgcaagatcgcgcgcgggcaactgcaatcctgcctggccaacgtcccggtctgtctcatcggcctggaggcctgtaccggagcccaccacgtcggccgtcaactcgctgctctcggccatgacgttcgtctgctgccggcccagtatgtcaaaccctttctcaaaggacataaaaacgactaccgtgatgccgaggccatcgccgaggcggcgcaacgtccaaccatgcgcccggtgccgctgaagtcagccgagcaacttgatctgcaagccctgcatcgggtgcgaagccgacggatcgggcagcgtacggccgtcatcaaccagatccgcggctttctgctcgagtgcggcatcgccgtgcgccaagggccggctggtttgcgagaggccctccctacgctgcttgcccaccgcacggacgtgctctcgccgcgcatgatccacctcatcgaggagttggcggaggattggcgacagctggacgagcgcattgccgtcctcacccgggacattgcggccctggccggccaggatgccggctgccggcggctgatgggcatcccaggcgttggcgtgatcaccgccagcgccatggtggcggcggtggggaccggagccgccttcaccaaaggccgtgacttcgccgcctggctcgggttggtgccgaagcagatctcgaccggggatcggacgatcttgggaggtctctccaaacggggaaaccggtacttgcgcaccctgtttgtcagcggcgcccaaactctcctgcgggatccaggacgctggcagaaccacggcttcggccgttgggtgatgacggcccttgctcggctgcctcgcaatgtgctcgcggcagctctcgctaacaagcttgctcgcatggcctggagcgtgctgttccgcgggtgcgggtatgaggcggagtttacgacccgcgcagcctgagcggactgcaatcgctagtcttccgccaactgagttcctgcccaggttcgcgagaaggatgtgacaggatggatgaacggttacccggcgcaccgcaagcctgggtataaaaatggcccgctgaggtctcggctttaagcaggctcggtgcgcgcggattcccatgatggcccggagcaagagctccacatcgaggccggatagattgatgcgaaccgtctctcatccaaccagaagcagccctcttgcaacgcacggccggtccatagat

SEQ ID NO: 9889 - DNA, 1541 bp, unidentified
  source 1..1541: mol_type = unassigned DNA; note = element_f8302e6
  misc_feature 1..2: note = core
  misc_feature 3..243: note = LE
  misc_feature 244..1422: note = CDS
  misc_feature 1423..1541: note = RE
  misc_feature 6..220: note = bridgeRNA
cttgtattatagagtagtagtgattagagcccctctccaagggctgtgtgctacactgtaagggatgctgtggatcggtgcaaacctcctaccacaagatggttcttgaaaggttccaaccacagccccttacaattttgttgatcagttaaataccgccagacggttgatgtggaacaaggctacaaaagtaaggtgtactgtgggtgcagcatcacatatttaccgctggaggaatttgtcatggtgatttctgttggtatcgatgtttcaaaggataagcacgattgttttatcgtcagctcagagggcgaagtcctggcggatgtgttcacgatttccaacaacatggacgggtttcactgtctgttgcagagaattcggggttgtgttacaccgcaaggcaaaataaaagtagggcttgaggcgaccgggcactacagctacaacctgcttgggtttctccttgacaacggtctggccacctatgtcctgaatcccttgcgtactaacctttaccgaaagagtctcagcctcagaaagaccaaaaccgaccgggtggatgcacgaacgattgcgcatatgctgttatccgatgcgggcctcaaaccctacacaagtacagcataccacaacgaggaactaaagtcactgaccagataccgttttgacaaggtgaaagaacgggcgaaactgaaaacctctatttcccgattggtctgcatcctgtttcccgaactggaaaaggtggttcccacacttcatatgacctctgtttacgccctgctggaggagttccccagcgccaaacagatagccgcagcccacttaacaaggctgaaagcacttcttgaaaccgcctccaagggccgctacaagagggatacggcgcttgcgattcgcgatgcagcccgaaactccattggctcttggatgcctgccaagtcccttgaacttcagcataccatccgccttatccgcgaactggacgctgagattgcagaaatcgaagaacagatccagtccattatggatgggctccattctcccattatcacgattcccggattggggttccgtatggctgccatgatcctggctgaggttggggatttctctcgctttgactccccggacaagctgttggcttatgccgggatgtccccctcaacttaccagtccggacagctcaaaaattgctacccgcacatggaaaagcgtggttcccgatacttacgctacgcactttacaacgcaaccaagtatgtttgctactggaacccggtttttgccgattatctcgccaagaagagggcggagggaaaacactacaatattgccatctctcatgctgccaagaaattggtgcgtttaatttttgccttggagaaatccagacagccatattgttcagcagcttaagtacaactacctgaatagccagcaggggcctgacaagacctcagctttgctatacctttttgagccatctctttttcaccaccaccattcattttgaggattgacttttaatagttaat

SEQ ID NO: 9890 - DNA, 1191 bp, unidentified
  source 1..1191: mol_type = unassigned DNA; note = element_f83759a
  misc_feature 1..2: note = core
  misc_feature 3..375: note = LE
  misc_feature 376..1176: note = CDS
  misc_feature 1177..1191: note = RE
  misc_feature 25..198: note = bridgeRNA
cttgtatggtgagggtgcgccttccgtagtgggagggtgctggggtagggacgtcgtcaaccatcagccggtagccgccggactgccaggacgagagcatcccaccccgcctcacagcgtcgataaggaatctagcggctcaggaccgccgattgatcgcaaggtaacgcccgaggcgaggctaccccagcggactaaacgtatcgcagggagaggcatcatgcaaatatctggctgcgttattggggtcgatgtcggtaagttcgagctgcaagtggccggtcatgagaagtcaattgtgtccggagttctgcccaacaaccgattagcatcgttggttggctcaagcgcttgccggcgggaagcgtgatcgggatggaagccaccgggggctaccaggagctgttggcccggctggctcacgagcgcgggttcgtggtttatgtcctgaaccccacgcatgtgcatcactatgcgatctcattgggcaaccgaggcaagaccgatcgcttggatgctgaggtgatcgcccagtacatcgcgcagcgccacaccaagctacatccctatgagccgatctcgcctgaacttcaacaggtccgggcgcttcaggcgctcaggacaaccgtggtgcgcgtgagcacgtcgttaaggctgttggcgcaacgtcatggctgcgcgagcgtccatcagaagaaggccctggccggtctgagttcttgggccgagcagcttgagcgcgagttgatcgccaagatcaaggcccagagcgagtgggccaagatctacggcctgttgaccggcatttgcggcatcgggccgattaatggtgtggcgctgaccgcattgtttacccgtgtccacttcaccagcagcgatgcggtggtggcgttctgcgggctggatccgcggcccaaggagtctggcaggaaagtcgggcgacggcgcttgagcaaacagggcgacaaggccgctcggtcgttgctgtacaacgcggccagctcagcagtacgaacgccacactttaaggattactacgccgcgcttagggcccgtggcctggcctcgacggcagcgttggtggtgatcgcgcgcaagttattgcgtattgcttacggggtttggcgtacagggagagccttcgatccggacaggttgaacctcaaaacagcttgatccacaccatagaat

SEQ ID NO: 9891 - DNA, 1200 bp, unidentified
  source 1..1200: mol_type = unassigned DNA; note = element_f841532
  misc_feature 1..2: note = core
  misc_feature 3..180: note = LE
  misc_feature 181..1197: note = CDS
  misc_feature 1198..1200: note = RE
  misc_feature 35..197: note = bridgeRNA
tcctttagattagcatagttaaatttatcgggaattcagatcggggaagaacagggtaaactatgcgttcctccgagttagtggctcaaattgcgatacagaccctgctctttttcatcaaccaggtactcaaatagaaattcgggctaatgacccattatcaaggagttgagtgtgttgatgattccgatcattttaaactttcattacaaaattatgcaaaatcaaacaattgcaggtatcgatgtcagcaatgagacattagacatttgtataagtagctccaaaggacagtattcctttgttattaaaaacgaagtaagatccattagcaaattcttcaaggcttatgagcatgagacgatttttattggcatggaaaatacggggcgctataactgggcgctgtacgaagtattgaaagacctgcatcaccggatatttgttgtttccccgcttcacctgaagaaaagcgtgggcctggtaagaggcaagaatgataagattgacgcggtgagaatagcggcctttatattgaaaaaccattctgatctaccacagtggaagccatcaaccccatctgttcagaagcttaagatattacttaccgaaaggaatgctcgcgttaaggcaaaaagtatccttcttaaacaacaaaaagatcatgccaggatgaaacttcttggtttggataaatacctgcaagggttaaataaacagcaattggcggtacttaccaggcagatccaccaaattgaaaacgatatggaagcgttgatcagagccgacgaacaaatgcatacgcagtcaaaactgatccgttcaattcctggtgttggtaaagtattatgctggaccatgatcgccaaaacagaaaactttacgacgattaccgagccccgcaaaatggcctgttacagcggcgtggtgccattcaggaactcttcaggaacatctctcaggggtaaagaccacgtttcaaattatgctgataaggccgtcaaaaccatattacatatggcagctatgagagctgtgcggttaacgaatgaccttcaaactttctacttgcgaaaagtctctgagggcaaaaataaaatgagtgtattgaatgcaatcagaaacaaaattatccatcggatattcgccgttattaaaaatcaaacttcttatcaaaataacttgcttatgtcatagaaa

SEQ ID NO: 9892 - DNA, 1497 bp, unidentified
  source 1..1497: mol_type = unassigned DNA; note = element_f84f960
  misc_feature 1..2: note = core
  misc_feature 3..582: note = LE
  misc_feature 583..1476: note = CDS
  misc_feature 1477..1497: note = RE
ctaatgggactgcccgggtcggggtcctcgtgcggactcgggggctggtagcggccgggtaggtgagcactcgcagagcctggacgcagcttgagtcctacagacagatcgtgcccctgcccggctggtcgggagcgttgaccgctgatgggatgacgtgccgctgctcgtgggtgagcacttgaccattaggccgctggtggcgctcccggggctgcgaggagctggtcgaggtcacggaggaggagcgttgctgctggtcggggacgactgggccgaagatcatcacgatgtcgaaatccaagacgagaccgggcggcggctgggcaaggctcggctgccggaggggatcgctgggatcacccagctgcacggtctgatcggcaggttcttgcccgaggacgcagcacccgagcaggtggtggtcgggatcgagaccgatcggggcgggtgggtgaccgcgctggtcgccgccggctaccaggtgttcgcggtcaacccgctgcaggtggcccgctaccggcagcggcacgtcacctcggggccaagagcgacgctggggatgcgcacacgctggccgacatggtccgcaccgaccgccaccagctgcggccgattgctcccgacagcgccctggccgaggcggtcaaggtcttggcccgcgcccaccagacgttggtctgggaccgcagccggcaggtgctgcggctgcgggcggcgctgctggagttctttcctgctgcgctgcaggcatttgacgacctggccgctcccgatgcgctggagctgctggccgccgcgccggacccagccagcgcggcgcgcttgccggccggcacgatcatcgcggcgctcaaacgcgcccggcgccagcgggtggccgacaaggctgcccggctccaggcggtgctgcgcgccgagcacctggcccagccgagcgtcgtggtggccgcctacgcggtgaccgtgcgggctgcggtggcggtgatcggcaccctcaacgcccagatcgagacgctggaagcacaggtcggggcccattttggccggcacccggacgctgagatctaccagagccagccggggctcggggaggtcctcgccgcccgggtgctgggcgagttcggtgacgccaccgaccgctatgccaccgtgcggtcgcgcaagaactacgccgctaccagcccgatcacccgccagtccggcaagcggaagttcgtgctggcacgttatgcgcgcaacaaccggctcgccgacgcgctccaccagcaggcgttcagcgcgctgcgagcatcggcgggggcgcgagcctattacgacgcgctgcgcgcccgcggtgtcggccatcatgcggcgctgcgccagctcgccaaccgcctagtcggtatcctccacggctgtctgaagactcacacctgctacgacgaggcaaccgcctggccgcagcacgggcaggccgaagccaccgcggcttgacagcccaacgacatgggatgt

SEQ ID NO: 9893 - DNA, 1742 bp, unidentified
  source 1..1742: mol_type = unassigned DNA; note = element_f8571db
  misc_feature 1..2: note = core
  misc_feature 3..273: note = LE
  misc_feature 274..1518: note = CDS
  misc_feature 1519..1742: note = RE
  misc_feature 12..293: note = bridgeRNA
ctgttactatatacatgccccatgtttgtgacagccagtcataagcgagggacatctcattgcctaagttgtacaatgagaaggcaatggtctggcgaggcgccccaagagcacaaagctcgtcccgtagtcagccagcccgccttcttgttgtacaacgttcgatttgtgcaagttgagttccggtaacgggcactcgggtcagcgaacagatagaatcggcgatgggtaaaggcggtaagccattgtagtaacacatcgggaggattcagcatgttcgcagtaggggtcgatatttcaaacggcaggagcacagtagctgtactcggaaccagaagaaccatcgttgtgaaaccgcacgaggttccacatacggcagatggctttgctgaattggcggcaagactgcgtgctttgggtggtgaggtcaggatcgtcatggagcataccgggcgatactacgaatcctttgccatgagcatgcaccgggcaggtttcttcgtaaccgcgatcaatcctctggctatcaaggattaccaggaaggcatcacggttcgtaaggtgaagacggataaggcggatgccctgaagattgctcaatttgccattgacaaatgggacattctgccgcaatatactcccatggatacgattcgttacgagcttaagacccttcaccggcagttccagctgtcgtccaagacaaaggtcgcgctgaacaacaatctcatcgcgttgttagagcagagctatcccggcgcgaacaggtacttcggcagcccggtccggccggacggcagtcagaaatgggtggacttcgtggacactttctggcatgtggattgcgtggccggtgtcagccggaacgcctttgtggagcgataccggaagtggtgcaagcgccatggctacagcttctccgaagccaaggctgtcgagattcacgaggatgcccggcagaagttcccgctggtgcccaagtccgacacctgcaagctgctggtcagggaagcagttgcccagctcaacgcagtttcccgcacggtggaaacttaccgcgccgagatggatcggctggcttctcagcttccggagtatcagaccgtcatgtccatgaccggcgtgggcaagtccatggggccccagctgatggccgagatcggcgaccttcgccgctttgcgcaccagaagtcgctggtcggcttcgccggtactgatccgatcaaagatgactcaggtgacaagatttccggcagcaagccaagcagcaagcgtggttctccctacctccgcaagacgcttttcgtcattatgacgattctgctgcagctgcagcccgccgatgatccggtctaccagttccttgacaagaagcgttccgagggcaagcagtactatgtgtatatgactgccggcatgaccaagttcttgcgcatctactacggaaaggttcgtgactgcctcaaagagaaaggtctctgggaacagcccttgtccgaagaggtcaaccctggttgacaggggttgggcaccaaccccttgattgcccataagcacaggcagcacgacgggtcaaggatgccgcaggcacggctggaagccgcttgtccttgacgcggcgcgatggctgtactactcaccatctctggtcattttgggggtggtctatttgtcgttccatttcttttactcatttacctgcaaatttttttctctcaagggattgactttttatttgcagg

SEQ ID NO: 9894 - DNA, 1409 bp, unidentified
  source 1..1409: mol_type = unassigned DNA; note = element_f864527
  misc_feature 1: note = core
  misc_feature 2..306: note = LE
  misc_feature 307..1365: note = CDS
  misc_feature 1366..1409: note = RE
  misc_feature 119..274: note = bridgeRNA
ctttaactttgcagtttgaaaagagagtccttacgaactcttaaataatttaacgttcaataaacgataagaaaataaagagatataccagtttttccttacctttgttgtagaaaggaaggattaactgccggaggccaacctaacgtcccttcgaggctttgagcctatctaccgttgaaggccctccggatttcaagctgcaaattccaaataggaaggtaggctcgaagcctaattaaagtaatagacactcacagcttttctttcgttaatcgcttcctgtaactattaaacgtaaaagacatgaagaaaattgttgtcggcatcgacatttccaaggaaaagattgacgtaagtgcaatcgatgtaagggagagccaaactggcatggtcaaattggactaccaggtatttgagaaccgtcctctgggtttccgccgtatgctcgtgtgggcacggcacctgataaaaggtataggattggaggatattcttttctgctgtgagacgacgggcggatacgaccgctgcctgtgcgactacatctatgcaaaggggctatacatctggcgcgagggcgcattacagattaagcgcagcatgggtgtgcgcaagggcaaggacgacaaggccgactcgctgatgatagctgagtatgctatgcgtcacatggacaaggcggtaatgtatgaaactcccagtgagactattcgcgagctgaaggcactgttcctttaccgccacaaactggtacaggagaaggcagaaaaaaaggtcagggcctctcacctagacgacacggcagctaagagcaaatctatgaggttcatcctgcgtgacgccaagaaaagcgtcaaggcgctggagaagagcatcaaggaatgcgaaaagcagataatggaactcatcgagggtgacgaagatcttaagcggaactatgggcacattgtttccatcaagggcatcaacattgtcaatgcaacggctatgattgcctacagcaacaattttaagggcatcaccactgccaacaagatggcttcctactacggcgtggcttcattccgtgagcaatcaggcacgagcgtcgacaagaaagcctgtgtgaaatactactccagctcattactgagggcaaccatcacacaagcggcagaatggacaatcaaagaaaatggcatataccacgactactatctgcgactaaaagcggatggcaaaccttatggcattatcatcaacaatgtcaagaacaaactcatccatcttgcatattcgcttgtcacaaatgacatagattatgaaaataatcatgagttccttagggctaaaagaaagtgcgaacaagcagaatctgactaattaaggaatattaactaaatacatttggctaaatacataggaag

SEQ ID NO: 9895 - DNA, 1396 bp, unidentified
  source 1..1396: mol_type = unassigned DNA; note = element_f86d989
  misc_feature 1: note = core
  misc_feature 2..88: note = LE
  misc_feature 89..1120: note = CDS
  misc_feature 1121..1396: note = RE
  misc_feature 1163..1388: note = bridgeRNA
caatgggatggacccctcctcaccttacggcatcgatgtgccaaactggaagtgtcgtccaccagtcaacagggaggaggagtccgctatgaagcttagtcgggttggggtcgacttggcaaagaacgtcttccaggtccatggggtagaccggagtgagaaggcggtgtggcggcgcaagctcacgcgggagaactggctgagcgtgttgcggcagagtgttgagccgggctgcgagattggcatggaagcctgtggaggtgcgcaccactgggcgcgccggctgcaggagcacgggttcaaggtcaggttagtggcgccgcagtttgtgaagccgtatgtgaagagcaacaagaacgatgccaacgatgcggaggcgatctgcgaagcgatgagccggccgcatatgaggtttgtttcagtcaagaccgttgagcaacaggatatccaggcggtacaccgcattcgcgccgagttgatcaagcagcgtacggccaaggcgaatcagctccgcggcctggttgctgagtacggtttggtggcgccgaaggagctggggcagttgcgccgggccttgccgtgttggttggaagacgcagagaacgggttgagcgggcgcttccggcgattgctgaacgggctgtggggcgatttgcagacactcgatgagcggctgaacgaactcgatcgcgagatcaccatgattgcccgcagcgatccggttgccaaacggctccagcagctacgaggcgtggggccgatcgttgccacggcgttggtcgcggcggtcggcaatggggaacagttcgccaaaggccggcagatgtcggccgcgttggggctcacgcctagacagcagagctccggtggcaaggagcgactgctaggaatcagcaagcgcggcgacgcgtacctgcgggcgctattgattcacggtgctcgagcggtcatccaaaacgccaaagacaaagacgaccgcctcagtcagtgggtaggtcgactggctgcgcgtagccaccccaacgtggctgctgtcgcgctggccaacaagactgtccgcatggcttgggcgatgttaagaaacggcaccgattaccgaccgggtatggttagcagttgaagcaggccacggccgatccattgcatccgtagcaggagcctatccaccacgattgctaagcaaaccgaacgatggttaacaggtcgaaccggcaccggcagaacccgtgaacgtccatgtgcgagaagcacgagagaccagttgggagccggtgcgcgaatagcccatcatggccggcatcgtcaaatcgatgcagtagttagaggccggatatacgtgagcagtcgtacctcagccaacgaacggaatgcttgcaaacgaggaggggtccatata

SEQ ID NO: 9896 - DNA, 1379 bp, unidentified
  source 1..1379: mol_type = unassigned DNA; note = element_f876e7b
  misc_feature 1..2: note = core
  misc_feature 3..80: note = LE
  misc_feature 81..1127: note = CDS
  misc_feature 1128..1379: note = RE
  misc_feature 1138..1376: note = bridgeRNA
ttaatgtgatggtcagcctgacctaaatgcctcagcaggcgtcaaacctgctgaggcatttcttcttcggggagagcatcatggcaaccgtcacactcatcggtctggatatcggcaagcacagctttcatctgatcgggcacgacccgcgcggcaacccggtcctcaagaagcagttcaatcgcaacagtctcatcgaatttctcgcgaaacagcctccctgccgcatcgtgatggaggcctgctgcggcgcgcactggctggcacgcaagctgacgggcttcggtcataccgtacaactgatcgcaccgcagtacatccgcccgtttgtcttcggcaacaagaacgatttcatcgatgcccaggccatctgcgaggcggctacgcgcccgaccatgcgctacgttgccgccaagagtgccgaacagcaagccttgtcggcactgcatcgcctgcgggaatctcgcattgccgaacgaatacagaccaacaaccagatccatgcgctgctgctggagttcggcatcgcgcttcctgtcggggtacgggggatcacgcagctgccgacgctgctgatggacgagaccaacggcttgcccgtcaaggcccggcagatcctgcaacgccagctggatcactaccgtctgctcaagaccgagatcgacgagctggatcacgagattgccacagaagcccgacaggacgatgtcgcccggcggttgatgaccattcccggcatcggtgcgatcaccgccagccagttgtcggcggacgccggcaatgccaagggctatggcaatgcccgtgactttgcggcatcgctgggtctggtcccgcgacaatactcgacaggcgggaagtccaagctgctgggcatcagcaaacgcggtgacaagagcctgcgtcgcctgctggtgcaatgcgcacgggtgatcatgcagaacgcgccgcgctggaagagtgcgatggcagcgtggacggtggcgctgatgcagcgtcgccactcgaatatcgtggcctgcgcactggccaacaaactggcacgggtcgtgtgggcgctactcgccaaaggcggcgagtaccgtccccaggcccgcgcactgactgaaatgcaaaccgccgggtaaacccggcggcgagtagaagcctgcttttgccaagacagatactgatgacgacaaccggcccacggcctgcaggataccccgatcgtaaaaacagtcatgacagactgagggctttttagggacttgcaggagcggctcacatcatggatcgggctctattgtgcccatcaagaatccggatagattagagcaagcctaccccgtcatgattcatcagcacgctgttcttgcaaaggtcaggctgaccataga

SEQ ID NO: 9897 - DNA, 1396 bp, unidentified
  source 1..1396: mol_type = unassigned DNA; note = element_f881a1b
  misc_feature 1: note = core
  misc_feature 2..314: note = LE
  misc_feature 315..1127: note = CDS
  misc_feature 1128..1396: note = RE
  misc_feature 1154..1387: note = bridgeRNA
taatgggatggtccggccgtgctcccgccccgccagcaagagaagctggcaaggggcaccaaagacgaggagcacggcatgtcactcaaggtcaattccgcaatcgctgtgatcggtatcgatatcggcaagaactcgtttcacgtggtgggccacgacaagcgcggggcgatcatgcttcggcagaagtggtcgcgcgggcaggtggaaacacggctggccaacctgccgccgtgtcaaatcggcatggaggcttgcgttgaggcgcatcatctcagccgcaagctgcagatactgggacacgacgctgcctgatgccggcgaagtacgtgcgcccatattccaagggacaaaagaatgacttccgggacgccgaggcgattgccgaggcggtgcagcgcccgaccatgaagttcgtcgcgaccaagaccgccgagcagctgcaggcgctccaccgcgtgcgtgagcggttggtcagtcagcgcaccggcgtcatcaatcagatccgtgccttcttgttggagcgtggcgtcgccgtgcgtcaaggcttgcgcttcttgcgcgctgagttaccacgcattctcaccgcgccttgcgatgctccgtcaccccgtatgttgcgcgtcatcgaggacctggccggtgactggcgccggctcgatgagcgcatcaagggcttatccagcgagatcgaagtgctggcgcggcaagataagagctgcgagcggctaatgaccgtgcccggcattgggccgatcatcgcgagtgcgatggtggccgcgatcggcactggagatgcgttctcgaaaggccgcgacttcggcgcttggcttgggctggtaccgaaacaaatctcgaccggagaccggacaatcctcggcagcatatcaaaacgaggcaatcgctatctgcgcaccctgtttgtccaggcggcctgggtcgtgttagtcagggtcgggccaaagcattgggagcgctatggcctcaagtcgtggatcgaagcggcgaagaagcgactgcatcacaacgtccttgccatcgcgctcgccaacaagctcgcccgcattgcttggagcgtgctggcgcatggccgaacctttgaggccagcaacattcaggccgcgtgattcaacgcgaatagctgaaacgccttacctgccgaggtctgcgagaggattacaaacgagatggaggatcggtcttcccggcgcatgcgaacactggtgacccgaatggtcccgttgaggcctatccgctaatgagatcgcacgcgcgctgatacccatgatggcccggagcacaaaaggctccaatcaaaggccggatacattgatgcaagaccgcacatccgccaactcgatgaaagttctcttgcaacgcacggccggaccataca

SEQ ID NO: 9898 - DNA, 1499 bp, unidentified
  source 1..1499: mol_type = unassigned DNA; note = element_f8911ed
  misc_feature 1..2: note = core
  misc_feature 3..243: note = LE
  misc_feature 244..1479: note = CDS
  misc_feature 1480..1499: note = RE
ctaatgagtgttagcgaggctgctatccggcagactcggggtgtggtggccgccggcaggtgagcacttggttctcccgggctttgagccctgacgaaagaccgtgcccctgccggtgaccgggagagttgatcgctgctgggatgtcgtgccctccggatggggtgagcacagtttcattaggtcgctgatagttctcccgctggctgccgcctgttttcgacaccttggacgggagagcggatgcggctgttcgtgggcgatgactgggctgaggaccatcacgacgtggaggtgatggacgaggccgggaaggtgctggcgaaaaggcggctgcccgagggcgtggccgggatcgcgcagctgcacgagctgatcgggcggcacctgggcgaggacgcggatggggcggaggtggtcgccgggatcgagaccgaccgcggaccgtgggtcacggcgctggtcacggccggctaccgggtgttcccggtgaatccgctgcaggcgtcgaggtaccgggagcggctcggcgtgtccggggccaagagcgacgccggggacgcgcacatgctggcggacatggtgcgggccgactcgcaccagctgcggccggcagccggggacagcgcggaggcggagggcctcaaggtgctggcccgtacccacaagacgctgatctgggagcggacccgggcggtgcagcggctgcggcaccagctgcgggagtactaccccgccgcgctggaggcctacgacgacctggacgcccccgacaccctcgagctgctgggcaaggccccggacccggcccgggccgcgaagctgacccgcgcgcaggtcagcgccgcgctcaagcgcgcccgccgccggaacatcacggacaaggccaccgcgatcctcgccgcgctgcgcagcccgcagctgggccagcccgcggctgtcaccgccgcctacgccgccaccgtccgctccctgatcgcggtgatcactgtcctgaacgagcaggtcaagatcctgcaaaggcaggtggaggaaaattttggccggcacccggacgctgagatctaccagtcccagcccggcatgggcgccatcctcggcgcccgggtgctcgcagagttcggcgacgacccgcaccgctacgccgacggcaaggcccgcaggaactacgccgccaccagcccgatcacccgcgcgtccggcaagaagaaggtcgtcgccgcccggttcatccacaacgaccgtctggtcgacgcgctcaacgcccaggcattcacggccctgagggcatcgcccggcgcccgcgccctctacgacgagctccgcgcccgcggcatcgagcacaacgacgccctgagacggctcgccaacaggctcgtcggcatcctgcacgggtgcctgaaaacccgcaccctctacgacgaggccaccgcctggtcccaccggcaaaacctccctcagtcttccgtagcggcttgacacttaagctcctgggatgt

SEQ ID NO: 9899 - DNA, 1387 bp, unidentified
  source 1..1387: mol_type = unassigned DNA; note = element_f892db7
  misc_feature 1: note = core
  misc_feature 2..69: note = LE
  misc_feature 70..1101: note = CDS
  misc_feature 1102..1387: note = RE
  misc_feature 1144..1382: note = bridgeRNA
caatggtatggaccccgccctccctgcgaggtggaatctcgagcatctactgcaatgaaggaggatgtcatgcaggttgttcgaataggtttggatctggcgaaatacgtcttcgatgtttacggtgtcgactgccacggtaaggttgtcctgcgtaagacgctgcgccgcgatgcggtcgcccgcttcttcgtcaatctgccgcaatgcctggtcggcatggaggcttcgaacggggcgcactattgggcaagggtactttccgatctcggccatgaggttcgcttgatcagcccgcagtttgtgaccccatacgtgaaatccaacaagaatgaccgcaacgatgctgaagccatctgcgaagcagttagccggccctcaatgcgctttgtgccgccaaagtcgatcgatcagctggcgatccaggccgttcatcgcgttcgtcgacggctggtcgccgatcgggtcaggcttgtcaatcaggcccgtggtctcctatccgagcatgggatagtcatcgcccgcgacatcacgcaattgcggcggggccttgccgtcatcgtcgggaatgacaatgacggtctcagcgacatggttcgggcgctcatgagggaattgcaagcggagctggtcgaactcgatcggcgcatcgcaacttatgaccggcggatacgggaaatcttccgctccaacgaccagtgtcagcagcttggcaagatcgaaggtatcggtccgctaacggcaactgccttgatcgccgctgtcggtgatcgaacttgcttcaagaacggtcgtcagttcgcagcttggcttggcctggtgccgaaacaacgttccagcggcgggcgagcccgtctactcggcattagcaaacgcggtgatcgttatctacgcacattgatgattcatggcgctcgagctgcgctcggcaaggcggccggcaagcagggtccaaggagccgctggctcggaaagctgcgggcacggcggcatcccaacgttgcggccgtcgcgctcgccaacaagaatgctcggattgtgtgggccatgcttaagggcgagactgtttacgagcccatgccgcccgtgaaagcggcctgagacggccagcagacgaaggcataatagaaggaggtctcacccggcaattgcagcagaatggcaggagatggcgaaacggtcattccgtcgctttccgaacctggtgtgtggaccggcttggcttcggccaatgtctgggggccgatgaggtggaagcgcgcgaaaatccatcggggctcgcggcgacgatatatcaagccgcatcaagaagccggatatacgtcagcagttgtgaccgtcgatcctgattctagccaaaccgttgcaatcgggcggggtccatata

SEQ ID NO: 9900 - DNA, 1553 bp, unidentified
  source 1..1553: mol_type = unassigned DNA; note = element_f89678b
  misc_feature 1..2: note = core
  misc_feature 3..263: note = LE
  misc_feature 264..1427: note = CDS
  misc_feature 1428..1553: note = RE
  misc_feature 3..245: note = bridgeRNA
cttgtatgatgtatttagtaataaatacatcaatactctcctttcttttcaactttgttataatcaatagtaacactgtggactttttattttaccctatagctttgactatttgaaggagtgtattgccacagttttatctgaatcatttatagttggataagtcaatacgatttaatcgttagaacttttatgtcacgcaagtctatgatgataaaactaggtggacaaacacagtgattatttactaaggagttgatcttatgatttacgttggcattgatattgccaagcaaacacactatgcagccatcatgaattctgatggagaaatccttgttaaaccatttgccttttcaaatgaccataatggatttcaaaaattactgaaacatttagattcctatactaaagaagagctttatattggtatggaatctactgcccattatgcagaaaaccttactagcttccttttcacaaggggatttcaggtttgtattatcaatcctattcagacttcctctcttagaaaatcaaatatccgtaaaaccaagacggactcggtcgatacttatctcattatcaaagctttatctttaaaccattatcatttatattcggaacgcgattacaattctttgcaattaaaaaacctatgtcgcttccgtcaaaaacttatgaaggctaggacaaaggttaaaattcaacttgtgacatatgtggatttgttattcccagaactccagtatttctttaaatctggtattcacggaaaagcttgttatgctctattaaaagaacaaccaaatcccgacagaattgcaaaaatgcatctcacaaggttaactaaccttttatcaaagtcctcacacggacactttaaacagtctaaagctgtacttttaaaagagcttgcatcgcaatctgtcggtattaaaaatgataccctatctttacagattttgcaatccataaaacagattgaaatgtacacagaacagcttgcagaagtagaccaatccattcatgaaatcatggataagatggattctgttattaagactatccctggtattggagcaatcaatggtgccatgattattggtgaaattggcgatatttcgagatttgataaaccatgtcaactactcgcctatgccgggctagatccttcggtataccaatctggaaattttcatgctgccagaacaagaatgtccaaacgaggctccaaactacttcgttatgctttaataaatgcagcctggcaaaccaccttggttaacaaaaccttcaaggattattatgatttaaaaatctctcagggacgtcgccactataatgctcttggccatgtagctcataaattagtccgtgttatacataagatgatgagctctaacgttgaatttaatttagcttagtcttacctatcaactatatttaattttcagaaagcacctttatgatgctttatttgatatgcaattttataataataattaagcttaagaaaatttctcttttactattgacttttcatagttggt

SEQ ID NO: 9901 - DNA, 1378 bp, unidentified
  source 1..1378: mol_type = unassigned DNA; note = element_f89bc9b
  misc_feature 1: note = core
  misc_feature 2..88: note = LE
  misc_feature 89..925: note = CDS
  misc_feature 926..1378: note = RE
  misc_feature 1140..1370: note = bridgeRNA
caatggtatggactcctcctctccttaacggcatctaggtgccaaactggtaagcgataccaccagtaaacggaaaggaggagtcaccatgaagcttagtagagttggaattgatttggcaaagaacgtttatcaattgcacggtgttgatcgttctgggaagacggtctggaagcgtcgcctgaaacgtcatcaatggttcagggtgctattggatacagcaggacccgagtgtgagattggcatggaagcgtgtgccggcgcgcatcactggggtcgagagttgcagtcacgaggctacacggtgaagttgattccgccacagtttgtgaagccttacgtgaagagcaataagagcgatgccaaggacgctgaggcgatttgcgaagcaatgagtcgaccgaacatgcgctttgtgacggtcaagcgtgtcgagcaacaggacatccaggcgacgcatcgcatccgggctgaattgatcactcagcgcacagccaaggcgaatcagatccgcgggttagtggccgagtacggcctggtggcaccgaagcatttgagttcacttcgtgctgcaatcccgtgttggttggaagatgcggagaatgggttgaccggtgacttccgtgctttgctgcagggcgtgtggacggaccttcttctgctcgatgatcgtgttggcgagatggatcagaagattaagcaactcgccgataacaacgaagtctgcgtacgcttgcagcaactacggggtgtcggcccgatgacatcgacagccatggttgccacggtaggtgatgcccgacagtatccgaagagtcgtcagatggcggcagcgataggcatcaccccaaacaacacagttccggagacagagaccgtctgctcggcatcagtaaacgtggcgatgtttatcttcgtacgttgatggtccacggagccagagcggtggtggctcgagcaaaacacaaagacgacaggctgagtcgctgggtaacgaacatcgcgaacaagaaacatccgaatgtggcggcggtggcattagccaacaagacagcacgcatggcctgggctatgctcaggaatgaaactgattacgaccctgacttcgcgttacgctgagacagggaacaaaggagaccctccaagacgattgcttgagtaaactgattgatggcaaacaggttagaccggcgtcagctaaacccgggaatgtccacgtacgtaaagtacgacaaagcgattgggagctgatgcgcgaataaaccattatggcccggcatcaacgtaatgaatgccaacttatgaggccgaatatacgtatgcagtcgtgccatgaatgccagatcagcttgctagcaaatgaggaggagtccatata

SEQ ID NO: 9902 - DNA, 1485 bp, unidentified
  source 1..1485: mol_type = unassigned DNA; note = element_f8b5c34
  misc_feature 1: note = core
  misc_feature 2..108: note = LE
  misc_feature 109..1125: note = CDS
  misc_feature 1126..1485: note = RE
  misc_feature 1173..1402: note = bridgeRNA
gaatgaaagggacttccccgtcccgaactagccgcgatgcggcaaacggcaactgagtgccacgatgggggggcgatctctcatcaactcattcggaaggggaagtccatgacgattctgaccgttggcatcgatctcgccaagaacgtttttgcagtgcacggtatcaacgaggccggcaaacccgagctcgtcaaacccaatgtggcgcgcgacaaactgggcgagttgatcgccgcattaccgccgtgcgtgatcggcatggaggcttgctcaggcgcgcatcactgggccaggcagtttgaagcgctggggcacaccgtgcggctgatcgcgccgaagttcgtcacgccttaccgcatgagcggcaagcggggaaagaacgatgcagcggatgcagctgcgatctgcgaagccgtgcagcggccccacatgcggttcgtgccggccaagagtctggagcagcaatctcgactgatggtccaccgggcccgacaagggttcgtcgagcagcgcacggccaccctcaaccgcatccgcggcctgctcagtgagttcggcatcgtgctgccactgaaggcggccactgtgcgtcgcaaagcctgcgagtgcctggaagatttgcctggctacgccaacaccgtgatcggtgatctgctcagcgaagtcacgcggctcgatgagcgcgtcgcgcagtacgaccagcacatcaaggcgatggcgagggatgacgagcgggccaagcgcctgatgcagctcagcggcgttggcgaaaccaccgccacctgcttgctggcgatgatcggcaacgggcatgactttgattgcggccggcagttcgctgcgtggctgggtctggcaccgggccaatacagctcaggaggcaagacccggttgggccgtattaccaaagccggtgatgcctacctgcgcagcttgttggtgctgggtgctcgcgccctgttggctgcggccaagaacaagaccgacagcgtcagcaaatgggccgtagccctggcagagagacgcggctattggaaggctgtggtggccattgcggcgaagaacgcgcgcatggcctgggcggtgctgcgcaagggcgaggccttcgccatgccagcctgaagccagcgttcggcatcaatcaaacccacagcaccaggagcaccgaattcgaccgccgcgtgacggcaggcgttgatgacaacaggtttggacctgcgcggggagtgaccgtttaactcaagggcggccaatggtttgccggctaacgaatgggtcccccgcgtgcgtccttcatcagggtccgtggccatcaacacgccacacgaatgaccgtttgtagtttgaccagtccgcacctcttgtcctcaccaccgcctgggccgaaaccaagtggttgcttgaaccgcagtacaaaacaaacaggcccgctgtgcgggcctgaggggtagcttttgcttgacggacggggaagcccttgta

SEQ ID NO: 9903 - DNA, 1436 bp, unidentified
  source 1..1436: mol_type = unassigned DNA; note = element_f8bc352
  misc_feature 1: note = core
  misc_feature 2..226: note = LE
  misc_feature 227..1423: note = CDS
  misc_feature 1424..1436: note = RE
  misc_feature 14..241: note = bridgeRNA
ctactaggagacttccctgcaggatcggtgtctggccagactctggtctaggtgatcggcgggacgctcttttatcggctgcccaccggctggtgtggctctcatctggactgcgacccgtcgaccaccgtgacgaggagtggctccagaggggtctgcccagctcgtagtagcaatgcccacctcgtcgactcttccgatttccaagcgaggacgaggtgagcacatgagcagcacgaaggcagtgatcatcggggttgatccccacaagatgtcggtgacgatcgaggtcgtcgacacccgcgaacggttgctcggtagggctcggttcgacaccgacaaggccgggtatgccgcgatgtgccgttatgtgaagcagtggcctgcccggctgtgggcggtcgagggagccaacggtgccggccgtccgttggctcaacggctccttgccgccggggagcaagtggtcgatgtcccggccaagctcgcggcgcgggtgcggctcttcgacaccggccacaaccgcaagaccgacgccctggacgcccactccgtcgccgtcgtcgcggtccgcaccgacggactgcgggagctgaccgaggacggtgagctcgaagcgctgcggatgctcaccgaccgccgcgatgagctggcccaccagcgcgtccagaccgtcaaccggttgcagcgcctgctcagcgaactgctgcctggccagcgcaaacgcgacctgtccgccacgcaggccaaagccatgctcgccaccatcaggcctcgtgacatcgcaggcaagacccgacggcggatggctgccgaagaggtcgcggacctggtcgcggtcgacgccaagctcaagcgcattaaggccgagttgaaggccgcggtcactgctcgcggatcgcacctgatggacctctacggcatcggacccgccggcgctgcccgggtgctggctgacgtcggcgacgtcgcgcgcttcgccgaccgcaaccggttcgcgtcctggaccggcaccgcacccctggacgcctcgtccggcgagcagacccgccaccgtctgtcgcgcgcggggaaccggcggatgaaccacctgctccacgtcgcagccatcgtgcagatccgtcacgacacccaaggccgcacctactaccgacgcaagctcgccgccggcaagaccccgatggaagcactgcgctgcctcaaacgacggctgtctgacgtcgtctaccggcaactcatcgccgactcgaaacaagacgatggagcggatccgggagggcactgcggggcgtctcttcaatccagcgcggccgattcccacccacacatcgacacttcggatcagccacttcccggacccgcgcagccgacgctacgccggccaccggcgcgcgggaagaccctcaccacgagcgccccttgacacagaggggtgc

SEQ ID NO: 9904 - DNA, 1652 bp, unidentified
  source 1..1652: mol_type = unassigned DNA; note = element_f8bde8d
  misc_feature 1..5: note = core
  misc_feature 6..351: note = LE
  misc_feature 352..1485: note = CDS
  misc_feature 1486..1652: note = RE
  misc_feature 62..275: note = bridgeRNA
acctggtatattgtaattgactcatttaatagtcatctacaaatataccttctcctttctatcaaccatttaaaccgtggttgattacggttaagttaatttgtaaaatatttaatatgtaaatgtggatttgtattttttcaccttgtagcatgactactttaggcaggcccttaccacaaccttattcctaaataatgattagttagatgagtcttgaattcgtattttgcaccaggttttgtggtctaagtgttgtggataccttttcacatatttttatcaagaaaggatcttttattatgaaattagttggtatcgatattggaaaaaaaacacttcttttgtattatggacaaagatagtggtgaagttttacttcaaccttcttctttttccaatactaaagatggatttgattctctaatccaaaaacttagttcttattctaaggactctatattgattggtatggaagacaccgggcattatcattttgctttattaaagtatcttttagaaaaaaattttactgttgctcttatcaaccctaaaactactgattacactcgtaaaatgcagaacggcatcactaagaatgataaacttgacactcttactatctgtgatgttttggatactcctgtacgaaaaaagcagtatcgtattacaaaagtcaacagcttcgatctttatgaacaaaagcaattaactagacatcatcacaatttaaaagaagaactcaatgtttatacaaaccgcctacaaaaatgtattgatattgttttccctgaattcaacagcttattttcatctaaatacggcattatctacatgaatgtacttaaaacatttggcagtgctgaaaatatcgctagtactgatattagaactattcgcaaatgttttgaaataaaaggccgagggaaccgcatatctctaactgcacagcagcttaaagactctgctaaatcttctattggaatttcatcagcagcagaagtaatcaaaatcaaacatctgataagtcagattgaacttatcaatgaacagttagctgaaacagataaaaaaatagaagagttttccatccaaaataactctcctatcctatccatcccagggatttctcatttctctggtacttctattttagccgaattaggagagataagcaactattctaagccatctaagataataaaagcagctggtgttgctccttatcattacgaatcaagtcaatacaacgcacaacatactgctattaccaagaaaggttcaccatatttgagaaagactttatatcagatcatattgcctgtgattaataataatccggtatttaaacaatattatgatttaaagatttctcaaggtaaaggtcatcgttgtgcttgtggacattgtgttagaaaattgcttagaattatttatcatctttcaagtaccaatcaacaatttgatgatgcacttttaagataaaataaatgcattaaaattaaaaaaaggccaattttggttcttttcgtcatgcccaaaaattacaaatcattattcacatttcaaggatctatactacttaacatataaaatcatttattttaacattttcaaactttttcataaaaacacttgaattttatatagtt

SEQ ID NO: 9905 - DNA, 1602 bp, unidentified
  source 1..1602: mol_type = unassigned DNA; note = element_f8c20d1
  misc_feature 1..2: note = core
  misc_feature 3..277: note = LE
  misc_feature 278..1486: note = CDS
  misc_feature 1487..1602: note = RE
  misc_feature 12..297: note = bridgeRNA
ctattacaataaaattgtcgggtaaagcacgtcagccagacatgcttttctcgttctcatgcctaagctacaataaggggagcaactggctgacgtctcctttctggggctgtcacgtccgtaatacagactgtcagccatcctcttgttgtagcgttcggtttaagcaggttgagccacctcagtgatgagcggtgttcgtgtcacgcaatagattgaatcggcagcgagaaaaagatgggttccggttgcgtatcaatatattggaggaatgtgaatgaacgccgtaggcattgatgtctccaagggtaagagcatgattgctgtcatgcgaccctttggcgaggtggtggtctctccctttgaagtgcggcacaccgacagtgaactgagtgagctggcaaagcagctcaaaagcctggacggtgagacccgtgtggtgatggagtatacgggcaattaccatgctcctgtagcgtggtccctccacgacgccggaatctatgtttccgtagtcaaccccatgctggtgcatggctacgggaacaacagtttaagacgagccaagaccgacaagaaggacgcccttaagttggcgaactatgccattgaccgctggctctcgctaccgcagtacttcccagaagaagatacccagctcatgctgaagagctgctatcggcagtatgagcagtattccaagctgcggacgatgctcaagaacaacctgatcgccttgcttgaccaggtattcccggacgctaaccgtcgttttaccagcccacgccggacggacggcagcgagaagtggattgactttatagccgccttctggcattgcgaatgcgtcagcaatctcacccaagcggcttttatcctgcgctaccagaagtggtgcaaaaagcacgggtacaatttcagtgaggagaaggcggagaatatttaccttgattctgccggccacgtcagcgtgatgcctatgaccgataccgcgaagcttctggtgcagcaagccgtttctcaactacaagcgacttccaaggctcttgccacactccagcgggaaatgcagactttagcggcttctttgcctgaataccccgtcgtcatgcagatgtttggcgttggttccaccctggggccacagctcatggccgagattgggaacgtgtatcgctttcattcaaagaaggcgcttgtggcctttgcaggtattgacgctccgccttaccaatccggcaccgtagatgtccgcagccgcagcatctctaagcgcggctcctcttcgttacgcagaacgctttttctggtcatgggcgtcatccttcaaaattcaccgattgacgagcccatctatcagtttatggacaagaagcgcgccgagggtaaaccctacaaggtctacatgatggcttccgccaacaagttcctgcgcatctattacgccaaggtcaaggcatatttggatgcccttgatgctaattaacggatactaccaattctgatctgccgccgttatttgtgcgcttagcggcatgctttgctatactctttttcacccctctcttttctcaaattcctacttgacttttgttagcaggt

SEQ ID NO: 9906 - DNA, 1633 bp, unidentified
  source 1..1633: mol_type = unassigned DNA; note = element_f8c68f9
  misc_feature 1..2: note = core
  misc_feature 3..261: note = LE
  misc_feature 262..1437: note = CDS
  misc_feature 1438..1633: note = RE
  misc_feature 11..237: note = bridgeRNA
ctcgtataataatgttgtagttaaaaactatatttacttttctatctcactcttcttgtgagataatatttgtacagatagaggtcgtagcattcctccttgaggcctagtcttcctaattaagagttacgcctcttctttacatccatatacgaatgagctggatagtacaatggttactgaatatccaacgaggttgtattggtgtaaagtaaagaggtactagactttatctgtaatattttaaaagttggtgattttatgttttatattggtattgatattgctaagaaaaaccacgaagcctctatcattgattctaatggtaagcttcttgataaaagtatttccttttctaattcacaagctgggtgtactaagttaatttcttactttgagaaatttgaagctgatacttccaataccattattggcatggaagctactggtcattactgggttagtctttattcatatctaattgatctaggatttactgtttatgtcattaatcctattcaatctgatgcttttagaaagatgtatattagacaaaccaagaatgactctaaagattcttttattattgctcaaattatgcgtttcggtgagttttctactacttctttagctgatgaagacattttagccttacgccagttatctcgttatcgtcttgctttagttgatgaatgttccgactggaaacgcaagtgtattgctctcttggatcaagttttccccgagtattctaagcttttttcagatacctttggtgtaacttctaaagaacttctttctaaatatcctactcctgaggatatgttatctgttgatgcaggtactcttgctgagcttttagctaaagccagtaagggacgattcagtatctctaaagctaatgaaatacaagaatctgcttccaatacttttggtgttagttttgcaaaagatgcctttgcatttcaaattaaacagattattgctcaaattaactttatcgaagatcaacttaaagaactagaaactgaaatttcaaatttacttcacaagaccaatacagtaattactactattacaggtattggtgatgttcttggagccataatcattggagaaattggtgacatttgtcgttttgaaaaagcatctcaactagttgcttatgctggccttgacgttgctgtgagacaatcaggagactttgaaggtaccaaaactaaaatttcaaagcgtggttctccttatcttcgtagagcaatatggttggctgctactattgcagccttcaaagatccagcgttatctgtatattatcagtcactcagggcacgaggtaaacatcatttaactgctataggtgctgttgctcgaaagatgtgcaacattatctttgcagtactccgtgataacaaaccttacgtgcctcatatatagagaattccttaagtttagctttatactaacctaaatttctttgctattagtttaggtttatttgttttgcccatttttacataagaatttatggtaggttctgtcaaggacgttttttcccttgacaggttctaacagaaattctaaaatgacttagcaaaaaaattaaattatttcttgacatttaatagctggt

SEQ ID NO: 9907 - DNA, 1408 bp, unidentified
  source 1..1408: mol_type = unassigned DNA; note = element_f8cb2b2
  misc_feature 1: note = core
  misc_feature 2..88: note = LE
  misc_feature 89..1120: note = CDS
  misc_feature 1121..1408: note = RE
  misc_feature 1173..1400: note = bridgeRNA
caatgggatggactcctcctcccgcgaacggcatcaaggtgccagactggagatctcatccaccagtcaagtgaagaaggagtccgaaatgaaacttatccgtgttggagttgatttgtcaaagcaggtctttcaggttcacggtgttgattggcatgagcaggcagcatggcgctgcaagcttagccgccgggagtggctcaagtcgctgctgaaaacgattgagcctggctgtgttattgggatggaagcgtgtggtggtgcccaccactgggctcgccaactgcagcagcatggctttacggtcaaactgatcgcgccgcagtttgtgaagccgtatgtgaagagcaacaagaacgacgccaatgatgccgaggcgatctgtgaagcgatggctcggcctacgatgcggtttgtaccggtaaagacgatcgaacagcaagatattcaggcaacgcatcgaattcgttctgggttgatcgaacaacgaaccgccaaggtgaatcagacccgggggctggtatcggaatacggtttgatcgctccaagagaagtgacccagttgcgtgccgcaataccatcgtggctggaagatgcggagaacgggctaagtgccagatttcgtcgtctcctcaacggtctctggcaagacctgatgatgctggacgagcgcgtcaaagaaatggatcgcgagattgcgatgattgccgcaacggaccctgtagccaagcgccttcaacaattgagaggcgttggcccgatcaccgccacggcgttagttgccactgtgggtgacgccaatcagtttaataacggcagacagatggctgcctcattgggtcttactccccggcagagcagttccggtgggaaggagcggcttcttggcattagcaagcgaggcgattcttatcttcgaatgttattggtccatggcgcgcgttcagtaattcgcaccgcaaagtcgaagaatgatcgattgagtcagtgggtaatgcggatagcaagcacacggcatccaaatatcgcagcggtggcgctggcaaacaaaacagcccgcattgcatgggcaatgatgaccaaagggacggattacgagcccaacctggtctctatttgagagcgtgtgatgcgcaagattggccgcgtcaatagctaacctgcaggagattaccaaccacgattgctaaacaaaccatttgatggccaacaggtcgaaccggcgctggtaaaacccgagcgtgagcgaggctgaagagcccgataaaccgatagggaactggcgcgcgaatagcccatcagggtccagcatctttaacaggtgccgcagttagagaccggatatacgtgagcagtcgtacctcaaagccaaagggtgattgttggcaaatcaggaggagtccatata

SEQ ID NO: 9908 - DNA, 1572 bp, unidentified
  source 1..1572: mol_type = unassigned DNA; note = element_f8cf246
  misc_feature 1..3: note = core
  misc_feature 4..255: note = LE
  misc_feature 256..1458: note = CDS
  misc_feature 1459..1572: note = RE
  misc_feature 33..275: note = bridgeRNA
tttagtaccataaaagtgtagttgttagagagtaattaactctgacatctgcacttatttttttataataaggggagtaattggtctgacgttgccttatttggattacagcatccgtcaaaaaaaccgttaaccaaccccttattataagcattcgattaagcaggttgggatcaactcccgcgtaacgaactaaactgagtggtaataagtgtggttgtaacaattactaataccagtttgaggaggtaaaggatgataagcgttggaattgatgtttcaaaaggaaaaagtacagtctgtattcttaaaccttatggagagattgtatgcagcccatttgaagtgctccatgtagagaaggaacttgaaggccttgatgacttactgaggaaattggatggtgaaatacgggtggtaatggaagccactggtatttatcacttacccatgatgactttccttgaagagaaggggtatttcgtgtctgtggtcaatccttttgcgatgaaagaatttgcaaaggacaataacatcagaggtgcaaagacagacaagttggactccaccatgattgctaattatggcatagaaaaatggttcaagcttcaaaggcattcgggagatgaagaagtttatgccgagctcaagctcctaggccgtcgataccgatactacatggaaattcatgtaaaagcattgcaggaattaacacatattctggattatacaatgcctggtataaagaaactgttcaacagttgggacgaaggcagtggaaaggataagctgagtgattttgtggagcgtttctggcactttgacataatcttagaacaagatcttgaggattttgtagagacatatatcacatgggctgaagaaaagaaataccatcgaagcagatcaaaggctgaggcagtctataatctggcgtccgatggcatcaccacattatcttccggtaccccatcgaccaaaatgttggtacaggaagccatttcagtattaagagctgtggacaactctctatctcgtatcatatcacgaatgaaagagcttgcgaagtccttgccggaatacccaacagtacgggcgatgggcggcgtaggcgatattcttgctcctaaacttattgcagagataggagatgttcgacgactacatagtgcaaaagcgcttatagcgtgggccggaatagatccaccaccttatgaatctgggaagtttattggctccaaacgaaaaataacaaagcgtggatcatcaacccttagaaaagtcggatatgaagtaatgagagtccttaaaacccataaagcccctaaggatagtgccgtttataactatatcctgaagaaagaaagtgaaggaaaagacaaaaaactcgcaaagattgctggattaaataagtttttgcggatttattacgcaagagtgacggcagtatatcgttaattgagaaaccttcgagtggccggatgattctgccggctttattgttgtacacaaaaaccaattcatggaaaatccccaaaatatttaatgagctacttgacttttgttagcagg

SEQ ID NO: 9909 - DNA, 1712 bp, unidentified
  source 1..1712: mol_type = unassigned DNA; note = element_f8d5cc2
  misc_feature 1..2: note = core
  misc_feature 3..236: note = LE
  misc_feature 237..1556: note = CDS
  misc_feature 1557..1712: note = RE
ctcgtataataagttttaaagttaatatttcaggtatcagcaggctttgggatgcccgtgatacaatagctgtaggacagcatggtcaagttctcatctctccagttgagccgtaaggctgcttcacaaaaagtccgtccccctgagccggaagttagctgcaaactcattggctgtttgccggaacgcgggccgccctttcagcagtgagggctatcgcattggccctctccggaatgattctgatacgcgaggttgcggatgctccggttatcatgggcatctcaaagcctgctgacctgaaatctccatgcggggaggtgaaaattatgaatccattattcgttggcattgatgtgagcagcaagagcaatgtggcctacctgatgaagccggacggcagcaagcactccagtttttccgtgcaaaacaatctgggcggtgctaaactgttgtcagaaagaatcgtgtcggcgcttggctccatgcagctcagcgatgtggtgattggtctggaagccacctccatctacggagacagcctcgtttacgcactccgagaggatggcagccttggccgctttcagcgaaaaatccatgttctgaacccaaagcaggttcggaagtttaaggaagcctatcctgacctgccaaagaacgactgggtggatgcctttgtgatcgccgaccatcttcgcttcggcagaattgccaaggaggtctacatggacgactatcgctatcaggcgctcagaacgcttaccagagccagatttgatgtcatccaaagcctgacgcgcgagaagcagcggtttgcaaactatctgtttctcaaatgctccggtatcgctcagaacaaggatattcagaataccagcgctactacgattgctctcatggaacggtttgaaaccgttgacgagctagcaaacgctgatttgaacgaactgaccgcctttatttccgaagccgggcgaggcagatttgccgatccggacgctaccgccaaaacggtgcaagctgcggccaaaggatcttaccgtctgcccaggacagtgaatgacactgtgaatcaggctatggccgtctctatcgcttccatgcgggcgatgaaggaacaggtcaaggtgctggacaaggccattgagcagcagtttgaaattattccaaacacgctgacctccatccccggcattggcaaggtctattctgccggtatcatcgccgaaatcggcgatgtccaccgctttgaatctcaagcctctgttgccaaatttgccggccttgtctggcacaagcaccaatccggtgattttgaagccgagcattcccaaatgattaaatccggcaaccgttatctccgttactatctgctggaagccgccaactccgtgagaagatgcgactccgagttccggcgctactatgacctcaaattcaaagaggtcaacaagtaccagcataaacgcgcactcgccttaactgccagaaaactggttcggttagtctttcgtctgctgaaggacaaccgcctgtatatcccgccggagggctaagcataccgcttgctgctcgggtgtccaagccttgtttcaaaaaacggcaggagcagggcttagtttggtgttgcctttttgccgcctacatcgtgcgtttgccttgcttttcttcaaaatttttctgcatcacctacttgacttcataccattgga

SEQ ID NO: 9910 - DNA, 1383 bp, unidentified
  source 1..1383: mol_type = unassigned DNA; note = element_f8d96e6
  misc_feature 1..2: note = core
  misc_feature 3..84: note = LE
  misc_feature 85..1107: note = CDS
  misc_feature 1108..1383: note = RE
  misc_feature 1152..1378: note = bridgeRNA
cgatgtgatggacacctcctaccttacggcatcaaagtgccagactgaggtgttaacttcagagtcccggaggaggtgcccatcatgaatattaaacgcattggtctcgacctggctaaaaatatctttcagatacacgcggtagatcaccatgaacaggtcgtcttacgtcaggctttacgtcgtgacgccatgacggcattttttacccgcctttctccctgccttatcggcattgaagcctgtggctcttcccattactgggctcgcgaactgactcgcatgggtcattccgtgcgtatcattccccctcaattcgttaaaccttatctcaaaggcaacaaaaatgatgccaatgatgctggagctatctgcgaggctatcagccgccccggcatgcgctttgttgccatgaaaaacgaaaggcaacagacactgcaggctgagcatcgggtccgggcgcgtctcattcgtgaacgaacggcgctgagtaacgagattcggggcttcctgggtgagttcggtctggtgctgccggtggggataaaccggttgcgcaaagcgttgcctgagatactgtcggagcaggataaatgggatgaccgctttatgcggctgctgtgtgaactggcagaagagttaaaggggctggatgaacgggtagcgcaccatgacagctggcttcagcagacggcccgtgaagatatccgggtaaaacggctgctggcgatagaaggcatgggaccggtggtggccagtgcgctggtggcggcagtgggtgatgcccggcagttcagaaatggccgtgaaatggcggcgtatctgggtctggttccgcgtcagcactcaagcggagggaaagagcgactggggcacatcagcaagcggggagacagctatgtgcggacgctgctgatacacggagctcgttcggtgttaaaagcctgtaaagagaaaacggacagacgaagcgagtggctgaaagcgctggcagaaaggcgtaaccgaaacattgcgacagtggcgctggcgaacaagaatgcacgaatagcgtggtccatcctgagtcgggaagaagattaccatgggttacaggcagccggttaaccggcagtgtgtaacccatggagtaaaaaagcagtaacctgtcgtgagattgcgaagacattgaagcagatgagtaacaggtaagaccggcaccttaaaatccgcgctggccgcaggctccctgaaaaacaaagccgctagcccgacaggaagaaggtgcgcagataacatcatggccggatacgacggtatcgaaagagaggccggatatacgcacgcaacttaccgcgttaaacagatgaaaagatgtcttgcataacgggaggtgtccatata

SEQ ID NO: 9911 - DNA, 1402 bp, unidentified
  source 1..1402: mol_type = unassigned DNA; note = element_f8d9b32
  misc_feature 1: note = core
  misc_feature 2..85: note = LE
  misc_feature 86..1111: note = CDS
  misc_feature 1112..1402: note = RE
  misc_feature 1167..1397: note = bridgeRNA
taatggaatggacgccctctttcaaaacggcatcgaagtgccaaaatagcgggaatatctcgcttaactgaaaggagcgtccatcatgaagattactacgataggcatcgatttagcaaaaaccgtttttcagattcatggcgtagatagtcatggcaaaacggtattgcgcaagaagttagatcgctccaggatgctggaattttttatcaaattggaaccgtgtttgatcgggatggaagcttgcggcagtgcgcattattgggcacgcaagctagtagagatgggacataccgtcaaattgatggcaccacaatttgttaaaccctacgtgaagacgaataaaaatgatgttgccgatgcagaagccatctgcgaagcggttagccggcctaatatgcgttttgttccgatcaagacagagttgcagcaagcagtattgtcattacatcgggtacgtcaaggctttgttagagcacgaacagcgcaatgtaatcagattcgtgggttgctctctgagttcggtgtcattattgcaccgggtagaacaagtattgccaagcgacttccagagataatggaaagaacggaccttcctggcagtttccgtcatttgttgcaacgtttgtatgaccagctaaaagggttggatcagcagatagatgagatggatgccaacatcgagcaatggcatcgagaatcagaggtcagtcgtaagctgacggaaattcctggaattggtcccattaccgcgacagccttattagcgtcgataggtgatgccaagaatttcaaaaatggtcgccagctagcggcatggctgggattagtaccaagacagcattctagtggtggcaagtcggtgctactgggcatcagcaagcgtggcgacacgtatctacgcacactactgattcacggcgcgcgtgcggtgatccgctttgccgatagtaagccctcgaactgttggattaacaaactgctcgcgcgtaagaacaagaatgtggccgccgtagcgctggcaaataagaatgcacgcattgtgtgggtgctattgacgcaacaagaacaacgattccgtcctgattatgttcctgctgttgcagcataatcaggacggctgagataacgatttatcgccacaacaatgatgacgtaaagaggagaactcacaccggttgcgcaggcaagaatgacgtgatggcaaaattggttagaccgtggttgagaaaacctgatgtgcaacatgcgctttgagcgcgccgctttgataaggactcgaccagcaaattccatcagggacagagaaatatttctcatataaagtccggatatatggccgcaatctttcctttctgctattcaccgatttaaggcttggcaaactgagggcgtccgtata

SEQ ID NO: 9912 - DNA, 1575 bp, unidentified
  source 1..1575: mol_type = unassigned DNA; note = element_f8df5d9
  misc_feature 1..3: note = core
  misc_feature 4..255: note = LE
  misc_feature 256..1455: note = CDS
  misc_feature 1456..1575: note = RE
  misc_feature 13..275: note = bridgeRNA
tttagtgccataaaagtgtagcagttagagaaccttctctacttgctgcgcttattttgtataataagggaagtagttggtctggcgaggtgcttttttggatcttcgcatccgacataaaaaccgtcaaccagccccttattatatgaactcgtttaagcaggttgggacaataaagaagcttccgtgtaacgaactaaaatgagttgtaataagtgcggttggacagctacaaaatatactcaggaggtcgttatgataagcgtaggaatcgatatttcaaaaggtaaaagtacagcttgtgccattaaaccctatggcaaggtcgttgtcagtccgtttgagtttcagcatgcagaaacggatttgaaatccctgtgtaacatgttccggaggatgaatgatgaggtcagaatcgtgatggaagctaccggcatttaccatctaccggtggcaacatatctgatagaacatggaatgtttgtgtccgtggttaatccgtatgaaatgaagcaatatcgcacgcggggattgcggaaggtcaagacggatcgtgcggattctatgatgatagccagatatggcattgattattggtactctttgaaagagtttcaggtatcacaggatgtatatgcagaactgagaatactcagccgtcagtatcgccatcatatgcagcttcggatatctgcattgctcggtctcactcacttgttggattatacaatgccaggaatcaagcgtgagctgaagagctggaacgaagataacggcaaggataaacttggagattttgttgataaatactggcattacgacaatattacaaagatgtcggaatccaagttcattgagcattactgtaaatggacagagaaaaagggatatcatcaaaaccagagtaaagccgctaagatttattctatggctaaagaaggcatccctacactcccagcgaatcaaaccactaaaatgctggtgcatgaggcagttgaagtgctgagaagagtcaacgagactctcaacacaatattagcacgtatgaaggaactcgccaagagccttcctgaatatccagtagtcaggaagatgggaggtgttggagaaacacttgcaccaagactgatagcagatatcggtgatgtgagacgttttcataacagtaaggctttgattgcgttcgccggaatagatgcgccaccctatcaatcagggcaattcgttggcacagaacgtcacatatctaaacgagggtcgtcagcgattcgtaaaaccggatatgaagttatgcgctcccttaaatcacacaaggagccagaggacagtgcagtataccatttcatactcaaaaaagaagcggagggtaagccgaagaaagtggcaaagatagcaggactgaataaatttctgaggatctattacgccagagtgcaagaagtgtatagcgaatagtcctacttgagataaatattgaaaaggtcggggagaactccgacctgtttgtgatacaagaaatcttactaaaaaacctgcaatgaagagttagatttctgcttgacttttcttagcagg

SEQ ID NO: 9913 - DNA, 1168 bp, unidentified
  source 1..1168: mol_type = unassigned DNA; note = element_f8e2197
  misc_feature 1..2: note = core
  misc_feature 3..179: note = LE
  misc_feature 180..1148: note = CDS
  misc_feature 1149..1168: note = RE
  misc_feature 33..200: note = bridgeRNA
cttgtatctctaaagcggattactattaacgagcttagatttggtaaagcctgtgtagtccgattcctcacggggttattcaagcccgcagcatagcgactgacgcacaggctgagccgcccatctgaagcccgaacagttgtccgaacctcaaatcgtatttgcaaggaggggtatagatgagtggaaccaatcagcattgtgccgggattgatgtttcgaaaaacactctggatattgcatttagcggcatgactaatcagtcaacaatgccaaatgatctagaaggttttactaaagttgtcagcgagttaaaacgtaattgcacgcgcttgatcctgatggaagcaacaggcggccttgaatcgggagccacttgctatctccaatctgaaggttttgatgttgttatcattaatccccgacaggcgcgagattttgctcgcgcgatgggttatctggctaagactgatcgaattgatgccaaggttctgcttcagatggcagaggttattaaccagcaccccgagcgggaaaaatatattcgtcccttgcctaatgttcacagacaattgctggcagccatggttgtcagacgccgtcaattaacagtcatgcttacggcagaacggaaccgattacatctatcgcatccaatgagtcacaggagcatcagattaatcattacggcactgaaagatgaattagctcgcattgaagatgaaatggcagaccatatctcgaaaaatttcagagacctgtctgaactgctaagcgctgtaaaaggcgttggtgcggcgactgttgctgtgctacttgcagaagttccagaacttggatctctgtcacgtcgtgaaattagtgctctaattggagttgcaccggttaaccgagattccggaacaatgcgtggtcgacgaacggtctttggagggcgagcctcagtccgtacggccctgtatatgtcagcactggtagggacccggcacaatcctgtaattaaagagttttacgagcggctggttgctgccggaaagcctaaaaaggtcgcattaactgcctgtatcagaaaactattgaccattctgaatgcaatgttaaagaagaatgaagcatgggatcctttgtatcatcaccatgcttcgtaatgagtggctatagacagttg

SEQ ID NO: 9914 - DNA, 1261 bp, unidentified
  source 1..1261: mol_type = unassigned DNA; note = element_f8e3350
  misc_feature 1..3: note = core
  misc_feature 4..221: note = LE
  misc_feature 222..1235: note = CDS
  misc_feature 1236..1261: note = RE
  misc_feature 31..194: note = bridgeRNA
catataaaggaactgccctttacaaacatgaggggtaagctggagtgaggagaagagacaaagacgtcaaaagccctggagcttctcgcaatgccaatgtctcttctcactccagcgattcaagagcttcttttaacaggtatcgttaaatcgtctttaacgaatatgataaagccagcgaatcgccctccagtcaccgactacaagggtaattgaatatcatgaaaaatgcatcatcagcaaaagtatttaaagattgtctgggcatcggtattgatgtttccaaggccgagttggctgttgttgggatcacactgaatcagtcttatctcaagcgtgtctgcaatgatatgaaagccatcaaagcgtttatccagcgtcttcatcagagtggttaccgcgacaaggttgtgtgtgaatcgacgggccactatcacctaaaactggcactggtttgtcatcaaatcggtgtggaattgattgtgctcaatccgctgcaatcgagcaaacacagcaaggccaaaatcagaaaaaccaaaaccgatccagaggatgcgctgatgctggcgacgatgtgcataaccgagcccaacttgccgaagccgatgcagctgacgccatccaaggcattgattcgactgaagatgggacagttagcctcaatcgaaaaacagctgcagcaatttcatcaaagcttgaggcaatatgaagaaacctatgcaggattgggtttggcattaagcgagtatcaacaggccttgtgcgcacacggcagcagcctgaagcgacttagaaagcagcttgagaaagaactcgaaggtttattgtcacacgcagtagccgacgatcagagtctggctgatttgcgcgcacttcccgggttttccaacgtggtcgccggtctggtcggtatattggatcgccaggtcaaaggggctgattcatggacggcctatgtgggtctcgatgtgagtgtgcggcgaagtggcacgtggcaggggcgcggtagactcaccaagcgtggcaacgcctatatgagaaaaagattgtttcaggccgcctggggcgcctgtctgaattacgactatgtcagagcttactacgaccagctaaaaacacaggggcgtaagcatgcagaggctgtatgcatcatcgccagaaaactgttacgcatcgcttattacgttgtggtcaataaagtacaatttgatccgaaaatcgcttttcctaattaaatttattgacaagttgctttaacagg

SEQ ID NO: 9915 - DNA, 1352 bp, unidentified
  source 1..1352: mol_type = unassigned DNA; note = element_f8ee331
  misc_feature 1..2: note = core
  misc_feature 3..72: note = LE
  misc_feature 73..1077: note = CDS
  misc_feature 1078..1352: note = RE
  misc_feature 1117..1350: note = bridgeRNA
ctaatgagatggtcacccccaccctgtgagcggtacgctggcagggtgtttttctttttgaaggggatcatcatgcaaaacatcacacttatcggtatcgacctcggcaagcataccttccatgtccacgctcaggataaaaacggccacgctctgctgcgcaagaagttttcccgtacccagctcaccgcttttctttccacctgcagcacagccaccgtcgtcatggagtcctgcgccggcgcccactttatggcgcgccatatcactcagctcggccatcaggttaaactcatctcgccccagtttgtccggccattcgtcaagagcaacaagaacgacttcatcgacgctgaagccatctgcgaagcagcttcacgcccctctatgcgcttcgtgacgccgagaaccgaagaccaacaggcgatggcggcgctgcatcgcgtccgggattctcttgtcagagaacgggtcaaaaccaccaatcagatgcacgcctttctgcttgagtttggcatcagcatgccgcgaggaacggccgttatccgacgcctggctgcggtacttgaagagcattcactaccgccttatttaacccggctgcttatgcgcctccagcaacattacacctatctcagcgagcaggttgagggactcgaacaagagttaaaaacgcatatggcggatgacgaggctacgcagcgtctgctgaccatccccggtgtcggcatgataaccgccagcctgctggccacaaagctgggcgacgggaaaaactatgtcggcagccgggactttgcggcatcgacgggattggtcccgcggcaatacagcaccggcgggaaaaatacgctgatgggcatcagcaagcggggagataaaaatctgcgccgcctgctggttcaatgtgcgcgggcctttatgcagcgacttgaacatcacccggggcgtctggctgaatgggtgaaggtccagttgacacggcatcactcgaatgtggtggcctgtggactggcgaacaagctggcacggatagcctgggcggtgacggcgcatcgcaccgtatttagccaataaaaagcgccgacagttagccgctgtcagcgctttggataacccagttacgacctggttttgcgacgactgatgatgatgacatgaacggcacagcgacctgctgatgaacctgacataaaaaatggctctttgaagccgggacccttttcaggttcagcaggtgcggacttcatcgtggcgcgggtaacgcagtgttacccatcagacgccgtatagatttacgcaagcccatcataaatcaaaatcggtgttgcaaaaacgggggtgaccataga

SEQ ID NO: 9916 - DNA, 1356 bp, unidentified
  source 1..1356: mol_type = unassigned DNA; note = element_f8f911e
  misc_feature 1..2: note = core
  misc_feature 3..284: note = LE
  misc_feature 285..1097: note = CDS
  misc_feature 1098..1356: note = RE
  misc_feature 1086..1342: note = bridgeRNA
gatggggtggacggtcccttgccatagggcatcgagtgccaaaacgtggctgcttgtaagagcaccacaaggaaaggaccgtccagatgcataatatcacgatcggaatggatattgcgaagagcgtttttcaggttcacggcgtcgacaagcgcaccggcacggttatcaagaagcgattggcgcgttcgaaactgctgggtttcttcgcgaagctcgagccgagcctgatcggcatggaagcgtgctcgacgtcgcatcattaggcgcgcgagcttgaggcgttgggccacgaggtcaagcttctgccggcgaactacgtgaagccctacgttaagcgcggcaagaacgacgagatcgacgcggaagcggtctgggaaggtcttgagcgaccgacgatgcgttttgtgccgatcaagagttgcgagcagcaaggcgttcttgccctgcacaaggtgcggtctcaattggtgggccagagaaccaggctggtcaatttgctgcgggcctatatggcggagtttgggctggtggcgccgcaagggatttggcggatcgcggaactcaaggccatcgtcggcgacaaagccgacgaacgcttgccggcgttgggtcgcgtcgcgctgacgccggttattcagcagctcgacttgcttgcgagcgcgatcgaggatctcgatcgggcggttgtcgcgcattgcagaagcaacgagaccagccgccggctttcggccattcccggcatcggtccgatcaccgcctcggccttggtcgccaccgtcggcgacgccaccgtattcaaatcggggcgtcactttgccgcctggctgggactgacgcccaagcagcacgccagcggcttcaaggacaggaaaggcaggatatcgaagatgggcaatccctatctgcgcacccttctggtgctcggcgccaccgccacgatgcgccaacgcagccaaacgcctgcgtcggcatttgtccggcgattgctggcgaagaagaagtcggtgcggctcattaccgtcgcgctcgccaacaagatggcacgcatcgtctgggtgctcatggccagaggcgagccctatcgcgccgcctgaacgtcttgggaaaacggatcaaccattcggcttgcaagaggtgatgacggcgtgatcgtaaaggatcgatcccaaaggccgcaaaaccgttccgcgtctcgcactccgagtgcgtcgcagagagattggagcgtgcctcgcggattccatcagggccagcggccgtgaactgccgcatccaaaggccggacacaagaccgcaagccgatcctcgcgtcacgccaaaaaatctcttgccaagcaggggccgtccacacag

SEQ ID NO: 9917 - DNA, 1449 bp, unidentified
  source 1..1449: mol_type = unassigned DNA; note = element_f9002d9
  misc_feature 1: note = core
  misc_feature 2..236: note = LE
  misc_feature 237..1433: note = CDS
  misc_feature 1434..1449: note = RE
  misc_feature 11..200: note = bridgeRNA
ccttacctttcttgaagggtgtttggggtcgtcggccttaggcttcgaatcacccagggatgtcgggtatggctttcatcggtttgctgccgtttatggccgaaggagattggccgcccggcgtcccgcgacgactcgaccgctaattgagagaagcgatgtgatcgctgtgtaaggacacgccggcgtggtcgtctgctgggccgtttcacacgacgacaatcatggaggtggttgtggggcaacaactgtgggccggtgtggatgccggaaaatccgaacatcactgcgtagtcatcgacggtgacgggcagcgactgctgtcccaacgcgtcgccaacgacgaaacagtcctgctcgaattgatccaggccgtcatcacgctggccgatggtggtgacgtcacctgggcgatcgacctcaaccacggtggggccgcgttgctgatcaccttgctcatcacccacgagcagcggttgctctacattccgggccgcaccgttcatcacgcctccggcggttaccgcggcgacggcaagaccgacgccaaggacgccgcgatcatcgccgatcaggcccgcatgcgccgcgatctgcaaccgctgcgtgcgggcgacgagatcgcggtggatttgcggatcctgaccgcgcgtcgcatcgacttggtcgccgatcgcacccgcgcgatcaaccggttgcgcgcccagctcctcgaatacttcccggcgctggagcgggcgttcgattacggccacagcaaggccgccttgatcctgctgaccggctaccaaactcccgatgcactccgtcgcgctggagtcgcacgcctggaagcctggttgcgcaaacgcaaggcctacaacgctactgccgttgccgccacggcgatcgcagccgccaacgcccaacacagcaccgtgcccggccaacagatcgccgcggcgatggtcgcgcggctggccaaggaggtgatggccctcgacaccgaaatcggcgacaccgaaacgatgatcgaggaccgatttcgccgccaccgccacgccgagatcatcctgagcatgcccggattcggcgtccagctcggcgccgagttcctcgccgccaccggtggtgacatgaccaccttcgacagcgtcgaccgcctcgccgcgtgtccgggctggccccggtaccgcgagattccggcgcgtcagcggcaacctcaaacgccccgccgctacgaccgccgactgctgcgagcctgctacctgtcggcccagatcgccatccgcaccgaccccgcctcccggacctactacgaccgcaagagatccgaaggcaaaacccacacccaagccatcctcgccctggcccgccgacgcctcaacgtcctgtgggcaatgctccgcgaccacgccgtctaccagcccacaactactgctgcggccgcttgacaacgtcattgagaat

SEQ ID NO: 9918 - DNA, 1354 bp, unidentified
  source 1..1354: mol_type = unassigned DNA; note = element_f9027c0
  misc_feature 1..3: note = core
  misc_feature 4..78: note = LE
  misc_feature 79..1107: note = CDS
  misc_feature 1108..1354: note = RE
  misc_feature 1111..1341: note = bridgeRNA
tgatggggtggacggccccaccacggcatcgatgtgccaggatgtggtcgtcaaagaccaccaacaggggagccgtccatgacgaaggttagcacgatcggtttggatttagcgaagcacgtcttccaggtgcatggcgttgacgagcgcggtgccgtgatcgttcggcggcgtctgcggcggagcgaggtgttgaagtattttgcgcgtctcgagccgacgatcgtcggcatggaggcgtgctcgacctcgcatcactgggcacgtgagctgcgtgcgctcgggcacgaggtccgactgatgccggcgcagtatgtgaaggcctatgtgaagcggcagaagaacgatgcggccgatgccgcggcgatctgcgaggcggtgagccggccgtcgatgcgcttcgtgccggtgaagacggcggagcagcaggcggcgctgatgctgcaccgcgcgcgcgatctattggtgcgccaacgcacgatgctgatcaattcgctacgcgcgcacctggcggaatttggcgtgatcgaggcgcgcgggccgagtcggatcgtgccgctcgtgacggcgatcgagaacggtgacgcgccggtgccggaattggcccgccgagcgctcctgccgctgatcgctcaactgcgtgcgagcgagacgcagatcgacgccatcgacgccgagatcctgggctggcaccaggcgagcgatacgagccggcgtctggcgacgatcccggggatcggtccggtcattgccagtgcgatcgccgcatccgttcccgacccaagcgcctttgccaccggccgccagttcgcggcgtggctcggcttggtgccacgccagacctcgaccggcggcaagccgcgccttgggcggatcagcaaacagggcgacgccaatcttcgccgcctcttgatcatcggtgcgcaaagcgtgctgcgctgggccaggccgggcaagtcgaacgcgtggatcatcgcgctcctgggccggcggccgcgcaaggtcgctgccgtggcgctcgccaacaagatggcgcgcatcgcctgggccttgatggcgcgcggcgagcgttatcgcgccccaacgatcgtcaccgccgccgcgtgagccgcgcgcggccgtcgccggaatgcttgcgagggtgaacgagaggtgatggcaatcggtcaaaccgaggatcggccaaacccgctggggtcaggggcgtcgcagcccgtcactctgatagggaccgattcgcggataccatcagggccagcggtcatgcgcaccgcaccaataggccggacacatgactgcaagccgccgagtcgccgccaccaaaaatccttgcatgcaaggggccgtccacaca

SEQ ID NO: 9919 - DNA, 1611 bp, unidentified
  source 1..1611: mol_type = unassigned DNA; note = element_f903f65
  misc_feature 1..2: note = core
  misc_feature 3..544: note = LE
  misc_feature 545..1492: note = CDS
  misc_feature 1493..1611: note = RE
  misc_feature 13..299: note = bridgeRNA
ctactacaatatatttatggttaatatcccttacagccagtaaggaattatccatcttgttgcttaagctgttagaatgtaggtagcaattggatatcttctcctttcttggacttcgcgtccgtaacacagactgataaccagctcctcattcgcagcgttcgttttatgcaggttgaatcacctcaggtgcattcgtgtcacaccacagtagattgaataggcaatgagtaaaactggtacttatccattgcaataatcttaaggagtgacaaatttatgaacgcagtaggtatcgatgtttcaaaaggtaaaagtatggttgctattatgcggccttttggcgaaattgtttccacaccctttgaaattaaacacacatccagtgacatcaattcgcttgtaaaacttatcaagtctatcgaaggtgagtcccgaattgtaatggagcataccggacgctattacgaagtccttgcccatcaactttccgaagcaaatcttttcgttagtgccattaacccaaagcttatcaaggattttgatggataacgattcccttcgtaaagtcaaaacagataaagctgactctgttaaaattgcccgatatgcacttgacaagtggcaaaatctgaaacagtatagcgttatggatgaattacgcaatcaactcaaaaccatgaaccgtcagtttggcttttacatgaagcacaagacggctatgaagaataaccttatcggcatccttgaccaaacctatcctggtgttaatacttattttgacagtcctgcacgtagtgacggcagccagaaatgggtcgattttgcatctacatactggcatgtagactgtgtccgtaaaatgtccataaacgcttttattgatcactatgaaaactggtgcaaacgcaagaagtacaacttcagcaagtcaaaagctgaagaaatctatggaaaagcaaaggagcttgttcctgtacttcctaaggatgacattacaaagcttattatcaagcaggcagttgaccaacttaacagtgcttctattactgttgagtcgctacgcactctcatgaacgaaactgcatccaagcttccggagtatcccgttgttatggcaatgaaaggggttggaacgtcactcggtcctcaactgatggctgagattggtgatgtttcccgtttcactcacaagggtgccattactgcttttgccggtgtagaccctggtgttaacgaatccggctcttatgaacagaaaagtgttccaacttcaaaacgaggttcttctgacctcaggaaaacactatttcaggtaatggatgtcttaatcaaaacacatccacaagatgatcctgtgtatcagttcttagacaaaaaacgggctcaaaagaaaccgtattatgtctatatgactgccggtgctaacaagtttctacgcatctactatggacgagtgaaagaatatcttgcatctcttccagaatcttaattatctactatacctttcagaccagcactggtgtggtggtcttgttttgatgtctaattttcaacctgtataaaattttcaaagttctttcattttagccttgactttttatttgcagg

SEQ ID NO: 9920 - DNA, 1582 bp, unidentified
  source 1..1582: mol_type = unassigned DNA; note = element_f905765
  misc_feature 1..3: note = core
  misc_feature 4..272: note = LE
  misc_feature 273..1481: note = CDS
  misc_feature 1482..1582: note = RE
  misc_feature 14..292: note = bridgeRNA
tttcgtactatgtaagtgtagattatcagtgaagtaatgactgatatctgcacttacttttataatgagagaaagcagcaggcctgacgtaattccgattgggatgtcgaactgatactcccgccgataaacagtcagccattctctcattacatgtattcgatgaagcaggttgggacctgtgtgttcaggctcccgtgtaactaacgaaactgaatggtagtgagtgctgatggatgccgctgctgattctacgtagaggaggcgaatgtatgatcagcgtaggaattgatgtttcaaaagaaaaaagcaccatctgtgcgatgaagccttatggagagataatcatgtctccgaaagacttcaagcataccaaagaggacatggaacatctcacagacaagatcagctcattaggcgaagacgtgaaatgtgttctcgaagcaacgggaaagtatcatctccccatatgccagtaccttaagagccatcatttatttgtatcagtgatcaatcccctcgaaatgaagcgttatcgatgtcagggactgagaaatgcgaagacagacaagatcgattcgaaaatcattgcccaatatggcattgatcactggtaccagctgagcgagccgcaggaaatagagcaggatcgctatgagctccgactgttgggccggcagtatgcacagaccatgaagatcagggtcaaaagatgtcaggcactgtcagatctgcttgatatgaccatgccaggtatctgcggccttttgaatgactttaatcggtataacggaaaagacaagctgtgcgatttcgtcagagagtattggcattatgacaacatcacaaagagcagtgagaaagtattcatcaagaaatatcagacctggtcaaagaaaaacggataccgtaggaacgaagacgaagcccgccagctttatgccctcgctatgaacagtatccttacccttgattccggatccgagcctgtacgtctcatgattcagaactctgtggatatcctgaaagaagtagacgcttctctctatacaatcttaaatcaaatgcgtgaattggcaaagacaatgccagaatatgatactgttctttcaatgggtggcataggagagaccttggcaccatgtctgatagcagagattggcgatataaggcaataccacagtggtagtgcattggtcgcatatgcaggaatagatgtgccgccatatgaatctggaaagttcgtcggcacgaagcgacatatttctaagagggggtcacctttattacgtctgcttggctatcagatcattgactgtctgaataaacatggacctaggatggtgaatgatacgagtgtatacaactattttatgaagaagcgtgcagaggggaaaccgtataaagtcgctggcatggcagctttcaataagttccttcgtatctaccattcaagagtcacaacaataacaacaaattaaatatgccattgagctgaatggtaaaaatgtaccagtatgaactggtctttcgtcatggaattattataagatataatttatacttgacttatattagcagg

SEQ ID NO: 9921 - DNA, 1567 bp, unidentified
  source 1..1567: mol_type = unassigned DNA; note = element_f9094d7
  misc_feature 1: note = core
  misc_feature 2..322: note = LE
  misc_feature 323..1552: note = CDS
  misc_feature 1553..1567: note = RE
  misc_feature 25..256: note = bridgeRNA
ccgttagcttctaagggcaccgcttctccggcaggataagtggtgttgtccggtccggctcctgggcatgatcgtttgcccccagtcaatgtgatgatccggggggtgttgtcacccaggagctggtcacgggcggatcgtggatcgctgatagaggcacgacagtcccactccttgaggacttgttttctaacgtggatgccgagcatgacccgcccaccgactcaccccaggtcctgggccgcggaccggatgactggccgcgctgagcgctttgcccagggcggtgacgaggattcacaccgaagaggagataccgctcatggcctgggatcttcaggacttcgcgctgttcatcggcctagacgtcggcagaaccgaacatcacgccaccgcactgacccgcaccggcgagaaggtctacgacaaggcactgcccaacgacgagaccaagctgcggcagctgctgaccgagctgaccgatagccatggccgggcgctgctggtcgtcgatcagcccgccaccatcggggcactgccggtcgcggtggccaaagaaacccccgaggtcgaggtggcgtatctgccggggctgaccatgcgccggatggctgacctgcacgccggctcggccaagaccgatgcccgggacgcgttcatcatcgccgagacagcccgcaccatgccctcagcgctgcggcagatcgccgccagcgacgagcagatcgccgagctggcggtgctggctggcttcgatgatgacctgttgggccagaccaccgcgacccggaaccggctgcgcgggttactgactcagacccaccccgggttggagcgagctatcggatcgcacctgcaccactacggggtcctcgatgctctggccgcctggccgaccccgcagaagctcaaggccgctggccgggggcatgtgcgcaacaggatcaagaagcacaatcctcgcctggccgagaggatcaccgaggcgatcttcaccgccctggatgcccagaccgtcgtggtcgctggcaccggggctgcggccacgatcatcccgatcctcaccaaccagctgaaggacctctacacccagcgggcccacgtgctggcccaggtcgaggcactggtggaggcccaccctcttgcccaggtcctgacctcgatgcccggaatcggggtcaggaccgccgctagaatcctcaccgaggtcgtcggcaagaacttcaagactgccggtcacctcgcttcctacgccgggatcgcccccacgacccggcgctccgggacttccattcgcggggagtttgccaaccgcgccgggaacaagagactgaagtccactctgttcaacagcgccttcgcctcattgcaccacgggccttcacgggcctactacgacaagaagagagccgctgggaagactcacaaacaggccgtcatcgccctcgctcgtcgccgtctggacactctctacgccatgctgcgagacggcaccttctaccaggaaccagacaacgcccgcggaggctcaggccacgccctcgcggcttgacgaaaaccatagagg

SEQ ID NO: 9922 - DNA, 1416 bp, unidentified
  source 1..1416: mol_type = unassigned DNA; note = element_f914ea2
  misc_feature 1..2: note = core
  misc_feature 3..131: note = LE
  misc_feature 132..1145: note = CDS
  misc_feature 1146..1416: note = RE
  misc_feature 1179..1412: note = bridgeRNA
agatggtatggacgcctcccccagcaacagggaggtttcccatgacggttggaaccggggatcctcgccgccacggcaaccttgtgccagagtggaaatgtcgagtaaccacctgagcgggaggatccaaaatgaagcttaccgtaatcggcatggacatcgccaagcatgtcttccaactgcatgcaatcaacccggtcagcggcgaaaccgagcgcgtcaaactcaagcgtggccagctcctggatttctttgcgaaacgcgagccttccttggtagcgatggaagcctgtggcggcgcacaccactgggccaggcaactgcaggggcttggtcacgacgtcaggctgatttgcgcccgctcagtccggccgttcgtgttgcgcaacaagaccgatgccaccgacgctcgcgcgatctggacagcggttcagcaacccgatgcacgctttgtcgccatcaagagcgaggcacaacaagcgatcctcgcgctgcatcgcctgcgcgcccaactgatgaagttccgcatcatgcagaccaacgcgctacgcggtctgctccatgagttcggccagacgttgccggaaggctaccaagcgctcgcaaaagcgattccggatgctctcgccgtagcagcggagcacttgccggccattcttgtcgatagcttgcgtgaacagtgggcacgcgtacaagctacggacaaggacattgccatcctggagcatcgactcaagatcgcacttcgcgaaaatcagcaatgtcagcggatcgcagagatacccggcgttggactgctgaccgcaacggccgctgtcgctgccatcggcgatcccggcaccttccgctccggccgcgaattcgctgcctggctcggattggtaccacgacaggtcggaacgggcggcaaagttcgacaactcggactaagtaagcgcggcgacacctatttgcgaaccttactgatacacggcgctcgagccgtgatcacgcgtggcatacgatcgccgtggctcgacagcctgcttcagcgacgtcccttcaacgttgtggtagcggccatggcaaacaagcttgcccgcacgatatgggctgttctataccgcgggaccagataccacggggccacgaccaaggctgcgtagccgctggcctgcatgaggctccaccccactgaacactctcaccaaggagcgcaagcactcgctgcatgatggcaaacaggttggaccgggacgaggtaagtctgataagagcgttgaacgactgagttcgattgttagctgagaccctcgtcagcgaaatccatatgggccagcaggctagccagcctgcgcgaacaggccggacataagcgtgctgccttacctgcaaccaacatgcaaaacagcttgcgatccgggaggcgtccacata

SEQ ID NO: 9923 - DNA, 1375 bp, unidentified
  source 1..1375: mol_type = unassigned DNA; note = element_f92d773
  misc_feature 1..2: note = core
  misc_feature 3..78: note = LE
  misc_feature 79..1104: note = CDS
  misc_feature 1105..1375: note = RE
  misc_feature 1081..1362: note = bridgeRNA
cgatggggtggacgcgcccttccggggacaccacactatggcaggtggcgtctctacatcgcccggaaggaggaacccatggaacaggttcacatgatcggcatcgacctggcgaagcagagctttcaactccacggcgcgcgcgcggatggatcgatcgcgtttcggaaaaagatcggcaggacgaggatgctcggctttttggcgtcacagcctcgttgcctggtggcgatggaggcgtgcgcgagcgcgcactactggggtcgtcagatcagcaaactcggccatgaggtgaagctcatgcctccggtctacgtgaagcccttcgtcaaacgccacaagaacgacgaggccgatgcggaggcgatctgcgaggcggcctcccgtcccacaatgcggttcgtggcggtgaagagcgaagcgcagcaggcccggggcatgttgttccgcacgcgcgatttgctggttcgccagcggacccagactatcaacgccttgcgtggacacctggcggagtatggcgtcatcgctccgcagggttgcgcccacctcgcgcggctgtcggtagcggttagagttccggactcgggactgcccgaggcggttcgtgagttgggcggggttctgctcgatcagattgccggcctcaaagcgaagatcctggagttggagaggcaactccgcacgagcgcacgccaggacgaagaggcgaggcggctgatgagcatcccggggatcggcccgatcaccgcgtctgcgatactggccttcgcgccgcctttggagagcttcaagtgcggccgggacttctccgcctggctcgggctcgtcccccgacaacactccaccggtggtaagccccggctgggaagaatgtcgaagatgggccaacgcgatatcaggaggctgttgatcacgggcgcgatgtcggtggtgcgctgcgcggtccggcgcggcgccccgccgggctcgtggctcgcccggatgctggcgcgcaagcccaggatgctggtcgcggtggcgctggccaatcgaaccgcgcgtatcgtctgggcgctgatgacgaatatggaagtctaccaggagccggtgccggtcgcctgagcggcaggcgagcggataacgcctggagcaatgtgagcaggccggaggacaaggtaggggcaaacggtcattgagacggggtcgggaaaaccagggtatgtccgagagctttcaagctcgcgaggtcgattcggacccgatcttcgcatctccatacgggcccgcggcaagtgaaacgccgcaaaagagaggccggatgcacgactgagccggaccgcattgcaccgaactgtccgaagaaaacgcttgcatttttgggcgcgtccatgca

SEQ ID NO: 9924 - DNA, 1365 bp, unidentified
  source 1..1365: mol_type = unassigned DNA; note = element_f943865
  misc_feature 1..2: note = core
  misc_feature 3..81: note = LE
  misc_feature 82..1104: note = CDS
  misc_feature 1105..1365: note = RE
  misc_feature 1080..1353: note = bridgeRNA
tgatggggtggacacccctcgacggcatcaatgtgccaaaatggtggttgttgcaaccaccggagagaaggagtgcccacgatggaagttaccacaatcggcctggatctggcgaaaaatgtgtttcaagctcatggagcggacgcctttggcggtgtcattttccgtaaacaattgcgtcggaaaaccgtccttgaattcttcgctaagcaacccgagtgcatggttgctatggaagcatgtgctggcgcacattactgggcgcgggagatcggcaagttcggccacacaataaaactgatcccaccagcttacgttaagccgttcgtgaaaagacagaagaatgatgctgccgatgcggaggctattgctgaggccgcatcccggccgacgatgcggtttgtcgccgtgaaaagcgaagatgcccaggccagcgccgtcgtgtttcgggcgcgggacttattggtgcggcaacgaacgcaacttatcaactcgctccgcggtcaccttgccgaatacggcttcatcgccgctcagggtgcatcacatgttgcgactctcatagaatgcgtggtggacgataagaacactctaccggaagcagctcgcctggtgcttgccatgctggtcgaaacttaccgggatttagaggatcgcatcaggcggcttgatcatgaaattacacgtcgtgctcgagaagacaaggatgctcgccgactagcaacgatacctggtgtaggaccaataacggcgaccgcggtgatagctttggctccggcagcatcgacctttgtgaaaggacgagattttgctgcgtggcttggcctgaccccgcgacagcgatcgactggtgggaagcaaaagctcggcgcgacatcaaaaatgggcgagagaaccttgcggcgcctgcttattcttggcgccagttcagtggttcgacaagctgcccatcgtggggtagcagagggttcttggctcggacgcatgctggcgcggaagcctcgcatgttagtgatcgtggcccttgccaacaagctcgcccgtatcgtttgggcgcttttggcgaaaggcggagtctatggagctccagtagcggccaattaacctggtcgtgaagggggcgtcgaaggtgtaggagagtcgagaggacggtatggcgcgcagttgacagagacgggatcggaaaaccaggcctgaacaaagtgcctctgagcacgcttaatgatttggggccgatctgcgaactcccatacgggcccgcgacatcttcatggtcgcatcagaggccggacagatgtcagcactcgactacgtgccaatatctcgccttgaaattcctcttgcatttacgggggtgtccacaga

SEQ ID NO: 9925 - DNA, 1359 bp, unidentified
  source 1..1359: mol_type = unassigned DNA; note = element_f94900c
  misc_feature 1: note = core
  misc_feature 2..7: note = LE
  misc_feature 8..1117: note = CDS
  misc_feature 1118..1359: note = RE
  misc_feature 1127..1353: note = bridgeRNA
taatgggatggtccgcctcgtcctcctgccgcatcatgaggcggtcaaaccgaaggaggttgcaatgccgcaacgcaatgtgccgcgtcccgcagcggtctatgggattgatcttggtaagaacatcttccacgtcgtcgcgttagggagcgacggcacggttgttcagcgggttaggttccgacgggacacgttgcttcaattcttccagcgggcagcacctgcgattgtggggatggaatcctgcgcagggtctcagtgggtcgcaaggaagatccagacgctcggtcacaaggttcggctgatccccgcccaatttgtgaagccttatgtaaagtcgaacaagagtgacatcatcgacgcggaggcaatcgccgaggccgccacgcgaccaacgatgcgatttgctgcactcaagactgaggagcagaccgaccttcaagccttgcaccgggtgcgtgaccaaatgatcggcacgcgaacccgcctgatcaaccagatgcgcgctttttgcctcgaatacggtgtcgcgctacgtcagggtgcaggtctgttcaagctcgacctgcccgaggctctcaaggatccaactaatgatctttcgcccgcaatgcgcaaactgctcagcgaactgtttgccgacctgcgtcagttggaaacgcggattgctgatgtgacacgcgagatcgaagcgaacgctgatcgagaggatgccgcacgacggctgatgacaatccctggaatcggagctctcggtgcgacagcactgcttgctgctgttggaaacggcagacagtttcagaaagctcgtgatctggccgcatggctgggccttgtgccacgagaatactcgacgggagggaagcaaaagctcctcggcatcagcaagcgaggtaatcgatacgtccgtaaactgctggtccatggtgcgcgatcctgcttccgacacctcgaccgaacaaaggatcgactgggaagctggctggatggtctccaagcccgaatgcacccgaacaaagccgttgtcgcacttgccgcaaaaatggcccggatcgtctgggtcgtcctgaccaagcctggagcgctctacgaacgcagggaccctgccttcacctgacgctcctggctcgattgcaaggctcgggaatagtgatgacgaaacagtggatcaacatgccgtaagtcctgtgcaaaaaagcgggcctcgtgcccgaaccatttattgggaacggcgtgtgcggatctcatcatggcctggctgcaaccgcagcccactcgcgagaggccggatacatttatgcaactggaatcgtcgctcacgatgtcgcgtacccttgcacggacgaggcggaccataca

SEQ ID NO: 9926 - DNA, 1377 bp, unidentified
  source 1..1377: mol_type = unassigned DNA; note = element_f94c89a
  misc_feature 1..3: note = core
  misc_feature 4..91: note = LE
  misc_feature 92..1117: note = CDS
  misc_feature 1118..1377: note = RE
  misc_feature 1150..1364: note = bridgeRNA
tgatggggtggacggcccccgacccgacggcatcgcgatgtgccagggtggcgaccgtcaatcgcaccacctcgagggcaggagccgtcccatgcagattatcaccgtcggtctggatatcgcgaagaacgtctttcaggttcatggcatcgatgaccaaggccgggccgtgctccgccgcaaggttcgccgcgatcagctgttgaaagtgttcggtggcctcgagccctgtcttgtcggcatggaggcgtgcgccaccgcgcatcactgggctcgtgaactgcgcgcattggggcacgacgtgcggctgatgccgccggcctacgtgaaggcttacgtcaagcgcaacaagaacgacgccgccgatgccgaggcgatctgcgaggcggtgacgcgaccgaccatgcgcttcgtgccaatcaagtcggccgaggtgcaaagcgtgctaatgctgcaccgggcccgccacctgctggtgcggcagcgcacggcgcaagtaagcgcgatgcgggcacaccttgccgagtacggcgtcgtcgccgcgaaaggcatatcgcggctgcgcgacttgctgccggtgctcgacgccggcgctggcatcctgcccgagctggcacgccaaaccctgctgctgatcgcgcaactgatcgaggccctgacgctacaaatccgcaagatcgagaccgaactgctggcctggcaccgtagcaatcctgccagccagcggctcgaaaccatccctggcgtcggggtcatcaccgccaccgcgttggccgccaccgtgctcgacgcgagggcattccgatcaggccgccagttcgccgcctggctcgggttggtgccgcgccagaactccagcgggggcaaggaacggctaggcggcatctccaagatgggcgatcgctatctacgccatctgctcgtcgtcggcgccaccgccgtcgtccgctacacacggcgcaaggcaaccaccatcagcatctgggcaaaccggctgctggatcgcaaacccgcccggctggtcaccgtcgcggtcgccaacaagatggcccggatcgcctgggccgtcatggcgcgggaagagaattatcgcgcaacccccactgctgccgcgtgagatcagcagcaacccggtaatcagaaccgctttgggcaggagagaacgacgagcgtgatgccgatcggtcaaaccggggagcgggacaacctgcgtgattcaacgcgcatcgagcgcggcagcttgatgaggacccgctccaccgacaccatcatggccagcggcctggtgccgcacgcaacaggccggacacatgaatgaacctgacccgatcgtcaaagcgccgccaaccctcttgcccaacgggggccgtccacaca

SEQ ID NO: 9927 - DNA, 1446 bp, unidentified
  source 1..1446: mol_type = unassigned DNA; note = element_f957379
  misc_feature 1..2: note = core
  misc_feature 3..231: note = LE
  misc_feature 232..1431: note = CDS
  misc_feature 1432..1446: note = RE
  misc_feature 12..198: note = bridgeRNA
tccttaccgttataggtgggtcttcgagctggcatttctaagctgtgagcgaccctgggacgttgggtatggctccgtttcgtcagcccgcggatggctaacagtgattggccgctcggcgttccgcgatgactcgaccgctaattgagagacgcgatgtgatcgctgtgtaaggacgcgacggcgtggtcatctgcagggccaaatatcacaacaacactggaggtagatgtggcagcaccatcgctgtgggcaggcattgatgcgggcaagctcgatcaccattgtgtggcgatcgacgcatcaggccggcggctattatcccgacgtgtacgtaacgacgaggctgcgctcgtcgcgctcatcgaggacgtaatcgcattagctgacggcggctccgtgcaatgggccatcgacctcaacgccgggggcgccgcgctggcgatcgcactgctgctggttcgcgatcaagacctgttgtacatccccggccgcatcgtgcaccacgccgccgcggcctatcgtggcgacggtaagaccgatgcgaaggatgccgccatcatcgccgaccaagcacgcatgcgcacagacctgccggaattccgtcatcgtgacgaaacgactgtggagctgcggaccctgtgcgcgcgacgcgctgacgtctcggccgatcgcaaccgtgcactcaaccgtctgcgagcccaactcctagagtatttccctgctctggaaagagctttcgactactcgcaccgcaaagccgcactcattctgctcaccggctaccagactccggaggccttacgtcggacaggtaggacacgactcgagaactggcttcgcgaccgccacgcctacaacccaggcgccatcgtttcccgtgcgatggaagccgcgaacgctcagcacatcgtcgtgaacggacaacacctcgcggcggtgatggtcgcacgcatcgcccagcagatcctcgacatcgacgccgagttggccgatctcgacgacatgatcgaggaacggttcagccgacaccatcaggcctccgtgatccgcagtatgcccggattcggtccgttgctgggtgccgagctcgtcgcggccaccaacggggcgctggacagctttcccagcgctgacaggctcgctgccgtcgccggcctggcacccgtgcccaaggactccggccgcatcaccggcaacctcaaacgcccacgccgatacgatcgccgactgctccgcgtcttctatctggccgccaccaacagcatcaaaacctgtccggaatcacgggcctactacgaccgcaaacgcgccgagggcaaacaccacaggcaagccgtactttcgctcgcccgccgccgcgtcaacgtcctctgggccatgcatcgcgacaacaccacatacaagagcaccgcgaaaactgcggcttgacaatctcattgagaa

SEQ ID NO: 9928 - DNA, 1170 bp, unidentified
  source 1..1170: mol_type = unassigned DNA; note = element_f95b527
  misc_feature 1..2: note = core
  misc_feature 3..210: note = LE
  misc_feature 211..1164: note = CDS
  misc_feature 1165..1170: note = RE
  misc_feature 19..216: note = bridgeRNA
cttgtaatagcgaaatcgattatcgtcggtctgttccgaaaggaatgctctgccgcggacggccatccgcggcagagcggctggtgatcggatcgagcccaccctgagccgcctgtggctgcctcgtagcgtgatcgcaccagcgccttcatcggacccggatggttgccggaacaacttggttcgcttcacaaggcagggtcgacgaagatgacacagattagcacgatcacggccggaatcgatacgtcgaaagccaagctcgatatcgcaatcgacggccagaccacacgttggcaggtcgccaatgatttgcccggctggcggcgtcttgccgccgacctcatgaaggccggcgtcgcgcgcgtcggcatcgaggcgaccggcggctacgagcgcggcgtggtcgtccatctgcgggcggcgggcttcaccgttctcgtcctgcagccgatccaggttcgcgccttcgcacgcgtgcacttgcgccgggccaagaacgacgcgctcgatgcggcgttgatcgcggcctgtgcggctacgatcgaggcgccgcggatcgagcccgacgcgcgattggccgagctggcgggacatctgaccttcgtcgagcagatcgaagaagacatcgcgcgctgcaaggtgaggctcgaacatgtcgatgacccgcggctgcggcgcctggtcatcgccgacatcgcacggctcaaggcgcggcgcgcggccgagttgctgcggattgaaaaggagttgcgcaagcatcgcgatctcgcccatcgcctcgatctggtgctcagcgttcccggtatcggcgaacgcacggcgcttgcgatcatcatccgcatgcccgaactcggacgtgtcagccgcgaggaagccgcagcgcttgccggtcttgctccgttcgacgccgacagcggaacccacaaggctcagcgccacatcgcaggcggtcgaggacggctgcgccgttctctcttcgccgccgcgctgcccgccgccttccgctggaacaaggcgctgatcgctctctacagccgcctcatggcgcgcggaaaagcccacaatgccgccctcgtcgcatgcgcgaggaagctgctgatctatgctaataccgtcgtcgagcgtggtacgccttgggtcgaaagacccgccgcaacttaatggttg

SEQ ID NO: 9929 - DNA, 1583 bp, unidentified
  source 1..1583: mol_type = unassigned DNA; note = element_f96867e
  misc_feature 1..2: note = core
  misc_feature 3..248: note = LE
  misc_feature 249..1418: note = CDS
  misc_feature 1419..1583: note = RE
  misc_feature 6..226: note = bridgeRNA
ctcgcattatatagtcacgcccattctttacctgttctaaggtatagggtatgcttttgaagatgctgtggattggtttgtacctcctactgctcagacggtttcccgaaaggctccaaccacagcctctttgtcacaatgttaatcagttagataccgcatgacggtttatgtagaacgaggttacatcggcagagagctctgtggatccaatacagcatcaaatactttttaggaggatcatgcgtatgatctatgttggtatcgatgttgcaaaggataagcacgattgctgcatcctaggatcggaagccgataatctatatccggttttcaccattccgaataacaaggcaggctttgatgaactatatgagaagatcttctctgtaacagacgataagaccgaaataaaagtaggtcttgaagctaccggccactactcacttaatcttctcggatcgctcattgataaaggtctagccacctgtgttatcaacccgttacatacaaatctttacagaaaaggtctaagccttagaaagacgaaaacggataaagtcgatgccggttcaattgctatgatgttgatgaccgataagactctcaagccctactcagacacatcttaccacagtgaagaactcaagtcattaacccgctaccgttttgataaggttcaggaacgtgccaaactcaaaacatcagtgactcgtcttgtcaatatcctgttccccgaattggaaaaacttgttccaaatcttcacatgacttctgtgtacgctctgctctacgaatttcccggcgcatcatatattgccgccagtcatcttactcgtctaaaaaatgtcattgagacagcatccaaaggtcgctatggacgcgacatggcagttgccataagaaatgctgcaagagattctattggatctgtaatgactgcaaaatcaatggaattgaagcacaccatcaacttgattgaagttatgacagacgagattgatgaaatagaatcatccatcaaatccatcatggataccaacaattctccaatcatgacaatccctggaataaactaccgcatgggcgctatgatccttgcagaggtgggggatttttccagattcagcaatgcggatcagatacttgcatttgctggtctgtcaccatccacctatcagtcggggcaacttgattcctgtcattcgcacatggagaaacgaggttccaaatatctacgctatgctttgtttaatgccacgaagtttgtctgtcattgggacgagacattcagtacatacctttccaaaaagataagcgaaggtaaacactacaatgttgcggtttcccatgcagccaaaaagttgattcgcactatttatcgaatggaacttactggcgaaacataccgaaaataacgacttaacttcatatccttttctgtgagcacctatacagatgctctatttgtcatacgattttcaaggaactgcttacggcttcagtctgtctccagactatctaaaacatccaatggtgttttattcaaaaaaaaaaattactgttgacttttaatagttagt

SEQ ID NO: 9930 - DNA, 1222 bp, unidentified
  source 1..1222: mol_type = unassigned DNA; note = element_f96e85b
  misc_feature 1..2: note = core
  misc_feature 3..210: note = LE
  misc_feature 211..1212: note = CDS
  misc_feature 1213..1222: note = RE
  misc_feature 43..194: note = bridgeRNA
taccttagatttgatcgattgtatttaaccaagaagggtggtataattgaaaacctgccagcgatccatcgatagccttagtagagcactatcccgatatttggagctgacaggtttaaagaaccaagacctgtataagatattagtcttacatctgttaaggttattaggtaacggttcttttcaatcaatttatctaaatgctaaagtatgaaattcaagacatttatcggaatcgatgtgagtaaattgacacttgacatttgcctggttaccctttatggggaaatcgagaacttcaagatcgagaacaaggatctctccattgggagatttttcaggaggttggagaagagccgtgcctggggggaagtgctggtctgtgcagagcataccggccattattccaatcctttgaaggtgttctgcatgggcaacgggatcgctttgtggctggagagcggagccgagatcaggctgaggtcgggggtacagaggaggaaggacgacaagatcgattcagaacggattgccgactatgcgatgcagtatgtcgacaaggcaaggctgcagaccctggacgacaaggtgatcgaaaccgtaaaactgcttggcagtgagcgggatatgtatatcagggacagggctaagtacaagtcccagatcaatgattttgagggatacattgattcggatgtctacaaggccaaagcaaagaggcttaaaaggcaggtggagtccctgaccaaactcattgaccttctggaccagcagatagaggaacagctcatgggcagcgagaagctcgcaaggcaaaaggagatattggtttcagttggcggcgttggagacaaagtggccacggagaccatcatagcgacacagggctttaccaagttcggatcgggtagacagttttcatgccatgtgggcgttgccccgttttccttcgaatcgggaaccagccaaagatccaggcgcaaggtctcgaaccgggccaacaaggacctaaagacactcttccatatggcggcactatccgcgatcaggatgaagggggaactcagggactattttgaaaggaaagtagcggagggcaagaacaaaatgacggtcctaaatgcagtcagagccaaaataatcaaccggatattcgctctgataagggaagaccgaaaatatgaaaaatcctatatcaaacccgttgtttaatccataagaa

SEQ ID NO: 9931 - DNA, 1622 bp, unidentified
  source 1..1622: mol_type = unassigned DNA; note = element_f96f4c2
  misc_feature 1..2: note = core
  misc_feature 3..237: note = LE
  misc_feature 238..1509: note = CDS
  misc_feature 1510..1622: note = RE
  misc_feature 16..308: note = bridgeRNA
ctcctaatatatagttgtggggttaagttacctaacagccagctaggccttagccctcttgttgcttaagctgtacaatgataaggcattggtctgaccttgttctcctaggaccacttagcgtccgtaagaaagcccgtcagccagcttatcatttgcagctgttcgttttatgtaggtaggactgtcttgtacacgtccggttaataccacaggagatagaataagcaatggggaatgctggacaccatgcatattcaatgttggggaggaaccttatttatgatgtacaatgcagttggaattgatgcttctaaaggaaagagcaccgtttccatcatcagacccgcaggtgttgttgttaaacgtccttatgacgtaatgcacacagcaagtgggctgaatgacctaatctcttatatacagtcccttgaaggtgaaacaaaggctgtagtcgaatgtacaggtcgttatcatgaacctgttcttaaagttttttctgaagcaaatatttttatatcagcagtcaatcctaaactgatcaaaggccaaaatgacaatactctccgccatgttaaatctgaccctgctgattctcgcaagatagcacgttatgctcttgacaactgggcagaactgcgacagtattcaagcatggatactacacgagaacagttaaaaacactaaatgcacaattcgatttctttatgaagcagaaagtggctgcaaaagccaacctaatttctcttctcgacaatacatatcctggtgttaataagctctttaagagtcctgccagagaagacggtagtgagaagtgggtggactttgcatactctttttggcatgtagactgtgtccgtaaaataggtcttaaagcattcacagagcggtataaaagtttttgtaaaaagcacaaatacaacttccgtactggaaaggctcaggagctttttgaattatcacaggaacttgtagctgtatttccaaaagacaaaacctacaagatgataatccagcagagcatactacagcttaatcttgcatctgaacatcttgaaaaactgcgtaaggagatggatgatcttgcatctaccttgcctgaatacgagaccgtaatgagcatgtatggcgtaggtaaaacatatgggcctcagttaatagcagagttaggagatatcacccgttttacacatcgtgaagctataactgcatatgctggtgtggatccaggtgttgatgagtctgggcagcgtaagcgtaaaagtaatgctgcttcaaaatgtggtccatcaaggctcaggaagactctttttcagcttatgagcactatccttcagaataaaccagctaacgatccggtatatcaattccttgaccgaaaacgctctgaaggtaagaattactatgtctacatgactgctggggctaataagtttctccgtatttactatggcaaagtgaaagctcattacagagaactcgaagcacaatcccaagagcaataatcagttgtccaatatcaagtctttcaaaccggcaaatcatggcggtttgtttgtcattccatttttcatactttcaactttcttcaatttcctattgactttttattagtagg

SEQ ID NO: 9932 - DNA, 1543 bp, unidentified
  source 1..1543: mol_type = unassigned DNA; note = element_f97b2d2
  misc_feature 1: note = core
  misc_feature 2..495: note = LE
  misc_feature 496..1479: note = CDS
  misc_feature 1480..1543: note = RE
  misc_feature 13..242: note = bridgeRNA
ctacttgttgtatggacgcacggctcgggcctggccaggcttgggtcgaggtatccggcggggtcgctctcacagcggctgcccgcggctggttggcgtggctctctcatggcgtgcgcaccgccgggcaccgtgacgaggtgaggctcaaggggtctgcccagctcgaagtagcgctgccctcctcgtcgacagacagtcggttcgaggcgagaggtggagcagcgatggtgcatgtggtgattgggatggatccgcacaagcggtcggcgacgatcgaggtcctcgacggggcggagaaggtcctgtcgaccgggcggttcggtaccgaccgtgagggctaccgcgacctgctcgcggccggccggcggtggccggaccgggtgtgggcggtcgagggttgtgagggcgtgggccggcacctggcgcagcgcctggtcgccgacggcgaggcggtggtggacgtgccggccaagctgtcggcgcggggcccgggtgttctccaccgggcagggtcgtaagaccgacgcgaccgacgcgcactcggtggcggtggtggcgttgcgcacgccgggtctgcggccggtgcaggtcgatgacctgaccgtggcgcttcggctgctggtcgaccgccgtgacgagctcggcgcggcgcgcacgctcacggtgaaccggctgcaccggctgctggtcgagctgatcgcgggcggggcgaacaagttcttgtccgcgactcaggccaaggcgctgctcgcgaccgtgcgcccgcgggatgtggtgggcaagacccgccgccgcctcgccgcagagctggtcgtcgagctcgacggcatcgacaagcgcatcaaggtcgcgaacaaggaactgactgaactcgtcggggccaccggcagcaccctgctcgagctgcacgggatcggcccctccggcgcggcgcgactgctcggggacatcggggacgtgtcccggttcccgacccgagggcacttcgcctcgtggaacggcaccgccccgatcgacgcctcctccggtgagcagaaccgccaccggctctcccgcgccgggaaccggcggatcaaccgggtcctgcacatcatggcgatcgtgcagctgcgcaacgacaccgaaggacgggcctactaccggcgcaagatcgccgccggcaagaccgggatggaggcgatccgcgccctcaaacgccggctgtccgacatcgtctaccgccggctggtggacgaccagaaacggctccgacaggacgtgaaggtgacaggcccgggaggacactcgggggcggctactggctccagcgcggccgactccaaccccaacgtcgacgcttcggagaagtcacttcccggacccgccagcaccgaccctacgcccgccaccgccgagcctccacaccgttctccggcccgttcccgacgccctgtcaacgcgccgacccgcagccgacgtcaagcgcagtctgcttgacgacggcgaggaccggcgcacactcgacaggcgggaacaaccacttcttgacacagaggggagc

SEQ ID NO: 9933 - DNA, 1221 bp, unidentified
  source 1..1221: mol_type = unassigned DNA; note = element_f983033
  misc_feature 1..2: note = core
  misc_feature 3..208: note = LE
  misc_feature 209..1189: note = CDS
  misc_feature 1190..1221: note = RE
  misc_feature 22..203: note = bridgeRNA
cttgtatcttgccccactcaaaatggtcagacattatatcactgaccgccaaggataatagtatattgttcgccccctgagtgcctagacactgtaaagtagataaaactattatcctttcatcaataatctgaatggtatcaaagcgcgcacaacttgtgctgacgctgcattgacaaggatagaaaagatgatgaataacaaaataatggggattgatgtttctaagcataaactggattgtgccctgataaacgacctgaatatcggtaaaagccgtagcaaagtcgttcctaataccgatgacgggttttatgcgctgattcagtggctgaagaaaaagacggataatgaccttgctcatttgcatatcgtaatggaagccacaggagtttaccacgaagccgttgcctattttctcgctgaagcgggttttactctgtatgtggttaatcctgcggatgctgccaaattcacacaatcttgcaacgtacacaaaacggataaaacagacagtaaagcgcttgctcagtttggcatacagataatcttgcatggacatgtccgcccttggcagcccgaaccgaaggcgattagggagttgaaggcgttaatcagtcggctggatgcgcttgaagcagatttgcagcgggaacggaatcggatggaaaaagcagaggtctcatcggcttccatatcggttattcagtcgattgaagtcattcagcagaatttaatgactgaaattaaacgattaaagcagcatatcaataaccatatcgaccgccatccgcagctgaaacaagatgtgagattgttgaaaagtatccccggtgtcggcgaagtggttgcgctacgcatgacaacactttaccgcagtcgcacttttcaaaatgccggacagatgtcagcttatgtgggattggtgccgaggctaggtgaatcaggtctgtttcgcggacggtcgatgatatcgaagcgtggtaatccgattatacgagcaaagctgtatatgggagcagtcgtggcgaagcaatataatcccgatattcgcaggctgatagagcggttgctgactaatggaaagacgatgatgcaggcgctagtggcgggtatgcggcgcattgtgcatatttgctttggtgtgttgaaacatcagagggaatatcaacctcaaatcagcatgtgattgaggttgattttaggtggaagagatggtat

SEQ ID NO: 9934 - DNA, 1399 bp, unidentified
  source 1..1399: mol_type = unassigned DNA; note = element_f9868e0
  misc_feature 1..2: note = core
  misc_feature 3..64: note = LE
  misc_feature 65..1117: note = CDS
  misc_feature 1118..1399: note = RE
  misc_feature 1116..1387: note = bridgeRNA
tgttgggttggacggctcccaacggcatcgcgatgtgccaaggtgatgtcgttgtaggactcacatgagggagccggccgtggaacagattacccgtataggcatggacacgtcaaagaacgtttttcagctgcatggcgtggacgctgcagaaaggccggtcctgcgcaagaggctgacgcgccgggaaatgatacgatttttcgagaagctgcagccgaccgttgttgccatcgaagcttgcggcagcgcgcattattgggctcgcctccttggttcattcggccacgcggtgaagttgatcgcaccgcagttggcgaagccctacgtcaagcgcggcaagaacgacgcagcggatgcggaagctctgtgcgaggcaatgaaccgcccgtcgatgcgatttgtgccagcgaaggatgccgaacaacaggcggcgctcatgctcgtgggcatgcgcaccagacttatcaaaaaacgcacgcagcttgccaatgcgatccggggctttgctgcggaattcgggatcgccgcagcaacggggatgtgccgtatcgagccgctgcgcgagcgcatagcggcagaggagaccatacccgaacttgcgcgtgatttgtttgcgcttcacagacaggagtacgcgcagctccagcacgagatcgaacggatcgaggccaaggtcatggaatggcatcgcaatgatgaatgcagccagcggctcgcacggattcccggtgtcggcccgatcggcgcatccctgctaaagatgaaagccccagacccgcgcatgttcaagtctgggcgagacttcgccgcctggatcggtttgacgcccagagatcattcgactgccggaaaactcaggctcgggagcattacgcgagcaggcgatgaactattgcggagcacgctcgtggttggagcaaacgccgtcgttcagcatgcccggcgcaccggaggcaggaatgcttcgccttggctgctaggcttgctcgaacgcaacaagccgaagcttgttgcggttgcactcgccaacaagatcgcgcggatcgcatggaaactgatggtgagcggcgatcagtatcgaaaggcagatacgtcgttggcggtagctgcataaaagatcggcccggtacgatgagcgatggctgatgctgtcgtgctgagccgatgccggatcttgcaagagaagagcagatggtgcgatcgatcgatccgaggagtgtggcattccatcgggaccaatggccgttcgaggccgctgaggtgttaggaattcacgctgcggaaaccatcttggccagcgaccatgtgtggtcgcatctaaaggccggacatatggaagcaagcgatccgatcaaatcttcccgctcagcccttgtaagagggagctgtccacata

SEQ ID NO: 9935 - DNA, 1580 bp, unidentified
  source 1..1580: mol_type = unassigned DNA; note = element_f988f91
  misc_feature 1: note = core
  misc_feature 2..78: note = LE
  misc_feature 79..1149: note = CDS
  misc_feature 1150..1580: note = RE
  misc_feature 1344..1571: note = bridgeRNA
taatggaatggtccggccgtgctcccgccctgccagcaccgaatgctggcagggggcaccgaagacaaggagcacgccatgtcacagaaactcgacacttcgcccgccgtaatcggcatcgatatcggcaagaactcgttccacatcgttggccagaatcagcgcggtgccattgtactgcggcagaagtggtcgcgtggccaggtggaggcccggctcgccaatctgccgccgtgtcggatcggcatggagacctgcgtcggcgcgcatcacctcagtcgcacgctgaaggcgctcggtcatgacgcgcggctgatgccggcaaaatatgtgcgcccgtattccaagggtcaaaagaacgactatcgcgatgcagaagcaatcgcggaggcggtgcaacgcccaaccatgaagttcgtcgcgaccaagaccgccgaccagctcgacttgcaggcgctgcaccgggtgcgcgagcggtttgtcggtcagcgcacgggcatcatcaatcagatccgcgcgttcttgctggagcggggcatcgcggtgcggcaaggactgcgtttcctgcgggccgagttgccgggtatcctcgcgacgcgcaccgatgtgctctcgcctcgcatgttgcgcattatcgaggatctggcgggagactggcgccggctggatgagcgtatcggggggctatctagcgagatcgaaacgctggcccgtcaagatcaggcctgcgagcgactgatgacggtgcccggcattggcccgatcatctcgagcgcaatggtggccgcgatcggcaccggagacgtgttctcgaaaggccgcgacttcggcgcctggcttggactggtgccgaagcagatatcaaccggcgaccgcacgatcctcggcaatatatcaaggcgcggcaatcgctatttgcgcagtctgttcgttcaggccgcctgggtcgtgttggtcaagatcgggccaaagcattgggaccgctacgggctcaagtcgtggatcgaggccgcaaggaagcgcctacaccacaacgtgctggcgattgcgctcgccaacaagctcgcccggatcgcttgggcggttctcaacaagggacgcgccttcgagtgcgtcaagacggaggagacggcgtcccgacctgcttgatcctcgcgccgtgctcggggccgtcaaggcgcagcctggcagcggtagagcaagacgtcagaccagcgcgacggccagccttgacggtcccttgcgcgcggcccgtctgcatgcgcaggccgggacgaaggaacggccgccaggcacgaacaaaggaacagccgtaaaatgaggagctatcgatgatgtagtctacccgccgaggtctgccagaggatgagacgacgatggaggatcggtcttcccggcgcatgcgaacactggtgacccaaacggcccgtttgaggcctgtccggtaataacgtcgcctgcgcgctgatatccatgatggtcgggagcaagagctccaatcagagaccggatacattgatgcaagaccgctcaccgccaggtcgtcgaaatcttcttgctacgcacggccggaccataca

SEQ ID NO: 9936 - DNA, 1351 bp, unidentified
  source 1..1351: mol_type = unassigned DNA; note = element_f990f47
  misc_feature 1..2: note = core
  misc_feature 3..75: note = LE
  misc_feature 76..1104: note = CDS
  misc_feature 1105..1351: note = RE
  misc_feature 1122..1348: note = bridgeRNA
atgaaatggctacccccgccgccccctgtgatcgcccactaagctttcacagggggctcatcggagatcattgccatgaacaacgtagctatcgccgccatcgacctgggaaaacatacctttcacctgcatgcgcaagatgatcgtgggcacgaggtttgccgcaaaaaatttacacgggcggcgctcacgcagcatctgagcaatctcgccccctgcaccgtcgtgatggaagcctgtggcggcgcccacttcatggcgcaagaggtcgctaggctggggcatacacccaagttaattgcccctcatctggtacgcccttatgtgaaaagcaacaaaaacgacttcgctgacgccgaggcaatctgcgaagcagcaactcgcccgacgatgcgcttcgtgccccccaaaacccaggcccagcaggcgctggctatgctcaactcgacccgtgatgcgttcatcaaagaccgcaccgccaccgtcaaccggattcatgccgccctgctggaggtcggcgtcagcctggccccaggcttcaaatccatcaaagatctcccggcgctgcttgaagcgagttcattttcagaatgcatcaaaaagattctgacgacgctttatgagcacttcgactatctgaacgggcgaatcaaaaacctggacaaggacgtggagtgccaggccgctgaagatgatctggcggctcgtttgatgaccatgccctgtgtcggcccgatcacctccagcgccctggctgccgagctcggtgatggcaagcagttcaaatgcggacgaggttatgcagcctccatcggattggtgcccaaacaacattccacaggtgacaaaaccgtgcttttgggcatcagcaaacgcggcgatcgaaaccagcggcgcctgctcattcagtgcgcgcgggtttatttgataaatctggagcatcagaaaggcgctttggcggattgggtccgtcagctcttggcgtcccgccatcactccaatcttgtggtctgtgcattggccaacaagctggcacgaatcgcttgggcgattgcggcccaccactctgaattcgatgcggggccagccgcgatgaacgcctgaccccgctgtcacccgagcaccacctacctggttttgcgatgctggataactgatgacgtgaacggccaaccggcctgacgacaaccctgagctcctacacggctgaaaggccgtcaaattaattaggatcgttgggcatcgattctcatcgaggcgcggggccatcaccccactcagacgccggatagatgaaagcaagccaaacacgacatcaacaacagtattgcagaaaagggggtaaccatag

SEQ ID NO: 9937 - DNA, 1353 bp, unidentified
  source 1..1353: mol_type = unassigned DNA; note = element_f9955d0
  misc_feature 1..3: note = core
  misc_feature 4..86: note = LE
  misc_feature 87..1106: note = CDS
  misc_feature 1107..1353: note = RE
  misc_feature 1125..1340: note = bridgeRNA
ggatggtgtggatggctcctgcaccattagcgtcgtaatgcgctattctacaggtgttaggaactgctcgagaaaggagccaacccatgcaagttacaacaatcggcctagatttggcaaagaacgtttttcaagtccacggtatctacaaagatggtgaagttgcattcaaccgcgctttacgaagggcgcaagtcctgtcattttttgaacgccttgagccatgtttggttggcatagaggcgtgtggaacaagtcaccactgggcgcgtgaactgatcaagctggggcataacgtcaagttgatcccgccagtttacgtgaagccttatgttaagcggggcaaatctgatgctgttgatgcagcggccatttgtgaggcggttacgcgaccgacaatgcgatttgttgaggtgaaggcacccgaacaacaggcgatattggcggttcatcgaacccgtgacctcatcgttcggcaacgaactcaaacaatcaatatgctgcgggcgcaattggcagagtttggcattatcctgcctcaaggtatctatcacgctcttgcattcgccaagggttggctgaatggagaacaaccggatttgccagaagtttcgggcgaggtaatctttgaactctgcgaccaactactgttcttgcattcaaagaccctaggttactcccgtcagatgaaccagatcgccaagcgtgagaaacgcgttgcactgcttcgcacaattccgggtgttgggccaatcactgcttcagcaattgttgcaacggttggcagcggcaagcagttcaacaatggccgagagtttgccgcctggctgggattgacgccgatcaacaaatcaagtggtggaaaagaacgcctaggccatatctcgaagatgggcgatcaatacattcgacggttactggttctcggcatgacgtcccgtattagatcgattagagcggagccagagaagtttgatccttggtttgcagacatcctgtcacgcaagccaagcaaagtggcagcgattgccatggccaacaaaactgcccgtatgatctgggccgtactaatccggaatgagccgtacaaagtgagaaccgtttgaactcaacggcctggaaacaggagattgcaagaccaatgaagtgatggaactttgtcagccctaaaaccaagacgccccgtgctttgtcctgaacgcttgctgttcgatatgcggaatgggacttggttggtggaaaccatcagggccagcggccatgtgtgtcgcgcaaacaggccgaacacaagactgcttctgacaaatggtcgatcacaaaaaaaggacttgcaaaaagggagccatccacaca

SEQ ID NO: 9938 - DNA, 1507 bp, unidentified
  source 1..1507: mol_type = unassigned DNA; note = element_f99d297
  misc_feature 1..2: note = core
  misc_feature 3..204: note = LE
  misc_feature 205..1482: note = CDS
  misc_feature 1483..1507: note = RE
  misc_feature 6..204: note = bridgeRNA
ctgatggctctaccctcctgcattgaggtcttccccggggaacgcttccgttgctcgtccctcgaggactgatgtgagacggcgtccctgggggacggcctcggaggtccgacgtccacaagggtgtcgtcccacgaggactggtccatcagcacgacgccgtgcctccgtccgaacggcttccccatgacgaagggaggcgatgtgctcggagtcggcatcgattggtccgaggagttccatctcgtcgcgctgggccgccccggcgagggcgtcatcgatatctcgcgcgtggagcacagccccaccgcggtcgacacgttggtgggaaggatcgcagggctcgagcccgacccagccgaggtccgggtggtgatcgagacccgccacggcccgctcgtcgagcgtctcgtcgacgcgggctacgttgtcgtgccggtcaaccccgatctcgtcgcgagaaggcgcggcccggccaagaagaaggacgattccgaggacgcccgcatcgcgtgcctgatcgcgctcgaccggcacgagcggctgcgcccgctgatcccgcacgggcagatcgccggcgagctgcgctcgatcgctcgcgacgacgagcgtgcggcccgggacgagcgcaggctcggcaaccgcctgcgccaagatctcatcgcgaccttccccgcagcgcttcagatcggcggcgatgacctcggagcgccgacgttcctgcgcctgctggaacgttggccgaccgcgaacgccctggccggggcatcgagggaggagctggtggcgttcgcctgctcgtgccgccacggctggccggagcggttcgccgacaaggtcgcgacctcgctcgcagcggaccatttccggcccaaggagtacctcgtgcgggccaaggccgacacgatccgcctgggggcgacccagctgctcgcgatcgctcgccaacgcagggcttgggagcgacgcatgggtgagctcctgctcggggctccgcgacgaggacgggatcaccagccgaggggagatgggctggggaatggctttcctgacggcgagatctacctgagctttccgggcctcggtgaccgcctcgccgccaggatcgccggtgagatcggcgatcatcccgaacagttcgactcgccgagctcgctgcaatgctacgcgggcaaggcgccggtcacgcgccgctcgggcaagtccgagctcgtcgtggcgtgccggctcgcgcacaaccgcttcctgggcgccgccgtccagcagtgggcgttctgctcgctcaaacgctcgggctgggccagggagttctacgacgcgcagagagctcggggcaagggacaccatgccgcgctccgggcgctgggcaatcgccggctcgagatcctctggcactgcgtgcgaagaggcgtcccctacgacgaaacggtccacgtcgccaaccgcaaccgggcgctgggaaggacggccgaagccgcctgagacgctgggggttgacaaaggatgt

SEQ ID NO: 9939 - DNA, 1155 bp, unidentified
  source 1..1155: mol_type = unassigned DNA; note = element_f9aaa70
  misc_feature 1..2: note = core
  misc_feature 3..192: note = LE
  misc_feature 193..1143: note = CDS
  misc_feature 1144..1155: note = RE
  misc_feature 31..202: note = bridgeRNA
cttgtgtctttgaattttgctagagaagaagccctggggggtggggcatgccccaccccccagggtggagcggcacccgctaaacccttggccctggccggccgcggatgagcttgggaccgctccgccgtcttccacgcccgaacagttgcctggcacgaccgccgaacaggcaaggaagggatccgaagaatggcacttcttctcatatttgtcggcattgatgtaagcaaagacgctctcgatgtccatctcctgcccggcaacgcttcctggcgcgcggacaacaccgagcagggctggaaacaactgatggcgtggctgcaacgccacggcgagccggcccagatcaccatcgccctggaggccagcggtggcttcgagaagggctgcgcccgcaagttcgccgaggcgggctataccgtctccatcctcgatccggtacgcgtgcgccgcttcgccgaggccgccggtcagttcgccaagaccgacgccatcgacgcccgcgtcatcgcccgcttcgcccagaccttcaccaccaccccggcggtcttcgaccaagccaccgagcggctggctgagactgtgcgctggcgccgccagctgatcgagcagaagaccgcgctggacaatcaactgcgtggcttgaccagcacctccctgcgccgtgccacgcgcggcctgctgacccggctcgaaacgctgatcgagcggatcagcgacgagatcgccaagcagatccaggccaatccggcctggaccgccgtgaccaagccgatccactcgatcaagggagtcggcccggtcacggtcgccaccctgctggccgagttgcctgaactgggcaggctcgaccggcgaaagatcgccgcattggttggggtgtgcccttacacccgccaaagcggcaagagcgacgccaagcgcatgatccgcggtgggcgccttggactgcgcaacgcactctacatggccgcactaaccgccatgcgatatgatccaaccctcaaagccttctccgagcgcctcagagccgccggaaagccgggaaaggtcgctgtcgtcgctgtcatccacaaaatgctgacaattctcaacgctcgggtccgtgacgcactggcagccattcccaccaacacatgaacaagacagttg

SEQ ID NO: 9940 - DNA, 1354 bp, unidentified
  source 1..1354: mol_type = unassigned DNA; note = element_f9adc42
  misc_feature 1: note = core
  misc_feature 2..79: note = LE
  misc_feature 80..1093: note = CDS
  misc_feature 1094..1354: note = RE
  misc_feature 1096..1341: note = bridgeRNA
tgatggtgtggacgacctccacctgaccggctgttctggcggtgtcgtcatcagggacgtcacgtctaggagcggtatcatgcagaccatcgctgtcgtcgggctcgatctggcgaagactgttttccaggttcacggtgtcgccgcagacggcacggtcgtcctgaggaggcaactgcgacgaggtcaggtgctgggcttcttccagtcgatagggccatgcttggtcgggatcgaagcgtgcggctctgcccatcactgggcgcgggagttgatggcgatcggccatgaggtgcgtctcatgccaccagcatacgtgaaggcctacgtgaagcgcggcaagaccgacgccgcagatgctgaggcgatcgcggaggccgtcacccggccgaccatgcggtttgtggccgtgaagtcgaaggcgcagcaggcagtcttgatgctgcacaagacgagagacctgctcgttcgccagagaacgatgctgatcaatgcgctgcgcggccacctcggcgagtacggcataaccgcgcctcaaggcccagccggggtgcaggcggcgctgaaggctttgcgggaagaggatcaggacctgccagatctggcgcgtaccgcgctgggaggtctggcggaacagctcgaacaacttggtgcagagataggtcgcttggaacgtcggattctcgagtggcatcgacaggatgagacgagccggcggttggcgaccatcccaggcatcgggccgatcaccgccagcgccatggccgcaagcgcgccggatccgaaactcttccgctcgggaagacagttcgcggcctggctggggctaacgccgcgcgccaacagcagcggcggcaaggaacgtcagagcggcatcagcaagatgggcgacagctatctgcgacgcctgctggtcgtcggggcgacggccgtcctgcgaatggcccgccagcgagcacgggcgggctgggtcggcaatctgctcgagcgcaagaagcccaaagtcgccgccgtggccttggccaacaagacggcccgtatcgcatggaccctgatggtgcgacaggaggactacaggcccatagcggcatagagatcggcccggctcccaacaaggaccgacgccgtagacgaaagagtggtgagacgtgatgacgaaccggccgcagccggggacgggtgaaacccagggggtcagagcgcttcgagcgcgttgacgtgattagggagccggtccgcggacttcatcaaggccagcagcgcacacagctgcatcaacaggccgaacacatgactgcactcgaccgagcgccaacgtcgttttcactcttgcgtcttggaggtcgtccacaca

SEQ ID NO: 9941 - DNA, 1517 bp, unidentified
  source 1..1517: mol_type = unassigned DNA; note = element_f9b5899
  misc_feature 1: note = core
  misc_feature 2..226: note = LE
  misc_feature 227..1504: note = CDS
  misc_feature 1505..1517: note = RE
  misc_feature 14..236: note = bridgeRNA
ctacttgttgacttgtgctacggccggtgcctggccaggctcggttgaggtgaccggcgggacgctctctcattcggctgcccacctgtgagtaggtgtggctctcacattggcgtgcatcccgccggccgccgtggcgcggagaggctcaagaggggcgtgccctgctcgaagtagcgctgccctcctcgccggcaactgcccgcggagtggaggagagggagtcatgggacatgtgatcatcgggatggacccgcataagcggtcagcgacgatcgaggctatcgacgaccaggagaagatcctggcgcagggccgattcggcaccgaccgtgacggttacaaggcaatgctggccgccggccgcgggttcccggaccggacctgggctgtcgagggctgcggcggtatcggccggcacatcgcgcagcggctggtcgccgacggtgagtccgttgttgatgttccggcgaagctgtcggcgcgggcgcgggtgttcgccaccggccagggccgcaagaccgacgccaccgacgcccactcggtggccgtcgtggcgctgcggacccaggggctgcaggtcgttgcggcggacggcgcgaccgtcgcgctgcggctgctggctgatcgccgtgacggactgggccatgcccgcaccgatacggtcaacaggctgcaccggctgctgctggaattactgcccggcggggcgaagaagttcctgtccgcccagcaggcccgcgccctgctcgcgacggtgaggccacgtgatatcgccgggcggacccgccgccagctggcctgcgagctgatcagcgagctcgccgccatcgacaagaaaatcaaggccgccaacacccagctgagcggcctggtcgccgagaccggcagcagcctgcagcacctcaacggcatcggcccctcaggcgctgcccggctgctcggcgacgtcggtgacatcgcccgtttcgctgaccgcggccacttcgcctcctggaacggcaccgcgcccatcgacgcctcctccggcgagcagcagcgtcaccggctctcaagggccgggaaccggcgcatcaaccgggtgctgcacatcatggccatcgtgcagttgcgcaacgacaccgaaggccgcgcctactaccgccgcaagctggccgccggcaagaccagcatggaagccatccggtgcctcaagcgacggctctccgaccaggtataccggcagatgatcaacgatgcgcgggcatcagcaacgggcccgggaggacacacggggacggctactggctctagcgtggccggcttgcaccccagcgccggcacttcagagaagtcacttcccggacccgccacctgcgaccctacgccagcacgccgatccattctccaggttgctcccggcgcctccctttcacgccggaccgcagccgtcgtcaagcgccctctgcttgacgacggcgaggaccggcgcacacttgcgaggcgggaacaacgaccctcttgacatagaggggagc

SEQ ID NO: 9942 - DNA, 1434 bp, unidentified
  source 1..1434: mol_type = unassigned DNA; note = element_f9b6f8a
  misc_feature 1..2: note = core
  misc_feature 3..138: note = LE
  misc_feature 139..1158: note = CDS
  misc_feature 1159..1434: note = RE
  misc_feature 1195..1431: note = bridgeRNA
aaatggtatggacgcctcccatcttaaagggtgagtgagcggcgcagtttgtgaaggaagtggaccctccgagccgacggcatcaaagtgcctgaggtggaagggtttcagtcttcacaggcaaccggagggtccgagatgaatcgtatcgtggtgggagtagatatcgcaaagcgagtgtttcagctgcattgggtggagcctgagacgggggagattgtgacgctgcagcttaagcgggagaagtttttggagcattttgccaatcgttcgacctgtgtgatcggcatggaagcgtgcggcggagctcagcactgggcgcgatcgctacagaagctgggtcacgaggtgaaattgctgtcggcgcggatggtgaagccgttcgtcggcggtaacaagaatgatgtggcggatgcgcgcgggatctggacggcgatgcaacagccggggatcaaagtggtggcggtcaagagcgaagagcaacaagcggtgttggcgctgcatcggatgcgtgcgcaattggtgaagtttcgcaccgcgcagagcaacggtttgaggggattgctcacggagtacggtgaggtgatgccgcagggccgcgccgggatcaaacgagatatcccaggcgccttagggcgattatccgaacggttgccggcgatcgtgatcgacactttgcgcgaacaatacgcacgcctgggtgagcttgatgagcagattgatcaaatcgaacggcgattacgccaatggcagcggcaggatgcggcagtacagcgcatagcagcgatccctggggtagggttactcagtgcgactgcggcgatcgcgacgatgggcgatgcgaaggcctttaagtcggggcgcgagtttgcggcctggctggggttggtgccgaggcaaagtggcacggggggccgcgtgcgcttacttggtatcagcaagcgaggcgataaatatcttcgcacgttgctgatccacggcgctcgcgcggtgctgacgcacagcaaatcgccgcccgagtggttgagagaattagcgaagcgtcggccgaagaatgtggccgtcgtcgcgatggcgaacaagatggcacgcacgatctgggcgctaaccgcccatgaacgcgcgtatcaaagtgggtacgtgagtcggcccgcatagggttgcacgcacgattaattaaccgtcagcagaggcaggtacgctaacaggttgcgcaaggactacaccgtgtgatggtcaacaggtcggaccgtgacccgccaagcctgaatgttcgtccgagcttcgagctcatgaaggaactgaggcgcggatcagcgaaatccatcagggcccgcaggcttcggcctgcacaataggccggatataaacctgcagcctaatctgtcgctcatcacaccgagaagaccttgcaaccggggaggcgtccatata

SEQ ID NO: 9943 - DNA, 1461 bp, unidentified
  source 1..1461: mol_type = unassigned DNA; note = element_f9b923d
  misc_feature 1: note = core
  misc_feature 2..183: note = LE
  misc_feature 184..1446: note = CDS
  misc_feature 1447..1461: note = RE
  misc_feature 36..221: note = bridgeRNA
cccccccattaccgtcttcgtggccccgcaacggggttaccggccttcggagttggcatgactgcctccccttgtcgagtgcatggcctggggggtggtgtcaccagctccggaggcactgacagaccgctgattaggggcatgaccaccggcctttccccaggtcgggaggctcttcgtaatgtggatgtggcgatcagtgccgtggcagggccggacgagtacgaccggaggacactgcacgtgatcgacacccgcgacatcgacgtctacctcggcctggacgtgggcaagggcgaacaccacgccaccgccgtcaccccggccggcaagaaagccttcgacaagcggctgcccaacagcgagcccaaactccgtgaggtcttcgcgaaactgcaggccaagcacggcaccgtcctcgtggtcgtcgaccagccggccacgatcggggccctgccgctggccgtcgcccgcgacatgggctgccaggtcgcctatctgcccggcctcacgatgcggcggatagccgacctctaccccggcgaggccaagaccgacgcccgcgacgcattcatcatcgcggacgcagcccgcgccatgccgcacaccttgcgctcgctcgacctggacgacgccaccgtcgccgagctggagatgatcgtcggcttcgacgacgacctcgccgccgaagccacccgactgtccaaccggctccgcggcctgttcacccaggtccaccctcacctcgaacgcgtcctgggcccgcgcatgcagcaccccgccgtgctgaaactgctcagccagttcggctccccagcccagatccgcaaggccggacgccgaaggctgatcaccctgatccgccccaaggctcccaggatgacggaacggctgatcgacgaggtcttcaccgcactcgacgaacagacggtcatcgtcccgggcacggacgcagccgcgctgatcgtccccagcctggccgactcgctccaagcagtcctcgaccagcgcaaactcctcgctcaccggatcgaggaactcctggaggcccaccctctttcccaggtcctgatgtccatgcccggcatcggcatcaggaccggagcccgcatcctcatcgacgtcggcgacggcaccaacttcccgtccgccgcccacttggccgcctacgccggcctcgccccggcaacgagaagctcgggctcctcgatccgcggcgaacagccctcccgccggggaaacaagcagctcaagcgggctttcttcctctccgccttcgctgccctggccgacccgacctcccgcacctactacgacaagaagatcgcccagggaaagcaccacacccaagccctcctctgcctcgccagacgtcgggccgacgtgctcttcgccatgctccgcgacggcaccttctaccaacccccaaccccgatcaccccttgaccaaagtcatagggg

SEQ ID NO: 9944 - DNA, 1225 bp, unidentified
  source 1..1225: mol_type = unassigned DNA; note = element_f9c2f58
  misc_feature 1..2: note = core
  misc_feature 3..238: note = LE
  misc_feature 239..1210: note = CDS
  misc_feature 1211..1225: note = RE
  misc_feature 6..210: note = bridgeRNA
cttgtatctcgactttcgcctcccaagaggcgaaagttctcgactgatcatcgagggaaggtcttgaagcggagccgctcctagggcatcgagcccgtactgtagatgacgctctggccttccaaccccactcgacaagttcgaacggtatctagtgcccgtccctggcgtgagtacgcattgacaaggttgaactgagtgtagggtgatcgactttcgtagtttgaaggagaagatcatgtccgtctttgttggcgttgatgtcgccaaaaaatctttcgacattgccaccccgcttcccaacggcaagacgcgcaccaaagccaagctgtccaatgatcctggagggttcaagcagttctgcgactggcttgagcgccacgccgaaccaggcgcctggatccttatggaggccacaggcacctatcacgaagcattggccgagcattgtcacaaccaaggttatcgggtgtgcattctgaacccggcggtgatcgcgaaattcgctgacgtggagcttcggcgcgtcaaaaccgataaggctgacgccaaagtcattgctgcttatggccaacagaaggcggcctcgcttcgccagtgggagcccgagccacctgcacagcgccgtttgcgtgctctggtacggcgactggacgacctcaaggaaatgcgccagatggagcagaatcgtttggatgtcgcacaagatgcggtgcagcagtcgattcaagacgtcatcggacacatcaccgaagaactggaaaagaccaggaaggctatcgagcagacgatcgatgatgatccagacctgcgcaagcgacgtgatctgattacctcgattgatggtttgggtgacaccactgctacgttgctgctcgccgaactgggtgatccactgaaataccaaagcccttctgcgattgtcgcgttctcaggcctgaacccggtagtgcagcaatcgggagagttcataggccagagccctatctcgcgcacaggcgcctcgcggctacgtgcgggcttgtggatgtcaggcactgtctcgatcaggcataaccctgtcgtgaaggccctggcagagcggttgaacagccggcacaaagcctacaaacagatcgtttgcgcggcgatgcgcaagctgctgcacctggtttacggggtggtgaagtcggggataccgtttgaccccaaaatcgctcttgcagggtgagggtcaagacggtat

SEQ ID NO: 9945 - DNA, 1503 bp, unidentified
  source 1..1503: mol_type = unassigned DNA; note = element_f9c63e5
  misc_feature 1..2: note = core
  misc_feature 3..246: note = LE
  misc_feature 247..1482: note = CDS
  misc_feature 1483..1503: note = RE
  misc_feature 6..239: note = bridgeRNA
ctaatgggccttgtcgggccgtgaggaagactacggtccgtagccaccagcgggtgagcactccgagcctccgagccattgcgagttctgaggtcagaccgtgcccccgctggtcggccgggaggcctgactgctgatgggatggcgtgcccgccgggtagttgggcgtgagcacttgatccattagagagcgagccgcgccttccgcaggctgcgcatcatgattggacgagagcggaggggcgggtgctggtgctgttcatcggcgacgactgggctgaagaccaccacgacgtcgaaatccaggacgagacgggccgcaggctgggcaccgcgcggctgccggagggcgtggagggcatcgcgaaactgcactccctcatcgcgcgacacggcggcgaggacctggagccggggcaggtggtggtcgggatcgagaccgaccgcggcccgtgggtgcaggcgctgatcgcggccggctaccgcgtctacgcggtcaacccccgccaggcggcgcggttcaaggagcggtacggcacctcgggggccaagagcgacaagggcgacgcccacgcgttggccgacatggtccgcatcgacggcgaccagctgcggccggtcgccggggacagcgaccaggcccaggcagtcaaggtcgtcgcccgtggccaccagaccctgatctgggaacgcacccgcgcgttccagcgtctgcggagcacgctgcgcgagtacttcccgggcgcgttgaacgcctacgtgggtctggagctgaccagcaccgacgcgctggaactgctggtcaaggcgcccaccccggggcaggcgacgaagctgacgaagccgcagatcatcgcggtgctggcccgacatcgtcggcgcaaccgggaccagagggccgccgcgatccaggccggcctgcgcgagccgcagctcggcgtcgcggccccggtcgccgccgcctacgccgcggcggccaccgcgcacgcaagagtgctgatcgcgctgaacgagcagatagccgcaatggaagagcaggtgagcgcgcattttctcgcgcacccggacgctgagatctacctgtcgatgcccggcatcggcgagatcaccggcgcccgggtgctggccgagttcggggacgaccccacccgctacacctccgccaaggcccgcaagaactacgccggcacaagcccgatcacccgcgcctccggcaggactcacgccgtctatgcccgacacgcgcgcaacgaccgtctcgccgacgcccttcacaagcaggctttctccgccatcaacacctcgcccggcgcccgccgctactacgacaagcagcgcgcacgcgacgccggctacaaccccgccctgcgccagctcggcaaccgtctcgtcggcatcctccatggatgcctcaagacccgcagcctctacgacgaggccaccgcgtggtcacaccacgcaaccctcgccgcagccgcttgacatccctacgccatggggtgt

SEQ ID NO: 9946 - DNA, 1381 bp, unidentified
  source 1..1381: mol_type = unassigned DNA; note = element_f9c7e40
  misc_feature 1..2: note = core
  misc_feature 3..82: note = LE
  misc_feature 83..1102: note = CDS
  misc_feature 1103..1381: note = RE
  misc_feature 1151..1369: note = bridgeRNA
tgatggtgtggatggccccaccagcggcatcgcgttgtgccaaggtgggtctgggaaagcacacacctgaggggagccatccatggaccaacctaccaccatcggcctcgatctggccaagagtgtcttccaagttcacggagcggacactgaaggcgcggtcgtctgccgccgtcagctgcggcggtcgcaggttctggtcttctttgcccggctgggtccttgccttgttggcatagaagcctgcgctggggctcatcactgggcgcgggagctggcaggccttggccatgaagtccgtctcatgccgccagcctatgtgaagccctacgtgaagcggggcaaaaccgatgccgttgatgccgaggccatttgcgaagcggtgacacgtccaacgatgcgcttcgtgccggtgaagtcggcggaccggcaggcggccctgctcgatcacaaggcacgtgacttcctggttcggcagcggacgcaaatcgtaaacgcgatccgcgcgcagttgtgcgagttcgggatcgtcgtggcgaaggggatccataatgtcgatcgccttgtcgatgcagcccgcgacgtccccgatccagcgcgcccggcgctggatatgctggcccatcagctgtgcgacacgcaggcccgcatagaagaggtcaccgcgcggatcagcgagatgcaggccgaagacgcgctggcgcgtcggctcgcgacggtgccaggggtgggcacgatatcgtccagcgcgttcgcggcaaccacccccgatgtggcccctttccgcagcgcacgagactatgcggcgtggctcggcctgacgccgcaggctcattccagtggcgggaaagagaggctcggacggatctccaaggcaggcaatcggcacctgcgcaggctgctctacctcggcgccatggcccagatcggcgtgcggcgaggacgtcgagaggttgcatcaggccaggcgccagactggctcgaccggatgctcgcccgcaagcccgtgaaggtggtcgcgatcgcgctggccaaccgcatggcccggacggtctgggcgctgatcaggcggggcgacagctaccgcaccaccgcagcttgacacgagacaacagccaagtcggtcgcgaaccggctggcccagagatggtgaggcgcgagccgtgaggtgatggcacagggacggcaatacgcggaacgggacacccagttcggaccagagcacctcaaagtgcgtgccattgatcgggacccgtccgtcggctgacttcatcagggcgcgcagcagtgaaatcgctgcctatcagacgccgaatacatggccgcgaccgaccagaatgccagacccgaacaaagctcttgccaaggggccatccataca

SEQ ID NO: 9947 - DNA, 1180 bp, unidentified
  source 1..1180: mol_type = unassigned DNA; note = element_f9c9fc1
  misc_feature 1..2: note = core
  misc_feature 3..86: note = LE
  misc_feature 87..950: note = CDS
  misc_feature 951..1180: note = RE
  misc_feature 901..1168: note = bridgeRNA
tgatggtgtggatgcctcacccctgaaccggcatcgaagtatgccatagtggtgatgttgaaatcaccaaatgggaggaggcatccatgaatgaagttacaatgattggcgtggacttggcaaagtcagttttccaggcgcacggcgcgacggcagcgggcgaaccagtactccgaaagaaactgtcgcgcgggcagttcttgaaattcctgagcgagcagccaaattgcgtggctgcgatggaggcctgtgcctcgtcgcattactggggacgcgagatcatgaagctgggccacgacgtccgcctgatcccgctcatctatgtaaagccatttgtgaaacgccagaagaaggatgcgaatgacgcagaggccatcgccgaagcggcggtccggccaacgatgcgtttcgctccagttaaatcagctgagcaacaatcccggtcgatggtctttaagacgcgtgatttatttgtccgacagcacaatgcgatcatcaacgcgctgcgaggccacttgatggaatatggtatcatcgctccacccggacgaaattttgtgaagaagttggccgaacagatcgaagatccagagagtggcttgccattgattgtcactgaactcagccgcgtatatttggatcagctcagcacctgcagctacaaaattgtagtgatagaacgacgcctgaaggatgaagcgacggctgaccccgagacgatacgtttgcaaactgcaccgggcgttggcccagtgagtgctatggcgatcaaagcgttctctccgccgttggagggttttaaacgtggccgcgattttgcgacttggctcgggttggctcctgtccaaaaatccactggtggccgacaaatactgggccgaacgtcaaagatgggacagcgcgacatcctgttgcggcagcttgaagctgtaacgctcggtaagatgtgagaaggacattgaaacagtaagggcaaatgatcgactagatcgaggttagaaaaaccaggccttcccagagagcttcgcgctcgtgacattgatttggacctgaccttcgcatcgccataccggcccgcggcatgtgaaacgtcgcaaactgaggcctaacacatgaccgtacccgatcacatgttcaaactgttgaaaatatctcttgcatcaaacggggcatccacaca

SEQ ID NO: 9948 - DNA, 1641 bp, unidentified
  source 1..1641: mol_type = unassigned DNA; note = element_f9ccca3
  misc_feature 1..3: note = core
  misc_feature 4..277: note = LE
  misc_feature 278..1504: note = CDS
  misc_feature 1505..1641: note = RE
  misc_feature 13..297: note = bridgeRNA
actcctacaatatatttgtaggtagccccacggcatccagccgtgttgctattcaacttgttgcctaagctgtagaataagaacgtagtggccggacaccatttttcttggacttacacgtccgttaagcagtcagtcagccgccgttcttattcgcagcattcgatttacgcaggtagtcccaccgtaaagcggtgcgttcgtgttacccaggagattgaacaagcaataagtaaaaggcggaagccattgcaaattcaaactgggaggaaaacgaatgaccgtagttggaatcgatgtttctaagggtaagagtatggtagctgccatgaagcccggtggggagcttgttgcagcgccatatgaggtaaggcattcagatattgaactgtcacgtcttgcgttgaatgttctttgcatggagccggatacacgcgttgtaatggaagcaaccggcagataccacgaaccagtagcagcgctgcttcacagcgaaggaatctttgtaagcatcctgaacccattgcttattaagcaaagcggagcaggctctctgcgcaaagtaaaatccgacccgaaagatgccctaaaaattgccaagtatgggcttgacaactggtctacattgctggaatatactcctatggaagcaattagacagcaactcaagttgtgcgcacgtcaatgcgacttgtataataagaatattgtcatgctcacaaacaaccttatttctttgtctgacaagacctttccgggtgtaaacgagctgttctcaagccccgaaaaggcagacggacatttgaagtgggtggacttttaccgaagcttttggcattgcgactgcattaaccgtatgtcaccggatgcttttgaagagcgatacaagaaatggtgcaagagaaagggctaccattttagtactgatgcggcagatgctctctacgcagccagttgcagaccctataccacactgccgcgtgacaacaatgctaaattactggttacagttgccgccgaccagcttattgcactgcgcgaaaaccagtccaagcttgaagccgagatgctgaatctctgcaagcagctgccggagtacgagaccgttatggccatgtacggcgttggaaagtccacaggaccgcatctcatggctgaattgggtgatgttcgccgtttcctgcaccgcagttctattgtggcctttgcaggcgtagaccccggcgttgttggctccggcaagatgcagctttccagtgtgacaacttccaagcgcgggtcacctcagctgaggaaagcgctctttcaggtggtttctacttacgttaaatgcaaacccgaaaacgaagcggtttaccagttctacgccaaaaagcgtgacgaggggaagccgttcttcgtttgcactactgctgccgcgaacaagttcctgcgtatttactatgcccgcgttaaggagtgcctgaacgccactgaaagcgcaactcaggtcgaagaaggctaatctgtaatgctcattatgtcatttggctgcctccgatttttgagggagtcctgtttgctgtacacatttttactcggctatctgccgagtatttttttggactttttctgcaaaacctattgacttttatttgcagg

SEQ ID NO: 9949 - DNA, 1330 bp, unidentified
  source 1..1330: mol_type = unassigned DNA; note = element_f9cef77
  misc_feature 1..2: note = core
  misc_feature 3..71: note = LE
  misc_feature 72..1070: note = CDS
  misc_feature 1071..1330: note = RE
  misc_feature 1108..1317: note = bridgeRNA
ttatgggatggacgcctcccgcaagcgggccgagcatgttgccacagcgaccgggaagaggagttcatcacatgcaaatgctagcgatcgatttgggcaagcagtcttttcacatctacgggatcacttgcgaaggtgaggtaatctcgcggaaggttagcagggcaaagctggtcgatgcggtgaccagattgcaaccgcagtcggtcgcgatggaagcctgcgccagttcacaccactggggccgcgtcttcgaggcgctgagttatgccgttcgcctgatccatccgcgtttcgtcaagccattcgtgaagggatcgaagaatgatgcggttgatgccgaagccattttcgaagctgccaacaggccaaccatgcggttcgtgccgctgaagagcgtcgaacagcaggatctgcaagctctgcaccgaacgcgtgacagactgatcgtgcagcgcaccgcgttgatcaatcacactcgtggtcttttggccgagtatggcgtcgtcatgccggcaggtgcgtcccggttccggctgcaggtcgacaagatgatcgaaattgccgaactatcgcacttggcgaaggacctgttcctgaagctcgtcgaggagtatcgcgacttggatgccagagtatccactctggatgacatgctggttgatatctgccggagagacgatcgttgcaaacgtctgactacgctgccgggggtaggaccgattgtcgcaacctccctcatcgccgcaattgacgatggccgacacttcgcatccggccgagccctttctgcctggattggactggttccgcgacaatacacgaccggcggaaagccaaggctcggtggtatcgggaacagagccaatcattacctgaggcgccagctgatacatggtgcacggtctgcgttgctgcggatcgccaagcatgacgaccggcgttcaaaatgggcgcaggaactgcaatcaagggcaggccacaacaagacactcgtcgccatggcaaacaagactgctcgcatggcctgggcgatgttgcgaagcggcgaaagttacaaaatggcgtgaccgttcgggcagcgggccgcaatctgatcagaggttacaaatgcgaggtgaagacttgatggtgtaacggcacggaccgccgcttcacagcctgtaaggaacgatggccctcgaggccgctcatcttaaaaggcactgaaccgcgcggattcccatcatggccaggggcgaaaacacctcaatcaacaggccggatagattcacgcatccaatgccggagcaacatcgagaaactaccttgcgcgggaggcgtccataga

SEQ ID NO: 9950 - DNA, 1421 bp, unidentified
  source 1..1421: mol_type = unassigned DNA; note = element_f9cf488
  misc_feature 1..3: note = core
  misc_feature 4..201: note = LE
  misc_feature 202..1407: note = CDS
  misc_feature 1408..1421: note = RE
  misc_feature 1..192: note = bridgeRNA
ctccgtaagttgttggacggcccgggagggccgggtgtggctgaacgttctctgcctgcagtggctcgcaaggagtggccgcccggctctccggggcgccctggtcgctgattgaaatctgcggatcggtcgctgtttacggagatgacgacggggtgttcctcgggccgtcggcaagacgaacggctcgaggagaagcacgtgaccaagcagcagaggccctgcatctgggcgggcatcgacgtgggcaaagcccaccactgggcggcagcagtagacgagacaggctcgaccttatggtcgaagaagatcgacaacgacgagtcggcgatcctcaccgcgctcggcgagatcctcgacctggccgccgaggtccgctgggccgtggacatcaccggcacatcctccgcgctgctgctggccctgctggctgcccacggccagcaggccgtttacgtccctggtcgcacggtcaaccgcatgtccggcgcctatcgcggcgaagccaagacggacgcccgcgacgcctacgtcatcgccgaagcagcccgccaccgaagggacttcgcccgcgtcgacgtgcccgtccagctggccgccgaccttgctctcctgacctcccaccgttccgatctggtcgccgaccgggttcggatgctgaaccgcctcaaagacgtgctcaccggcatctttcctgctctggagcgggccttcgactactcgtcccacaagggcgccctggtcctcctgaccaggtatcaggctcccgccgtgatccgtcgccgcggccgagtccgcctcgccgcctggctcgccaaccggggcgtgcgtggcgccgacgcggtcgcggccaccgccctcgaagccgctcagtctcagcagaccgcactgcccaacgagaccgtcggggcccagatcgtcgctgacctggccactcaggtcctcgccttggaagaccacctcaagcgcatcgatcagcagattcgggagatcttccgcagccacccacaggccgagatcatagagtccttgccgggcatggggcccatcctgggcgccgagttcatcgtggccgcaggcgacctgtcggcgtacgccgacgccggccatctggcctcggcagccggtctggtgcccgttcctcgcgactccggacggcggaccgggaacctgcatcgccccaaacgctacagccgccgtctgcgcagggtgttctacttgtccgcgcaggccagcatcatgcgcgagggccccaaccgggacttctacctcaagaagcgcggtgagggcctgaagcacgtccaggccgtcatcgcggtggcccgacggaggatcgacgtcctatgggcgctgctgcgcgacaaccggctgttcacgcctgttcctcccgtcccgcaagcggcttgactcggtcattgaaa

SEQ ID NO: 9951 - DNA, 1727 bp, unidentified
  source 1..1727: mol_type = unassigned DNA; note = element_f9d172b
  misc_feature 1..3: note = core
  misc_feature 4..277: note = LE
  misc_feature 278..1447: note = CDS
  misc_feature 1448..1727: note = RE
  misc_feature 13..256: note = bridgeRNA
cttatataatgtatttaggttgttaaaggtaacctataaccctttttcgactgaatattatccagttttactgtataatattgttattagatagagtgtactcgttttctccttgggatttaatctcgtacttgaaagagtgagtcctctaatcttttaactgtttacgaataagttagatgttgacccttctagggtacttcgaatattccataaggcagtaacgttattagattttgaggtgtctatctaaaatatattttttgtgaggtattttatgttttatttaggtattgatattggtaaaaatactcatgtagcttctttaattgatgataagaaaaaagttatttttaaggctttttctttttcaaattccattgatggtgctgaaagtttaatctgtaaattagaaaatttcaaaaatgaacttgaaattggcatggaggctaccggtcattattggttatctatatactcatatctttgtgaaaaaaacttcactgttcgtgttatcaatccaatccaaaccgatggttggagacaaagtatagaaatcagaaagagaaaaactgatattattgattctcttttaatagccgatcttcttcgctatggagattttgttgaaacttctctttctaacgaggactatttgtctttgagaaatctttctagattcaggtcttatcttgtatcctcaattggtgatcttaaaagaaaaattattgctcttttagaccaagttttccctgaatatgcttcttcttttagtaatatttttggaaagacttctaaagaaatactttcaaatttctctactccttcagactttgaagatatcaattctgaagatttacaatcttttttagacagtgtttctaaaaagaagtacgcttctagaaaacttgaagaactttctaagaaagcttctaaatcttttggcgttaatttctgcatggattctttcagcttacaaatcaaaatgcttatcgagcaaatttcttttattcaaaatcaagttttagatgtcgaaaaagaaattgagattttacttaaaaaacttaattctccaattactaccattccaggtattggtgctgttaatgcagctacaatattaggcgagattggagatattaaaagattttctaacccttcaaaacttgttgcttacgcaggtcttgatgcaagtatttctcagtccggagaatttgaatccacttctaatcatatgactaaaagaggttctccataccttagacgtgctttgtttcaatctgctcttagagctgaattttatgacccggttttttctaattattatcaaaagaaaattagtgaaggcaagcatcatttagttgcaacaaacgctgttgctagaaaactttgtcatactatttttgccgttttaacaaaaaatgaaccttatcaaattcaaagatagtttttgcttaactctcaattaatttttgaaaaaggtactgtaaatgacgagcaatgcttatgcgtagcctttatcatttacaggttcttttgaaaaatttacaatctaaaaagcaaaaacgatttaattctaacctttgcttaatctagtttttcctaaattcagtttaggtctttttgtcatgcctttttttagaatctttttatttttctatctaatttttattcattacaatatctaatattttttacattatacctcttgacttttaatagttagt

SEQ ID NO: 9952 - DNA, 1150 bp, unidentified
  source 1..1150: mol_type = unassigned DNA; note = element_f9e15b6
  misc_feature 1..2: note = core
  misc_feature 3..202: note = LE
  misc_feature 203..1138: note = CDS
  misc_feature 1139..1150: note = RE
  misc_feature 12..208: note = bridgeRNA
cttgccttatggttttcccggctcatcaagcgatgatgagccggtacgggggagtggccactcccccgtaccggcagggtcggaccgggaaaatgctggccgcacagggccgagctagagtggggtcgccccgtcttttccaacagacctgaacggatacctgggccgcacggcccgtatggcaagcacaggattggaaaagatgaccgagattagcatcgggatcgacatctcaaaagaccatctggatgcctatcgcagccacgatggtgcggaaaagcgcttcaccaatgaccgttccggttgccggcggccggtggcctggatcggcgccgaagcagagcgcatcgtttatgagccgaccggacgctatcacaggctcgtggaagacatcctgagcaaagcgggacttccgctggcaaaggtaaacccgcggcaagccaagcgtttcacggaagccatcggcgtgctcgccaagagcgaccgcgtcgatgccagggttcttgcccaaatgggaagggtgctggatctgccttgccaccaatcggccagtgccgaaatggacgcgctcaaggaattatgcgtcatgcgccgggccctgctgaaggacaggactgccgccaagaatcgcgaaaagggcgcccgccttcccttgatcaagcgacagctcgccgcccgtctccgccacatcgaccgtcaggtcacggccatcgatgcggccatccgcgaacgcatcaaggccgatgccgctctcacggagcggttcgatatcctggtttccatccccggcatatccgagatcacggccgccgtcctgttggtcgaaatgcctgagctcggaaccctcgatggaaagcaggtcgccagcctcgccggcctggcgcccgtctcccgccaatccggcaaatggcaggggaaagccttcattcggggcggacgacgtggtccacgcgaagccctctatatgcccgctctcgtcgccatgcgcttcaatccggacttgaagcgcatgtacgaggcgctgcgcgcacgcggtaaaccgccaaaggtcgccatcaccgccgtcatgcgcaagcgggtgatcatcgccaatgccttgctgcgggatcaccgaccttgggcacctcatctggcttgaccatcacggata

SEQ ID NO: 9953 - DNA, 1572 bp, unidentified
  source 1..1572: mol_type = unassigned DNA; note = element_f9e3381
  misc_feature 1..2: note = core
  misc_feature 3..69: note = LE
  misc_feature 70..1101: note = CDS
  misc_feature 1102..1572: note = RE
  misc_feature 1343..1563: note = bridgeRNA
taatgggatggtccgccgcaggaacctctgccgtagggaggtgtagagtgcggagaaaggagacgtctcatggaaatacacgcgatagggattgatctgggcaagacgctattccacttggtgggtgtcgatgcatgcggaaccgtagtcgtgcgcaagaggtgttcgcgctcgcagttactggcgtacaccgcgaacgtacgcgtccagcggattggaatggaggcctgcagtggttcgcattttctagggcgagcgctgcgcgagcaaggccacgacgtgcgattgatgccggcacagtatgtcaagccttacgtgaagacgaacaagagtgattacatcgatgcggaggccatcgctgaagccgttcagcggcccaacatgcgttttgtgccgatcaagaccgaagagcaattggatctgcagaccgtacatcgtgtgcgcgagcgttgggtgatgcgaagaaccgctgtggtcaaccagatccgcggccttcttctggaacgtgggctgaccctgccgaaagggcgaagtcatgtaaatcaggcgcttcctgggatcctggccgatgccacgctgaggttgtcggactcctttcgggtgctgctggctcagctcgggctggaaatggatcaactcacggcacgcatcgaacagatggacgcggtgattcaccacacggcgacagagaatgaggcttgccggcgactcacctccattcccggcgtaggcccggtgaccgcgaccgctctggtcgcagcaattggcaacggaagtggatttcggagagggagagatctggcggcttgggtggggatggttccccgcgagtactccacgggcggtaagcagaagttgctcggtatcagcaaacggggcaacgtgtatcttcgaagattgttcgtccaaggagcgagaactgtgatgcagtaccgcagcaaacaggcagccggactgcgctgctggttagatcaactgatggcccgcactcaccagaatgtggcgattgtagcgctggcgaacaagttagtccggatggcctgggcggtcttatgcaagaacgagacgtatcgagctccggttctgctcgcgtcgacctgaacctggacgtgatgctgacgtgctccctttcccttcacgcctatgttccagaacggtcctcgccgtccagggttcgcttcgccgcgcaaaaccggcgcgccctggacggctccgggccgttccgaagattccctataagaagggaaagggagccaatgcaaacggcacttgggcgctggtcagtctccagtcgtcgtggccagagtttgcagtacggaagaatcatcggagaacaatgcattcatgccaggtctgctggcggataacttgagatggcacaacggtcgatccggcgctttccaaacctgatatcaacagaggcccttttgaggccatatagctaatagggaagagagcgggcggaacccatcatggccaggagtcgctgactccactaaaggccgaatacattggcgcagaccaaactgtctttctcggtttttcgcttgcaactctgcggcggaccataca

SEQ ID NO: 9954 - DNA, 1517 bp, unidentified
  source 1..1517: mol_type = unassigned DNA; note = element_f9e5b02
  misc_feature 1..4: note = core
  misc_feature 5..262: note = LE
  misc_feature 263..1507: note = CDS
  misc_feature 1508..1517: note = RE
ctcactggtgcaccatccttgtgtcggtgatcttggatggattgccgatgcacccgaggtgccgctgatctatcgccctgctcgctcgacgctgttgatgtccagcatgagttctgcggaggtcagtggttacccggggcgcgttgaccgtcgacagggctatgcgccaccgagcgccgctcagtgagcgaaccggcagtcgtgccccggaacctgcacataagggtgcctccccactgggcttagcagcgaggaggctgtcatgaagtctgcccgaaataccctgccaacggaacccgccaatgggctcacgtgtggaatcgactgggcctgcgatgatcacgcggtctcgatcgtcgatgccaaaggccgcgagatcacccgcaaaacgatcggtcacaacgccgttgggctgcgagatctgctcaccacactgcaacgcgccggtgtcagcgaagtcgccatcgaacgccccgacggtccggtcgtacacgccctgctcgacgctgggatcaccgtcgtggtgatcagccccaaccaactcaagaacctgcgcgggcgctacggatcggccggcaacaaagatgaccgcttcgacgcgttcgtcctggccgacaccttgcgcaccgaccggacccggctgcggcccctgcagcccgacagcccggccacggtggccctgcgccagacctgccgagcccgtaaaaatctggtcgctcaccgcgtggcgatcgccaaccagctgcgggctcatctgatgatcgtctttcccggcgcggtcgggctgttcgccgatatcgactcgccgatcagcctggcctttttggcccgctttgactgccaggaccgcgccgattggctctcggtcacccggatggccaactggctggccagcgtcggctacagcggccgcacccacgccagtgaactgcaccgacgactcaccgccgcgcctcgcggtgccgccggtatcgacggtgccaccatcaccgcgaccttcgtcgaggtgttgagcactgtgagcgcccagatcaaaaccctcgaccagagcatcgccgagcaactcgacgctcacgccgatactcatatcttcaccagcctgccacgctcgggcaccttccgtgccgcccgactgctcgccgaaatcggcgactgccgcgcacggttccccacacccgaatcgctggcgtgcctggccggagtcgccccctccacccgccaatccgggaaagtcaaacacgtcggattccgctgggctgcagacaaacagctccgcgacgccgtatgcgacttcgccggcgacagtcgtcgagccaacccctgggcggccgatctctacaaccgcgcccgagcccgcggacacgaccacccccacgccgtgcgcatcctcgcccgcgcctggctctacatcatctggcactgctggcacgacgaagtcgcctacgatcccacccaacacagggccctccaaaagctgatcaaccaagatcaacccagggcggcttgacacagggcaa

SEQ ID NO: 9955 - DNA, 1353 bp, unidentified
  source 1..1353: mol_type = unassigned DNA; note = element_f9f0b9a
  misc_feature 1..2: note = core
  misc_feature 3..86: note = LE
  misc_feature 87..1100: note = CDS
  misc_feature 1101..1353: note = RE
  misc_feature 1089..1343: note = bridgeRNA
tgatgatgtggacgcctccatcaccggcgtcagcaagcgtgatatggctttgctgttgcctcactggaaagcaaggagcatccgcaatgcaaattaccacgatcgggcttgatctggccaagaacgtttttcaggttcatggcattgatcaagaaggcaaggttggcgtccggcgaagccttcgccgttcggaggttgttgagtatttcgccaaacctccaccttgcctcgttggcattgaagcctgtgcaacggcgcatcactgggctcgcgagatcggtcgatttgggcacacggttcgtctgatgccgcctgcctatgtaaaaccctacgtcaaacgcaacaaaaatgacatcgccgatgccgaagccatttgcgaagcggtgacgaggccgaacatgcgcttcgttgccgtgaagacagcggctcaacaatcggttttgatgctgcatcgctgccgagttcttctggtccggcaacgaactatgctggccaatgcaattcgcgcgcatctggcagaattcggcatcgcgatgccgcaagggattcgtactttgctgacggccctgaatgtgccgaaaaatgaaatgaacaaccttcccgatctcgtccggattgcactcacccccatgacagcaagcctcatcgaactgggtcagcgcattaaagcactggagatcgagattgcgcgcgagcatcgcggcaacgagaccagtcgccgattggaaacgattcccggttttggtgtcatcacatcaacagcgatggcagcgacagtcgcagacccgacagccttcaaatctggccgtgaattcgccgcctggctcggccttacgccaagagagagttcttcggggggcaagcaacggctcggcagcatccaagatgggcgacgggtatcttcgaacgttgctcgttgtcggagcgacggcggtgatccgcttcgctcgcgaggaagggtccgccaagacggcgtgatccgtaagctcatggagaaaaagcctgcgaaggtcgtggcggttgcgctcgccaacaagatggcgcgcattgcctgggcgctgatgacgagaggagagatttaccgtgccatccccgcttgatctggcgtgggcttgaacgcgacaacgagttggtgagggaaagacacttgacgagaaccggtcaggggccggggttggaaagcccgaggggtgcagcgacttttgagcgcgctggagtgtttagggatccaatccgcggagattcatcagggccagcggctcaacacaccgcatcgaaggccgaacatatgactgcaaccgaccgtttttgagaatggtgccactttcgtcttgccaaggaggcgtccacata

SEQ ID NO: 9956 - DNA, 1505 bp, unidentified
  source 1..1505: mol_type = unassigned DNA; note = element_f9f87b5
  misc_feature 1..4: note = core
  misc_feature 5..250: note = LE
  misc_feature 251..1495: note = CDS
  misc_feature 1496..1505: note = RE
  misc_feature 30..213: note = bridgeRNA
ctcactggtgcaccatccttgcgtcggcggttccagatggatcgccgatgcacctctggtccccaccgggccatcgccatattcgctcgaccgttgaggtccaggatgagttctgcgaggcccggtggcccaggacacccagactggctacagggctgtgcgccagagagcgccgatcagtgagcgaccggctgcggtgtcccgggaccaacgggtgtttccccactggtgcaacagcgaggagacgacaatgagtgtcgcggaagaaccaaccggaacgccaccgtgcgccggtgtcgattgggccaaggatgatcacgccgtgtgcatcgtgggtgccgggggtgaagcgctccaacggttcatggtcagccacgaccgggccggtctgaaggacatggtccgccggttgcttcgctcgggagtcgacgaggttggcatcgaacgaccggacggcccaatcgtggacgcccttctgatggccggtttgaccgtgctggtcatctcgcccggtcaggtcaagagcctgcggtcccggtacggctctgccggcaacaaggacgaccggttcgatgcctacgtgctggccgatgtggtccgcaccgaccggcgccggctgcgcccgctcgagcgggacaccgcggcgaccaccgcgctgcgcaccaccgtccgcgcccgccgggacatcgtcatccaccgggtggctgtggccaaccagctgcgtgcgcacctgcagatcgtgttccctgctgccgcagggcttttcgacaaaatcgactccgacgtcagcctgcagttcctcgaacggttcagcacccaaggacaggcggactggctctccccgaagcggctgggctcgtggctggcctcgatcggctactccggcggcaccgaccccgctgtcatccatgcccggatcaccgcagcgcctcgcggtaccaccgggcctgacgccgaaatcctcgccggaacgacccacgcctacgtcgcggtactgcgcaccttgaacatgcagatccgaaccctcgcggccggcatcgccgagcaactcgacgtccacccggacgcgaagatcttcacctcgctgccacgctcgggaagcgtccgtgccgcccgcctgctggccgagatcggcgacgcccgagggagatttcccaccgcgagttcgctggcctgcctggctggagtggcgccctcgacccggcaatccggcaaggtcaaggccgtgaccttccgatggggcgccaacaaggagctccgagacgcgctctgcgacttcgccggcgactcccgacacagcaacccctgggccgcagccgtctacgccaaagccattgccaggaaatgcgaccaccagcacgccgtccgcatcctcgcccgcgcctgggcgggcatcatctggcggtgctggcaggacaacaccacctacgaccccgcgaaccacggcgccctccaacacctcctcaaccaagatcaacaaaccgtcgcagcttgacacatgtcaa

SEQ ID NO: 9957 - DNA, 1387 bp, unidentified
  source 1..1387: mol_type = unassigned DNA; note = element_f9ffbcd
  misc_feature 1..2: note = core
  misc_feature 3..90: note = LE
  misc_feature 91..1122: note = CDS
  misc_feature 1123..1387: note = RE
  misc_feature 1154..1375: note = bridgeRNA
tgatgctgtggacggctcctccacccggggcacgagagtgccatgaagggaggggtgcttgggcacccaatgattcggaggagccaggtcatgcagacgaccacgacgattggtctcgatatcgcgaagtcggtttttcaggttcacggcatcgatcgcgatggcaacgtagttgttcgccgtcagctcaagcggcgttatgttctgacgttctttgcgaagctgccgccgtgcctaattggcatcgaggcatgcgcgtcatcacattattggtcgcgcgagctccaggcgctcggtcacaccgtacggctgatgccaccggcctacgtcaagccttacgtcaaacgacacaagaacgatgcggctgacgcggaagcgatttgcgaagccgtaacgaggccaaacatgcggtttgtgccgaccaagacccccgagcagcaaagctgtttgacacttcatcgcacgcggcatctgttcattcgccagcagacggccatcatcaattccattcgtgcgcacctggccgagttcgggatcgtcgcgccggtcgggcgccgtggtgtcgagcaactgctcaaagtcgtcgccgatgccaacgacactcggctgccagagatagcccgggcctgcgtggctgccctcgggactcaattgctggcactaaaagcccaaatcctggccttcgatcgccgcatcatggcatggcaccgatcgaatgagaccagcaagcgacttgacgccatcccgggtgtcggcccagcgttggcgactgctctggtcgcgagcattggtgaacccaaggcgtttcgatcgggacgcgatttctcggcctggattgggctcgtcccgaagcagaactcgagcggtggcaaagacaaactcggcaacatcagcaagcaaggcgatcgctatctacgcagcttattcaccgccggtgcgctcgccgtgatccgctatgcgaagctccacggcaccgaacatcgaccatggcttacagcattgttggcgcggcggccaaccaaggtcgctgccatcgcgctcgccaacaagatcgctcgcatggcctgggcaatcatgacgaaaggggagcgctacaaggaacccgtcgcactagcggcgtgaaacagatcgcgccgggggggcggcgtgatgtgaacggttgggagggacgaacagcacgtaatgcagagccggtcgatccggcgatcaggacaacccactcgggccaccgcatggtcgaatgcgtggaattgaccgggacctgatccgcggagggcattatggccagcggtcatgtgaaccgcactaacaggccgaacacatggctactccgaccacctgctgctcgcgtgaaaaaagttcttgccaacccggagccgtccacaca

SEQ ID NO: 9958 - DNA, 1354 bp, unidentified
  source 1..1354: mol_type = unassigned DNA; note = element_fa04563
  misc_feature 1..2: note = core
  misc_feature 3..82: note = LE
  misc_feature 83..970: note = CDS
  misc_feature 971..1354: note = RE
  misc_feature 1113..1350: note = bridgeRNA
ttaatgagatggtcaacctgaccgagaagccctgcaggtttacgcttgcagggcttttctcgttttcggcggaggatctctcatgagcaccatgacgcttctcggtatcgatattggcaaacacaatttccacctgcatggccaggatgcccaaggtcatcaggtattgcgcaagaaaaccaaccgtggccagttgctcagcacattggcccagttacccgcctgcacggtggtgatggagtcatgcggtggtgcccactggctggctcgacagatcggtgttcagggccacgacgtgaagctgatcgccccgcagtacgtcaagccattcgtcaaaggcaacaaaaacgacttcattgatgccgaagcgatttgcgaggcggcgagccgccccgcgatgcgcttctgctcgatcaaaaccgcagagcagcaaacgctttcagctctgcatcgtgtccgcgaatccttgattggccatcgcaccgcggcgatcaatcagattcatggctttctgctggagttcgggatcagcctgcctattggtgccgctgcgctgcaccgtgtgccgacgttgcttgacgacccgcaacacccggttccattgagcttcaagaatttgctgatgcgtctctaccgccagattcaacaactggatcaggagatcaaggacatcgagtctgacctcaagcaacagttgaaagaggacgatgccggaagccgtttgcagagtatccctggcattggcccgatcactgccagcgccttgctggcggatataggggatgcctcgaactatcgcagcggacgtgatttctcggcttcgttagggttggtgccgaagcagcactcaaccggcggaaagacagtgctactggggattaccaaacgcggtgacaaacacatacgccggctactggtgcaaggtgcgcgggccatcatgcagcatatcgatgggcgggatgatgcgtaggggccttgggttcgagagttgctgacgcgtcgacactccaatatcgtcgcctgtgcgctggcgaacaaactggcgcgaatcgtgtgggcggtactggccaaaggcggccagtacgacccacatccgaacgcttgaacgtacagctttaccaccggcttttgcgacgtcactgactgatgacagtaaacggcaaacggcccgactgagaacctggcaataaaatcagcctcagaggctgagggttttttcaggacagtcgggagcggctactcatcgagggtcgagcgttgtggcgcaacgctcacaatgagcccggatacattagcgcaagccagctttaccgaaaacagcccatgaggttgcaggagatgggctgaccataca

SEQ ID NO: 9959 - DNA, 1210 bp, unidentified
  source 1..1210: mol_type = unassigned DNA; note = element_fa0580a
  misc_feature 1..2: note = core
  misc_feature 3..196: note = LE
  misc_feature 197..1177: note = CDS
  misc_feature 1178..1210: note = RE
  misc_feature 15..200: note = bridgeRNA
cttgaatctctcagtctgatatatttgattagctatcagtttatcaaggatcgtgtgaacttgtgttcgtcctgaggttaaaaaacctgttacgcagataaagtccatgctcctatttctcaagtgctgaatggtatcaaagtcctttccttgacggaaagaaggctgtatttacaagggtagtgaggagaatattatgatgattattggtattgatgtcagtaaaaataaattagattgtgctttaattgatcatctaaatgttgataaactcaaatttaaggtagtttctaattctgaagtgggttttattgctttaattgactggctttctaagcatgtaaaaacaacagtttcagactatcattgtgtgatggaagcgactggcgtttatcatgaacaacttgctgattgtttatttaatatgggcgcaaaggtatctattgttaaccctgcacacataaaatattatggaaaaagtttaggtgttcgctctaacaatgataaaaaagacagtgttgttatcgcacgttacgggttaactcaaaagccaatgatttggcaacctgaaactcatgaaataaaggtacttaaagcattagcttcacgtcttgatgcaatagaaaaagacatcttacgtgaaaaaaatcgttatgaaaaatcaagcatcaatccttgttcagataccatattagaatctattcaaaagatgttggctgtactgaatgaagagaaaactagtttggaaaggttgatagatacgcatattaatcaacacatatatttaaagactaactatgcccttttacagacaattcctggtgtagggcctgttgtttcaagatatatgctaattgtcataggcagtcgatcatttaagtcggcatcacaatgtgctgcatatattgggttagtgcctatacaaaatgagtctggctccagcctgaggggaaggagtaggatatctaaagcgggaaaccctgtcatcagagctaaactctatatggccgcaatttcagcactacaacacaatcctgatattaaaatacaaaaccagaggctgttaaaaaatggtaaatctaaaatgagtgcattatgcgcagcaatgagaaaactagtgcatatttgttttggtgtgataaagcatcaagaaccctatcaagttcaagccaattaatgatgacttgaacatggtactgagagatggtat

SEQ ID NO: 9960 - DNA, 1751 bp, unidentified
  source 1..1751: mol_type = unassigned DNA; note = element_fa07c46
  misc_feature 1..3: note = core
  misc_feature 4..70: note = LE
  misc_feature 71..1246: note = CDS
  misc_feature 1247..1751: note = RE
  misc_feature 1291..1514: note = bridgeRNA
aagatgctatgggcggcagcggggagcatatatccatcgctgcattgaccaaccccgatggagccccgtcatgaagaaacccaaaaccaagactgtgaacgatttcagccgatgtctcgacccgctggatatggacgcgacgttgatcgcggtgatcgagatgagtcaatcgagttggcttgttgcggggattgttcctggtatcgagcgccagccgctgaagaaactcgcgatcgacgaacacgcattactgaacctgttgaaccgctggcgggcggaggccgagaagcaaggccaccggatctcccgcatcgccgtcgcgttcgaggccggacacgacggcttctggctggcgcgctggctcgccgcgcagggcgtcgaggctcacgtgattcatgcatcgagcgtagcggtgacgcgcgaacatcgccgagcgaagaccgatcggctcgacacggagcttctcaaacgcgcctttctcggctggctgcgcggtgagcgcggacattgcaagatggtcgcggtgccgacgattgctgaggaagatgccaagcggccgagccgggagcgcgagacgctggttggcgaagcgagccggcttatcactcgggtcaagtcggcgttcgtccggctcggtatccgtggcttcaacccgaagctcaaggcggccgccacgcgcctcgaaaccttacgcacgcccgaaggtgagccgatcccgcccaacacgttggcggcgctcaggcgcgatctggagcgccaccagatcgtaaagaaacagatccgcgagatcgagcagacgcggctcgaacacctggcgcaagcgccggcgaaggggccgcatgccatggtgcgactgctggcccgcgtggtgggcatcggtgttgagacggccgacatgctggtgcaggaggtgctgtcgcggaacatgcgagatcggcgcgccgtggcacgttatgccggtctcactggctcgcccgatgaaagtggggcgaaacgccgagagaagggattggcccgttcgggtaacgcgcgcgtacggcgaggcatgatccagctggcatggcggttcctcatgttccagaaggacagtgcactggccgaatggtatcgacagcgaacggcgaatgccccgtcgatgcgcaagacgtttgtcgtggcgttggcgcgcaagctgctgatcgcgctctggcgcctcgcgcgcgacggcgtcgtgcccgaaggtgtgcggctgcgtgccgctgcatgatcgacaaaacccgctaacgttgtcgtcccaagttatgacttcgctcccgtccgctcgtgcgtgatgggctcgcgatgacggttcgaggtggtggggtcccgcgcttgtccctggtttcaatgccgccgttaagaatgggtccaccgcctcggagcttcgccgccgatgcgcatgcgtgcatcatggttcgggtcactacgacccaccggatacaaggttgcggcgcgagttcctcgtgccccgacagcgagctcccctcggacgtgtcatcccgaccacaacaagcgtgccgccgtgctcggggctgtcaaggcgcggcctggaaacgacggagcgtgcagccagggcggagcgacggccggccttgacagcccccctgcgcgcgccggccttcaacacgtgtgggtcgggccgaagaaacgggattccaagtcgaacaaagaaactggaaagaaggaagtggagaatgccctgaaataagtgcttgacttcgaaagccccatac

SEQ ID NO: 9961 - DNA, 1399 bp, unidentified
  source 1..1399: mol_type = unassigned DNA; note = element_fa12a2f
  misc_feature 1: note = core
  misc_feature 2..85: note = LE
  misc_feature 86..1123: note = CDS
  misc_feature 1124..1399: note = RE
  misc_feature 1175..1391: note = bridgeRNA
taatgggatggacgctctcaccctaacggcatctaggtgccaaaatggtgatgcataaaccacctaacgaatgggagcgtccgcgatgaaaattaccacaatcggccttgatcttgccaaagaagtttttcagattcacgctgttgatgagcgcggcaaattggcccagaaaaagaagctgaaacgaaaagagatgtcgacctattttgcaaatctggagccttgcctgattggcatggaagcctgcgggagttcccactactgggcccgcgggctcaagtcgatgggccatacggtcaaactgatggccccacaattcgtcaagccttatgtgaaaaccaacaaaaacgatgcagctgatgcagaagccatctgcgaggcggtcacacggccgagcatgcgattcgttggagcaaagaatgtttatcaacagacgatcctttgccttcatagagcgcgacgtttactcgtcacggctaagaccgctcaggccaaccagattcgtggcttgctggctgagtttggaatcgtggcccctcagggtatcaagaccttgagagaccgaatacccgatatccttgaggatgcggaaaacgaactgatcccggaaatgcgagagctgatcaaggtcatggacgaacggctcaaggacatgatcgaagatgttgaagcactggatttgaaaatcaagctcagcaatgagcggaacgaaatgattgctgagctcatgaagatccctggtattggccccctgactgcgagcgccatggtcgcgaccattggggacttcaaggaattcaagagtggacgagagctggctgcgtatctcggagttgtcccaagacaacactcctcaggaggaaagcagaatcttctgggtatcagcaagcggggagatggttaccttcgaacccttttgatccacggcgctcgggcggtaatccgctttgccgaaagtaggcaggagaagaacgattggcttgtgggcctcatcgggcgtcgcaacaagaatattgcagccgtggccctggccaacaaaaacatccggattatctgggcgatgatgacccgaagtgaaagatttgaccccgctcacatcagtcatgcaccgataccggcataagaacgggcaaccattaaactaaagacttcaacgacaaggagaagagctcagtaagattgcaaagggcgatcaactcagatggcggaacaggtaagaccggggatggctaaaccagggtattccacagcacttaaagtgcgcaggcgtgatttggtgtcatccagcgaattccattggggctaggccattaggccgtaaaaaagccggatgtatggctgcaacttcttcgttctaaaatctgaatttatctccttgcataccgagagcgtccatgta

SEQ ID NO: 9962 - DNA, 1493 bp, unidentified
  source 1..1493: mol_type = unassigned DNA; note = element_fa16e53
  misc_feature 1..2: note = core
  misc_feature 3..255: note = LE
  misc_feature 256..1443: note = CDS
  misc_feature 1444..1493: note = RE
  misc_feature 16..250: note = bridgeRNA
ctaatgggaggcaccaaggctggccggtcaggcagacttggcacctggtagccgctggtggatgagcactctccccgactggaccgattggccgagtcctgaggtcagaccgggcctccaccagcgtgccaggaggtctgcatcgctggtgggatgtcgtgcccggccgaggccgtgagcactcgaccattagtccgcgaacgaacttcctgcaggctgccgccggacgctcgacgatccaggaggtgcaggttgttgtacatcggagacgactgggccgaagaccaccacgacgtggaagtccaggacgaacacggccgagtcctgcgacgcgaacgattgccggaagggatagcggggatccgcggattcggggaactcgccggacggttcgccgacgacgacaccgagtgtgccgacgtgctggtgtgcatcgaaaccgaccgcggaccctgggtacaagcactgctggcagccggctacaccgtgttcagtgtcgatccgaaacaggctgcgcgacatcgggaaatcctcggaaactccggagccaagagcgacaagggagacgcgcacgccctcgccgacatgctccgcacccgccggcatcaacttcgtgaggttgccgcggactccgaggtcgcggaggcagtcaaggtcgtcgcccgcgcgcatcagacgttgatctgggaacgtacccgccacctgctgcggctgcgggtggcgttgcgggactacttccccgccgcgctcgaggcctacacaccgctcggacttacctccaccacggtgttggccctgctgaccaaggctcctgccccggacgcggccgccgcgctcaccttgcggcagatcaccgccgcgttgaagggccgccgtgacatcgagaccaaagcggcggcactccagcaggcgctgcgcgccgagcacctcggtcaacccggtccggtgagcgcggcatatgcggcaacggtgcggtcgctcgttgcgattctgacgacgttgaacaccgagatcgcgaacctcgagaaagacgtgtcgacgcattttggtgagcacccggacgctgggatcctgctcagccagcccggtctcggcgtcgttctcggtgcccgggtgcttgccgagttcggggacgccccgggccgatacgccagcgcaaaggcacgcaagaattacgccgggaccagtccgatcaccaggcagtccggcaaaacgcgagtggtctccgccaggcacgtacacaacgatcggcttgtcgatgccctgcacatgcaggcttcctgcgcgatcctgcacgatgagcaggtgcgtgtctactacgaccaactccgcgcccgcaacgtcagccacaacgccgctctgcggcaggtcggcaatcggctcgtcggcatccttcacggctgcctcaagacccacacgcactatgaccaggcgaccgcctagtcacatcgtcaacccatcatcgctgcttgacatccgagatccagggatgt

SEQ ID NO: 9963 - DNA, 1541 bp, unidentified
  source 1..1541: mol_type = unassigned DNA; note = element_fa19c46
  misc_feature 1..2: note = core
  misc_feature 3..246: note = LE
  misc_feature 247..1422: note = CDS
  misc_feature 1423..1541: note = RE
  misc_feature 3..223: note = bridgeRNA
cttgtattatagagtagtagtttttagtgtccctctccaaggacatatgctacaatgtagaggatgctgtggattggttgtttgctcctaccgcaagacggttccagaaaggctccaaccacagccctttacagaattgttaatcagttagataccgctccgacggtttatgtggaacaaggttacaagtgtaaagtgttctgtggatacagcagcatcacatcataaacttttggaggtatcatcatgatttgtgtgggtattgacgttgctaaggacaagcacgactgtttcattctcagctcggaaggcgaagtcttggcagatgtattcaccatccccaacaatgccgagggctttgacatccttttgcagaccattcgccgctgcgcccgtccgtcagacaaaataaaagtagggcttgaggctaccggacattacagctacaacattctcggattcttgcttgacaaaggtctgaccacctttgtcatcaatccgctgcacaccaatctctaccggaaaagcctgagccttcgcaaaaccaagactgatcgggtcgatgcacgaaccattgcaactatgctcatgtctgatgtggacctcaagtcctacacagacacatcatatcacaacgaggagctaaagtcactaacaagatacagatttgataaggttcaggaacgagcgaagctgagaacctccgtttcccgtcttgtctgtattctgtttccggaactggaaaagctggttccaaccctccatatggcctctgtttacgcacttctcagcgaatttccgggtgcgaagcagattgcgactgcccatctgacccgcctgacaaatcttttacacgagacctccaaaggccgctatgggcgggagagggctattaaaattcgggacgctgccagaaattccatcggctctgccatgcctgccaaatctctggaactgaagcacaccatccggctcattggggaactggatgcggagattgaagaaattgagaaagaaatcaattccatcatggacaaagtccattctcctattaccacgatccccggtatcggcaaccgcatggcagccatgattctggcggaggtcggcgacttctccaatttcgattccccagacaagattctggcttatgccggtctgtcaccttcaacctaccagtcagggcagcttaccaactgctattcccacatggagaaacgaggctccagatacctgcgctacgccattttcaacgccaccaaatatgtctgtatccatgatcccacctttgccgcctaccttgccaggaaacgggctgagggcaagcattataatgttgccgtctctcatgccgccaagaagcttgtacggctgatctacgccatggagaagtctcagcaaccatacaggtcagcagcataaccgcttccataaccttttctcagagcgccgtcaccgacgctctacttgtcataccgtttttgcagcagtgactttttctactgtgtcctcaaattgaggcttgacttttaatagttagt

SEQ ID NO: 9964 - DNA, 1486 bp, unidentified
  source 1..1486: mol_type = unassigned DNA; note = element_fa1ccb3
  misc_feature 1: note = core
  misc_feature 2..258: note = LE
  misc_feature 259..1458: note = CDS
  misc_feature 1459..1486: note = RE
  misc_feature 43..231: note = bridgeRNA
cgttaccttcttcgcagccctcggggtcgtgttggatcgggggtgctggcctgtcgggctcggtatggctctttgcccccagtcatcgatgatccggggggtgttgccgccgaggcccataggtggctggtgatcgctgataggggccgggccagacaccctgatcggggtgcggagtcgccttcgtaacgtggatgccgacatccagccaccgcggacagtccagcgtcccgttcgtagcggctagggaggtcatgggtgatccaagaacaccaccaggtcgaggtcttcgttggcctcgacgtcggcaagagcgagcaccacgcggtcgccctggaccgggccggaaaggtcctgttcgacaaggcgctgcccaacgatgaggcgaagctgcggacgatcctcgccgagctcgccgcgcacgggccggtgctggtggtcgtggaccagccggccacgatcggcgccctgcccgtggcggtcgcccgggacgccggcgccctggtgggatacctgcccgggctgtcgatgcggcggatcgcggacctgcacccaggccaggccaagaccgacgcccgcgacgcgctgatcatcgccgaggccgcccggacgatgccccacacgctgcgctcgatcgagctggccgacgagcaggtcgccgagctgaccatgctctgcgggttcgacgacgacctgcgcgggcagatcaccgccacctctaaccgcctgcgcgggctgctgacgcagatccaccccgccctcgagcgggtgctcggcaggcacctggaccacccggccgtgctggacctaatccagacctggcccaccccggccgacctcaaggccgccgggaccaagcggatcgcggcacgcctgaccaagcgcgccccgcgcctgggcaagcgtctggccgaggagatcaccgccgccctggccgagcagaccgtggtcgtcgccggcacctccgccgccgggatcgtgctgccccgcctggccgcccagctcgccgagctgcgcgcccagcgcgccgacgtcgccttgaaggtcgaggaactggtgcgtgaccaccctcttcaccaggtcctgatgtcgatgccgggcaacggcatcaggaccaccgcacggctcctgaccgagctcgccggcaaggacttcacctccgccgcccacctggcctcctacgccggcctggccccggtgacccgccgctcgggcacctccatccgcggcgagcacccgaaccgggccggcaacaaggtcctcaaacgcgcgctcttcctcgccgccttcgcctcgctcagcgaccccatctcccggcgctactacgaccgcaaacgcgccgagggcaagagacacaaccaggccctcatcgccctcgcccgccgccgctgtgacgtcctgttcgccatgctccgcgacggcaccctctacgacgcaccccaaccgctcgccgcttgacgaacccgatagggcccccccccccccc

SEQ ID NO: 9965 - DNA, 1175 bp, unidentified
  source 1..1175: mol_type = unassigned DNA; note = element_fa1eab3
  misc_feature 1: note = core
  misc_feature 2..195: note = LE
  misc_feature 196..1146: note = CDS
  misc_feature 1147..1175: note = RE
cattacagtcgaaattgtcagcccgggaccgtctcgggctacgattgaggcgcgcccagaacgggccgccgaccgggcgcccgcgcacggccgaacgtccctgccccgagagggcccgttgggtgctgccggcgcggggcgcgccgcccccgacggctgataggaaagtgccgggcaggtgccgcggctggtaatgtgagtgccgagggggaggccatccggtcgaacgactaccggaaggataccaccgtgaaagcgccatcgaccaggcccgcggccgtgctcggcctggacgtcggcaagtcgtcgcactgggcctgcctgatcgaccgcgacggggaggtgctggccagcgcccccgtccgcaacagggaggccgagctcgacgcgctgttcgcctccgcgcccgccggcacgctcgtcgtcgtcgaccagttccgcaacatagggtccctcgccgtgaggcgggcccgcgccgcggggctcggggtcgcctacctgcccgggctcgccgccagccgcgccgcgggcctgttcgccggcgaggccaagaccgacgagcgcgacgccgcggtgatcgcgcggaccgccctgggcgtgctggactccctgtcgggggtcccgggccgcggcgaggccctcgaggccgcccgcgccctctcgtcgcagcgcgaccacgtcgtcgcctgcgcgaccagggacaagaaccgcctgcgcgcggtgctgctcgagtcctgcccggccctcgaggccgcggtcgacctgtcggaccggcggtggctggagctgctcaccgtgcccggcatcggcccgaggaccgcggcgcagctcgcggtgtcggtcgacatcgggaggttcccggaccacgaccacctggcctcgtactgcggcatagccccgagggtgaggagctccggcacgtcggtgaggtcggtcagggcgtccaggcgcggcgacgcgaggctcaagtccctgctgatcttctcgtgcaacagcctggtgaggtcctcggggcgctacggcgagtactaccgggcctgcagggcacggggcatggggcacgggcgggcgctcaaggccgtcgcgaggaagcggctcagggcgatatacgccgtgatgcgcgaccgggtgccctaccgggagtagccccgacggttgacaaaactataggaaca

SEQ ID NO: 9966 - DNA, 1520 bp, unidentified
  source 1..1520: mol_type = unassigned DNA; note = element_fa1edda
  misc_feature 1..4: note = core
  misc_feature 5..253: note = LE
  misc_feature 254..1495: note = CDS
  misc_feature 1496..1520: note = RE
ctcactggtgcaccatcctcaggtcggtagttccagacggactgctgatgcacctctggtccccaccgggccatcgccacgagcgcttgaccgctgtcgaggtccagcatgagttctgcgaggtccggtggcccaggacacccggaccggctacagggctgtgcgccgatgagcgccgatcagtgagcgaccggctgtggggtcccgggaccaccgggtgttctctcactgctggaacagcgaggaaacaatcatgagtgttacccctgaggcaggttcggcgcgagtgtgcgcgggcctggattgggccaaggacgatcacgcggtctgcatcatcgacgcagacggccaggtgctgcaccggttcaccatcgagcacaccgccgccgggctcaagcagctggtcaggcgcttgctcgcggccggtgtcgaggagatcggtatcgaacgcggtgatggaccggtggtccaggctctgctgcaggccgagctcatcgtgctggtgatcagccccaaccaggtcaagaacctgcgttcgcgttacggatccgcgggcaacaaggacgaccggttcgacgcctacgtgctggccgacgtggtccgaaccgaccggcgccgactgaccccgctgacccgatccagcaccgccactcgagcgctgcgttccagcgtcagggcccgacgagacctgctcgcccaccgtgtcgccgtcgcgaaccagctccgggcgcacctgcagagcgtgtttcccggtgccgcaggcctgttcgcgtcgatcgactccaccatcagcctggccttcatcgagcgctaccccacccaggccaaagccgactggctctcccccacccgactcggccgctggctgtcctcgatgggctacagcggccgcaccagccccgacgtcatgcacgctcgactgctggcagcaccccgagggaccaccgacaccgacgctgaagtccacgcgcacaccacgctggcgttcgtagccgtcctgcacgtcctcacgacccagatcgacaccctcgaagacaccatcagcaaccaactccacatccaccccgacgcccacatcgtcacctcgctgccccgttccgggatgctgcgtgcagcgcgcctgctggccgaaatcggcgacgcacgcggccgattccccaccgccgactcgctgacatgcctggccggtgtcgcaccctcgacccgccagtccggcaaggtcaaagccgtcaccttccgatggtcggccgaccaccaactgcgcgacgccctgtgcgacttcgccggcgactcccgccacgccaacccctgggccgcggaccagtacaaccgcgccagagcccgaggacacaaccacccccacgccgtacgaatcctcgcccgggcctgggcaaacatcatctggaaatgctggcaagacggcgtcgcctacgaccccgcccgccacaacgcactccaacgcgtcctccacgaacacgccgcgaaagccgcctgaaacagccaaggttgacacagggcaa

SEQ ID NO: 9967 - DNA, 1561 bp, unidentified
  source 1..1561: mol_type = unassigned DNA; note = element_fa1fbb9
  misc_feature 1..2: note = core
  misc_feature 3..264: note = LE
  misc_feature 265..1473: note = CDS
  misc_feature 1474..1561: note = RE
  misc_feature 11..240: note = bridgeRNA
ctcgtatattaatattgtcagatacattctgactggttattcctttaaaccttctttttggtttaaacttgtagtaagcagatagaggtcgtagttttcctccttgaagccttgtcttcctcaaaaagactgacgcctcttctcttgcgacagtatatgaatgagctagatagaacctggtttctgaatatctaacgaggctatatcgtccaagagcagagaggataaccgctatctgacaaatccttgaaaggatctgattgaatgttttttctcggtattgatattggtaagcaacaccatgaagttggagtgattgatcaacacggaaaatcgatcggaaaaaccatccgtatctccaataccaaatttggcagtgaacaactgcttgctttcttcaataaacacgcgttacttccagaaaacaccatggtcggaatggaagccactggtcattactggctgtccatctacactttcgtgcataagctaggctttcataccactgttttcaatccaatacagtccgatgtattacgcgatttttacattcggaaaacaaaaactgatacgattgatgctttattgatcgcccaagtcattcgattggacttgcctgataaaaccgaacttcccgcagaagatattttccgattgaaacagctggaacgattccgctatggtttagtggatcggtgttctgacttaaaaagaaaaattcttgcttgtttagatcaggtctttcctgaatacgatcagattttttcggatgtgtttggttgttcttccacgcaagtcttactaaattctcctattccagaagatcttcttgagattgatgccgaacgtctcattgaaaccatcaataccgcaagtgagaaacggttaggaatcgctcgctcagaagaaaaagtgctgaaattgaaagaagctgcggcacattcttttggcatttcaattgcttctgatgtcttcaagttagagattcaaatcatgttggaacagattcagttgcttgattctcaaatcaagatcattgaagcagaaattcaagaaatcgtttcaaaacaagaaaactatttgacgaccattacagggattggtgacattactgccgctgtcctcatggcagaagtcggggatatcaaacgttttgaacgccccaatcagctccttgcttttgctggactggatgcctctgttcatcagtctggagattttacaggaaccaaaaacagactttctaagcgtggttctccttatcttagaagagccatttggcaagctgcttttgtcgccgcatttaaagatcctgccctttccttgtattatcaaaaattgagaaaacgaggaaagtcacatggaaccgccattggtgcagttgccagaaaactcgtgaatatcatttttgccgtttggacacaaaacaaaccttacgaagttcattttcccgaagatatctccgaaaaataaatttttcattcgatttttggaggtctatttggtgtgttttcttaaagataaaagaaattcctttttcactttactaattcatagctag

SEQ ID NO: 9968 - DNA, 1296 bp, unidentified
  source 1..1296: mol_type = unassigned DNA; note = element_fa2508b
  misc_feature 1: note = core
  misc_feature 2..186: note = LE
  misc_feature 187..1179: note = CDS
  misc_feature 1180..1296: note = RE
  misc_feature 34..201: note = bridgeRNA
tcttaagtttgattctcattaaatcgttatctaaatcagaaagaacaaaagagaggattaaggttatgatatacattgaagctcagacttcgtcaacattgataatcccctctcttttactatctcaaccacgttcagttctgtgagacctggatctcgtttttaagttgttgtgagtaggatagtatgctctttcataaatcaattcttatgaataaatataaagaaacttatggagttgacatcagtaaagatgtttttgatgtctatggtagccttagcggtcaccatcagtttaacaatgatgagtatggttttaaaaagtttcttaaagtactatcaaagaactcattagttgctatggaggctaccggttattatcattaccggcttgcacagtttctctacaaaaatacagtagtagtatcagtcatcaatcctttgtcgatcaagcggttcatacagatgaagctggctaaggtaaagacggacaagagtgatgctaaggcaatatgtgagtatgcaaagaccaacaagatccctatttataatgcgcttaccgaagtacagagtgaatgcctgcagctgttcagactgttggacacttatttgaagcagcgaactgcggtgaaggacaagatccatggagaagaagctctgggggttccttcaaagttcgtttacaggtctttgaagcgccaaagaaaacagcttgacaaggaagttaaagccatagaggaaaagattctatccttagtaaaaaaagaccaagagcagcagctcacacttcttacttcagtaccaggcataggacagaaaacagccctattcctgattgtaattaccgatggcttctctaaatttgaaacggcctcacagctttgtagctatgtggggatcactcccactacaagagagtctggcagcagcgtaagaggtaaggcgcgaatcagtaaggtaggaaacagaaagctgcgaaatttgttgtttctatgtgcctttaatgcctgtaagcataataagggatgcagagaaatttacgagcgaatcgtaaacaagggaaagagcaaaaagttagcactgattgcagtggccaacaagctactaaaacaatgctttgctatagctaaatcaggactaccgtatgatgaaacatacgtgtctatattgcagaagtaaatagcacacaatgaaaggaacaaaaaaagctcatagaatccataaatgaaatctgtgagcctagaataataatgtctaaaattaatgaagaaaagagttgttttttacctcagttct

SEQ ID NO: 9969 - DNA, 1169 bp, unidentified
  source 1..1169: mol_type = unassigned DNA; note = element_fa2b28e
  misc_feature 1..2: note = core
  misc_feature 3..221: note = LE
  misc_feature 222..1157: note = CDS
  misc_feature 1158..1169: note = RE
  misc_feature 13..227: note = bridgeRNA
cttgtcttatgatttttcccggcttttctgcgaagaagagccactgacagccgccttccacgcggcggtcagtggcggtggtcggatcggtagggggttggtcatgaaccgcaaggaacatggaccgtgttagagtgtgatcggccaccgtcttcgctcaaggcctgaacggatacgcagcagcttttgggctctgcatgacaagcataggacacgcgaagatgatgaatgatagcatcggtatcgatatttcaaaaggccgtctcgacgcctttcgcctgagtgacagggcgcatcgggctttcgccaacacacaggcaggctttgacgacctgcggcgatggcttggcgatagcccgatcagccggattgtctatgaggctaccggtccttatcacggcgcctttgaatgcgcgctcgcttctgatcttccgctcgtcaaggtcaacccgctgcaggcgcgacggtttgcccaggcacgcggcagccgcgccaagaccgatcgcgtcgatgcgcgcatgctggcgctgatgggggatgcatttgaccttcagccagacccgccagtggaggaaaccgatcatgaactcaaggagttgcagatcgagcgcaccgctctcgtcagggaccgcacacggctgctcaaccgcatcaagacgcaaacgctttccctgacgaagcggcactcaaaggcgcgcatcgcccagatcgagcgccagctcgcggcaatccaggacgagatcgaaacgcgcctgcgcgcggatgacggcaaggcgagaaagcgcgacatcctcacctccatccccggcatcggtccggtgacggcgtcaacgatcctgatcgaatgccccgagatcggcatgcttggccgaaagcagatcgccagccttgcgggtttggcgcccatgacccgacaatcgggccaatggcgcggcaaggccttcattcagggtggacgaaagttcctgcgcgacgccctctatatgcccgccctcgtcgccatgcgcttcaacacgcagatgagggcaaaatacgaggcgctgaaaggcgccggaaaacccgccaaagtcgccctgacagcaatcatgcgaaagcttatcgaactggcaaacgcactcatccgcgacgacagaaaatgggcgcaaatgagggcttgagcaaaacggata

SEQ ID NO: 9970 - DNA, 1223 bp, unidentified
  source 1..1223: mol_type = unassigned DNA; note = element_fa38df8
  misc_feature 1..2: note = core
  misc_feature 3..210: note = LE
  misc_feature 211..1176: note = CDS
  misc_feature 1177..1223: note = RE
  misc_feature 36..200: note = bridgeRNA
gtcgtacgtttgtagttagttaaacaattgacttatttttacagtatcgagcatggattaaggccgaaatttcgttggttttataaaccgataacaacgttccgtccccatgctttacatctcaaaaccggacagttcgttaggccaagtagagcccgtgtgtgcgacgatggtttagaagatgtagttttcacttaaattctttttattatggtttacatcggtatcgacatcagcaagagtaatttcgttgcagcttacccgtcaacgaacggctaccgtaccaagacttatccgaacacgaccgcaggtgttcgcaagttcatcgttacgctctccgtcactgagcatcactgcgtcatggaggcaaccggtaattacggttttctgctgctgtacctgctgtatcagagcggtattgccgtcagtttggtaaatcctaaacagatcaagcatttttcccggatgatgatggctgtcaccaagaccgacgaaaaagacgcctgcatgatcgccatgtacggggagaaaatgaatcctcccatctacaaaatgccctcgcaggctatcttactgctcaaacagaaaaagaccgttatccgtcagtttcgtaaacaactcgtcgcatcgaagaacctgcgtgaatcgctcgtcgtactaccttatcgggacaaagcctgtttgcgtacactggacaaggccatcgacttcttaaccaagcaaatcgagcaactcgaagcggaactggcagacatcgcatcatccgagttcgataagcaactaaaagccctgacatccatcaaagggataggcattacgctcgctacggcactcatccttaccaccggaggatttacctacttcgacaatgcaaagcaactgtcacgcttcatcggaatatgtcccacctatcaacaatccggaacatccgtaaatatcaaaggacatataaaccgaaatggcgatgaacacctacgatccttgctctatatcgcctcgtggactgcattgcgttacaatactgcttgcaaggaatgttacgtccgactaaaagccaatggtaaaccgtctaaagtagctctgatcgcggtggctaacaaactcgtcagacaagcttttgctattgccactaccgactcaacctatattgacgggttggtctcgactaaaaaataataccctactcatttttttatctttttacttgttttttaatacagttc

SEQ ID NO: 9971 - DNA, 1634 bp, unidentified
  source 1..1634: mol_type = unassigned DNA; note = element_fa46090
  misc_feature 1..2: note = core
  misc_feature 3..99: note = LE
  misc_feature 100..1290: note = CDS
  misc_feature 1291..1634: note = RE
  misc_feature 1346..1583: note = bridgeRNA
agacatgatgttttgacctgcccgtcctcaacgatcgtgggttatcgttggggatgggtaagcaccccttaaacagagccacattgaggagggcaggtcatgagccagtttaacgctgaatccacttcaattcacaccgtcggcgctactgttgagccagagcaattgcccgtccataccgcttacgtcggcctggatgtgcataaagaaaccattgccatctcggtagctgatccggggcgtcaggaaccgggttacgaaggcgagatcgccaacacacccaagcggattgaccgcaagattcaacaactcagtgagcggtacggcggcggcctattgcaatttgtctatgaggccggtccctgcggctatggtttgtatcgccagctgctggccagcggccacgacgtccaggtggtggcgccatcgcgaattccgaaggccccgggtgagcggatcaagacggatcgacgcgatgcgctcaagctggcacgactggcacgcagtggcgacctcacgccggtctgggttccggataccgaacaggaagccatgcgcgatctgactcgggcccgggacgacatgaaggctcaggaacgtaaagcgcgccagcagttgaacgcgttcgtgctgcgccacggtcatcactggccgaagggccgtagccgctggacccagacgcatttcaactggctggagtcgttgcggttccagcatgactggcagcaggtggtgttgcaggaatacatcgatgccgtcagggcggcgacccgccgggtggccgatatcgctgcccagatggagcgagccttgccacagtggtctttggccccggtggtggaagcattagttgccttgcgcggcatcgacaaactggcggccatggtgctaatggcggagttgggtgacatcagccgctttgattcgccacgccagttgatggccttcttggggctggtgcccagtgaacacagcagcggctcacgccgacgccagggggcgatcaccctcactggtaatagccatgcccggcgaatgctggtggagtcggcctggagctatcgcttcccggcacgccagacgggccacttgaaacgcaaggcggccaatgcgcccgaggaggccaaagctattgcctggaaggcccagaagcgcctgtgtgggcgttatcgggacctgacccgggcggggaagaatgccaagctggtatgtgtcgccgtggcgcgagagctgaccggctttatctgggatattgtctgccgggtgatgcccagggcgcacgcagtttaaggtgccgccatcaagaaaggaattgaattcggattatcgaaaaacgagtttatggaataccaggcaccttgagtcagggcaggatcgggccggtgtggagaacccttgggcaggctataccggtgcttgtcagggataatcccaaggggcgttcccggcaagtgatccctgctcctagagaaaggcaagctccgcgacgcagtgaagtcaggtggtaaccaatccacgtatatcagcatgatccaccgtcgcagtctgccggatcctgtcctgccccaaggtgcctgtcatcgggaggtgcaacatgtaaagtccgtgcaagccttgacaggtcaaaacatatc

SEQ ID NO: 9972 - DNA, 1170 bp, unidentified
  source 1..1170: mol_type = unassigned DNA; note = element_fa47690
  misc_feature 1..3: note = core
  misc_feature 4..183: note = LE
  misc_feature 184..1137: note = CDS
  misc_feature 1138..1170: note = RE
  misc_feature 11..152: note = bridgeRNA
cttgtatcttaagagtagagagatagaccgacaccccttggatgctagacatcgtggagaagccagggtcatctctcgattgcaacagtcaaactcgaataatcggttgggacatcacgatcccgtatgacgcaaggttgagtcaaagactgtcttaaacataaaacaaatcggcagggtgtgatggaaagcattgagcaatggattggcattgatgtatgtaagcgctggctggatgtccatattcgtccccagggcagccggtttcgggtcagcaacgatgctgatggcattcaagcgttactgacgcatctgaaggagccgactcaagtgggtcggatcatcttggaatcaacgggcggctatgaacgccaggtctcgttacacttgtggacattgtcatacccagtggttgtggttaacgctcgacaagcccgtaactttgctaaagctgttaaccaattagctaagaccgatcaagtagatgcagcaattttagcctggtttggcgaagcgctcaaacctgagattcgaccgtttgccagtgaagcgcaagcccaacttcaggatttggtcacgcgtcgtcggcaactcgtcgagatgctcacagccgaacaaaaccgcttgtcgggtttgcgaggcaccgcccaagccgatgtggaagtgcatctcgattggttgcgcgaacgcatcaaacagttagatgagcaggttgccacccaaatcagccaatgccagacttggcaagccaaacacatgcggcttaaaacggttccaggcgtgggcaaagtcgtcgccgccaccttggtagccctcttgccagaactcggtcagctctcaactcaaaaaatcagtactttagttggggtggctccgctcaatcgtgacagtgggcagatgaagggcaaacgcatcattttcgggggtcgcgctgccgtgcgccagatgttgtacatggcaaccttagtagcggtacgccataacccaatcatcaaagccttctatgaccaattgctcaagcgaggcaaaccaaccaaagtggcattagtcgcgtgtatgcacaagctcttaaccattctcaatgccatgcttaaacatggtaccgattggcgcttatccccaccggctgcggcttaacttgactgatttgcttgacattcaagataatcg

SEQ ID NO: 9973 - DNA, 1356 bp, unidentified
  source 1..1356: mol_type = unassigned DNA; note = element_fa49708
  misc_feature 1..2: note = core
  misc_feature 3..76: note = LE
  misc_feature 77..1102: note = CDS
  misc_feature 1103..1356: note = RE
  misc_feature 1078..1344: note = bridgeRNA
tgatggggtggacgccccccgacggcatctacgtgccagagtgaggtgtgttgaacttcactcgagggaggcgcccatgggcgagcttaccatcatcgggctggatatcgcgaagtcagtattccaggcccacggagccgatgcagccggcacggttatattccggaagaagcttgggcgaggccggctgctggcgtttttcgccgggcagcctcgctgcttggtcgccatggaggcctgcgccggagcccatcactggggccgtgagctggaggcgctcggccatacggtcaaattgatcccgccggcctacgtgaagcccttcgtgaagcggcagaagaacgacgaggccgatgcggaggccatctgcgaggcggcccagcggccgacgatgcgcttcgtgcccgtgaagagccgcgagcaacaggccagcggggtggtgttccgcgcccgggatctgctggtgcgccagcgcacgcagatcatgaacggcctgcgcggccatctggccgagttcgggtatgtcgccccaaagggggtgatgtacgtccagcgcctggttgccgagatcgaggatcccgcgagccaactgccgccggctgcccgcgttagcctgcaagtcatggtgcggatgctggccgcgctggagacggagatcgccagcctcgatgccgagatcgcccgtcgcgccaaggaggatcttgtcgctcggcggctgatgacgatcccaggcattggacctgtcacggcctcggccatggtcgccctggccccgggagcagagtccttccgctgcgggcgggacttctcggcctggttgggcctaacgcctgtccaacgatcgagcggcggcaaacagaagctgggccagatcaccaaggcgggcgagcgaaccttgcgacgattgctggtgatcggcgccagcgccgtgatcaagcaggcgctcatccgtggcgcgccgcctggatcatggctggcgcagatgctggcccgcaagccgcgaatgctcgtggctgtggccttggccaacaagaccgcgaggatcatttgggcgctcctggctagaggcggcgtctacagggctccggcgctgacggcctaacagccgccggctccagaggcgtcgaagcgtagtcggacgacggagggtatggcgcacagtcggtgagacgggatcgggaaaaccagggcttaccaccgtgcctctcttgagcacgctatgggtgatttggacctgatccgcgaacttccatacaggccagcgctgaagggcgcacaacaggccggacagatggcagcatccgatcgagcgtcaaagcttcaaatccgtcttgcgctgaagggggcgtccacaga

SEQ ID NO: 9974 - DNA, 1566 bp, unidentified
  source 1..1566: mol_type = unassigned DNA; note = element_fa4ec0d
  misc_feature 1..2: note = core
  misc_feature 3..247: note = LE
  misc_feature 248..1423: note = CDS
  misc_feature 1424..1566: note = RE
  misc_feature 3..227: note = bridgeRNA
ctcgtattatatagtagtagtgtttatagtccctctccaaggactgtatgctatactattggagatactgtggattggttcatttctcctaccacttgatggttttggaaaggctccaaccacaggctctttgtatatttgttaatcagttagataccgcatgacggtttatttggaacgaggttacaatcgcaaggagtgccagtgggttccaaacagtgtcaaatacattcaaaggagatttttcatgatttacgttggaattgatattgcaaaagataaacatgactgctttatcactaactctgatggcgaaaccctctacaagccctttaccatctcaaacaaccgggaaggctatgaagagctttacagcaaaatatgttcttccaccggagatattagcaaagtaaaagtaggactggaagctactggacactacagctacaatctcttgggcttccttgttgataaaggtctagccacctttgttatcaacccgttacatacgaatctgtacagaaaaagtctaagccttagacagaccaaaacggataaggttgatgcccgcacgattgcttccatgctcatgtctgatgtaaacctaaagtcctactcagatacatcataccataatgaggagctaaagtcattaacccgttaccgttttgacaaggtaaaggaacgggcaaaactgaaaacctccgtttcccgacttgctctgattctttttcctgaattagaaaagatggtccccacactccatatggcttctgtttatgccttgttatccgaatttcccggtgcttccaatgttgcctccgcacatcttacaagactgacaaatcttttggaaacagcctctaagggacgctattccaaagataccgctatcttgttccgcgaagctgcaagaagttccatcggctcaaatatgcctgcaaaatcgcttgaattaaaacacactatcaaactgattcaggaactggatactgaaatcgaagaaatagaaaaggaaatcaaaatcattatggacgaaatcaattcccccattctctccattccgggaatcaactatcgtatgggtgccatgataatcgctgaaataggcgatttcagccgttttgactctccagacaagatacttgcctatgccggattgtctccgtctacctatcagtcgggacagcttgactcagcatactcacacatggaaaagcgtggctccagatatcttcgctatgccttgttcaatgctgcaaagtttgtctgccattgggatccaacattcgcagcctaccttgccaaaaaacgtgcggaagggaaacactataatgttgctatttcacatgccgcaaagaaacttgttcgtgtgatttaccagctagaaaaatctggacaggcgtacatcaaagcagcatagtttatatcattccatatctccttttgagcacctgtaatgatgctctgtttgtcatgcaattttcaaggttctgatatatatgaagtgcatttctgcaatccattcaaaattttttattttaggcttgacttttaatagttagt

SEQ ID NO: 9975 - DNA, 1392 bp, unidentified
  source 1..1392: mol_type = unassigned DNA; note = element_fa518fe
  misc_feature 1..2: note = core
  misc_feature 3..90: note = LE
  misc_feature 91..1116: note = CDS
  misc_feature 1117..1392: note = RE
  misc_feature 1087..1379: note = bridgeRNA
agatgggatggttgccgccctccccaaacggcatcgcgatgtgccaggattgtggtgttgagagccacaaagcggagaggacggcaaagaatggatactatgatcggcgtggacttggcaaagtccgttttccagttgcatggggcggcgatgaccggcgaggtggtgttccgaaagaagctgacccgacagcagttcgtcaaattcatgtcggatcacgctcctgcagtcgtcgtgatggaggcctgtggcggtgcgcactattgggcgcgggtgatggcggatctggggcacaaggttcgcttgatcgcgccccagtatgtgcgcccgtttgtgaagcggcaaaagaatgacgccgccgatgccgaggcgattgtcgttgcggcgcagcggccggaaatgcgctttgttgacccaaagactgaagagcaacaggcgcgggcggcgctgtttcggtcccgagaccgccttgtccgccagcgcactgaactgatcaatgcgctgcgcggggtgctctacgaacatgggcatgcctttcccgccggagcccggaatctggggcgcatccagacgctgctttgcgacccggacaatgggttgcatcctttggtccttgccgattgccatgacctgctggagcagatttccgagaaatcagaacgcattgacgccagaaccaggacgacggcggccctgtccgcgcaggcaagtgtcacgcgacgattgcagacaataccgggggtggggccgctcactgccctggctgttgaaaccttcgcgccgcccatggaaagctttgaatccggtcgagcgtttgcggcctggctcggcatcgtgccgcgccagcattcttcgggcggcaaacagcggctgggaaagatatcgaaggcagggcagggggacataaggcgcctgctgatcatgggggcgatgacccggctcacgccgagaggccgccgcggggttccggagggaagctggctggcgcgtctgcttgagcgcaagccaaggatgctggtcgcgattgcgctggccaacaaaatggcccggcaaatctgggcgctgctgcggaaacaggaagactaccgggaaccggcacagatggcggcggcatgatgttcatgctgcgccgtgaaatctgaggccgggaaccgggaggtgtgagaagccgatggcctgaatgggaaaatgatcaaacagatctgggtcgggaaaaccagcacgcccccttgagcctgaaagctcgcagggtagatttggacccgatccgctgatctccataccggccagcggcttctgaaacgccgcaccaaaaggcctgatagaagaccgcactcgatcacaccccacaaagcgccaaaagcaacttgcatcacgggcggcaaccataga

SEQ ID NO: 9976 - DNA, 1615 bp, unidentified
  source 1..1615: mol_type = unassigned DNA; note = element_fa576db
  misc_feature 1..2: note = core
  misc_feature 3..276: note = LE
  misc_feature 277..1473: note = CDS
  misc_feature 1474..1615: note = RE
  misc_feature 12..296: note = bridgeRNA
ctactataataaatttagacgttaaatccatgacaagccagccatggtttacacgtacttgttacataagctataatgaaagcagtgattggactaacgtcttttacgctgggacaccacgcccgtttatgagactgttatccatgctttcattacagcattcgtttttgcaggtagagccaacctttatgcgctcgcatcactaagtagacagaataagtaatgagtaaagtgtggatttatcgatcacaaattctattatcaggagagatatttatgaacgcagtaggtattgacgtatccaaaggaaaaagtatggtcgctattgtgcagccttttggagttgtcgtggctgaaccttttgaggttttgcacaacgctgaggagctgaaggagctcgtagagcgattgaagctcctcagcggcgaaataaaggttgttatggaatacacaggtgcatattatgagccgatagcaaacgcactccataacgccggtatatttgtatccgttgtcaatcctttactgataaatgactacggcacaaaccgtgtgaggaaggtcaaaaccgataaaaaagacgcatttaagcttgccggtttcgcccttgacaaatggcttgaacttcgtgaatacatacctgtcgatgaaattcgcaaaacgctcaaaatcattaaccggcagtatgatcagtacaacaaaattctggtaatgcataaaaataatcttattgccctgcttgattcatttttccctaatgccaatacattgttttcatcaccccggagagaatcagacggacacgaaaagtggatagattttgtgattaaattcccacatatcgattccattgcaaagcttcctttatcggcttttaaaagcaaatatcaaagctggtgcaagaaaaatcattacaattacagtgaagctaaggctgccgaaattcatgcttattcaaaaacgcagttaagttcgctgcctatgacagactctgttattaaaattattatagaatctgcaaagctgctgaattccacttttgaagttcttaacacgctgcggaatgaaatggataagctttcatcacagcttcccgaatacaaaaccgtcatgaacctgtacggggtcggaaaagttttctgttctcagcttattgcggagatcggcgatgtcagacgccttgaacgttccaaatcgatcattgcattagccggtattgatccgcctccatatcaatcgggaaagttcgatacaagatcaagaagcatatccaagcgtggttctccggcaatcagaaaaacgcttttccagatcatgcagatctatcttcagaagcagcccgccgatgagcccgtttatcagtttcttgataagaaacgttcagagggcaaaccttacaaagtctatatgatcgccgctgcacataaatttctaagaatttactatgctcgtgtaatgcaggcattaacttaaatacatcattcaacaaagctaaatgatatttctcagactgcttaaaaaaatccttttattgcggtctttttggcatgctctttttagatttgtgaattatttgtaaattcactctttgggggcttgacttttatttgcaggt

SEQ ID NO: 9977 - DNA, 1545 bp, unidentified
  source 1..1545: mol_type = unassigned DNA; note = element_fa5a718
  misc_feature 1: note = core
  misc_feature 2..401: note = LE
  misc_feature 402..1433: note = CDS
  misc_feature 1434..1545: note = RE
  misc_feature 13..255: note = bridgeRNA
tcgtactatataagagtagagaaaaatacctctattcttatttttttgttatgatgagtttgattggttaacgtgtctaaatttgggacatgctcccgtaactaaaagtgttaaccacaactcattgtcaataattcgatttagcaagttgggattcgctcccgtgtaaataacgaaactgaacagatactgagctgctggaaccaatcataataaaacataaggaggatttaccatgattgctgttggaatagatgtatctaaatccaaaagtactattgccattattaattcagaaggtcaactattattaaaaccaaagaactacaaatcacacctcgaatgatttaaaaggtctaatagacttaattaaaggctaccaagatgatgtaaaggttgccatggaagctacaggtcattatcactatccaattctaaaagctttgctaaatgaacatatctatgtttctcttgtcaacccatatgtaatgaaaaaatatggggatagtaacattcgtaaaggcaaaactgataaaaaggattctataagaattgcttactatgttatcgaaaaatcttatcaactaagcccttatactgttgttgatcaaaaatatgatgatctcaaatttctctctagacagtacaatcaagtagttactatgaaagtaaaatctcgtgtccaactaggtaacttacttgatgaaacaatgcctggtattcaaacgttatttgcttctaacaacgcttcaaatccatctaaaaatatctttcttgattttatcgaaaagtatgaatgttttgataatataaaaaagatgggtgaaaagcgtttcattaccagttatattaaatttgctgagaaaaagcgttgtcgtaacattcaagcgaaggcacttgctatatacgagcttgcacaaaatagcataactactcgtagtactgatgttagtactagtattgctttacatcaatgcataaacctcttaaagcaatgtactgaatcttctaatcaactgcttgtgcaaatgcaatccatctcattcaccttgccagaatatactaccgttcgcgccatgcatggagtcggtgataaattagcatctcgtttaattgccgaaattggtgatgttagacgttttacaagtggtaaagctttaaatgcatatgctggaaatgatgctccgccttatcaatctggtcaatttgaagggactaatcgtcatatatctaaacgtggttcttctagcttacgcaaagcgtgttacgaggttatgcaagctttaaaattacataaaatagttgacgatccttgttatcaattcatgataaaaaaggaatccgagggtaagccaaaaaatgtagctaaaatggctggtgtcaataaattcttacgtatctattatgctagagttatggaactgtacaattagcaaatccatttcataaatattttttctcactccatttcatggggcttatgaagtgcgctctttttttaatcacaatttctttcaatttacccttgacaactattagcaagtt

SEQ ID NO: 9978 - DNA, 1580 bp, unidentified
  source 1..1580: mol_type = unassigned DNA; note = element_fa6f830
  misc_feature 1..3: note = core
  misc_feature 4..284: note = LE
  misc_feature 285..1466: note = CDS
  misc_feature 1467..1580: note = RE
  misc_feature 13..264: note = bridgeRNA
cttgtataatagatttcagttgatgaggggaactgataccccgaaattaactgtatgattattcagcaaagtgctgtataatctaactactggatagaggacgtcgttttttccttgaagtgcttatgcaactccgtactcgaaagactgacgcctctaccaatagacagattacggattagttggatgttggcagcaagtgctgcacttcgaatctggaacaaggcagtaacgtttattggctcagaggaatctatccaaaaataaattcaggagagattattatgctgtatttgggaattgacatcagcaaaagaaatcacattgcttccttgttggacgagaaagggaaaactgtattcaaagcattctcattttccaatacaacagaaggcggcacgtccttgctggagaagttgaagcgttgtggtgccacaccttacaacatggaggttggcatggaggcaacaggtcactactggctttccatctattccttcctggtggagcataagtttatcgttcatgttatcaacccgatccagaccgacggctggcgcaaaggcacagaaatccgaaaacggaaaaccgataccattgactccgtgttgattgcagagctgatacggtatggcgattttctggaaacctctctggttgatgaaaataccatgtctttacgtaatttatcccggttccgcaactatctagtttcctctatcagcgatctcaagcgcaaggtgatttgtgtgctggatcaggtatttcctgagtatgcatccgctttttccaatgtttttggtcaaacatctaagcaattgctgcttcatttccaaacagcggaggactttgaggtcattactgctgagcaattagagcaggcgctggaacaggttacgcacaagaaaacagctcgcaaaaaagtggaacaactctctggactggcagctgactcatttggtctgaaattttgccgggatagtttctctttgcagctcaatctgctgattcagcagattgcattcatcgaaggacaggttactgatgtggaagcagagataaacgtcattctcaacaaacttcattctcccatcttcaccattcctggcattggtccaattaatggagcttgtattttgggtgaaatcggcgatatctccagattttctaatgctgccaaactagcggcttatgcaggcattgacgccacagtcaatcaatctggagcgtttcaaagcgccaataaccatatgagcaaacgcggatcaccttatcttcgcaaagctttgtttcaagctgctttagtcgctgcatttcatgatcctgtgttctctgccttttatcaaaagaaacgcactgagggtaagcatcatctgactgccatcggtgcagttgcacggaaactctgcaatgttatgtttgccgtcttaaaaaataacgatccttatcgtccacagatactttaaacttccaattaaatcctctggcatggtctttggtcatgccttgttgtcgtgcatattttttcagaactccattctgttttttctcttttacccccttgatttttgatagttggt

SEQ ID NO: 9979 - DNA, 1623 bp, unidentified
  source 1..1623: mol_type = unassigned DNA; note = element_fa7058e
  misc_feature 1: note = core
  misc_feature 2..252: note = LE
  misc_feature 253..1491: note = CDS
  misc_feature 1492..1623: note = RE
  misc_feature 6..221: note = bridgeRNA
tcgtaatataaggttagccagatttttctggttgacctttttcttttaggtcttattataacggtagtcggggtagaacgtagcgcccgtgggactcgatcccgtcagcaaaactgttcaccccctacttgtataagcatgtttcgagctggttgggacaaggatcccgtttaacaagcgaacctatgatattacaagcagctttaggggttaccgactaatttatagtttcttagaggaggagatttcattatgaatccagtcgttggtctggatgtttcaaaaggagaaagtcaggttcaagcctttttggataaaggtcagccttatcgtaagagctttagtattaaacatactcttgatggtttaggaagtttactagaatttctaagggatattgagaaattggctgctggaaagcaaccttcggttattttagaatctacaggccagtaccatatgcctgtcattcaatttttggaggagcagcaatatgtctatattattgttaatccacttatctctcatcgggccagaagtacaaatttacgaaaggtaaagacagatgcgattgatgcctatcgtctatgtgaattgtattataaggaagagttagaaccatacaaaaaaagaggaatccaactcttaaatcttcgtaatctcacgagacaacaagaaacgatatcaagcacagctgcccaaaccaaattacagctacaatcgattttagatcaggtatttcctgaatatagaggtgtctttgggaatctctattcaaaaatttcgttacagattctatcaatcttcccaacctccaaagaggttttaagtgttagcgaatcagatcttactaataaaattgcggaattatgtacaacccgttcagaaaaatgggcaaaagaaaaagcaattaaattgagagaagctgcattacgtaatccatttcaaaacaacttgtaccaaagccatatctttaacctaagaatgtttattaacattgttcttcaatatcaagagcatttatcaaagctagcaacagaaattgatgcgctcgctaaagaaattgaagaatatgagataatccagtctatccctggtgttggagaaaagattgcggcaacaatcatctctgaaattggagagatagagcggtttaatcatcctaaaaagctagtagcattcgctggaatagatcctagcgtttactcttcaggtagatttactgcttccataaatcgcataaccaaaagaggttctagcaggttaaggcaagcattgtttatggctgtacaatgcggtataagagatgcacgtaagcaaaaaacaagtgatgaaatactccctagaaataagaaattaagagagttctacgataaaaaacgagaagaaggaaaaccttttagagtagcaataattgcttgtgctaataagcttttacattggatttatgctctactaaaaaggaaaatgcccttccaaaatacggcttaaaaatcatatctaagaatataaaacaaaaccttccaatcttataaaggaaggcttatttggtatacccttttttagtatatcatgtaggttttatattttttattgaaaaatcttgacaactattagctggtt

SEQ ID NO: 9980 - DNA, 1655 bp, unidentified
  source 1..1655: mol_type = unassigned DNA; note = element_fa70fb3
  misc_feature 1..2: note = core
  misc_feature 3..303: note = LE
  misc_feature 304..1488: note = CDS
  misc_feature 1489..1655: note = RE
  misc_feature 65..276: note = bridgeRNA
ctggtatattagaaatgactcatctgacagtcactacaatatacctttcctttctatcagcccttatcaaataccgcgggttgaaaacggttagattcatttgtagaatattgaaatatgtgaatgtggatttgtatttttaccttgtggctttgactactttagagaggttcttaccacgccttattccaaaataatgatcagttagatgagtctttgaattcgtatcgcgtaccaggttttatggtttaagtgctgtggttcttcacttcacatgcatgtatttcagaaaggtgtgtttttatgtttctcgtcggaatcgatatcggtaagctctctcatatgttttgcatcttggatgcttctaacaatgaggtcattgtaaaacctgtttctttcaaaaacgataagctgggcttcgactttcttatgaatcagcttaaatcctatcctaaggatcatttgctcatcgggatggaagataccggtcattaccatttcactttgctgaaattcttgttagattccggtttctctgtcgccctgatcaatcccgtcacaaccgatcttacgcgcaagatacagctcagctccaccaaagacgatgatctggataccttgaccatttgtgatgtcctggcctccaatcaacgccggaaaggctacaggatctctaagatcgacagctttgatctttatgagcagaaacgtcttacccgcgagcatcacgacctcaaggaacagctgaacgtatataccaataaacttcaaaagtgcattgatatcgtatttcctgagttcaattccctgtttagatcaaaatacgggtccgtttatatgaacgtcctcaagacttttggcagcgctgattccatcgctcatgctgatatacgcaatatccgtaaatgctttgaagcaaacaggaaagggcgccgcatctccctgaccccggaagagttgaaagaagctgccagaaattcgatcggttttccttccaaagcagaagtgatcgaattacgtcatctgatcgatatcatcgagctgatcaatgtgcagatttctgaagtagataaaaaaatagaagagttctccgtgcaaaacaactctcctattctcaccataccaggaatctcacatttctctggtacttccattctagcggaactaggagatttacgcaactactcaaaggcatctcaggtcataaaatttgctggcgtttcaccttccaagtataaatcgagccagtatgaagcacagcatactgctatcaccaagaaaggatcgcgctatcttcgtaagacgctctatcaggtcatcctgcctgtgatcagatacaatcctgtgttcaacgcattctaccgtcacaaactgtcgcagggcaaaggacaccgatgtgcccaggggcactgtgtacgaaagttgctaaggatcatctatcatctggtcactacagatcagtcatttgatccaaagcttttaagataagcctgcacatcagatccaattaaaaattgagagccttgaccaaggttgttttcgtcatgtctttttattcacattttcaaagatcatacaaacgattcaactaactctatttcaagccaaattattttcaaactatttcatagattacttgacttttatatagttag

SEQ ID NO: 9981 - DNA, 1399 bp, unidentified
  source 1..1399: mol_type = unassigned DNA; note = element_fa7a698
  misc_feature 1..2: note = core
  misc_feature 3..112: note = LE
  misc_feature 113..1156: note = CDS
  misc_feature 1157..1399: note = RE
  misc_feature 1179..1394: note = bridgeRNA
agatgacgtaatgggccaaggagctggcgatagccagaaagggtggcagtccccaaatctggtcgtgcaagccaacggggtccttgcggccccaagcagaaagggtactgccatggactattatgccggactcgacgtgtcgttgaaactgacctcggtgtgcgtggtcgacgaaaaagggaagatcgttcgggaggcgaaggtggaaagcgagccaggcgcgttgatcggcttcttcgccgaactcggcttgcggatgacgcggatcggcctggaagcaggcccgctatcacaacatttgcacgcagggttggtcgagggcggccttgacgtggtgctgctggagacgcggcacgtgaaggcggcgctatctgcgatgacggtcaagacggatcgtaaagatgcgcgcggcatcgcccagttgctacgcatggggtggttccggccggtgcattgcaaatcgatgccggctcaagagaaacgggcgctgttgacggccaggaaactcctggtcgccaagctgatcgacgtcgagatgtcggtgcgcggcatcctgcgcggctttgggttgaaggtgggatcgacaacgaagaagacctacgccgacaaggtgcgcacgctggtcgccggccaagtgacactcgaacttgtgatcgagccattgttgcgttgtcatgaggcgctacgcaccgagtacgtcgttctgcatcggcagctacttggggcggtgcgtggcgatgaggtgtgcaagcgtctgatgacggcacctggggtcgggccggtcgccgcactgacctttaccgcgacggttgacgatcccgccagattcacctcgtcgcgctcggtcggtcctcacctcgggctgacaccgcgaaaataccagtccggagagacggacgtgacaggcggcatcaccaaggccggcgatgccatggcgcgtagtgccttgtacgaggccgctttctcgatgctatgcaagacccggcgcatgtcggcgttaaaggcgtgggcgatgcaggttgcccgtcgccgagggctaaagcgcgcggttgtcgcgctggcccgcaagctagccacagtgctgcatcgcatgtgggttgatggtaccgagttccgttggacgcatgaaacgtcggctgtcccggcggcggcctgatcgcatccggcggatgcatttgtaatcgagcggcccggaagggtttgctccccgaggtcccttcgccgggacgcggaaggtcgagaaagccgtcgtgaactctgcgcttcgagcgcgcgtatcagatcggctctcgactttcctactggtgtcatcatgtggcggcaacacgctgaccacgaacagaagcatggtaccggcggatggaaattggggcttgacacccaacgggcccattacaga

SEQ ID NO: 9982 - DNA, 1209 bp, unidentified
  source 1..1209: mol_type = unassigned DNA; note = element_fa7d429
  misc_feature 1..2: note = core
  misc_feature 3..215: note = LE
  misc_feature 216..1187: note = CDS
  misc_feature 1188..1209: note = RE
  misc_feature 12..193: note = bridgeRNA
cttgtatcttgatcgagttgatgattagctaccatcaactgaggtgaagaccagcttgtgcccaccctgaaggcattgaccttgtggtagtagattaagcccttcacctctcccaccccattgctgaacactggacggtatccgagggctttgaccctgcatgtacaaggcgagtgtggagtggttagggaaaatctggaacacaaggaagagcgatgttttatcttggcgtagacgtttcgaagaaaaaactggactgcatgctgctcaacagtgcgaacggcaagttgaagtccaaatcattatccaacacgaaggccggtttcgaagaactgatcggatggctggccgaaaataaggcacctgaggcgcatgtcgtcatggagccgactggcgtgtatcacgaaccagccgcgctggcactgaccgatgcagggctgacgctctcactggttaatccggcccagctgcgtcagttcgcccagggactgggcgtcaagaacaaaaccgacaaagccgacagcaccgtactggcgcgctatggtgaagcagtgaaacccgaggcatggcagccgccatcgaaatcggcccgccatctcaaggcattactagcccgacgtgatgctgtcgccgacgatctgcagcgcgaacaaaatcgtcaggaagccgttgaatttgctgtctcaccggaagaagtcaaacagtccatcaaccagtcgatttcgtttttaaaagccgagcttaaacggctggaagagacgatcgaagagcatatcgacagcgaccccggcttgcgcgacaaaaaggacttgttagagacaattcctggcgtgggcgaacgggtatcaaccaaccttaccgcgctgtttgctgcaaagactttcgatagcgccgaacaactggccggatatctggggctggtgccagtacacggcgagtccggcacgtcggtgcacaaacgtcctcgcctgtcaaaagcgggaccagcgcatctgcgcaagctgctatacatgccagccctggtcgcccgccaatggaacccccacatcaaagccttcagtgaacgcctgcttgccaaaggcaaaacaaaaatggccgtcatcggcgcctgcatgcgcaagctggcccacctgtgctttggggttgtgcacacaggcaggccatatgacccaaattacgccatgtgaggcttgacgggcgagacggtat

SEQ ID NO: 9983 - DNA, 1610 bp, unidentified
  source 1..1610: mol_type = unassigned DNA; note = element_fa8eac6
  misc_feature 1..4: note = core
  misc_feature 5..258: note = LE
  misc_feature 259..1446: note = CDS
  misc_feature 1447..1610: note = RE
  misc_feature 14..234: note = bridgeRNA
ctcctagaataatgttgtcgcatttgttaacagtttattgaacgaaaacaacctgcgataatgtcagcatgtagtgtgagtgtcgccgtaaaaatccttggggtttatcctcgttttggagagtggtgcctcacctcttgcggcagttcacgaatgagctggatgttgaggcgttagtcttctccgtctgtccaaggaggttgtgagccgcgagatgcgtgaggattcacctgcaaatacgttgttgtgaggtgactcatgtactatcttggcattgacatcggaaagaataatcacgaagcgggcttcatccgggatgacggcagccacgttggcaagtcgttgcgtttcaccaatactcaggaaggttttcagaagcttctgcagtttcttgagcaacgcttgccagagcaggaatccttctgtgttggcatggaggcgaccggccactactggctggcactttactcgttcctgcgtgaacagggctttgtgcttcacgtgataaacccgattcaatccgatagtctgagaaactttcacatccgccagcagaagaccgattcggttgactgcttcctagtggctgaggttattcgtttcggcaagttcagcgaaacccatctggctgacgaggatattctcgtcctgagaaacctggctcgtttcagagagtctctcaaagattcctgtgctgactacaagcgccaggtcatcacggtactggatcaagtgttcccggagtatgacaccctgttctcaagcatcttcggtgagagctccaaagcgtttctcaaaacctacggtacaccggaccaagtggttgaagtcaatacgaagtcgctggccaccttgctccggaaggcgagtcgcggtcgtcacagtacggacaaagcacgggagatcaagtcgctggctgccaattcggtcgggttaacgctgtgtgcggatgcgtttgcctttcaaattcgcattctcatcgagcaaatcgagttcacggagaagcaaatcgatgagatcgacaagaagatttccaagcaactgaagaagttgaactctgtcatcctgaccatccctggcgtaggaccggctaccggtgccattattctgggagagatcggcgatatcggtcgcttctccaatcccaagaaactggttgcctttgccggcatcgatccaacgtcttatcagtcaggcaacttcgttggtcaacacaaccgcttgtccaagaagggttccccttatctgagacgggccgtttggatgtctgcactgatcgccgctcggtatgatcccgtcttcaaggcgttctatgagaagaaacgacgtgaaggcaaagcacatggcaccgccttgggagccgttgcccgaaaattgctctataccatccatgcggtgcttaaggccaatgaaccgtacgaagtacggcttgacaccatagaataaccgcgttttcatcgctttctttctcgacccgctcccagaacgggtctctttcgcatgctgttttcgtccaatattctgttttcaaggtgcgcgtttgcctttttcaggcggtcaaccaacaatcgatttttcttgcatttagggcttgacttttaatagctggt

SEQ ID NO: 9984 - DNA, 1205 bp, unidentified
  source 1..1205: mol_type = unassigned DNA; note = element_fa971d7
  misc_feature 1: note = core
  misc_feature 2..213: note = LE
  misc_feature 214..1179: note = CDS
  misc_feature 1180..1205: note = RE
  misc_feature 34..202: note = bridgeRNA
tcttaagtttgtcttttagtaaatttagatataaaatagaaagaacaaaagagagaaataagattaatatacacggtgaagcattgacttcgacaacattggtaatcctctctctttttctactaagatttcgttcagttctgtgagacctagatctcgatttcaagttgttgaaacattagtagctatgttctttccaaatttcaaattgttatgaataaatataaagaaatttatggaattgacattagtaaagatgtctttgatgtttatggttcaaaaagcggacataatcaatttaaaaatgactcaaaaggctttttaaactttctaaaacagttggcaaaggatgctttagtagtgatggaagcaactggttattaccattatcgattagcacaatttttacacaaaaatggggtgcaggtttctgtagtaaaccctttatctgttaagcgttttattcagatgaaattagctaaggtaaaaacagataaaagcgatgcaaaagccatatgtgagtacggttcaataaatgaagtgccactatacaatgccttgacagaagtgcaagcagaatgcttacaactctttagattactggatagttatgtaaaaaagagtacggcaactaagaacaaattacatggagaagatgttttagatattccatcaaaaacagtttatcgttctttaaaaagaaatttaacacacttaaaaaaagagatagaactattagaagatagattgttagaattggtaaaacaagagcaacaaaatcaattaacattattgcaaagtattccaggaatagggatgaaaacagccttatttttaatagtagtaaccgatggttttaagaagtttgagacggcgtcacaattgtgtagttatgttggtataacacctacgatacgagagtctggaagtagtgtaaggggtcgaagtcgcattagtaaagtaggaaataaaaaattaaggaatttagtgtttttagcagccttttcagcctataaatacaacaaagcttgtaaggcattattcgatagaatagtagccaaaggaaagagtaaaaaactagcattaatagcagtagcaaataagctgttaaaacaagcttttgctattgcaaaaagtggattgccttatgatgaaaactttatttcaaaattagcttaaaatggcttgtattttaactcagttct

SEQ ID NO: 9985 - DNA, 1429 bp, unidentified
  source 1..1429: mol_type = unassigned DNA; note = element_fa9f145
  misc_feature 1..2: note = core
  misc_feature 3..93: note = LE
  misc_feature 94..1128: note = CDS
  misc_feature 1129..1429: note = RE
  misc_feature 1186..1427: note = bridgeRNA
cgatgagatggtctcctcccctcttaatcggcgtcgcgatgcgccaagatagggaaggagtaaattcctatctgagatgagtgggaggagaccatggcaaaggttacaactattggcattgacctcgcaaagaatgagtttgcgctgtacgcgctgggtccgaagggccagtgtggctggaagcgcaaggtgcgccgcaagcagttgctgaaccagctttcgaaactgaccccttgcaccgtcgccatggaggcctgcggcggatcccactactgggcccgtcagatacaggcgcggggacatgaggtggtgctgctgccgccccagcacgtcaagggttaccttcggggccagaaaaacgactacaacgacgccatggcgattgccgaggcctgcgaacaccgtcgaatccgtccggtgccgatcaaaagcgtcgagcagcaggacgtgcagatgttgcacaaactgcgtcgaagcgtgagcaacgaacgaacccggatgagcaaccgcttgcgagggttgctggccgagtatggtgtcatcattcccaaggggataacggcgctgcgccaggagttgcccctggcgctggaagatgccgagaatgggctgagtgcccgggctcgggagttgctgcatcgtcagtaccagcgctttctggacgcagaagaggagctggcttggtacgaccgggaagtggaacgactggctaaggaggacgaggtctgccagcgtctggacgagctgccgggggtcggcccaatggtggccagcgtgctcaaaagctggatgggcgatggtcatcagttccaccggggtcgggatgcagccgccgctctagggctggtgccgaagcagaacagtaccgggggcaaggagctcctgctggggatcagcaagcggggcgacccctacgtccgggctcaactcgttcacggggcacgagcggtggtgtcgcgggttgaccggaaaagcgatccgctcagccgttgggttcagagggttaaagcgcagcgggggttcaacaaggccacggtggcgttggcaaacaagttggtccgcatggcttgggtgatcatcgcccgaggcgagcggtaccggccgattgaggagcgactggctggataagttgatcagggagcgagtcgaacaagcgagcgacataaagtagacgattaacggaggatagccttcccgcgggttgcgagggtcacagcgatcgatggcacaacaggtcagaccggcctgccgaaaacctgactaatccgagggccctggaggccgttaggtcgatgaggacggcaggcgcggatcttccatcaaggccagaggcgacaaagccgcctcgtgaaacaggccggatatacggacgtaaacctgtccctgacatcgagcactgaggccttgcaaacggggaggagaccatata

SEQ ID NO: 9986 - DNA, 1398 bp, unidentified
  source 1..1398: mol_type = unassigned DNA; note = element_faa57f7
  misc_feature 1..2: note = core
  misc_feature 3..79: note = LE
  misc_feature 80..1120: note = CDS
  misc_feature 1121..1398: note = RE
  misc_feature 1127..1385: note = bridgeRNA
tgttggggtggacggcccccgacggcatcacaatgtgccagaatgaggtcgttgcagatctcatcaagggagaccgtccgtggataaacttattcgcattggcatggatacgtcaaagagcgttttccagctgcatggggtgaatgaagccgaacaacccgtgttgcgcaagaagctgcggcgcaatcaggtgctcgccttctttgcgaagctcccgccactgaaggttggcatggaggcctgtggcgcggcgcattactgggcgcgggagttgcgcgccttgggtcatgaggtgctgctgatgccggcgcagcacgtgaagccctatgtccagcgttccaaatcggatgcggccgatgccgatgcgacctgtgaagcgatgaaccggccccgcatgcgtttcgttgccgtcaagagcgccgatcagcaagcggcgcagatgctggcgaagctgcgagcgcagttcatcgaccggcgcacgcagctctccaattcgatccgcggttttgcggcggagttcggcctgactgcgcccaaggggctttcccggcttggcgatcttttggccgacattcgcgccgacgcgacaatcccggacatggccaaggacatgttcgagacgctggcgcgcgattacgcccacatcagtgccgaggttgccgtgctcgatgagaagctgcttgcgcttcatcgacacaacgaagtgagccggcggttggccaccataccggcagtcggccctgttggagcgacgttgctagccatcaaggtgacggacgcgcacggcttcaagtcggggcgcgattttgccgcctggctcggactgacaccgaagaaccattcgacagcaggcaaaaacaggctcggggtgattacccgcgctggcgacgagatgctgcgaagcgtgctggtggcgggcgccaccgctctcatccagcacatgcgccgcggcagcacccgggtctggccctggttacaggcgctgatcgcgcgcaaagctcccaaacttgcggcggtggcgctggccaacaagctggcccgcatcgcctggaagctgatggtcagcggggagcaatatcgccccatcggcgccacttatccagcgcctgtgctgccgtgagagcattaagagttcggtgtcgggcgcacgttcgacactgaaggccggaaacttgcaagcagaggagaagatggtgtgaccggtcgaaccgggacgagcgagacactccgaggtgctcaccggcagtcaatgtcgtgtacgtgtttggaactcgctatccgtgaagcccatctaggccagcgctcacaaatccgcgcgcaaaaggccggacatatgagcgcaagcgatccgatcaaatcatctcagccaaaccttgcaagcagggggccgtccacata

SEQ ID NO: 9987 - DNA, 1225 bp, unidentified
  source 1..1225: mol_type = unassigned DNA; note = element_faa8cda
  misc_feature 1..2: note = core
  misc_feature 3..238: note = LE
  misc_feature 239..1210: note = CDS
  misc_feature 1211..1225: note = RE
  misc_feature 6..212: note = bridgeRNA
cttgtatctcgactatcgctccgccaggagcgatagttctcgactgatcatcgagggagggatctggaagccgtgcagctccttaggctttttgcctgtgatgtatattgtgctccacccctccacactcactcgtatagttcgaacggtatcttgggcccgtctctgacgagagcccgcattcgcaaggttggacagagtgcagtgatgatcgaaaacggatcaatggagaaacagtatgtccaatttcatcggtatcgatgtcgctaaaaacacctttgatatcgctactcatctgccaaatggcaaacacaaaaccaaagccaaactgaccaacgaccccaagggcttcaaagagtttgaagcctggctgagcaagcaggtcgagccttcgtccttgatcgtgatggaagccaccagcgtttatcacttggaactcgccgagtttgtttacaacaagggctatcgggtctgcgtcgtcaatccggccacgaccaacgcttacgctggcagcgagttacgccggatcaaaaccgataaaagcgacgccaagctgatcgcagactttgctcgggaaaaggcagaaaagcttccactgtgggcgccggagccgctgaagtatcgccagttaaaggcgatggtacgtcggctcgacgaccttcaggaaatggagcaaatggagctcaatcggctggacgtttccgacgaaaaggtcaaagactcgatcaactccgtgctgcgccacatcgaaaaagagatcgttgaaacgcacaaagcgatcaaaaaacacatcgatgatgatccggacatgcggcaaatgcgcgacttgatcgtgaccatcgacggcatcgggcagaaaacgctcgagcggctactggctgaactgggcgacctgcgcaaatatgacgatcctcgcaaactggtcgctgccgccgggttaaaccccaagctacaggattcaggattgctgaagggccgaacagtcatttcgaagatcggctcagcgcgggtgcgggcaggtctgtacatgccaggtttggtggcgttgaagcacaacaaagcgatcatcgccatgaaagaccgcctgaaggccaatggcaaagctcccaagcagatcatttgcgcagcgatgcgcaagctgctgcatttcgttcacgccgttctcaaatcaggacagccatttgacccagaatttggtcttgcccgatgaggggcaagacggtat

SEQ ID NO: 9988 - DNA, 1286 bp, unidentified
  source 1..1286: mol_type = unassigned DNA; note = element_fab38a7
  misc_feature 1: note = core
  misc_feature 2..204: note = LE
  misc_feature 205..1176: note = CDS
  misc_feature 1177..1286: note = RE
  misc_feature 34..195: note = bridgeRNA
tcttaagtttgaatctcactaaattaatattgtaatcagaaagaacaaaagagaggattaagatatacgtagaagctctgtacttcgtcaacaatgataatcccctctcttttactacttcaaccacgttcagttctatgaggccggacctcgttttcaagttgttgtgcttaaggtagtatgttctttcataaatcagttcttatgaataaatataaagaaacttttggagttgatatcagcaaggatgtctttgatgtctatggcagcgtttgcggtcattcccaattcaagaatgaagcttcggggtttaagcaatttctaaagtcactgtcgcaaaacagtcttgttgttatggaagctacgggctattaccactatcgacttgcacagttcctttacaagaacggtattagcgtatcggtagtaaacccattatctgtcaagcgttttgttcagatgaaactggccaaggtaaagacagataagagtgatgcccaagctatctgtgattatgctctgtcaaaccaacctccactctacaatgcccttaccgatgtacaggcagagtgcttacagctctttagattaatggatagttatctaaagaagcgtacggccaccaagaacaagcttcacggcgaagaagccttggggatcccctccaggtacgcttacagatccctaaagcgcgaccttaaacatttgaatatggaagtgaaaggtattgaagatcgcctgctggagcttgtaaaacaggagcaacaacaacaattaaccttattgaccggcataccaggcataggtatcaagactgcattgttcttggttgttataactgatgggttctctaaattcgagaaagcttcacaactgtgcagctatgtagggatcacaccaacgatacgggaatctggcagtagtgtaaggggcagaagcaggatcagcaaagtaggtaataaaaagctacgaaaccttttattcctatgtgcattcaatgcctgcaagcacaaccggggatgtagaatgctttatgagcgcattgtagcaaagggaaagagcaagaaattagcattgatcgctgtggccaataaacttttaaaacaagcttttgctatagctacatcaggattgccgtacgatgaaaattatgtgtctgttttggcaaggggatgagacaaaacaaggataaatttaatggccaaaatctaaattatagcgtattggcccaggcacaatatgtttcaaatttaatgcagaaaagagttggtttttacctcagttct

SEQ ID NO: 9989 - DNA, 1390 bp, unidentified
  source 1..1390: mol_type = unassigned DNA; note = element_fabaf4b
  misc_feature 1..2: note = core
  misc_feature 3..89: note = LE
  misc_feature 90..1121: note = CDS
  misc_feature 1122..1390: note = RE
  misc_feature 1158..1376: note = bridgeRNA
gatgaggtggatggctcccgctcacggcatctgggtgccaaagtgtgaaggccatcaggcgttcacaagcaaaatgggagccatccgccatgcagattaccacgatcggcctcgacttggccaagagcgtttttcaggtccacggcgttgatgcggccggccaggttgtggttcgtaagtcgcttcggcggtcgcagatgctgccatttttcgccaagttaccctcttgcctggtcggcatggaggcttgcggcacgtcgcatcactgggcgcgcgagctgatcaagctcggccacgaggtgcgcctgatgccaccggcttacgtcaagccatacgtgaagcgggggaagaccgacgctgccgatgcggaagcgatttgcgaggcagtgacgcggccgacaatgcggttcgtgccggtgaagtcgctcgagcagcaggcggcgctgtcgatacatcgggcgcgagatctgctggtcaagcagcgcacacagctgatcaacatgatccgcggtctacttgccgaatttggcgtcgacatccccaaggggctggaacgggcgctgctgatggcgcggcagatcgtcgatggcaaagctcctgaggtaccgattgaggctgccaagatcgtcgccacgctgtcacggcaggcgctcgacacccacgttcggctccgtgagattgatcgcgatctgctcgtttcgctacgtggcaacgatgttgcccgtcgtctcatgaccatccccggcatcgggccggtcggcgcgacggcacttgctgcatcggtcaccgatccgcatcagttccgctcggggcggcagttcgccgcctggttgggactgacgccacttcagaagtcgagcggtggcaaagagcggctcggtcgtatcaccaagatgggcgacaaatacctgcgcaagctgctcgttgtcggcatgacggcgcttgtacgtcgtgcaaggcaaaatcccgaaagcgatccacggctggcggatctgcttgcgcggaagcccacaagggtcgccaccgtcgcgatggcgaacaaaaccgcgcgggtcatctgggcaatcatgacacgtggcgaggaatatcatgccggtcaccggccggcactggcggcataagcgatataggatttagctgaagaggagatcagctttacgaggttgcgagcgcgatgcgatgtgatggcaaaccggtcagaccgggaacagggacaacccaagcgatgtccaaggcgtcatagcctgaaactcagaacgggaccttgttcgcggactccatcagggccagcagtctcaaccgactgcatcaacaggccggacagaagactgcacccgaccaatgccactgcgtcaatttatctcttgcaacgcgggagccatccacagag

SEQ ID NO: 9990 - DNA, 1390 bp, unidentified
  source 1..1390: mol_type = unassigned DNA; note = element_fabeca0
  misc_feature 1..2: note = core
  misc_feature 3..81: note = LE
  misc_feature 82..1185: note = CDS
  misc_feature 1186..1390: note = RE
  misc_feature 1158..1377: note = bridgeRNA
tgatgcggtggacgacccctgacggcatcgatgtgccaagctcgggccgtcgagtgcaacgagctaagggagccgtccaccatggagattaccatagtcggtttagacatcgctaagcgtgtcttccagctgcacggcgtcgatgcgactggcaagacagtgttgcggcgaaagctgcagcgggcggaagtgctcacgttcttcaaggctctatcgccttgtttggtcggcattgaggcgtgcagcacggcgcattattgggcgcgtgagatcagggaactggggcatgaggtgcgattgatgccgccctcatacgtggcgccttacgtcaagcgcggcaaaaccgatgcggccgacgccgcggcgatctgcgaggctgtgacccgaccgacgatgcgctttgtgcccatcaagaccgctgaacagcaagccgtgttgatgttgcatcgaacgcgcgacttgttggtacggcagaggacgatgctggtgaacgcccttcgtggccatatggccgagttgggcgtcatcgcgcctcagggcatagcacgcgtggcggacctgctggccgtgctgttaggcaaggatacgacgaacgtgccggcgctggcccgccaggcgctttgcgggttggccgcggaacttgaggcactggacaggcgagtgaaggagatcgaggtagcgatcgtgaggtggcataaagacaacgaggccagccgccggctcgccactattcccggtgtcgggccgatcacggcatcggcgatcgttgccactattaccgatccttttcagtttcactccgctcggcaccttgcggcctggatcgggctggtgcccagacagcacagcagcggcggcacacagcgccaagggggaatttccaaacagggcgatcgctacctgcgccgattactcgtgctgggtgcgaccgcggtgatccggcattcgcgaagcaaatccacagccgaggcgggctggctcaagagcctgctcgaacgccggcccgcacggctcgtctcggtagcacaggctaacaaaacggcgcggatcgtatgggctttgctcgtgcgtggagaagcctatcgcaggccggcagcagtcccagatgggcatagcctgaagccgaaggaacccccatcagcggttgccacagctgacggggtgatgagggcgatggtggcgtgatggcgaaccggtcgaacccggagcttggaagaacccgtcaagcgttatgcgccattccagcgcgtaaatctgttggggagccaggctgcggattgcatcagggccagcggtcctcagatcgcgcaacgtaggccggacacatgaccgcacccgaccgcggcgcaacataccagatcgctcttgcttcgacggggtcgtccacaca

SEQ ID NO: 9991 - DNA, 1410 bp, unidentified
  source 1..1410: mol_type = unassigned DNA; note = element_faccd57
  misc_feature 1..2: note = core
  misc_feature 3..78: note = LE
  misc_feature 79..1125: note = CDS
  misc_feature 1126..1410: note = RE
  misc_feature 1124..1398: note = bridgeRNA
tgttggagtggacggctcccaacggcatcgaatgtgccagaatgagttcgttgaaatctcaatcgagggagaccgtccgtggaacagattatccgaattggtatggatacgtcaaagagcgttttccaattgcatggtgtgaatgcgagcgagcagccggtgcttcgcaagaagctctcacgcagggaaatggtgaagttcttcgcgaagacgccgacgaccactattgcgcttgaggcctgcggcggttcgcatcactgggcgagattgttaagctcgttcggtcacgaggtgaagctgatcgcgccgcaactggcaaagccctacgtcaaacgtggcaagaacgatgcggcagatgcagaagcattgtgcgaggcgatgagccgcccgaccatgcgcttcgtgccggtaaagaccgccgatcagcaggcagccttgatgctggtcggagtgagggaaaggttgatccgcaatcgcacccaactttccaatgctatccgcggttttgccatggagttcggcatcgtcgcggccaagggtatgtgccggatcgaaccgctgttgcagcgcatcgccagtgacgaggctctgccggaattggcacgtgagctcttcgccatgcaaggtgaggaacatcgtgatcttcttgccgagatcaaaaccgtcgatgagaagctgatgaccttgcatcgtgctgatgaatgcagcaaacgcttggcggaaatccccggtgttggaccgattggcgcatcgcttctgatgatgaagaccccggatccgacgatgtttaaatcggggcgtgattttgccgcctggatcggtctgacgcccagagatcattcgaccgccggcaaagtcaggcttggtgtgatcacccgcgctggcgacgagatgctacgaagcgtcctggtggttggtgccaccgcccttcttcagcaggttcggataggtcgaagtaaacacgcctcccgatggctccttgaactcctccaacgcaagaagccgaagctggttgcggtggcgctggcgaacaagatcgcccgtgtcgcctggaagcttatggtcagcggcgaagcgtgccgaagatcacaagatgtcccgcaggctgcggggctggcggcatgacagattggccatcacggtgagcacacaatgaacgctaccgtgctgagctgatgctgtgaacttgcaagagaaaagcagatggtgcgatcgatcgatccaagacgcgtgaaactccgttatatccagtggccatttaaggtcgttgccttgttgggaactcgcgtcgcggaaaccatcttggccagtggtcatgtgcgaccgcattcaaaggccgcacatatggaagcaagcgatccgatcgaaaatatctgcagaaatgacttgcaagcgggagccgtccacata

SEQ ID NO: 9992 - DNA, 1549 bp, unidentified
  source 1..1549: mol_type = unassigned DNA; note = element_fadc301
  misc_feature 1: note = core
  misc_feature 2..278: note = LE
  misc_feature 279..1211: note = CDS
  misc_feature 1212..1549: note = RE
  misc_feature 32..273: note = bridgeRNA
cgttgataatggttatgccggtttagctgaccggcgataatgaaggatgatggacggtgcggtgaccccgggcggaactgacgattccttggaacctgtcctgtttttgatttgtcccgcgccgcccaccgacccgatggccatggaacatgacctcataggagcgtggttgctccatcggttcccagcaagaccatggtagcgtgccccgtcaacgttctgtctgtgccggaagccatcggcaacggcattgcgacaaacgcatgaaaggaccgacgatgaagtcgactataccaacgatcctcgccggagtggatacgcattcaacaacccacacactggccctgctcgacgaacacgggcgggtgaccgacaccgagaccttcaatgcggacccgaagggctacgaacggctgatcgccatgataggtgacccggccctgtgcctgggcgtgggcgtcgagggcaccaactcgtacggtgccgcgctctcgcgcaggctcgccgcagccggctacaccgtgcacgaggtgctgcggccgaaacgcagcgtgcgccgcagcgacggcaagtccgatcccatcgacgccatagccgccgccagaagcgtgctcgccggcgatgggatcagcacgcccaaggcatccgacggttggtgcgaggcgttgcgccacctgatcgctgcacgcgagcagctcgtcacctccatgacggccatatcgaactgtcttgccgggttgctcaccaccgctccggaaggaatcagggagaggtaccggtcgctgccgtccaagagacggatcggcaagctcgcggcctgccgtccctccggtggcatcgtcgagcggaacgtgctctcatcgctgaagacgctggcgtcgtcatggcgcgaactgcacgacagggccgatgtgctggagtgccgcatgcgccagattctggaagagaacgcgcgtcccctgctcgacgtgtactgcatgggcaccatgtcggcggcccaactggccgtcatcggcggcgacaacccggaacgaatccgctccgaggcggcgttcgccaagctctgcggcgcctgcccgctgcctgcatctagcggcaagaccaaccggcaccggttgaacagatccggtaaccgtcagggcaaccgggccctgtataacgtcgccctggtgcgcatgagccaccaccaacccacaaggactacgtggtaaggaaaaccaaggagggaaagggcaaactcgagatcatgcggtgtctcaagcgctacatcgcccgcgaggcctaccgggcgctcatcgcgatccgcaacggcgaagccggacgcgaacccgccgtcgaacgcggggccaggctgagggaagtgcgcgtctcgctcggcaaaacccagcaacaggtcggcgacgcgttgggcgtgccgtccagccgcgtcagcgagatcgaacgtggggttcgggatctgcccgaactcgaacgacaaatcatcgagtggatggactcaatcctcgggcaaagccaacactccaacacatttgacaatgtataggagcat

SEQ ID NO: 9993 - DNA, 1425 bp, unidentified
  source 1..1425: mol_type = unassigned DNA; note = element_fafda8d
  misc_feature 1: note = core
  misc_feature 2..196: note = LE
  misc_feature 197..1414: note = CDS
  misc_feature 1415..1425: note = RE
ctacttaaagagaatttggtgtacgaccgcggcccggccaggcttggtcgaggtgatcggtagggtgctcaggcccgcgctgcccactcagatggcggggtgtggctctctcccggcttggaccctgccggtcaccgtggcgcggagtggctgaagaggggtttgcccagctgtaagtagcgttgccctcccgccggtgtggttctgccgcgacgacgggaaggtcaacgggtacatgggtcagctgatcattggagtcgatccgcacaagcggtccgcgacgatcgagatcatcaacgagcgtgaacaggtgctggcccgtggcaggtacggcaccgacaccggtggctaccagcagatgctcgccgccggccgccgtcacgccggccgggtgtgggcggtcgagggctgtaacggcatcggccggcacctggcccagcggctggtcgccgacggcgaaaccgtgctggacgtcccggcgaaactcgccgcgaaagcccgcaactttgacaccgggcacggccgtaaaaccgacggtcacgacgcgcaccacatcgcggtgaccgccctgcgcaccccgggcctgcgccgcgttcacgccgacggcgccaccgtcgcgctgcggctgctggccgaccgccgcgaccagctcggtgtcgcccgcaccgagaccatcaaccggctgcaccagctactgctcgaactgatccccggcggcgcgaagaagaacctgaccaccgaccaggcccgcaccctgctcgaacgcgtcagcgtcccggccggcgacatcgtcaccgccacccgctatcagctggccggcgacctggccgacgagctcaccaccctggacaccaagatcaaagcagccaaccggcagctgaagaccgtgctggccgccaccggcacccagctgaccagcctcaacggcatcggcccctccggcgccgcccgcctgctcggcgacatcggcgacatcagccgcttcccgacccgcgggcacttcgccacctggaacggcaccgcccccatcgacgtgtcctccggcgacaaccatcatcaccggctcaaccgggccgggaaccggcgcatcaaccgggtcctgcacatcatggccatcacccagctccgcttcgacacccccggccgcgcctactaccagcgcaaacgcgccgaaggcaaaaccgcgatggaagccatgcgagcgttgaaacgacgcctgtccgacaccgtctaccgccaaatgatcaaagacgaccacacggcacaacagacagcgacgggtccgggaggacacacgggggcgactctgaactccagcgcggccgacccaaaccccaagatcgacacttcggaaaagtcacaacccggacccgccaaccaccaccctaaaacacccctcacaccaaccccttgacagaggggtgc

SEQ ID NO: 9994 - DNA, 1338 bp, unidentified
  source 1..1338: mol_type = unassigned DNA; note = element_fb0009b
  misc_feature 1..2: note = core
  misc_feature 3..76: note = LE
  misc_feature 77..1096: note = CDS
  misc_feature 1097..1338: note = RE
  misc_feature 1075..1326: note = bridgeRNA
tgttagggtggacggcccgacggcatcgaacatgcgaggactgggtcgctgaatgaaccaaggaagggcagcccagatggaacttaaacgcgtttcgatcgacacctcgaagcatgtcttcacgattcatggagtggaccagacggagcatccggtcctgcggcgcgagatcaggcgtacccagtttgaaacgtttttcgccaaactcggtccaactgaagtggcgctcgaagcctgtgccggatcacatcattgggggcgcttactaagtcgcctgggtcaccgggtgaagctgattccaccacaatacgtgaaacccttcgtcaagcggagcaagaacgaccgcaatgacgcggaggctatcggtgaggcggcgtcgcgcccggcgatgcgcaccgtgccagtcaagaccacggaggagcaggccgccacgatcatcgtgaagcaccgggaaatgctggtcgcgcaacgtacccaggcgattaacgcgctgcgcgggcacgcggcggaattcggcataatcgctgccaaaggctgcccaaatgttgctgcccttctcacggttctggccgcggatgaggcaattcctgtcgccgcgcggacgatgttcggagagatgggccagcatgttggtgatctcgatggcaaaatcgcggcattggaccggcggctcctcgaccaacacaaggtcaatccggtcagtcagctgcttgcggcgatcccgggcgtcggaccgatcaccgcgatcacgatggcattgacggtggatccgggtcactttgaatcggggcggcatctcgcggcctggttggggctgacgccaagggaacactcgaccgccggcaagcatcggcctggtaaaatcagcaaggctggcaatgagaggttacgacaactccttgtggttggggcgatgtccgtgattcgtttcgccaaacctggccgccagtcggcatctggttggctgttgcaattgctggagcgcaagccgcgcaaactcgcggcggtggctctggccaacaagatggcccggatcatctgggccatgatggcgcgtggcgaggcatatcggcgccagccggttaccgccgcctgacgcgcgcgccggtgccaaaggttcagggacgtagcaagagatagtgatcggtcgaaccgacgaacgacgaaatccgggctggcccgtggtatataaataccgcccatctgttaggatgtcgttcgcggaacctatctgggcccgcggtcatgttgccgcacaaagaggccggacacatgaccgctttcgaaccgtcgctactttttctgatccacccttgacctttccgggccgtccacaca

SEQ ID NO: 9995 - DNA, 1652 bp, unidentified
  source 1..1652: mol_type = unassigned DNA; note = element_fb0518a
  misc_feature 1..2: note = core
  misc_feature 3..302: note = LE
  misc_feature 303..1487: note = CDS
  misc_feature 1488..1652: note = RE
  misc_feature 46..269: note = bridgeRNA
ctggtatattgttattgactcataaaacagtcataaacaatatacatctcctttctctatcaacctattaaccgtggttgatgacggtaattgtatcttgtatcatatgaaatatgtgaatgtggatttgtattcctccttgtggcattgactactttagaaaggctcttaccacaccttattccaaaacaatgattagttagatgagtctttgaattcgcattttgaaccaggttttgtggtttaagtgttgtggcaaacaagcacatcgcacatatattattttgaaaggatgtaattttatgtttttagttggtatcgacattgggaaacacaagcactctttttgtatcatcgaaaaagagactggcgaatccattgttaaacctaagttcttcgacaataataaagttggttttgaagaactactctcttcatttaaaggattacctaaaaaggatatccttataggaatggaagatacgggtcattatcattttgccttattaaagtttcttttagataaaaagtatcaagtagctttaatcaatcctgttactacagatcttactcgtaaactaagtggaagtcatacaaagaccgacaagctagatactcttactatttgtgatgtattaacttctaatcaaagaactaaaccttatcgcattagtaaagttgatagatttgatctatatgagcagaagcaattaacaagagagcatcataacttgaaggaacaatcaaatgtccttaaaaatcgtttacaaaaaagtatagacattgtcttcccagagtttaatagcttatttaaatcaatgtatggtgttgtatatatgaatatcttaaaagaatttggtagcgctgatgcgttggctcatagtgatatacgtaccatccgcaaatgttttgatttcaaaggaagaggtaaacgtatagaactaacagccaaagagcttaaaaacgcagctataaattcaatcggattcccttctatcgcagaagttgttcaaatcaaacacttagttaatcaaatcgaattggttgaagaacaaattgaagaattagataaaaaaatagaagagttttccattgccaacaactctcctatactatccataccagggatatcacacttctctggtacttctattctagccgagttaggagatatacacaactattcaaagccttcacaaattataaagtttgcaggtgtggcaccattaacttatgaatcttcacagtttatggcaaagcatactgccatcactaagaaaggctctacatatctaagaaagacgttgtatcaaataattctcccagtcattaataacaataaagtttttaaagactactacaatttaaagatctcacagggcaaaggttatagatgtgcccaaggtcattgtgttcgtaagcttttaagagttatatttcaactattaagtactaacacacaatttgatccagcgttacttgtttaaataaacatatacaattgattaaaaatcaatcacttcaaatgaagttgttttagtcatgccttatattcacaatttcaaagaacaaatacttttaacagctaactgtttcaataaaataaattttcaaactatttcatcaattactattgatttttatatagttag

SEQ ID NO: 9996 - DNA, 1401 bp, unidentified
  source 1..1401: mol_type = unassigned DNA; note = element_fb138ea
  misc_feature 1: note = core
  misc_feature 2..90: note = LE
  misc_feature 91..1119: note = CDS
  misc_feature 1120..1401: note = RE
  misc_feature 1160..1396: note = bridgeRNA
taatggaatggtcgcccctatctaatacggcatctatatgccaaagttgaggtgaatgtgaactctcaatttacgatagaggcaaccaatatgaatattacaacagttggcattgatctggcaaagaatgttctacaaatacatggcatcaatcaacatggaaagaaggtatttaacaaacaattgcaacgtaagcaggttttaaaatacttcactcagttacctccttgcttaataggcatggaagcttgtggaagtgcccatttttgggcaaggaagctacaagcgctaggacatacggtgaaactaatggcaccacaatttgtaaagccctatgtaaagactaataaaaacgatgctgccgatgcagaagcaatttgtgaagcagtaacacgacctacaatgagatttgtaccaataaaaaatagtgagcaacaagccatattatcccttcatcgtgcacgccaaggatttgttaaagcaaggacagcccaagcaaatcagatacgtggattgttaatggagtatggtattaccataccacaaggtattagtcacataacgaaaaaaatccctgaattaacagaagatgaggatagtgaattacctggagtattccaacaattactacagcgactgtgtgagcatttaaaggagcttgatcgccaaacagtagaattagaaacgcaaattcaaacttggcatagagagaatgaatccagcaaaaaattggcctgtattcctggtattggtccgctaaccgccagtgccttgatagcatctatcggtgatgcaagaagtttcaagaatggccggcagttagcagcgtggctggggctggttccaagacaacattccagcggtggaaaacagatactacaaggtatcagtaagcggggtgatacgtatttgagaaccttgttgatccatggtgcccgttcagtaatccgagtagcgacaggaaaaacaactccgacacattgctgggcagtcaatttagtagaacggcgtaataaaaatgttgctgctgtagcgttagccaataagaatgctcgaatagtttgggcactcttgacacaaaatcgccactatcaatcaaattattcgttggtagtataaatacaaaatgtgaaaccaatatcgacttaattaaaggaattttttcaaccgattgcacaggcaatcatgacacgatggcaagacaggtcagaccgtggcagattaaacctaattcacacagggagcataaagctcgacagactgatcaggtatctgccagcatattccatcagggacagaggcttagttgtagcctcaataaaaagtccggatctatggctgcaatcttaaccttcttactattgttgattgaaaacttggcaaaccgggggcgaccatcta

SEQ ID NO: 9997 - DNA, 1413 bp, unidentified
  source 1..1413: mol_type = unassigned DNA; note = element_fb280b3
  misc_feature 1..3: note = core
  misc_feature 4..83: note = LE
  misc_feature 84..1139: note = CDS
  misc_feature 1140..1413: note = RE
  misc_feature 1153..1400: note = bridgeRNA
tgatgaggtggatggcccctgagcggcatctctgtgccaagctcggagctgttgtggccaacgagcgagaggagccatccaccatgcagaccaacgcaaaagccagcccggccatcatcggtctcgatattgccaagaacttcttccaggttcacggggtcgatgtcgctggccaggtcgtgttgcgtcgcaagctcagccgcggagatgtgctcgcattcttcaagaatcaacccaaggctctggtgggtatcgaggcgtgcggcacagggcactactgggcccgcgagatcgccgctctcgggcacgaggtgaggctgctaccacccacctacgtcaagccgtacggcaagcgcggcaagaccgacgctgccgatgctgaggccatctgtgaagcggtcacccggcccaacatgcacttcgtgccggccaagacacccgaacagcaggcggcaatgatgatgcaccgctcccgtgagctgcttgttggacaaagaacggctctggcgaatgcgcttcggggccaccttgcggagctgggcatcatcgccgccaaagggatccgtcgcgtggccgatcttgttgcggaactggtaggggcggatgctgctaagataccgccgcttgccaaggcatcgctcacctgcctcgctgcccagatcgaggcggtggagacgcagatcgataaactcgaggcgctgatcctggagtggcacaagggcaatgaggcgagccggcggctggccaagatccctggcgtcggaccaatcaccgcctcagcagtagtcgccacgatcggtgatgcctcgaacttcacctctgcccggcacctctcggcggcatgggggctgaccccgaagcagaacagcagcggtggcaaggccaagcaaggcggcatctccaaggccggagacgcctacctgcggcgcctcctgttcattggctccatcgcagtgatccgcagcaagaaggcgcaggacgcgggaagctggctggggaggctgctggagcgtcggccggcgaaggtggtggccatcgccgtggcgaacaaaacagcccgggtgatctgggccatgctgcgcagcggggaggcttatcgagccgccgacgcagccgtcgcggcgccggctgccgggtaaaacgaaggtgagagcttccccatcggagatgccgcgaccgatgggagcgtgagggcaaagtggagtgatggcaaaaccggtcgatcccggaaccctgctgaacccgtctatgtcaaagcgtcgtggaacgcggccgcttgattggaagcagggtcgcggatttcatcagggcccgcggtcatgcgcaccgcacatcgaggccggacacatgaccgcacccgaccgcggcgccaccacaccagaaagcccttgcatcgagggggccatccacaca

SEQ ID NO: 9998 - DNA, 1547 bp, unidentified
  source 1..1547: mol_type = unassigned DNA; note = element_fb37c70
  misc_feature 1..3: note = core
  misc_feature 4..241: note = LE
  misc_feature 242..1435: note = CDS
  misc_feature 1436..1547: note = RE
  misc_feature 7..261: note = bridgeRNA
attagtaatatataagcgagggtgttacagccttcgcttttcctttaagatgaaggtgattggctgacggaatttccgattgggaccccacgcccgcaaacaaatgtgtcagccagccttcatcattctgcattcgattcagcaagttgggacaaatcactgctcccgtttcacggactaatctgattgaatcttgaagtgctggaaccaatcgtatctcaacgaatgaaggaggaacctcatgattgcagttggaatcgacatatccaaagccaaaagcaccgttgcggtgattgattcagacggtacagttctggcaagtccattcacaatggctcatacgcagctggagatggaagctttcgtgacctatctgaagggacttggagaacccacgaccatcctcatggagtacactggccactaccattatccggtgctccagaagcttcaagacgagggatttcccgtttgcattgtcaatccatatcagatgaaaaaatacggggatgtcgagattcataaggcgaagacggacaagaaggacgcgcttcggatagcagcctatgcacttgaaaaatcctataaactcgtaccgtatagctcaatggagcaaaagtatgaggacttgaaatttctttcccgccaatacaaccaacgaatctcttatgttgcgaaactgaaagttcagctcatagctctgctggatcagacgatgcctgggatcacaagaatactgccactgaacagcagaaaccctgaaaaatgcgctctgctgctctttatcaaacgattcaagtcctttgatgagattcaaagaattggaaaggcgcgcttcctggcatcctatgacgtcttggcgaaaaaggcttcagaacgcagtgcatccagcaagggacttagtatctacgaactcgctgttgacagcattaccacccgcggcgaagacccttacatttggctctcacaaaatcaatgcgttgacttgctttccgcaacacaaaatgctgccgacgaaatcatttctcagatgagaaacatcgccgagacaattccggaatacaaggtactccgagcaatgcacggcgttggtgaccgcctcggaccgattatccttgccgagatcggtgatgtccatcgctttcacagcggtaaggcattgaactcctatgccggcaacgatgcccctccatatcaatccggacaattcgagagcagaaaccgccacatttcaaaacgtggcagctctaccctccggaaggcttgttacgaggtaatgcaggcccttaaactgacaaaacctcaagacgaccctgtgtacctctttatgctcaaaaaagagcaggaagggaagcctttcaacgtagccaagatggctggcgtgaacaagttcctccgaatctactacgccagagcaatggagctctacaagtaaaccactttaattctacatcattttttcaaagcccgcaatctggtgggttcgtttagtgcgcccttttttctgtgcaactttcagaaaaaagtccttgacaaacattagcaag

SEQ ID NO: 9999 - DNA, 1592 bp, unidentified
  source 1..1592: mol_type = unassigned DNA; note = element_fb3a05c
  misc_feature 1..4: note = core
  misc_feature 5..370: note = LE
  misc_feature 371..1582: note = CDS
  misc_feature 1583..1592: note = RE
ctcactggactaccttcccgtccatgaaggacgtttggaccagatgcagggttgtccacggcggcgggcggccggcgcttgcgacggaccggccgcacgccgcggtggtcaacccgtgttctcggcgccgtcttgacgcgccgtggcccggcgtggaaggtgcgtatcgacttccgtgccctcggggtgactgcccaggctgctggccgttcgacggccccgatgagacccgcagccctcgaggtgccggaagacccagacgggcaacaggatgtagcgccacggtgtgcagccaagagcgccaatcagtgagcgtcccgcgtgggcttccggcacggcgagtcataccgcaacttgcaggaatttgtccatgagcaactactttgccgggctggactgggccagccgcactcacgcgttgtgcgtcgtcgacgagcgtggtggcgtcgtcgagcgcttcgagatcggccacgacgccgcgggtctggccgatctgcagcgccagctgcgccgcctgggctcgccgccggtggccatcgagcgaccctcgggcctgctggtcgacaccttggtcgaggccggcttcatggtcgttcccatccatcccaacgcggtcaaggcgagccgaccgcgctaccgcagccacggcggcaagagcgacgcctccgatgcctatgtgctggccgacttgctgcgcaccgacggccatcgcttcaaggccttgactgcgcagggcgacgagatcaaggcgttgcaggcgctcgttcgcgggcgcgacgatctggtggcaagccgcgtgcagctcgccaaccagctgcgcaccctcctggagtcgttctggcccggtgcagccgccgtcttcgccgacatcgattcgccgatcgcgctggccttcgtcgagcgctaccccacgcccgaggctgccagctcgcttggccccaagcgcatggccgccttctgtgcccaatacgcctacagcggcaggaggggcgccgaagacctgctggctcggctgcacgaagctcctgcggcggtctgcggcgagctgcagatggaggccaagggcgagctcgcacggtgcatggctcgcacgctgcgcagcgtcgtcgagcagatccgccttctctccagtcgcatcgagcaccacgtcgcctcgctcgaggacggtcgcatcctcatgagcttcccgcgcgccggccgcatttgcgcggcgcaaatcctctcggagctcggcagcgtgcgcgagcgcttcgtcagcgtcgagcacctggccgccgaagccggcgtcgctcccgtcacctacgagtcgggcaagtccaaggccgtcacgttccgatgggcctgcaaccaccgcctgcgcgcagccctcacctgcctggcagacaactcgcgtcacgccaacgcctgggccgccagcgtctacgccaaggcaaaggccagaggctgcgaccacccgcacgccgtccgtatcctcgctcgtgcctggctgcgcgtgatctggcgcgcctggaccgatcgcagaccgtacgacccgtcccagcatcggggcgctcaactgctcctcaaaacagttgggggttgacacaggatgt

SEQ ID NO: 10000 - DNA, 1391 bp, unidentified
  source 1..1391: mol_type = unassigned DNA; note = element_fb5a1e3
  misc_feature 1: note = core
  misc_feature 2..90: note = LE
  misc_feature 91..1116: note = CDS
  misc_feature 1117..1391: note = RE
  misc_feature 1167..1383: note = bridgeRNA
caatggaatggacgctcccaccccgtaacggcatcaaatgtgtcaaagtggagatgttgaacccccacttaatcggagaggagcgtcatcatgcagattacaactattggtattgatctggcaaaggatgtatttcagattcacggtgtggatgggcaaggaaaaattgtgcttaggaagcaactaaggcgtggtcagatggcttcattctttgtgaatctgcctgcatgcctgattggtatggaagcttgcggcagcgcgcattactgggcacgtaaacttcaggaacaaggtcatgtggtacggctcatggcgccgcagtttgttaagccctatgtgaagaccaataaacatgacgcggccgatgctgaggcgatttgcgaggcggtacgacgaccgaacatgcggtttgttccgatcaagaatgttgagcaacaggccatattgtcagtgcatcgcgtacgccaaggattaatcaaagcacgcacagcgcaggcgaatcagattcgtgggttgctcagcgagtttgggctagttttgcctaaaggaattcgcgttgtttaccagcgtgtcccggcgttgcttgatcaaactggcgatgagttgcctggtttgtttcgagagttggtgttgcgtttgttggcgcatctgaaggatttggatcgtcaagtcagcgagttagagcaacaaattaacgcatggcatcgatccaatgcattgtctcaaaagctggagaaaattcccggcattgggcccatgaccgccagtgcattagtggcttcggttggcgatgcaaaaagtttctccaacggcaggcagttggcagcgtggttgggattggttcccaagcagcacgcaacaggtggaaagacgaatttacttggaatcagtaaacgcggcgacacatatttacgcacgttgcttattcacggcggacgtgccgtgattcgaagtgctgagcaaaaaccaccccatgcaaattcatggcttgctcgaattctggcgcggcgtcacaaaaatgtagtgactgtcgccctggcaaacagaaatgctcgaatcgtttgggccttgcttgcgcatgatagggagttccacgctgattacgcaccggcgtaatcagcgtggactatgaaaaacacaagtaagtcttaataggagttcagttcaccgattgctcaggcaatcaacgttgatggcaaaacaggtaagaccgtggtcggcaaagcccgacgtccccctagcgctatgagcgcggttaaacgatggggcaccgaccagcacattccatcagggacagcggctaagccgcgataaaagtccgaatgtacgggtgcaatctttacctaatgctggcggcattgaaggcttggcaaaccgggagcgtccatgta

SEQ ID NO: 10001 - DNA, 1465 bp, unidentified
  source 1..1465: mol_type = unassigned DNA; note = element_fb6a5c6
  misc_feature 1..3: note = core
  misc_feature 4..219: note = LE
  misc_feature 220..1446: note = CDS
  misc_feature 1447..1465: note = RE
  misc_feature 7..216: note = bridgeRNA
tctaatggtgtccgtcatcgtcttttgagaagatggcaccgaaccgctgatcggtgagcaccagcacattctgagcctcgagctctagtcggagagcgtgccccaatcggtcggtgaggacggcggagaaggctggaggggtgtcgtgctgcgagcactggtccattaggtcgccaccgtcgcctcgaggttcaaccgacaacgacaggaggtgaccacatgatctttgttggagtggactgggccgaggtccaccacaacgtgtgcatattggacgaaggtggtgacgttctcgcgcgcaagaggattcccgacgcactcgacggagtgaatcagttgcacgcgatgatcgccgagcacttgggtgaggagaacgaagccgcgagtgtcatcgtcggcatcgagaccgaacgaggactcctcgtcacggcactggtggccgcgggatatcaactcttcgcggtgaacccactggccgcctcgcgttaccgcgagcgacaccacgtctcgggcgccaagtccgatcccggtgacgccaaggtgctcgctgacctcgtgcgcaccgaccgccacaatcatcgcgcgattgccggcgacagcgttctcagtgatgcgatcaaactgctcgcgcgcaaccaccagaacacgatctgggagtgccagcgccaggtcaacaccctgcgctcagccctgaaggactattaccccggggccctcgaggcctttggaacagagctttcggggcttgacgcggtggcgatcctcgccattgctccgactccggcgaaagcccgcgcactcacgaaggtccgcatcgagaccgccctgcgcaaggccggtcgtcgacgtctgttgaacgagcgcgtgaaccggatctacgaggtgctccagcgcgagcaattgcaccagccggcgctcttagaggacgtctatggcgtcacgaccgaagcgaccgtcgccaacatcgcgcaactgaacgcgtcgatcgccaaactcgaggcgtcgctgtcgacgcattttgagcagcacccgagcgccaaggtcatcctctctcttccaggaatggggacggtcctcggcgctcgggtgctgggcgagttcggggatgacccgaaccgctacgccgacgccaagtctcgcaaaaactacgccggcacgtcgccggtcaccagagcctcggggaaatcccacgtcgtgctggcccgccacagccgcaacaagcgattagcgagtgccctggatcagtgggcgttctcctctctcttaccttcgccaggggctcgggcctactacgacgagctcaagggacgcgacaagcaccaccgaaaggcgatacgccaactcgccaaccggtgggtcgggatcttgcacggttgcctggagaacgacaccccctacgacgaagaaatcgcgtggtcacaccatcgtccagacgttgccgcttgacattaacgaccaaggggtg

SEQ ID NO: 10002 - DNA, 1396 bp, unidentified
  source 1..1396: mol_type = unassigned DNA; note = element_fb747e6
  misc_feature 1..2: note = core
  misc_feature 3..88: note = LE
  misc_feature 89..1120: note = CDS
  misc_feature 1121..1396: note = RE
  misc_feature 1091..1383: note = bridgeRNA
agatggggtggttgccgccgtcccgaacggcatcgcaatgtgccaaaaaagtggtgttgaaggccacttagcggaaaggacggcaacaatgcagaaaaatacgatgatcggtgtggatctggcaaaggctgtttttcaggtccacggcccgtcgatgacggggcaagagaagttccgcaagaagctgtcgcggcaaagtttccccaggttcatggccgagcagcctccagcggtggttgttatggaagcttgtggcagcgcgcattactgggcccgcgagatgatcaggcttggccatgaggcgaagctaattgcaccacattacgtgaagccatttgtgaagcggcagaagaacgatgccgcagacgcgcaggccatagtgatcgcggcccaacggcctgaaatgcgctttgtcgagccgaagtgtgctgaacaacaaagccgggcgattttgttctgcgctcgagaaaggctcgtccgccagcgcaccgaattgatcaatgcactcagggcgggcctctatgaatacggccatgctgttccgcagggaatccatcagatcaaacagatcgaggaaatccttgatgcgccgaacagcgacctgcccgatttggtgcgtgaggaatgccgcgacctgttggaacagatcgccgaacagtcggttcacatcaacgctcgaaccgcgaagatcaaggttctcgcggctgaggccgacaccgcgcggcgcttgcagacgatccccggagttggcccgttgaccgcgctggcagttgaggcttttgccccgccgatagacagctttagctgtggccgcgactttgcggcctggctgggcctcgttccgcgccagttctcctcagggggtaaggagcggcttggtcgcacttccaaggctgggcaggctgatatccgcaggctgctgatcataggcgccatgtcgcgtctgaactggctgggccgaaaatcaatcctagcggattcgtggctggcgcgcattgcagcgcgaaagccgcggatgcttgtggcaattgctttggccaacaagatggcacggacaatctgggcattgatggcaaagaatgaggattaccgagttccggcactggtggcggcagcatgagcaacatgctgcacaatctgctaaaggccggataaagggggtgtgagaaggcgacgactcgaatgggcaaaatgatcgaacagatctgggtcagaaaaaccagttcaggactctgagcgatacagctcgccaatgagatttggatctgatctgcggatcaccataccggccagcggcttccgacaatgccgcaatcgaaggccttacagaagaccgcactcgatgactcgcacactcggatcaaaatcttcatgtaccacgggcggcaaccacaga

SEQ ID NO: 10003 - DNA, 1318 bp, unidentified
  source 1..1318: mol_type = unassigned DNA; note = element_fb75dc0
  misc_feature 1..2: note = core
  misc_feature 3..69: note = LE
  misc_feature 70..1083: note = CDS
  misc_feature 1084..1318: note = RE
  misc_feature 1090..1312: note = bridgeRNA
ttaattatatggtccgcctcactctcaagccctacgcttagagtaggctctcagaacgaggtgaaccatatgtcaaccatccacatcttaggtatcgatttaggtaagcactgctttcatgcaataggtaataattattctggtaaggaagttattcgccgtaagtttaatcgaagccaactcctacgtttcttatctgtactcgaacatactacgattgctttcgaagcctgcggtggtgcacactggcttgcaagaaagtgccaagcccttgggcatcgagttcatctcatcccacctcaatatgtaaagccttatgtcaaaggcaataagaatgatttcattgacgcagctacgatagccgaagccgccagtcgaccaaccatgagatttgtctcggttaaatcagaagaagctcaagtcatctctgctatccatcgtgtacgagaaggttatgtaaaagaacgaaccgcgtgtatgagtcgtattggtgcagtgctactcgagtttggactcagcttccctagagggcatgcgaagatgaaagcactgtttcaatggttagcggagcaggatgttgagttgccacaaagtcttattgctgagcttctctctattcatgaacactacaagtacttaaatgaccgagtttctgagcaagaccaaaagttgaaaagcatcgctataagtaatgaaagcgcggagttgctgaagactatccctggggtcggtgatttaacggcaacgttgtgcgtagcgaacatcagttccgcttctaattttgatggagggcgagagatggcagcatggcttgggttagtccctagacaattctcaacaggggggaagtctaagctgttaggcatgagtaagcgagggaataaacacctaaggactctatttattcatggcgctcgagccgtactttctaggatagaaagcacaggaaaagtgtttggagattggttggtgaatcttcgagcaacgaaaccctttaacgtggttttagtagcacttgccaacaagctcgcaagaatagcttgggcggtgttgtatcaccgccaagcttttcgggctgcatagccataactaagtttgcaacgccaatgaacgtgatgacaaaaacggtcaatcggccagattagtaacctgtcataaaaaatagcatctaatgctttcggttttttaaggataatctggcgcggatatcatcgtggagcggggaagttagtgttcccaatgtggactccgaatacattagcgcaaaccaactccgttattactaaattgtagttgcaataacggggcggaccataca

SEQ ID NO: 10004 - DNA, 1166 bp, unidentified
  source 1..1166: mol_type = unassigned DNA; note = element_fb78ba1
  misc_feature 1..2: note = core
  misc_feature 3..176: note = LE
  misc_feature 177..1145: note = CDS
  misc_feature 1146..1166: note = RE
  misc_feature 34..197: note = bridgeRNA
cttgtatcttgaaatttggttataataatagcgattagatttggcaaggtgtatgtaatccgattgtccctggggtttatagcccgtagcaaagcgaatgatgcatacacttagccactcatctgaaacccgaacagttgtccgtaattcataacgtatttgcaaggatgggtaatatgagtcagctaaatccaatttgtgtaggaattgatgtttctaaagcttcattggatattgcaggcaccaataacattgagcagttcagagtcagcaataaccctgacgggttcgataccatcatttatcaactgaaaaagaacaacatagccttgattctgatggaagctacaggtggtctcgaggcagcgattgcatgcgctcttcaggctgaaggttttgatgttgccgttatcaatcccaggcaagccagagactttgctcgatccatgggctatctggcaaagactgatagaatagatgccagagttttagctcagatggctgatgtcattaaccgccatcctgagcggtcacgttttatccaggctattcctgatgcagagcgtcagattcttgctgctatggtggtgcgcagacgccagctgattgcaatgcttgtagctgaaagaaaccggatgcatccatctcacccgcaaaacagaaaaagcatcagtaacatcatcaatgcactagaaaatgaacttaaacggattgacgaggatatgcataagcatattactgatcatttcaacgagcttgcagagcggctaagtactatcaaaggcattggtatgatgactgctgctacattgctggcagaagtccctgagttagggaaactctcgcgcagggagatcagtgcgctggttggggtagctcctgttaatagagactcgggaaccatgcgtggccgacgaaccatttttggcggtcgggccggagttcgaacctctttgtacatggctgcactggttgcaactcgtttcaatccggtgataaaagcattttacacacggctggttgcagcaggaaaagccaaaaaagtggcgctggttgcctgtatgcgcaaactgctgactatcctgaatgcgattctcagaaagaaccaagaatgggatgagtcgtatcataacgttgctccataaatatactgttcaagacagttg

SEQ ID NO: 10005 - DNA, 1442 bp, unidentified
  source 1..1442: mol_type = unassigned DNA; note = element_fb7ae89
  misc_feature 1: note = core
  misc_feature 2..142: note = LE
  misc_feature 143..1162: note = CDS
  misc_feature 1163..1442: note = RE
  misc_feature 1207..1441: note = bridgeRNA
gaatgtaatgaacgcatcccaaccacgtaacccttggtactatgctgaaattgagaggtaaggtggggatcctctcagatttccggccttatagtgcctaaatgagaagcctgttgctctctgataactggaggatccactcatgaaatatactcctgttggcgtcgatatcgcaaagtatctgatgcaaattcatttcgttgatgaatataccggtgaaatcattgataaacagctacgacgacgggattttttaacttttttcagcaaccgggatccttgtctgattggtatggaagcgtgtggtggtgcccactattgggcacgggagctgaaaaagttagggcatggggttcatttgctccaggctaaatttgttaaagcttttcgtctaggtaacaagaacgatgtcatggatgctcgggcaatctggatggccgttcagcaaccgggtaaacccgtcgctatcaaaaatgaagaacaacaaaccatactttctgtgcaccggatgcgtaatcagttagtgaaattcagaaccgcacaaattaatgcattgcatggattgttattggaatttggtgagacagtgcataaggggcgggcatcgttaaacaaagcgatacccgaggtgcttgaacggctaaggataacactctcccccttcctgatcagcctgattgaagagcaatattatcgcctgagtgagctcgataacgaaattgacggtctggaaaaacaattgactgagtgggcaaaacagaatgcggattgtcagcggatcatgaaaattcctggtgtgggtgttctgattgctacagcggccatcgctacgatgggggatccgaccgctttccgatccggccgggagttttccgcctatctgggcttggttccccggcaaacaggaacaggtggccgagttaagctactgggcatcagtaaacgtggggatacgtatctaaggacgctgtttatccatggcgccagagtcgcaacattatgcacgagaacaccgccgttgtgggtaagcgaactgaagaaacgacgtccggttagtgttgcgattgtcgggatggcgaataaactggctcgcacggtctgggcactgattgctcatcaacgggaatatgaaaaagattacgtcagtgtcaggccttattgaggtatttcaccgataaaaattcacgccaactcaattaaaaaagacgaatgcagaaagattgctgaggcaaaagtcgtgatgacaacgaaaggtgagaccgtgacttgcttgctaaacctgaatggtcaccagagcgtcaagctcgttcgaggaataaggcgcaggtcagcggattacatcgaggcccacagtattagctgtaacaaggccgaatatagagctgcaatctaccttcaatgtcacaataacttttgtcttgcaaacgggatgcgttcatata

SEQ ID NO: 10006 - DNA, 1588 bp, unidentified
  source 1..1588: mol_type = unassigned DNA; note = element_fb83370
  misc_feature 1..2: note = core
  misc_feature 3..211: note = LE
  misc_feature 212..1498: note = CDS
  misc_feature 1499..1588: note = RE
  misc_feature 89..242: note = bridgeRNA
aaactcccatgcccgcgcgcttggcaccaccataaatgaaactgtgcagacggtaggggattgaatttgtttctgctattatctatactgtgattaacggcaaagatcgtttttattttgggcctgtagcccgctttcaaaactgatttctggtactctcatttgcaccaccatctgtccagccgttttcggcagaaggacgtacagtaaaatgacaatagacagagtaccgtgccgtaaattcatccctggaggtgccattatggataaaatttacgacaaatgttgtggtattgacgtgcacaaaaaacttatcgtcgcctgctttagaagaggcaacaggcaggaagtacgcgagtttggtgcaacaaccagagagcttcttacattggccgactggctcaaagagggcggctgccaaatggtcgccatggagagcaccgcatcttactggaagcctctgtataacattctggaatcctctgacctgaacgctatggtggtcaatgcccaccatatgaaagcagttcccggacggaagacggatgtgaaggatgctgaatggatcgctgacctccttcagcatggattacttcaggccagctacattccggacaaagaccagagggaactgcgggaactggttcgttaccggaagagccttgtgggcgaacgcacaagagagttaaaccgcctccagaaaatgctggaaggagccaatatcaagctgtctggtacagtagaggatatcaatggccgaagtgcccgcaaccttttggaatatctcctcactggtaaaccttttgatgaggcaaaatacgatgagatgtatgagaagaaactcatcgcccataacctcaaagccacaaaagagcagatcattgaggacctgaacggtgtcatgactccccttcagcgccggatgatgaaagaactccctgcccatctggacgaactcaatgtccacatcaaaaatctggatgatgagatcgacaactttatgaagccggaagaaaagcaggcgtcacaggcaatccagagtgtaaccggcattgggaataccagcgcgcaggcagtcatttctgtcacaggcacagacatggaacgttttcccacagacgcccacatttcttcgtgggcgggattatgtcccggagataatgaaagtgccaaaaagaggaagtctggaaaaacaaggaaaggaaatgccctccttcggaccacgctgatcacctgtgcccattcggctgtgaaaaataaaagctcctgtttttacgcacagtatatgaggatcagcgcccaccgtgggaagaagcgtgcatatgttgcggttgcccattccatgctgacagccatttatcacatactcaaggaaggtgtggttttcaaggatcctggagctgattattataatcagtttaataaggagcgcaaaatcaatgcgtatctcaaaaagttaaaatcacttggttgggagcctacggtagttgccacctaagcctgtcagtcaagtacaaaatgaacgtttttagaattgacagggatagtttgcgcttttttggctacccggaaggttttgtttcacagt

SEQ ID NO: 10007 - DNA, 1356 bp, unidentified
  source 1..1356: mol_type = unassigned DNA; note = element_fb87288
  misc_feature 1..3: note = core
  misc_feature 4..195: note = LE
  misc_feature 196..1341: note = CDS
  misc_feature 1342..1356: note = RE
  misc_feature 3..152: note = bridgeRNA
cttgtatgttgaacatgaagacgcggggaagccgaaagatccttgagccttgagctcgtggcgaagataggctccccgccctcttcaccaaggccgaagagtatctgaggcgcaagagccagcatttacaaggtcggcaggtgagggtacagggtcgggaagcccgtgtcttgaataacgcaggaaggactgggaatgcaagcgatcaagacgttggtgggggtcgacgtgagcgccaagacgttggcggcgaagcggcggcgtaagaacgaagggaaggatgaggcgaaggagtttccgaacgatgcggctgggcaccgtgagttgctcaagtggatcggccgaggtgcgcgcctctgcatggaagcaacgggggtgtatcaccttcagctggcgctgatgctggtggcggcggaggtggaagtgatggtcgtcaatcctcgggtggcgaaagacttcgggcgtgcgttggcgaatcgaagcaagacagaccgcatcgatgccgggaccttgctcgagtacgtcgcccgaatggacttcgtagcgtggaaagcgccgagcagcgcggtgatggaactgcgcgagctgggacggcggctgagcgaactggttcacgccggcacggaggagaagaaccgctttcacgcaaagaacgtggcggcaatcagcagggccgtcatcagtgacgtccaggcacacgttgcccagatcgaaaaacgggtcacgcagatcgagaaagccgcagcgctggtgattcgcgccgatgccgacttgcgcgaacagtttgagatcctgacgaagatcccgggcatcggccgccgatcggcgattcttctgctgagcgagctggcggtgctcgatccgacgatgacagtcaagcaaatcgtcgggcatgcgggactggatccgcgcgagtacgagtcgggaagcagtgttcagaagccgccgcggatcagcaaggccggcaatgcgcacctgcgggcgatcttgtacatgcccgcgctgaccgcgattcggcacgatcgcggagcacggctcttcttcgcgcagctcgtcgcgcgcggtaagaaaaagatgcaggccatcgtcgcagtcatgcgcaaggtcctgcacggcatctggatcgttctacagcgccgagtggcgttcgacagctcggttcttttcgcggtctccctggcgaaggccgaatcctccgattcggccgtagctgccaaccagccggagccgagccaggatcacccgaagggccgcagcgaagcggaggagctgcgccagcagcttgatcctggctcggcgcaggctacgcgctcgcgaagaaagagatcaaaagccgcttgactttcaacagagtat

SEQ ID NO: 10008 - DNA, 1529 bp, unidentified
  source 1..1529: mol_type = unassigned DNA; note = element_fb9dfef
  misc_feature 1..2: note = core
  misc_feature 3..238: note = LE
  misc_feature 239..1414: note = CDS
  misc_feature 1415..1529: note = RE
  misc_feature 3..217: note = bridgeRNA
cttgtattataaagtagtagtttataaagcccctctccaagggctgtactacactgtagaggatgctgtggattaattcaaatcacctccacaatatggttcaattgaggcttcaaccacagccctttgcagatttgttaatcagttagataccgccggacggtttatgtggaacaaggtaacaagagcaaagagtcctgtggatacagcatcaaacattacattcggaggtatcattatggtttgcgtaggcattgacgtggcaaaggacaagcacgactgcttcataatcaactcagagggtgaagtccttggggatgtcttcaccatccccatcaatatggaggggttccattgcctgttggaacgaatccgcgcctgcaccaccgcccagggcaaaataaaggtagggcttgaggcaaccggacactacagctacaacattctcgggttccatcttgacaacggtcttcccgcctatgtcttgaaccccttgcacaccaacctgtaccgaaaaagcctcagccttagaaagacaaagaccgaccgggtagatgcgcgaacgattgcagctatgcttttatccaatgtgggcctcaaaccctacacagacacagcttaccacaacgaggagctaaaatcactgacgagataccgtttcgataaggtgaaggaacgggcaaagctggaatcccccatcgccagactggtctgcactctgttcccggaaatggaaaagctggttccgtctctccatatgccctctgtttatgcgctgctaagcgagttccctggggctaaatatattgccgacgcacatcttacacggttaaaagcgcgtctgctggaagcctccagcagacgctataagagggatatggccgtagaaatccgcgaggccgccaaagcatctattggctccgtactgccagcaaagtggctggaactgcggcacaccattcatctcattcgggaactggactccgagattgaagaaattgaagctgcaattcaagcaattatggatgagatgcattcgcccattaccaccatccccggcattggaactcggatgggcgctatgatccttgctgaggttggagacttttcccactttaattccccggataaggtgttggcttatgccggtctttcgccctttacctaccaatccgggcagcttacaaactgctatgcccacatggaaaagcgcggttccagatatttgcgctttgctctttacaacgctgccaaatatggttgccattgggatccgctctttgcttcatacctcgctaaaaaacgagccgagggcaagcattacaacgttgctatctctcatgccgccaagaaactgatgcggcttatttttgctctggagaaattccgagaaccgtatcgccttgcggcctgatagcctctcattagctcgcacgcgctctattgagtgcctgttttgcaatgccttttttaaaccatctctctttacacaactttcctcttttgggacttgacttttaatagttagt

SEQ ID NO: 10009 - DNA, 1373 bp, unidentified
  source 1..1373: mol_type = unassigned DNA; note = element_fb9fa92
  misc_feature 1..2: note = core
  misc_feature 3..80: note = LE
  misc_feature 81..1103: note = CDS
  misc_feature 1104..1373: note = RE
  misc_feature 1076..1360: note = bridgeRNA
tgatggggtggacggcccccggcggcatcgagatgtgccatactggagtttgtcgcaaccagtagagagggagccgtcctatgcaagagattagcacgattgggctggatttggccaagtcggtttttcaggttcacggcgcggatagttccggcgcgccggtgctgcgcaggaagctgcggcgcgacgcgctgctgagctttttcgcgcagctgccgccctgcctggtggcgatggaggcgtgtgcgggcgcgcattattgggcgcgcgcgatcgccggtttcgggcacacgaccaagctgatcccggccgaatatgtgaaggccttcgtcaagcgccagaaaaacgacgccgccgacgccgaggcgatctgcgaggccgcgcttcgtccgaccatgcgcttcgtcgcgcccaagagcgccgaacagcaagcctcggcaatcgtgtttcgcgcccgcgatctgttggtgcgccagcgcacccagatcatcaacgcgctgcgcggccatctggccgagttcggcatcgtcgtcgccaagggccccgctcatgtggccaagctcgtggccatgatcgaggaagagaaggcgccgccggatgcgctcccggcgctgcaatgccttgtttcaacactcaaggctttagaagaaaaggtcgccgcgctcgatcgcgagatcgccgcgcgcgcgaaagcagacgatgtcgcggcccggctgatgagcatacccggcatcggtccggtgatctccaccgcgattgcggcgctggcgccgccggcggatactttttccaagggccgcgatttcgccgcctggctggggctgacgccgcgccagcattcgagcgggggcaaggaaaggctcgggcgcaccaccaagatgggtgagcgcagtctgcgccggctgttgatcatcggcgccagcgccgtggtgcgctgggcggtgcgcaatcctccggccgcgggttcatggctggcgcgcatgctggcgaggaagccgcgtcaattggtgaccgtggcgctcgccggcaagatggcgcgcatcgcttgggcgttgatggcgaaaggcggaatttacagagcttcgggcgtggtcgcggcgtagagccaacaccgcgaacgggggccgcgaaacggcgtgggaaggtcaaacggagaagtatggcgcaaaagtcgagaggcgggatcgggaaaaccagcggtgacatgagcgccatcgagcgcgtgtgtgtgacatggacccgatccttcgtactcccatacgggcccgcggccatgtgcgccgcttcaacgaggccggacacatgtcagcacccgaccacgcgccatgcatcaatgttgagattcttcttgcaccaaaggggccgtccacaca

SEQ ID NO: 10010 - DNA, 1688 bp, unidentified
  source 1..1688: mol_type = unassigned DNA; note = element_fbaf8fd
  misc_feature 1..2: note = core
  misc_feature 3..263: note = LE
  misc_feature 264..1445: note = CDS
  misc_feature 1446..1688: note = RE
ctcgtataaaggataattgcagctttatttttattgctgccttttcataaaaggaaagtaggctgagagggtagttttgagaacttacggcattgtccggcgctctaagactaccaccctcactcctacggctctccggcaatttaacatgttacagctctactgcacagagtctggcgattttccacgagcttacgatctgtagagagcagggggatatttggtcctcagcctataaaattgtgttgtggaggatcaaagaaatgtatttgaacatcggtattgatgttgcaaagaatatacatgaagcctgcattctgaacgataggggcgaacagattggaaaatacatcagaatccaaaatttcgagagaagtattgagaagttcatagaacgcgtagaatcaatagcttttgaatctgatttaatccccaggattggaatggaagccacaggaatatactggtatagcatatattgtaaactttcaaaacactatgaaatccatctctacaatccttctcaggtaaagggttttgcagcagtcaatgttaggggagcaaaaaccgataaaatcgatgcaaaaacaatagctgggatgcttcgattcggagaagccccaaaaatctgttatggggataaaacgagaatggaaatcaaagaattctgtagattccgtttcaaactggtatcattgatggctaatctaaaaaagcggttaataagaaacgttcatcttatttttccagggtatgaccagctgttttcaagtatattcactaaaacttcaatagctattctaaataaagcaccaagaccatctgatatgcttgaaatgggagaagaaaagctctatgaattgatgagaaaaacgagtaggaatcatttcagtcctgagaaggcaagagaacttttagaaatggcgaaggattcaatttctcttgattttattgaggatgctttattatttgaagttgagtccctgcttaaactgattgaatacatagaagaccagataaaagaagttgaaaccaggattttgtctttatgggaaacagtgaaggataagcattatctgcagacaattcctggagtcagcgatttgatggcagctacgatatgggcggaacttggagatattgaaaacttcaatcatccagatcaaatagttgcttttgcaggatatgatcctaaagtaaagaaatctgggaataaagaagtcattttgggacctaataaaaggggatcaagactactaagatgggttctggggagagcagttgtgcaagcaaagatgtgtaatccggtaatagagcaatatttcaagaagaaaataagtgagggaaagcacttcaatactgcactttgtgcaacagctaaaaagttaataaggataatctggtctgtggaaaagaacaaaagagctttccagatcccgacataaagtagcccaagagagagccggagaataaatgatcaaaaaaaggtagctgtggctatgggttattattgattgatgtgaaaaggtttattgttgatatgaaaagggaaggaaaagcttaggactttaagggacaaaaaacattattagatctctacaccgaaatctaccgcgcatcagcgcggccttttcataagaattcatcttaatgaaaaaatggaatatagtaaatcatttataacatgt

SEQ ID NO: 10011 - DNA, 1378 bp, unidentified
  source 1..1378: mol_type = unassigned DNA; note = element_fbb9ea7
  misc_feature 1..3: note = core
  misc_feature 4..87: note = LE
  misc_feature 88..927: note = CDS
  misc_feature 928..1378: note = RE
  misc_feature 1080..1364: note = bridgeRNA
agatggggtggttgccgtcctccccgcacggcatcgcaatgtgccagaatggtcgttggaagaaacgactgcgcgaaaggacggcagatgaaggatacagtgataggcgttgatctggcaaagaacattttccaggttcatggagcttcgcgtgcgggcgaggtgatgtttcgcaaaaagctgcgtcgtcagcagtttatgcagttcatggccacgcagccgcctgctctggtcgttcttgaatcgtgcgggagcgcgcattactgggctcgcgaactggcaggagctggtcacgaggtcagactgatcgctccgcagtatgtgaagcctttcgtgaagcgccagaagaacgatgctgctgatgcggaagcgatcgtcattgcggcccgtcagccggaaatgcgctttgtcgaaccacgcactgaagcgcagcaggcgcgtggcgttcttttccgggcccggcagcgtctggtgcaccagcgcacggaactggtgaatgccctgcgtgccgttctgtatgaattcggtctcgtcgtgccacaggggattgcacatatcagacacattgaagccatgctggatgaggcggttctgccagaggctgtgaagcaggaatgccttgatctgctgcgacagatttcggagcagagtgtgcggattgatgtcagaacaaagaagatcaggatgcttgtccaggaaagtgaaaacacctgcagattgcagagcatgcctggagtgggtcctctgaccgctcttgcgattgaagcttttgcgcctgacctgcagagcttccggcgcgggcgcgactttgctgcgtggctggggctggtgcccgtcagttctcatctggcggaaaggaaaggctggggaagatatcaaaagccgggcaggctgatatccgcaggcttctcatcatgggcgccatgacccaggtgaactgggccagccgtaaggcccctgcaccgggaagctggctggcacggatgctggcccgcaagccccgtatgctggtagccattgcgctggccaacaggatggcacgagccatctgggccatggcaacaaaacaggaggattatcgggatccggccctgtccgtggcagcctgagcgatggctcggctcccgcggatggaaccggtaggggtgtgagagggcgatgacctgaatgggcgcatgatcgtctgatccggatcggaaaaaccagtggatttctctgtgctttaaagcacgcctgtgagatttggatctgatccgctgatcaccatactggccagtggcttctgaaaggccacatcaacaggccttacagaagaccgcacacgatcacacgtcaatatgggtcagaaaactcttgcataacggacggcaaccacaga

SEQ ID NO: 10012 - DNA, 1209 bp, unidentified
  source 1..1209: mol_type = unassigned DNA; note = element_fbbd9c2
  misc_feature 1..2: note = core
  misc_feature 3..186: note = LE
  misc_feature 187..1206: note = CDS
  misc_feature 1207..1209: note = RE
  misc_feature 43..205: note = bridgeRNA
tcctttagacttgtattgttatttttatagcagtattaacaaagaaaagagagctgaactcgggtacactaatatcgctcagaacataaagttcatcgttcgattcagacccaagttcagactttcatcaacaatctctaatagaaattcgggatataagcccattatcaaggagttgagttattgatgaaatccctcttatctacaaagcattacaaagttatgaaaagtatttatgtaggtatcgacattagtaaaaacacgttggatttttgtgttagatcttccggtgtggcaagctttcacaagatcggcaacaaaatcaaaagcatccgcaagcttttgaaaagcatagccaaaatagattccaaggcttttatagccatggaaaacacggggtattataactataacctttaccaaaccctgaaagactttgattttaacgtctatgtgatagaccccaagcatatcaaaaggagtatcggcctggtgcgcggtaagaacgataaggtagatgccaagaggattgccatattcattgaaaggaaccatcaggattttgaatgctgggaaccttgcagtgaagccatcaggtctttaaagatattgatgggccaacgtagatcaaaaatcaagcagcgcaaagggatcaaacagcaaatggccgatttaaaggatattgtatttaatggcagtaccagaaaactgatcaagatcaatcaaaaggccatcaaagaactggataggcacatccacgaaatagaaaccttgatccgtgccgaaatcaaatcggacccggttttacaggaacagctcaaaaggatcaagaccgtaccgggcataggggatgttaccgcttggatgatcgccatcaaaaccgaaggcttccaacgtttgaccgatccaaggaagctcgcctgctttgcaggggtggtaccctttgagcaacagagcggcaccagcctaaaaaccaggcccagggtatcgaaaatggcagatatggccttgaagtccgtacttcagatggccgctatgagggcggtaaggatgcaaaatgatctgcaggtatattacctaagaaaagtcgaagagggcaaaaataaaatgagtgttctaaatgcggtcaggaacaaattgttacacattgctatggcactaattaaaaaccaaacaaattataaaaaccgcttggaattgtcatagaaa

SEQ ID NO: 10013 - DNA, 1465 bp, unidentified
  source 1..1465: mol_type = unassigned DNA; note = element_fbbf133
  misc_feature 1..4: note = core
  misc_feature 5..185: note = LE
  misc_feature 186..1448: note = CDS
  misc_feature 1449..1465: note = RE
  misc_feature 38..222: note = bridgeRNA
ccccgttaccgttttcgcgtccccatccgttgtggggagccaggtcacccggtccggcatgactcaagccccctgtcgcacgaatgatccggggggtgttgtcaccgggcccgggtggcgtcggtggaccgctcatagggacaaggcgccttgtgtgacgaagtcatcgtctcgccgtaacgtggatgccggcagccgacgccagatctgtgaccaggccgaacaccctcccgatcgaggtagacgtgagcgtcgagtacgcggtgttcctggggttggacgtcggcaagggcgaacatcacgcctgtgctttggacccctccggcaagaagctgcacaacaaggccttgcccaacgatgagcagcggttgcggaccctgttcacccagctcggccgccacggtcgggtgttggtggtggtcgaccagcccgcctcgatcggcgcgctgcctgtcgcggtcgcccgcgaccagggctgccaggtcgcctacctgcccgggctgaccatgcgccgcctggccgatctgcaccccggcaacgccaagaccgacgcccgcgacgcctacatcatcgccgacgccgcccgcaccctgccgcactccctgcgacgcgtcgataccggccaggaggccctggccgagctggaggtcctcgtcgggttcgacgacgacctggcgggcgagtcgacccgactagtcaaccggatccgcgggctgctggtcaccatccatcccgctctggagaaggccctgggaccgaggctgcaccaccccgccgcactggaactgctgatcacctacggcggcccggacgggttgcgcgctgcccccgcagacgacctgctggccaccaccaaaccgctggccccgcgcatggccggacgcctggtcgaggcggtcaagaccgcccttgacgcccagaccgtcgtcgttcccggcaccaccgcggccgtgaccgtcctgccgcacctggcccgctccctacgatcggtccacgaccagcgcgaccaggtcgccacgcaggtggaggagatccttgatgcccaccctcttgccaaggtcctgatctcgatgcccggcctcgggatcaggaccagcgctcgaatcctgctggagatcggtgacatcacggccttcgcgaccccggggcacctggccgcctacgccggtctcgcccctgtcgcccgccgttccgggtcgtccatcaagggcgaacaccctcccaagggcggcaacaaggcgctcaaacgagccatgttcctggcagcgttcgcctcgctctccgacccgctgagcagggcctattacgaccggaagagagccgagggcaagaagcacaacgccgccctcatctgcttggcccgccgccgcagcgacgtcatctacgccatgctccgggacaaacagccctaccagcccacacgcaaactcaccgcccaagcggcttgacgaatcccatagggaca

SEQ ID NO: 10014 - DNA, 1354 bp, unidentified
  source 1..1354: mol_type = unassigned DNA; note = element_fbdb9ad
  misc_feature 1..2: note = core
  misc_feature 3..74: note = LE
  misc_feature 75..1097: note = CDS
  misc_feature 1098..1354: note = RE
  misc_feature 1073..1342: note = bridgeRNA
tgatggggtggacgccccccgacggcatcgatgtgccagagtggaggtgtttcacaccacttgaggaggcgtccgtgacagaagttaccacaatcgggttggatatcgccaagcatgttttccaggcgcacggggttgatgcgaccgggcgcgctgtcttccggaagaagatcagccgggccaagctgctggcgttctttgctgcacagccgcggtgcctggtggcgcttgaagcctgcgggggtgcgcatcactgggcccgcgaactgatcaagctggggcacgatgtgcggttgattgcgccggcctatgtgaagccgttcgtgaagcgccagaagaacgatgccgctgatgccgaggcgatctgcgaggcggtgcagcggccggcgatgcggttcgttgcggtgaagaccgaggcgcagcaggcggcagcgctggtgttccgggcgcgcgacctgctggtccggcagcgcacgcagacgatcaacgccttgcgcgggcatatgaccgaatatggctgggttgcgccgcaagggccgtcgcacatggcaaagctcgccgaattgctcgaggatccgctagccgtgccagggccggtgcaggcgatctgccgggtgctgctcgacagcctcgcgatgctcgaccgccagattgccgtgctcgacaaggagatcgcacgccgggcgcaggaagacgaagttgcccgccggctgatgacgatccctggcatcgggccgatcacggcgacagcgattaccgcactggcaccgccgccggagaccttcaccaaggggcgcgacttcgccgcctgggtcggtctcacgccgcgacagcactcgagcggtggcaagcagaagctcggggcgatctcgaagatgggcgagcgcacgctgcgacggctgctgatcatcggcagcagcgcggtcgtgctccaggccagcaagcgcggcgcccccaagggatcatggctcgcccatatgctggcgcgcaagccgcggatgctggtgacggtggcgctcgccaacaagacagcgcgcatcgtctgggcgctgctggtgaagcaggaagattaccaggctccggcaatgacggcatagccgtcagcgtcgaggttgtcggtagggtgtagtcgggcgaaggagggtatggcgcaacagtcggcgagacggggtcggaagaaccagggctaaccactgtgccttcgagcacgctgagggtgatgtggctccgatccgcgaactcccatacgggcccgcagctcacatcgctgcaaccagaggccggacagatggcagcatccgactacacgccaataccttcaaattccgcttgcacccgaaggggcgtccacaga

SEQ ID NO: 10015 - DNA, 1421 bp, unidentified
  source 1..1421: mol_type = unassigned DNA; note = element_fbdcddb
  misc_feature 1..4: note = core
  misc_feature 5..207: note = LE
  misc_feature 208..1407: note = CDS
  misc_feature 1408..1421: note = RE
  misc_feature 1..194: note = bridgeRNA
ctccgtaaggtgttggtcggcccgggagggccggatgtggctaacggttctctgccttcagtggcttgcgaggagtggccgtccggctcttcggggcgccctggctgctgattgagatgtgcgcgctgtgtgcggtcgctgtttacggagacgatggcggggtgttcctcgggccgatgaaatgcaggcgggatcgaggaggggcgagtgggagagcgaagtgcccgtgcttgggcgggtgttgacgccggcaagggccatcactgggcggccgtggtcgacgaggccggcacaacgctgtggtcgaagaagatcgtcaacgacgagacggcgatcctgaccgcgctcggcgaaatcctggagctggccgagcaggtccactgggcggtggacatctccggcaccgcctcggcactgctgctggccctgctcgccgcccacggccagcaggccgtctacgtgcccggacgcaccgtcaaccgcatggccggcgcctaccggggcgaggcgaagaccgacgcccgcgacgcctacgtcatcgccgaaacctcccgtcagcgaagggacttcgctgcgatcgaggtgcccgcccagctcgcggcggacctcgcactgctgactgcgcaccgatcggacctggtcgccgaccgcgtgcggatgatcaaccggctccgcgacgtgctcaccggcatcttccccgccctggaacgggccttcgactactccgcgcacaagggcgccctggtcctgctgaccggctaccagaccccggccgccctgcgccgccggggccgggcccggctgacggcctggctcgccaaccggagcgtgcgcggcgccgacgcggtcgccgcgaccgcgctggaggccgccgaggcccagcgcaccgtgctgcccggcgaggacgtcgccgccgcgatcgtcgccgacctcgccgcacagatcctggccctggacgaccggttgaagcggatcgacaagcagatccgcgacaccttccgtgcccacccgcaggccgagatcatcgagtccctgcccggcatcgggccgatactcggcgccgagctcgtcgtcgccgccggggacctggccgcctacgcggacgccggccacctcgcctcggcggccgggctggtgcccgtcccccgcgattccggtcgccgcaccggcaacatgcaccggccgaaacgctacagtcgccgcctgcgacgggtgttctacatgtccgcgcagaccagcatcatgcgggacgggccgaaccgggacttctacctcaagaagcgcgccgagggctgcaagcacgtccaggcgatcatcgccctcgcccgccgccgggtcagcgtcctgtgggcgctcctgcgcaacaatcggatcttcacccccgttctgaacgcgcaggcagcttgactcggtcattgaga

SEQ ID NO: 10016 - DNA, 1939 bp, unidentified
  source 1..1939: mol_type = unassigned DNA; note = element_fbdf61c
  misc_feature 1: note = core
  misc_feature 2..237: note = LE
  misc_feature 238..1452: note = CDS
  misc_feature 1453..1939: note = RE
  misc_feature 9..234: note = bridgeRNA
cgttaccgtcttcgtggctccgcaatggggcctccggccttcgggtccggcatgacttccccctcctgttgttgatgatccggggggtggtgtcaccgggtccggaggcatcgacggaccgctgatgaggggcttgagcaccggcttcacccaggccggaagagctctccgtaacgtggatgtggcagctcggtgccgaggcaaggccggacgaaagcgtgatggaggggcctgcacgtgatcgacaccggcgacatcgacgtcttcctcggcctggacgtcggcaagagcgaacaccacgccaccgccgtcaccccggccagcaagaaggccttcgacaagcgcctgcccaacaccgagcccaagctccgcgagctcttcacgaagctccaggccaagcacggaacggtgctggtcgtggtcgaccagccagcctcgatcggcgcgctgccgccggcggtcgcccgggacatgggctgcccggtcgcctacctgcccggactgacaatgcggcggattgccgacctctacccgggcgaggcgaagacggacgcgagggacgcgttcatcatcgcggatgcggcccgcgcgatgccccacacgctgcgggcgatcgacggcgaggacgagacgatcgccgagctggagatgatcgtggggttcgacgacgatctggccggcgaggcgaccagggtcgcgaaccgcctgcacggcctgctgactcagatccatccgtctctggaacgggtgctggggccacggttgcagcaccctgctgtcctcacgctgctggagcggttcgggtcaccggcacagatacgcaaggcgggccgaaggcggctggtcacgctgctgcggccgaaggcgccgcggatggccgaacgtctggtcgaggacatcttcaccgcgctggacgaacagaccgtggtggtgcccggcaccgacgcggccgctctgatcgtcccgagcctcgccggatccctggccgccatccttgaccagcgcaaactcctggccgggcggatcgaggaactcctggaggcccaccctctttcgaaggtcctgacgtcgatgccgggcatcggcgtcaggaccggcgcacgaatcctgatcgaggtcggcgacggcagcaccttccctaccgccggccacctcgccgcctacgccggcctcgcccccgcgacccgcagttcagggtcgtcgatccgcggagaacagccctcccggagaggaaacaagcagctcaaacgggccttcttcctctctgcgttcgccgccctgggagacctggcatcgcgggcctactacgacaaaaagatcgcccaagggaagcaccacacgcaggctctgctctgcctcgcccgacgccgggccgacgtcctcttcgcgatgctccgcgacggaaccttctacgaaccgcagccggtccgggccgtcgctccgcagacctagaccatggtcaggaggtggtccgtggggccgtagtcgatcttccagtcggcatagacccctgaggcgccgtccttctggcaccgcagcccaacggtcacccagcggaccaatccgtcgtcggcgagggagaacgcgaccgcggtttcaaactcctcgctcccgcacgggcagcaggcctcgccgggatccgcgtcctcccagaactcctcgctatccgcgatgaacgcgcggccgccgcaaccaacgcacacccgctcggctccaccctcgacatcgtcaacgagcacgaagaagacgcgcccgccacacccgccacagacggaaggaacgatcttcacccgacggccgtcgcctgcgttccgcagaaacaccgcgaggtccgcagagacaccctcgccaacctgatcatcagcatgcacagccacatcgttccagacacccgaaccagcacccatccaccttgaccaaagagataggggcacccccc

SEQ ID NO: 10017 - DNA, 1359 bp, unidentified
  source 1..1359: mol_type = unassigned DNA; note = element_fbe2235
  misc_feature 1..2: note = core
  misc_feature 3..78: note = LE
  misc_feature 79..1101: note = CDS
  misc_feature 1102..1359: note = RE
  misc_feature 1080..1346: note = bridgeRNA
tgatgaggtggacgcccccccacggccttggtgtgccacagtggaggtgttgaactgcaccacttgagggaggcgtccatgggagaggttagcacaatcggcttggacttggcgaagaacgtgttccaggtgcacggcgccgatgcatcgggagcggttctgttccgcaggaagctgcggcggcaccaggttctgaccttctttgccggccagaagccctgcacggtggcgatggaagcctgcggcagtgcgcatcactgggcgcgggagatcggcaagctaggtcatgccatccgtctgatcccgccggcttacgtcaagccctttgtcaagcgccagaagaatgatgccgcagatgccgaggcgatctgcgaggcagcccagcgcccgaccatgcgcttcgtggcgcccaaaagcgagcagacacaggctgccgctctcgtgttccgggcgcgcgatctcctggtgaagcaacgaactcagatcatcaatgccctgcgcggtcatctggccgagttcggcttggtcgtggccaaaggcccggctcatgtttctcagctcgtgcaggctgtcgcggacccggaggagccgatcccggagatcgcccgaccggtcctccagatgctggtcgagacactccatcggttggacaaacagattgcaggcctagaccaggaggtcgcccgacgagcgaaagagaacgagacagcgcgtcggctgatgaccattcccggggtcggccccgtgaccgcggtggctctggcggcccttgctccacccgctgagaccttcaagcgcgggcgggactttgccgcctgggtcgggctcacgcccttgcagcactccaccggcggcaaacagaagctgggcgcgacctcgaagatgggtgagcggaccttgcgccgcctgctgatcatcggcgcgagtgccgttgtgaggtgggcagcccgcaacggggctccggcaggctcgtggatggcgcgcatggtcgcgcgcaaaccaccgatgctggtgcgggtggcgctggccaacaagatggcccgcatcgtctgggccctgatggcgagaggtggggtttatcaggctccagccgcggcgtaagcgctcgcggctgtggggctgttggggcgtgggaagagccaaggagagagatggcgcaatggtcaacgagacgggatcaggaaaaccagctttgcgacaagagcctcgagcacgtggctttgaattggacctgatccgcgaactcccatccgggcccgcggcatgtgagccgcagaaaaggccgcacacatgtcagccctgaccacgcgctgcatcaaacctgaagattcttcttgcgctttagcgggcgtccacaca

SEQ ID NO: 10018 - DNA, 1392 bp, unidentified
  source 1..1392: mol_type = unassigned DNA; note = element_fbeb7a5
  misc_feature 1..2: note = core
  misc_feature 3..250: note = LE
  misc_feature 251..1315: note = CDS
  misc_feature 1316..1392: note = RE
  misc_feature 16..225: note = bridgeRNA
ctcctatgtttgaatcgcacttagtaaataataaatttactaataaaaagtgaaggatcgtgagagcagaagcgtaacttaacaactcccaaagtatgtacatgagtagatattgcctcacgttcttttcctttttgagtctgaacagaatgtaagaaatatggcatagctatatattcagaatatccacccaggagaaaagacgaaggaaggttattcacttatttaattaaacaaataaaaaaaagtgatgacaattttaaaacaggtagcaggcattgacgtagctcaaaaggaactggtagtatccctaggacgtatggatcaggaattaactttagagatctttgactacaaggtatttccaaacaacccaaaaggatttaaagctttaacccagtgggctgaaaagcaggttaaaaatgatgtaaagatccattatgtaatggaagctaccggtgtttaccatgaatcattagcctattttctgaccgacaatggctcagaagtaagcattgttctacccaacaagatcagcaattttttcaggacacttgatgtaaatacggttaccgacaaaacagcatcacaagccattacccgctttggactggaaaggaaactggaagtatggcaaaagccaaaaaagatattcagagacctgaagcagctaacccgtgaaagggggcagctgattgcagatagaacggtgttaaagaaccagttgcatgcggaaaatgcagaagcttttcccaatcaaagcagtatcaacaggaccaataaacgtatcaggttaatcgataaacaagatctggaaattaaagcagagataggggctcttgtcaaaaaggatacggaattggttaaaaagattaatatgataactactataccgggagtaggaaaattaaccgcagtaatagccctggcagagacaaatggttttgaactgattaaaagcaagaagcagttggtcagttacagcgggctggatgtcaagctcaaagattccggcacctcggtaaaagggacaccaagaatatccaagaaaggaaacaggcatcttagaaaagcgatgcatatgccggctttatctgcaatgagatttaatgatcagcataaagcattatttgtccgtctggtttcgaaacatggcataaaaatgaaagccgcagtagcggtacaaaggaaaatattggaactgatttatgtgatctttaaaacagataagccatttgataaagattacatgccgtcaaacgtgccaaaagaggtagcagtgatacaaaagttagagcagccattacgaaaatgaaactgccctaatgaggctaacataaagccgccttgaataaaacaaaattaaaaaatatttggaattcaacacagaat

SEQ ID NO: 10019 - DNA, 1674 bp, unidentified
  source 1..1674: mol_type = unassigned DNA; note = element_fbf69e7
  misc_feature 1..2: note = core
  misc_feature 3..247: note = LE
  misc_feature 248..1429: note = CDS
  misc_feature 1430..1674: note = RE
  misc_feature 3..225: note = bridgeRNA
ctcgtattataaaaagagtagtatttatagaccgctctccagcggtatgctacaatgtttaggatgctgtggattggtaattttcacctaccgtaaagacggtttattggaggctccaaccacagcctctttgttgaaatgttaatcagttagataccgccagacggtttatttagaacgaggttacaagagcaaagaagtctgtggtcctgaacagcatcgaaataaatatgccggaggtatcaaaatggtttgtgttggaattgatgttgccaaggataagcatgactgctgtattcttgattcagacggaatggttcgtgctgactgctttaccatccccaacaacatggatggatttaagcaactgcttcaaacgattcgaaactgtacccaaaaagtcagacaaaataaaaaagtaggacttgaggctaccggacattacagctacaacattcttggatttcttcttgacaatgacctggccgtctatgtcatgaatcctttgcacaccaacctgtaccgaaaaagtctcagccttcgcaaaactaaaaccgatcgtgtggatgcaagaacgattgcaactatgctattgtccgatgtagacctcaagtcctacacggatacagcataccacaacgaagagttaaagtcactaacaagataccgattcgataaggttcgtgaaagagccaagctgaagcagtcagtgtccagactggtcacgattctgtttccagaactggagaagctcgttacctctctccatattgcttcggtttatgcgctcctcagtgaatatcccggtgcaaaacagatttcagaaattcatctcaccaagctgacaaatcttcttgcaacagcgtccaagggacgctacgaaaaaaaaaaaaaggccatccagattcgagaggccgccagaacttccattggttctgtcatgtctgtcaaatttctagaattgaagcacaccattaaactcattaaggaactcacctccgagattgatgaaattgaagattcgattcagcaaatcatggatgaattgcatccaccgattctttctattcccggaatgggtgttcattccgctgccatgattcttgctgaaatcggcgatttctccaactttgaatctcctgacaaaatccttgcttacgctggctgctctccgtctacataccagtcaggcaaactcacaaactgctatgctcacatggaaaaacgcggttctcgctatctgcgatacgctctctacaacgcaaccaagtacgtctgccactggaatcccgtctttgctgaataccttgccaagaaacgttctgaaggaaaacactacaacgttgccctgtcccatgccatgaagaaactcgtgcggctgatctatgccttgcaaaagtctggaaaagcgtatcttacggctgcttgattttctccagagcctgagcgaaatccaagaacaacttagctggcgcagcgaacccttgacaaaccgaagcattcaaatgctatcctgtttttgcgagggttagctgggcttgctttttttgttattctctccgtcgccctcgctgtcccaagaccagcatttgaatgctgtttgtcatgggcagcgaatggttgacggattttagggatttttttcattttggggcttgacttttaatagttagt

SEQ ID NO: 10020 - DNA, 1364 bp, unidentified
  source 1..1364: mol_type = unassigned DNA; note = element_fbfef73
  misc_feature 1..2: note = core
  misc_feature 3..74: note = LE
  misc_feature 75..1103: note = CDS
  misc_feature 1104..1364: note = RE
  misc_feature 1079..1352: note = bridgeRNA
tgatgatgtgaccgccccccgacggcatcgatgtgccaaggtgggtctgcgacgatccacacaggggagcggtcatgtcgaagattactacgatcgggctcgatctggcgaagcatgtgtttcaggcgcacggggccgacgcgtttggccaggcggtgctgcgcaagaagttgcggcgggatcacgtgctggagtttttcagccagctgccgccatgcgtcgtggcaatggaagcctgtggcggcgctcatttctggggccgagagatcagcaagctgggccatgaggtgcgcctgatccctcctgcctacgtgaagcctttcgtgaagcgccagaagaatgatgctgctgatgcagaggcgatctgcgaagccgcacagcgcccgacgatgcgcttcgtgcccgtgaagagcgaagagacgcagggagccgcgatggtcttccgcgtgcgcgagcttctgatccggcagcggacacaggcgatcaatgccctgcgcgggcatctgggcgagttcgggcagatcgtgccccagggtgcggccaacaccgcgcggctgattgccatcgtcgaggatccggaaagcggcctgccagcagacgccatcgccacgctgacggtgctggttgcggccctcaggcacctccagacggagatcggacagctcgatgtcgagatcgcccgtcacgcgaaagagaacgaggtcgcccggcgtctgatgacggtgcccggcatcgggccgctgatcgccacagccatcgcggtcctggctccgccgcccgagacattccgccgggcacgggactttgcggcctggctcggcctcacgccgcggcagcattcgacgggcggcaagcagcggctcggggcgacgacgaagatgggcgaacggtccctcaggcgattgctgatcctcggcgccaacagcatcatcatcaagcgccatgtccacgctgcagcccggccaggcacctggctggcggggatgctgatgcgcaagccgccaatgctggtgcgggtggcactggccaacaagatggcgcgcatcgtctgggcgctgatgcgcaggggtggtgtctaccgggctccggccgtagcggcgtaagccgcccgtcggtcgcgaggacgtcggagcggaagagggcaaggagcagtttggcgcaacggtcgtgagacggggtcagaggaaccagcctgcaacaaagtgccatcgagcacgcggcgttgatttggggcctgatccgcgaacaccatacgggcccgcggcgtgtagcaaggccgcatcagaggccggacacatgtcagcacccgacaccgcgtcaagatcagctccgaagatccctcttgcgcacggggcggttacaca

SEQ ID NO: 10021 - DNA, 1147 bp, unidentified
  source 1..1147: mol_type = unassigned DNA; note = element_fc09541
  misc_feature 1..2: note = core
  misc_feature 3..310: note = LE
  misc_feature 311..1135: note = CDS
  misc_feature 1136..1147: note = RE
  misc_feature 12..211: note = bridgeRNA
cttgtcttatgattttttcggctcatgagttcagaatgagccagtgcaggccactccacatggccagcactggcggaagcgggatcgcgaaaggcttggtcgttgggaaccgtgctagagtttgatccgttgccgtcttcgccttgggcctgaacggatacgcagcaactgtaaggctctgcatgacaagcataggacagcgaagatgacgaaggatagcatcgggattgatatttaaaaaaaccatttggacgttgcctggccgcgggcagacaagagcacccgctttaccaatgaccgggagggatttgtggccctcaaacgctggctcggcgccggcctgcctgagcttgtcgtctatgaggcgactggcgcgtatcatagtgcgttcgagctggcgttttccggtcagttgccgcttcacaaaatcaacccgcttcaggcgcgccgcttcgctcaggcgtgtggactgcgggccaagaccgacaaggtggatgcggccatgctggcggcaatgggcgcaacgcttgacatggaaccggacccagttgtcagcaaggagcactatgaactcaaagagctgcagatagagcgcacggcgctcatcaaggaccggacccgtctcaagaaccggctcaagacccaaattctcgccttaacccgccgccagaccaaggcccggctggcccagattgaacggcagttgaaagccattgacggcgagatcgaaacgcggattgaacaggaccggccacgcgcgctcgacatcctcaagtccattccggggataggctcaaccacagccgctgcgatcctaatcgaatgtcctgagatcggctcgctcgggcgcaagcaaatcgccagcctggccggcctggcgccaatgacccgacagtcaggacaatggcgtggcacggcattcattcaaggcgggcgaaaattcctgcgcgacgccctttatatgcccgcccttgtcactagcaaattcaatccggacatggcggcaaaatacaaagccatgagaagagaaagaaaaccggaaaaagtcgccttaaccgccatcatgcgaaagctcatagaactcgcaaacactctcatcaagcaaaacagaacgtggacacaaaagccagcttgatcaaaacggata

SEQ ID NO: 10022 - DNA, 1624 bp, unidentified
  source 1..1624: mol_type = unassigned DNA; note = element_fc2001a
  misc_feature 1..3: note = core
  misc_feature 4..194: note = LE
  misc_feature 195..1409: note = CDS
  misc_feature 1410..1624: note = RE
cttatacattaaactagaaacaagcccactcgacaaaaggctggaacctccatccggcttgaccgattaagaaagctcgttttccctggcaccgttcctgagccgaaccgattatgagagagtcgtcgcttcgagcgccacagtataagggcacgggatctcaggaatatgttttgcaaagaggagcgtttctgatgtggtataccggtattgactgggcggacgagcaccacgatgccctggcgattgatgaaaaagggcatcaagccggtttgatccgcgttgatcataacccacaaggatttgctaagttggacctgtttttgatgcagattattggatccgcatcgaaagagcaaatggcatgtattattgaaacgacacacggcctgctgattgtccatctgctggaggctggctggcccgtctacccagtcaacccgcgtaccgttgatcgtcgccgatcggcctctggagccaaaacggatctgattgatgcctatctgttggcgaagacgggacgtgccgattttgtggatttgcgtcgcctgaccccagatagtgaaaaggttgccgagctgaaacaactgacacgcgaccaagataccttgatccacatgcaaacgcgtttggtcaaccagctcacggcctgcctcaaagcctattatccagtggccctggatctgttctccaaactgcaacaaaagagtacgttgttgttcttgcaagcctatccaactccacaggctgcgatggctgcttctgtcaaagagatccagcagcaactcaaacaaaccaagcatcctcgtccagccgatggcgcggcttcgatcgtcgagcggttgcaccaaccccacttgcaggctgatgcggtgctcacccgcaccaaatcgcgcttgatgctggtcctggtgagccagctgctgccactcattgaacagattgcacaatataacaaggagattgacaccctttttttgactcatgaggaccatgagatctttgagagtttgccgcgtgctgggcaacgtctggctccacgactgttggctgagattggggatgatcgtcagcggtatcaagatgcaagtagtctgcaagcactgggaggaacctcgccggtcctctatcagagtggggtctattccaaagctcatcgccggttgggctgcatcaaaccgctgcgcaacgccttgcatcaatttgcctggcagactacccaaagtgaagcgtgggccaaagactactatcaacggaaacgaacagaggggaaaagccataccgtcgccatacgggcactttctaatgtgtgggcgaggattatctttgcgatgtggatccatcgagagtgctatcgggcggcgacctttgaacaggcgcaacagcaacatgcccgcagagctgcctagtgctgtctctatcgctaggcgacaatctacttgtgcataacggacagcacctgctgctgtgtttgcacaggtaccatggcggatattcatcctgccatacacgcacgtgctatggaatacggccttatgctctcttacggacatttctcctctctcctttcttcagtttttctcttgcctaaaaattggtctcaaaaaggcttgacatagagagt

SEQ ID NO: 10023 - DNA, 1622 bp, unidentified
  source 1..1622: mol_type = unassigned DNA; note = element_fc2363f
  misc_feature 1: note = core
  misc_feature 2..571: note = LE
  misc_feature 572..1489: note = CDS
  misc_feature 1490..1622: note = RE
  misc_feature 6..227: note = bridgeRNA
tcgtattataaggtcagccagaaaatatttctggttgaccattttttatatcgatatatgataacggtagccggggtagaacgttcgcgcccgtggggctatgaccccgtccgcaaaacagtttgccccctacttgtagaaacatgtttgaggctggttgggacaatgatctcgtataacaagtgaagctatgacactacaaagaggatctaggggttaccggcaattatcattttgaaggaggaattataaatgaatccagtcatcggtctggatgtagcaaaaggtgaaagtcaggttcaagcttacttggaaaggaagaagccctacaagaaaagtttcaaagtaaaacatgatcttgatgggttagctagtttattagattttattaaagaattagaagatatttcaggagagcgtccccctcttgttatggaatcaacaggccattatcacacaccaattgttcaatattttgaggacaaaggctatttaataattatcgtaaacccactcatctcttataaagcaaaaagttctagtttacgaaaggtaaaaacagatatcatagatgctaatcatctctgcgagcttgtattataaggaggatttagagccttataaaaagcgtggtatccaacttgcgaacttacgtcatcttacgagacagcacgataatattacaggcatgtttgtacaaactaaactacaatttcaggcagttttagatcaagtttttcctgattatagtcatgtttttggagacttatattcggatgtttctttgaaaataatacatgcattccctacttctgaggatatattgaaagctaatactgaagtattagcaactaaaataaaagaattctgtaattctcgttctatacaatgggcaaacaaacaggctgaaaagctaatgaccgcagcagctcaaaacccttttcagaaggctttatactctagtcttgccctaagtttagatatgtatattaatatgctctttgaatataaaaaacatctatccatgcttgaaaatgagatagatgctttatcaaaaagtattgaagaatctaagattatccgatcaattcccggtatcggagaaaaaatcgctgccacgattgtatctgaaattggggaaattgaaaggtttaatcatcctaagaaactagtcgcatttgccggccttgatccaagtgtctttgaatctggtacattcaaaggtacttacaaccgaataaccaaaaaaggctcaagcagactacggcaagctttgtatatggctgttaaatgtgctattcgtgactgtcgaaaacagaaaaccacggatgaaatccttcctcgtaataagaaattacgggcgttttatgataaaaaacgggaagaaggaaaaccatttagagtagctgttatagcttgtgcaaacaaactcttacattggatttatgcacttttaaaaagcaaaacttctttccaagacttagcttgatttaacaatttaactaagtggacctgaactttccagatcaagtatttggacggttatttggtatacacaaatttagtataacatgatatttttattatttttaatgaaaattattgacaactattagctggtt

SEQ ID NO: 10024 - DNA, 1775 bp, unidentified
  source 1..1775: mol_type = unassigned DNA; note = element_fc28cd0
  misc_feature 1..2: note = core
  misc_feature 3..72: note = LE
  misc_feature 73..1110: note = CDS
  misc_feature 1111..1775: note = RE
  misc_feature 1550..1762: note = bridgeRNA
tgttggggtggacggccccacggcatcgcgtgccagaattggggctgtgagcaaccaagaccggagccgtccatgacccaatataaacgcatcgccatcgacacgtccaaggccgttttcaccctacacggcatcgatcagcaagaccggccggtgttgcggatcaatcttcgtcgcgcacagatgcttccgttcttccggaagctcccttccaccgagatcgccatggaagcctgtggcggcgcacattattgggctcgccaactgatcacgctcggccacgaggtgcgtctcatcccaccacaatatgtcaaaccatacgtcaagcgtagcaagaatgaccgcaacgacgccgaggcgatctgtgaagccgcggggcggccgggcatgcatttcgtgcccgtgaagtccgtcacgcaacaagcacagggcatggttttgaaggtgcgcgagacactggttggtcagcggaccctgatggtcaacacgctccgtggccacgcggccgagttcggcgtgatcgccgccaagggtctccatcaggttggtccgctgctggctgccattgaacaggagaccgccatcccgcccgaagcaaaagacatggccgtcctgttgggccagcagatcgcggaactcgacacccggataaaggaaatcgatgtcaaactgaacgccgcgcacaaagccaatgaggtgagccaacgtctggctacgatcccgggcgtggggccggtcaccgcgctgacattggcgatcgagatcgatccggcggcctttgaatcgggccgtcacctggccgcctgggccgggttgacgccgaaggaacattcgaccggtgggaagcagcggatgggtggcatcagccgagcgggcaatgaacggttgcgtgttctgctcgtcgccggtgccacctcggtgatcaatgctgccatgcggccgggtagccagctgatgacggactggttgcgggatctgctcgcgcgcaagccgcgcaaggtcgtggccgtagcgctcgccaacaagatggcacgggtggcatgggcgctgatgacgcgcggggaggtgtaccggcgcccggttgcggccgccgttgctgccgcagcatgaacggtatttcgtcacgtaacgtttgggagtggatcaatgccccgtccatcaatcggtgaaacgcccatgactggcgccgaacgtcaggcgcgctaccgcaccgcgcacgcggctggcgcgccggtcattcgcatccgccgcccggccgaccgccgcagccggatccaacgctggaacgacatgatcgccgcggccgtggagatgcagaacgagtatgccgcatggctggacgcgttgccggacaaccaacaggacagcgcgctcgccgatgccttgcggacgattgtcgaattcgatctgtccgagcttcaggcgatcgaaccgccacgaggcttcggccgtgattgaacaacgagatggcccgacggcatgggccacgatgacgcgcgcggcggcttatcggcatcagccagtgtccgccggaaccgcgcgttgatgccggggtgaaagagctgaatgagatgacgatcggtcgaaccgacgatccaaagaacccgttccgtaccgcggctttcgaagccgcatcgttgcttgggagtggatcgcggaccccatctgggccagcggacatggcgccgcgtcgagaaggccggacacatgatcgcaatcgacccacccgtcagacctctcatttttcctcttgcatccaaggggccgtccacaca

SEQ ID NO: 10025 - DNA, 1410 bp, unidentified
  source 1..1410: mol_type = unassigned DNA; note = element_fc4050b
  misc_feature 1: note = core
  misc_feature 2..92: note = LE
  misc_feature 93..1124: note = CDS
  misc_feature 1125..1410: note = RE
  misc_feature 1180..1405: note = bridgeRNA
caatgggatggactcttcctcacctaaccggcatcgatgtgccaaaatggtgagtaggttaaaaaccatcataactatgaggagaagtccagatgaccattatccgtgtcggtgttgatattgcaaagtctgtctttcatgttcatggcgcagatcgtcagggtaaaacctgctggcaaggaaaatattcacgcagcaaatggctggatgctatcagtaataaagcacctgccggtgctgaaatcggcatggaggcctgtgcctcttctcatcactgggcgcgtgagttgcaaaagcgtggttatcgggttcggttgattgccgctcaatttgttaaaccctatgtcaaaagtaacaagaatgaccgtgttgatgctgaggccatctgtgaagccatgagtcgccccaacatgcgctttgtcaccccaaaatcggttgagcagcaggatatccaggccatgcatcgcattcgggaagaactggttgctcagcgcacggccaaggctaaccaaattcgtggattggtcggtgaatacggcattattgctcctattggcattcatcagctgagacttgccctgcccaactggttagaagatgcagaaaatggtctcacttatcctttccggcaattgctgagcgatctcgcagaagaccttcgctatcttgatggtcgtgttcaaaagctggatgaacaaatccgtgagagcgttcaatgtgatccggttgctaagcgtttaatgacactgcgcggtgttggtcccttaattgccagcgccctttcaggagcacttggcgatggaaaagcctttaaaaaaggccgtgattttgcagcctctctgggattgacgcccagacaacatagtactggtggcagagatcgactattgggcattagcaaacggggtgacagctatttacgcaaattactggtgcatggggcaagagcagtattgcgacatgcgaccaacaaagaagatggcctgagtcgctggttaaaaggcctagcttccaggaaacacaccaatgtggcggtggtcgctttagccaacaaaacagctcgtattgcttgggctttaatttacaagaaagttgattatgacgaagctctggcagcggcttgagtgttcgattgtagatagcaacaaaacaaagcgttaaacaggagtcatacctcaccacgattgcgtggcactttgattgatggcgaacaggtcgaaccggcactggaaaaaccctttgcatgcggagagccttgagctcgtggagccaattgggagccagtgcgcgaatagcccatcagggtccgatgcctcgcaacggcatcattaatgagaccggatacacgtaggcagtcgtacctttgcttcgatcaaacaaagtgcttgcaatagaggaggagtccataca

SEQ ID NO: 10026 - DNA, 1563 bp, unidentified
  source 1..1563: mol_type = unassigned DNA; note = element_fc41b1b
  misc_feature 1..3: note = core
  misc_feature 4..431: note = LE
  misc_feature 432..1454: note = CDS
  misc_feature 1455..1563: note = RE
  misc_feature 8..226: note = bridgeRNA
gttcgtattatagagttcagccagatctttctggttgaactttttttatatggatttattctatcagtagccagggtagaacgtacgggggcgtgggacattgatcccgtcgactaaactgttcaccccctactagtagaaatatgtttgaggctggttgggacttagatctcgtataacaagcgaagatataatactacttgaggtattaggggttactggtgaatacgcaataggaggagaaagaatgaacccggttgtgggtatagacgtagctaaagaagtaagtgaagtacaggcttttttagataaaggaaagccttatggaaagagcttttcaattaagcataatcgtgaagaattagatggttttataggttttttagaggaaattaaatcaatgacaggtcacacacaggccggtggttatattggaatcaacggggcattatcatactcctgttattcaatgcttagaagagaatgatgtactttatattctgttgaaccctatcatttctcaccaagcaaagaaatccagtttaagaaaagtaaaaacagatgcatttgatgcctatcagttatgtgtcctttattacaaagaggattttgaaccttataaattgaggggaattcaactgatgaacctgcgtaacctttctaggcaacaggagatcgtgacgaatatgtatgtggaagcaaaactgcaatttcacacgattttagatcagacttttcctgaatacagaaaggtatttggagatcttttttcaaaagtatccttatcaatattaagagaatatccaacttcggagaagattctagaggcggatgaagaggacctggcggaacgaataaaagggtattgtccaactcgttctattcagtgggcaagagagaaagcaaggaaattgatccattcagctactcaaaatccttttcaaaaggtgatgtatcaaagccatctcatcaatcttaatatgtatatagacatcttatttcattaccaaggacatctgtcggaattggagaaccaaatgatatccctggcaaatgaaatagaagaatataagattatccaatcaatacctgggattggagaaaaaatcgctgccacgattatttctgaaatcggtgaaattgatcggtttaatcatcctaagaaactagttgcctacgctggaattgatcccagtgtacattcctctgggaagtttacagctacgacgaatcatataacgaaacggggttccagcaggctaagacacagcttatatctagctgtattatgtggaataaggagttccagaaataaaaagctcaaagagttctacgacaagaaacgctcagaaggaaagcctttgaaagtggcaattgtcgcttgtattaataaacttcttcactggatttatgctttattaaaaggcaaagaacatttcctggatatagcttaaaaaggttatccaaccacataaagaaaaaccttccatttggtatgcctaaaaacagtatagcatataaaaaaatgaattttacagagagatattgacatcctattagctg

SEQ ID NO: 10027 - DNA, 1639 bp, unidentified
  source 1..1639: mol_type = unassigned DNA; note = element_fc4b41a
  misc_feature 1..2: note = core
  misc_feature 3..294: note = LE
  misc_feature 295..1470: note = CDS
  misc_feature 1471..1639: note = RE
  misc_feature 41..272: note = bridgeRNA
ctcgtattatatagtagtagtttttagagaccatctccaaggtcttaataactgttaaatcatagtctcttctttacctcttctgtaggttcgactatgatatataagatactgtggattggttgtaatcacctaccacccgatggttttaaggaggctccaaccatagtctctttgttcatttgttaatcagttagataccgcatgacggtttatttagaacgaggttacaatcgcaaggagtaccagtgggtctataaacagtatcaaaatatttactcaaaggagatttttatgatatacgtcggaattgatgttgctaaggacaaacacgactgctttatcactaattcagatggtgaagtattattcaaatcttttaccattcctaacaatcgtgaaggttttgaaaccttatttcagaaagtacagtccgtatcagatgatttaaccaaagtaaaagtaggacttgaagccaccggacactatagttacaatcttctgggatttcttcttaataaaggtctgaccacctttgttatcaatccgttacatacaaatctgtacagaaaaagtctaagccttagacagacgaaaacggataaagtagatgcccgcacgattgcttctattctaatgtctgatgtgaacttaaagtcctactcagacatatcttaccacaatgaagaactaaagtcattaactcgttatcgttttgataaagtaaaagaacgtgccaagctaaagtcttccgtttcaagactgatctgtatcttatttcctgaattagaaaaacttgttccaacacttcatatggcatctgtttatgcattgctttccgaatttcccggtgctaaacaagttgctaacgctcatcttaccagacttacaaatcttctttcagaagcttctaaaggtcgatatagtaaagatactgccattacatttagagacgctgccagaacttctatcggctcaaatatgcctgcaaagtcactggagctgaagcacaccatcaagttgattaaggaacttgattcagagattgatgaaatcgaaaatgaaatcaaaatcatcatggatgaaattaattctccaattctcagtattccaggtatcaactatcgcatgggtgcaatgattattgctgagattggtgatttcagccgttttgattctcctgataaaatcttagcttatgccggtttttcgccatctacatatcaatctggacatctgtatggtgcttacgcacatatggaaaaacgtggttccagataccttcgatatgctctgtacaatgcagctaagtatgtctgccactgggatccaacatttacagcttatcttgctaaaaaacgagcagaaggcaagcattacaatgttgccatatcacatgctgtaaaaaagctgattcgagtaatttatcatctagaaaaaacaaatcagcaatacatcaaagcctcttaagtctttctaattcaatactgttttttttgagcacctataacgatgctttttttgtcatgcagttttcaaggttcaaagaactctaactgagttcaaaatatatctaaaaatacatttctgtactttattcaaaaaatatcattttagggcttgacttttaatagttagt

SEQ ID NO: 10028 - DNA, 1623 bp, unidentified
  source 1..1623: mol_type = unassigned DNA; note = element_fc4db3f
  misc_feature 1..2: note = core
  misc_feature 3..283: note = LE
  misc_feature 284..1504: note = CDS
  misc_feature 1505..1623: note = RE
  misc_feature 13..309: note = bridgeRNA
ctactacaatatatttatggttaatatcccttacagccagtaaggaattatccatcttgttgcttaagctgtataatgatggagcaatcggtataacggattcctccttgggcttcgcgcccgtacaaaagtctgttaaccagctcctcattcgcagcgttcgttttatgcaggttgatccaccttcagggtgcgttcgtgtcacaccacagtagattgaataggcaatgagtaaaactggtacttatccattgcaattattctttctaaggagtgacaatttatgaacatgaacgcagtaggtattgatgtttccaagagaaaaagcacagtggcagttctccgtccaggtggtgatgccgttgtaaagccctttgatattccacatttggatgatgcatttcaatcactaattaatcttctacattcccttgatggtgaaacccgtatcgtcatggaatgtaccggacactactatgaaccaattgcccggacactgtcacaggcaggattctttgtaagtgctgtgaatccccagattatctgtaactttcagggacaggataatcctctccgcagagtaaaaacagataaagctgattccgttaaaatcgctcgatatgcacttgacagttgggcaaagctgaaacaatatagtcttatggatgaaatacgcactcagcttaaaacaatgaaccgccagtttgatttctatatgaaacacaaaacggcaatgaaaaacaacctgattggtctcatcgaccagacttatccgggtgccaacacctactttgacagtcccgcccgtgaggacggcagtcagaaatgggtagatttccttggcacctactggcatgtcgattgtgttcgtaaaatgtccttaaaagcttttactgaccactatcaaaagtggtgcagccgtaagaagtacaacttcagccaaacaaaagctgaagaaatctatggaactgccaaggaactgattcctgtacttccaaaagataattttaccaaacgcatcatcaaacaggcgatagaacagctaaatactgcttcccagactgtggagcagttgcgctcacttatgaatgaaacagccgcccagttacccgagtatccggttgtaatggcaatgaaaggtgttggttcatctcttggtccacagcttatggctgaaatcggagatgtaacccggttcacacacaaaggagccatcactgcatttgccggagtagatcccggtgttaataattccggagactattcccaaaaaagtgttcatgcttccaagcacggctctccagttttgcgaaagactctgtttcagatcatggatgttttaattaaaaccaaacctgatgaccctgtatatctgttcatggacaagaaacgtgcacaaggcaagccgtactatgtctatatgacagctggtgccaataagtttctgcgcatttactatggtcgggtgaaagaatatctttcatccctgcctgtatcagagtaatcaacctatacttttcctcagaccggcattttctggcggtcttattttaatacctacttttcaacctgtataaaattttcaatgttctttaaattttagcttgactttttatttgcagg

SEQ ID NO: 10029 - DNA, 1120 bp, unidentified
  source 1..1120: mol_type = unassigned DNA; note = element_fc4e08f
  misc_feature 1: note = core
  misc_feature 2..216: note = LE
  misc_feature 217..1110: note = CDS
  misc_feature 1111..1120: note = RE
  misc_feature 33..198: note = bridgeRNA
ttgtctctcaaatctatgctctaatgtccgggaagctgggatcgaaccccgggatggccatcccggggttcacgtgacaaagcgcccgtacaggaataggtgtcaacgaccgacctcatgaagggactttgccgcaccagcttcgcatcgcttgctgacttgaatgggctatccgaaggacacgcccgcagacaattcgaagcatggagcctaattatgatggcagaactcgccgaaatccagtgcgtcctcggcctggacgtttcctgcaataccgtcaccctgttcgacagctgcaccggccgctgcctgaccattgccaacgaggccgacgcactgcgtactgccttgcagccctatcaaggcaccgccacgctcgccgtctgcgaggccaccggcggccatgaagataccttgctctgcgtgctgctggaattggccatcccggcccatcgcgccgatcccgccaaggtcaacgcctatatcaaatccttcggcaagcgcgccaagaacgacccgatcgacgcccgctggctgtcccgctatggccgcgaccgtgccgcaatgctgctgcgctggcagccggccaatccgacccaacagaagctcgagctgctcgtcgcccgccgtctcgatctcgtcgccatgcgggtgcaggagcagaatcgcctgaaagccccgcgcagcagcctgatcggcgaaagccgtgatctgacactgcgggccaaatcattgcggtcggtgccgggcatcggaccagttctggtaccgctgctgctcgccgtcatgcccgagctcggcacgctcaaccgccgccaggtcgcaagcctcgccggtgtggctccgcatcccaaagacagtggcaaggccagttggcatcgcagcaccaccggcggaagacgccagatccgtccggccctcttcatcgccgctctcgctgcttgccgcggcaatagtccgatcgctaccgcctataaggcgctgctcaaggcagcaaagccgaagcgcgtcgctctcaccgcaatcatgcgcaagatcatcaccatcgcaaacgcccgcgtcagagacgctctacagcagcaaaagcaaataatgcccgtccccgcataaactgacttgg

SEQ ID NO: 10030 - DNA, 1573 bp, unidentified
  source 1..1573: mol_type = unassigned DNA; note = element_fc52da6
  misc_feature 1..3: note = core
  misc_feature 4..167: note = LE
  misc_feature 168..1406: note = CDS
  misc_feature 1407..1573: note = RE
  misc_feature 45..193: note = bridgeRNA
cccgttaccttgtgggtatccccgataatggggatagtcgctggtcccggtatggcttacttgccctgtagtttccatgatccgggggtgttgctcccgggcgccaggacgttcgatgacagctgatagggtcacggccggaatctatatccaggtctctttgtaacgtgggtgctcgcaacgaatgtcgtgacgccagcgactggaacaacgacatacccatctcgttttctaggagctcaccatgtcgcaggaacactccatcgacatatttccttggtctagacgtcggcaaatctgaacatcatgcctgcgcccttaaccgtgacggcaacaaggtctttgacaaaccatcgccacaacttgaatccgatctagccggagttttccaccagcttcaggagcttggcagtgtccttgtggtcgtcgaccagcccaactctatcggcgcactaccgattactgtagcccgtgactgcggatgtgaagtcggatacctaccaggcctagccatgcgcaaagctgcagatctctacccgggacgtgtgaagacagacaaacgcgacgccttcatcatcgccgacaccgcccgcacaatgccccacacactacgtgcagtcgaccgcaatgatgaggtactttccgcgctaaagatgttatccggcttcgatgacgacatcgcccgcgattgcacccgcacagtcagtcggctgcgcagcatcctcacccagatctaccccagcctagaacgcgtcttcgctggtagcactctaactcgtgcccctatcttagacttgctgattcactacaacggaccccagggactgaaacgagccgggtaccaacgaatgctgaactggatgatcaagcacacacgtaaagaccccaccccactggtagacgagatttttgcagcactgaaagcccaaacagtcaccgtgctgagaagtgatgcctccgagctcgtcattccgcagctggccaccaacatcaaggcactgaaagagcaacgcaacaccatcgccgaacaagtcgaagagatgcttgctgatttccctttttgcgaggtcttgatgagtatgcccggagtcggcatcaagaccgcagcacagatcctccttgtgatcgatgacggctccgatttcggcagtgttggccacctggccgcttacgcaggaatcgcaccagttaccagaagatctggttcgtcgatccgaggtggattccctgcccgatcaggcaacaaacgactgaaaacgctttgttctattccgttttcgccgctatccgcagccataaaccgtcacggcactactacaaacgcaaacgtactgaaggtaaacgccacaacgcggcggtcatctgcctggcacgacgccgatgcaacgtcatctacgcgatgctgaaaaacaaggagttcttccgagggatcccaccacgcccagtcgctgcttaacatctaaaaagctaaaccgaccagcacacgctggctggtccctaggcgtgcctaaagactacccccacgcctgtactcacccgcgtcgacctaacacttgacaaaaacataaggaca

SEQ ID NO: 10031 - DNA, 1420 bp, unidentified
  source 1..1420: mol_type = unassigned DNA; note = element_fc5309c
  misc_feature 1: note = core
  misc_feature 2..231: note = LE
  misc_feature 232..1407: note = CDS
  misc_feature 1408..1420: note = RE
  misc_feature 14..245: note = bridgeRNA
ctactagttgcattgacctcagatcgggtcttggccgaggctcggtttaggtgtccggggtggtcgctctcgttcgcggctgtcctggcgggctggtggcctgtgactctcaattggcgtgcgctgccctgggcaccgattcggggcgggagaggctgaagaagggaatgctctgccagtagtagcggtgccctcccggctccattccaacggagcaacaggaggtgtcgcatgggtgagcattcgcgggtcgtgatcgggatggacccgcacaagcggtcggtcaccgtcgaggtgatggtggccgacgagacgatcgtgggtcatggccggttcggcaccgacgtggccgggttcgcccaactggtcgggttcgccgctcagtggcccgaccgggtgtgggcgatcgagggctgcgaggggatcggacggcacgtggcccaacgcctcctcgccgctggtgagcaggtggtggatgtgccggcgaagctgtcggcgcggatgcgcatgttcgccacgggccagggccgcaagaccgacgacactgacgcccactcgatcgccctggtcggggtccggatcgccggccttcatccagtcgtcgctgatgagcagttggacatgctgcggctgctggtcgaccggcgccggcgcctgggcgaggaccacaccagaatgacctgtcagctccaccagctgctgttggagcttgtcccgggcggcgcgaagaagaacctgtccgccgcccaggcccgcaagatcctcgccggcgtccgacccagcgacgaggtcggcaagcttcgtaagcgggtcgcgctcgagctcgtcgtggacctcgagcggatctatctgcgcaagaagcaagccaacaaagagctcgtcgccctgctcaagagcacccgcaccgggctgctcgacctgcacggcatcggaccttccggtgcggcgcggctcctggtcgaggtcggtgacgtcacccggttccccaaccgcggccacttcgcgtcctggaccggcaccgcgccgatcgacgtgtcctccggcgacaagcaacaccaccggctctcccgcggcgggaaccgacagatcaaccgggtgctgcacatcatggccgtcgtccagctccgcaaccccaccgagggacgcgcctactacgaccggaaggtcgcggctgggaagagtcccaatgaagccatgcgctgcctcaaacgacgcctctccgacatcgtgtaccgggccatgctcgacgactacgtggcaacgagagcgacaggcccgggaggacaccggggagcgtcacttcaatccagcgcggccggctcacatccccacaccagcacttcggatcagtcacttcccggacccgtcaccagaaagcctacgacccgcctgcccaaggcgtcttgacacagaagggtgc

SEQ ID NO: 10032 - DNA, 1200 bp, unidentified
  source 1..1200: mol_type = unassigned DNA; note = element_fc57905
  misc_feature 1..2: note = core
  misc_feature 3..225: note = LE
  misc_feature 226..1185: note = CDS
  misc_feature 1186..1200: note = RE
  misc_feature 6..207: note = bridgeRNA
cttatgtcttgaacttccccgccagtgcggggaagatccccgactgatcatcgggaggttgccggtgagcatcccctggccctggtgcttccgagcccgtgggagagattatgccccggcaaccttattccctgtcgcctcaagaccgaacggtatcctgtgcctctgagcacccacatataaggatggtctggcgatattattcataaggttacggagaatcagatgaccctcacttctgtcggcgttgatattgctaagctaaaatttgatgtcgctgtcctgctgcctggtcagaaatacaaaactaaaaagtttgctaacacgcctgcgggatgtcgtgagtttattcactggctgacccgctttggggactgtcatgtctgtatggaagcgacgggcagctacagcacggaactcgccacggcattgtccgatggcggctatcgcgtcagcctggaaaaccctgcccgcattcatgccttcagtaacaccgaactgacccgaaacaaaacggataaaagcgatgccgccctgatagcacggtattgtgccctgtatcagccagcccaatggcatccggctcctctcagccagcgacagctgaccgcgctggtgcggcatcttaaaaatcttgaagagatgcgtcagatggaagagaacaggctggaggccgcagatgaggtcatcactggctcgttaaaagagcacatcgccacgctggatgaactgataaaagaaaccaaaaagaaaatcagacagcacattgatgatgacccggacctgagaaaagacaaagcgctgctggagagtatcccgggagtgggagatgtgctgagtacgagtcttctggccttcgcgggaaacctgaggcggttcaggagcagtaaggctctggtggcttatgcagggctgaacccacgacgttgtgagtccgggatgtggaagggaaagagcaggttgtcaaaagtggggagccgtgagctgcgtagcgtgctgtatatgcctacggtagtggcgggaagatgtaatgaagtggtgaaagacctgatgacccggatggcgagcagggggaagacaggcaaagaacgcgtgtgtgcaggaatgagaaagctgctacagctggcttatggggtggtgaaatcagggcgtgaatttaacgctgaaataccgcttgccggataaccgacaagacggtat

SEQ ID NO: 10033 - DNA, 1720 bp, unidentified
  source 1..1720: mol_type = unassigned DNA; note = element_fc5e65d
  misc_feature 1..5: note = core
  misc_feature 6..414: note = LE
  misc_feature 415..1602: note = CDS
  misc_feature 1603..1720: note = RE
  misc_feature 185..391: note = bridgeRNA
ctgctataattcgtccataggaaaaactcggataaaaatgcagacatttcgcataatcgacgaaaacccttcccacgaaaatgcggcttccaagctcgttccggcggcagtccgattctttgtccttgcgaaatttgttcgctctaagcagcattcggcgctgctgtatgagaccgcagttcttcttttttcgccgttatcagcgcgcagatgcgcgatgatataatatcctcatgcagacagaggttctcttcttttctccttgcggcgctcgtccgctctaagcagcgtgggacctctctcttatgagctttcatttatgagccggatgcgggatcctccgctgatatcgaagcagggtatgactcataagaccatgaggactgtctgtaaatctatgttgaggtgtgtgttatgttcattgtcggtatcgatgtcgccaagcgcagccatgaggtctgcatgatcacatcggacggtcagaccgtccagcgtccattctctatccgcaacaactgcaccgggtacaatctcatgctggagaaaatcagaaaacacacgaacatcaaaagccagatcgtatttgcgatggagtccaccgcgcattactggctggcgctctttacgcggctgcgcaaggacggctatcacgtcattctgcttaatccgatccagaccagcgccatgagggatatgttcatccgcaagatcaaaaccgatgccaaggattccttcatcattgccgagctgatccgctttgggcgctatgccgaaagcaatgttgcgcaggatcgtttgctggcgctgaaggagctgtgccggaaccgcttctatctggtcgacatggccggtgacctcaagcgaaagctgatcgcgctgatcgaccgtgtctttccggagtatgaggcgcagttcgatacgattttttgtaagtcatccgtggcgctcctgaaaaagtatccgacgccgcaaaagctttccaacgcacatctggataagctgacggagctgctctggaacagcagcaacggtcacttcggcgagtggaaggcgcgtgaactcaaggagcttgcacgaaacagcttcggcgttgaagactgtgacggcgcgtattccacgctgattctcctgatgctcgaccagatccagtcgctctctgggaaggcagacgctctggaaaaagaaatatctcgactgtttcagagctttgatacgacggtcacgacgattcccggtgttggaccgatcattggagccgtcattctcagcgaagtcggagatatctcccgtttttcttctgcggacaagctcgcagcctatattggcgtcgatccgtctgtcaaccagtccggcgagttccaggctgcgcacgcgcatatgtccaaacggggctctccgtatctgcgcagatgcatctggatggcgtctcaggtcgctgtacagcgcgatcccatgttccgcgcgtattacgagaagaaagccgcagaagggctcaaatacatgacgatcatcggtcatgtgacgaggaaaatgactgccgtggtatttgccattctgcgtgaccataaggtctacgagccgattctgccgaccgccgcatagaagcttcacacccatatccgcctgctcacgccccgtgagcctgcattgccgcgcccatttccagcggtgaccatttcatttcttctgcatttttatcccttgacaaatccatagccgg

SEQ ID NO: 10034 - DNA, 1348 bp, unidentified
  source 1..1348: mol_type = unassigned DNA; note = element_fc5f7e8
  misc_feature 1: note = core
  misc_feature 2..69: note = LE
  misc_feature 70..1101: note = CDS
  misc_feature 1102..1348: note = RE
  misc_feature 1103..1338: note = bridgeRNA
tatggaatggctcgcccctcaggttcagcgcatcatggtgatgtgatgtggaagacagaggagcaaatgatgaacgggattgcagttctgggtatagatcttgggaaagacagttgcagcgtgaccggtctcgatgccggcggccacgttgttctgcgccgccgcatgcgccgtgacagcgtcatcaagttggctgccggactgccgccttgcgtgatggcgatggaggcctgctgcggtgctcatcatctgggacggttgcttcgaacgcaggggcacgacgtccgactaatgtctccggaatatgtccggccttatgtgaaggctcagaagaacgatgatcgggattcggaggcgatcgccgaagccgccactcgaggcacaatgcgcttcgtcgatctgaagagcgaggagcagctcgacatgcaaatcctgcatcgagcccgtgatcgtcttgtcggcgagcgaaccgcgttgatcaatcagcttcgggccgttcttttggagcgaggtatcgtcatggcgaaagggcgccgaaagctggagattcatctcgacagactgctcaccgacgaggtctcgttcagccgaagaatccgtcttctgatggaagacatgcgcgaccagtggcgagcgctcgacgcgcggatcacggacttagacaaggaattcgcctcgcaggctcgatccgatgaaccagcccggcttttgacgacgattccaggaattggcccgttgaatgcgaccgcgttcgtcgccgcgatcggcgcagccgagacgttcgggcgcggacgcgatcttgccgcttggctcggcctggtcccacgacagatgaccaccggcggcaagccccgattgctgggcatcagcaagcggggtaacggataccttcgcaaaatgctgatccatggcgcccgagccgcccttccggtgctgtcgaaaggcgacacgccgcttgggcaatggctgcgaggactgatggccagagcccatataaacaccgccgtcgtcgctttggccgcgaagatggctaggatcgtctgggctgtactgagaagcgggcgccccttcgacatgaggacgaccacggtagcggcatgaacggttcggcaggggcgtttagctggcctagcccaagatgtctgtgagtggacctacgagatggcctgacgatcgaccggtgttccgaaaacctgatcaaaaaaatggcgtgtaacgccgctctgtttatgaggatcggaacgcgcgaagctccatcttggccaaggggtcacccttgagaccggatacgttggcgcagatcaaacggcagaatcaaaaaccgcttgcaggcggggcgagccatacg

SEQ ID NO: 10035 - DNA, 1452 bp, unidentified
  source 1..1452: mol_type = unassigned DNA; note = element_fc6696d
  misc_feature 1..2: note = core
  misc_feature 3..228: note = LE
  misc_feature 229..1431: note = CDS
  misc_feature 1432..1452: note = RE
  misc_feature 6..220: note = bridgeRNA
ctaatgggacccgacggcatgcgtagggcatgctgtgcccgagccgccggcgggtaagcactgtgagtcgctgagcttcgagctctagggctagagcgtgcgcccgccggtcggtgaggggaagctgacggctggtgggatggcgtgcctcgagcactgatccattagcgcgccgcgcgtcccctccgggctcatcggtcgaccgagaggagggggcgagtgatcttcgtgggaatcgactgggccgaggcccaccatgacgtctgcgtgctggacgaagtgggtgtggtgcaggccaaggggcgggtgcccgacggggtggagggcgtggcccgcctgcacgccatggtggctgatcacgccgaggacgcggccgaggtcctggtggggatcgagaccgaccgaggcctgctggtgggagcgttggtggccgcagggtaccgggtctacgcggtgaaccccttcgcggtctcccgctaccgggaccgtcacggtacctcgggggccaagtccgacccgggggacgccaaggtcttggccaacctggtccggaccgacagacacaaccaccgggaggtggcaggggactccgagttggccgaggcggtgaaggtcctggcccgggcccaccagtccctgatctggacaaggcagcgccaggtgagcgcgctgcgcggcgccctccgcgagttctacccggcggcgcttcgagccctccccgagctgggcacggtggaggcgtgcagcatcctggggatggccccaaccccggagcggggtcgccggctcaccctggccaaggtccgccgctccctggccgcctcgggcaggacccggaacctggaccggcgggccgcggagatcctggaggccctactcgctccccagctggaagcgccgccgatcctgtcggaggcctacggctcggtggtgggatcgctggtcgtggtgatcgacgggctcctccaccagatcgcccgactggagaccgagctggcggagcgttttgagagacacccggacgccgagatcctgcgcagtcttcccggactcggcctggtcctcggcgcccgggtcctggcggagttcggggatgacccggcccgctacgccgatcctaaggcccgcaagaactacgcggggacgtcccccatcaccagggcctcgggcaagcggatggtggtcctggcccgggtggcccacaaccggcggttggccgacgcgtgctacttgtgggcgttcgcctcgctcaacgcttcccctggagcccgtcggtactacgacgcccgccggactgccggcaagacccatcaccaggcgctcagggcactcgccaacaggctggttgggatctttcatgggtgcctccagcatcgccagctccaccgggaagaggtggcgtggcccacggggcttgatgctgtggcttgacagcttccagccgtgggatgt

SEQ ID NO: 10036 - DNA, 1417 bp, unidentified
  source 1..1417: mol_type = unassigned DNA; note = element_fc68802
  misc_feature 1: note = core
  misc_feature 2..90: note = LE
  misc_feature 91..987: note = CDS
  misc_feature 988..1417: note = RE
  misc_feature 1190..1409: note = bridgeRNA
caatgggatggacgcccccacccattacggcatcgatgtgccaaagtggaagcgttgcttcaaccacttgaaccgagaagggcgtccaccatgaagattacgacagttggcatcgacttggcaaagaacgtgttgcaagtccacggcatcaacgagcacggcaagtccgcgctcaagaagcaactgaggcgcgagcagatggcggcgttcttcgtcaatctgccgtcatgcctgatcggcatggaggcgtgcggcagcgcgcaccactgggcgcgcaagctgcaggagctcggccacacggtacgactgatggcgccgctgtttgtcaaaccctatgtgaagaccaacaagaacgatgccgccgacgccgaggccatctgcgaggccgttggccggccgaacatgcgctttgtgccgatcaagaatgtcgagcagcaggcggtgcttgcattgcaccgggtccgccagggcttcgtgaaggcgcgcactgcccaggccaaccagatccgaggattgcttggagagtttggtctcatcatcccgcagggcattggctacatcggtacaagagtgcccgagctcattgaggatgcctccaacgatttgcctagcgcgtttcgcgtactcgtgcagcgcttgcttgacaacctcaaggaactcgaccgccaggtcgacgaactcgaggcgcagatccaggcgtggcaccgaagcagcgatctcagtcgcaaggtcgcgcaagtcccgggtatcagacccatcaccgcgagcgcgctggtggcctccattggcgacgccaggaactttgacagcggccgtcaaagtggcagcatggctgggcgttgttccccggcagcactcctcgggcggcaaggccaacctgctgggcatgagcaagcgcggcgacagctacctgcgaacgctgctgatacacggggctcgatcggtgatctatcgcgctggtcagaagccggagtcgagtgcgtgtagctggatcaatgccgtggttaaccggcgcaacaagaacgtggcggcagttgcggtgccgaacaagaatgcgcgcatcgtttgggcgctactggcccacgatctgcactacgaggccggctacgtgagcacggtccagacgatctgacagcgcaggcaccaagaaccaagaaccaagagacgatgacagcagggagaattaaccaccgattgctcaggcgatcatgaagtgatggcaagacaggtcagaccgtggttggcaaagcccgcgccggacgaggcacccagagtgcgtgtaagcgatcgaggcgtcaatcagcgtaacccatcagggacggtggccaaaagccacactggaagtccgaatgacgggtgcaatctttaccttcgagccaccacgaattgagagcttggcatagggggcgtccatgta

SEQ ID NO: 10037 - DNA, 1381 bp, unidentified
  source 1..1381: mol_type = unassigned DNA; note = element_fc6ab03
  misc_feature 1..2: note = core
  misc_feature 3..255: note = LE
  misc_feature 256..1305: note = CDS
  misc_feature 1306..1381: note = RE
  misc_feature 19..235: note = bridgeRNA
ctcctatgtttgtaaaagtataaaatctatttgttattttagatttatattaaagtgaaaagaatgagagtacattggcgcctaaataactcttgaagtatattgtcgcaaagaaatcacctcattctttttttatcttttagagtttgaacagaatgtaaggaataatttatttaaagttatatccagaatatccaaccaggagaaaaaacgaggagaggtaatcactttatataatttaaaccttatataagaatgaaaaaagtattaaaacaagtattaggagttgatgttgctcaaaaagagttagtagtaacgttaggaagaatgtttaatgatttatccgtagatctttatgcatataaagtattcaaaaacaacaaaaataattttgcatctttattgaaatggttagattctctaattgaaaaggatatagaaattcaatttgtaatggaagcaacaggagtttaccatcaaaaatttgcatattttttagaagagaaaggtttaaatttaagtattgttttacctaataaaataagtaattacatgcgtaccttaaataccaaaacggttacagataaaacagcatcacaggcaatatgtcgttttggtttagagcgtcaattagatgcttggaaacgaccaaagaaaatctacaaagaactgcaacaactcactagagaacgaagccagatagtagatgagcgagtaattgtaaagaatcaattgcatgcagagaaatctgaagcagaaccaaatcaaagtagtttaaaacgattaaaatcaagaattaaatttttgaataaacaagaaaaagaaattaaattagaaattcaagaaatgataaatcttgaccttaatttaaaaaaagaagttcaaaatatttgcacaattccaggggttggagttttaacagctgtaaccgttttagcggaaacaaatggatttgaattaatcagaaataaaaaacaattaaccagctatgcagggttagatgtaaaacaaaaacaatcaggaacatcggtaaataaaagaactaaaatttcaaaacaaggaaataaaaatttgagaaaatcgctacatctgccctcattgtctgccgttaaatataataacacacataaagaactatatataagattagtagctaaaagtggtataaaaatgaaagggttaattgcagttcaaagaaaattattagaattgatttatgtaatttacaagaataaaaaagggtttattcaagattatgagcaacaaaaaagagcaacactattagaaatagagattgccctttagaaactagcttatagccgttttgaaaaacaaaaatataaaaaatatatggattttttgttgcaagttaacacagaat

SEQ ID NO: 10038 - DNA, 1516 bp, unidentified
  source 1..1516: mol_type = unassigned DNA; note = element_fc72668
  misc_feature 1: note = core
  misc_feature 2..293: note = LE
  misc_feature 294..1364: note = CDS
  misc_feature 1365..1516: note = RE
  misc_feature 59..271: note = bridgeRNA
tggtatattgtaattgactcatcttacggtcatttacaaatataccttttcctttctatcaacctactatccgtggttgattacggtgttatacatttgtattattaaaatatgtgatgtggatttgtatattattccctatggctttgactactttttggaagttcttaccacaccttatttctaaataatgattagttagatgagtcttgaattcgtatcttgtaccaggttttacgaagtaagtgctgtggataacacattgcatatttttacgaagggaatatattatcatgattttagtcggaattgacattggtaaaaaccaacacaccttctccatcgttgacaagaatactggagaaatactttctaacccttccctttttactaataatcaggaagggtttctgttcctcatcaaaaagctaaacagatattccaaatcagaccttttaatcggtatggaagacaccgggcattatcactttgccttactcaaatatcttcttgatatccgttatactgttgcactaatcaatccaacaactactgaccttaccagaaaacttcaaggtggaatcaccaaaaatgcccctcttgattctcttactatttgtgatgtgatcggctctaatcagcgtaagaaaccatatcgtattacaaaagtgaatcgctttgacctttatgaacaaaagcaattgacacgtcatcatcacaacctgaaagaggaattaaatatttataaaaaccgtcttcaaaaatgtatcgacatcgtatttcctgaatttacttccttattccggtcaaaatatggcattgtttatatgaatgttttgaaagcttttgcttctgctgaaaaaattgcaacttctgatattcgaaccatccggaaatactttgagtatgaaggacgtagaaaacggatcacgctttctgaaatagacaaaaagatagaagagttctccttccaaaacaactctcctatcctctccataccaggaatttctcacttctctggtacttctattttagcggagttaggagatatttgcaactatacaaaagcgtctcaaataatcaaattcgctggtgttgctccatatcactataaatccagccagtttactgcccaacacactgcaataaccaagaaaggatccagatacctgaggaaaactctatatcagattatttttccggttatcaaccacaacaaggtctttactgcgtattacaacaaaaagctaatcgaaggcaaaggttacagatgtgcccagtgtcactgtgtcagaaaacttttaagaatcatctatcatcttttaagtaccggacagacatttgatcccgctttactgatataaccatacatacaacttaacttataaattcagccttctttgaaaggtctatttgtcgtgccataaaatccataattattcacatattttcaaggtacatacttttgctaactaaaattcaatttttctaaaaaactacttgatttttatatagt

SEQ ID NO: 10039 - DNA, 1393 bp, unidentified
  source 1..1393: mol_type = unassigned DNA; note = element_fc78d8e
  misc_feature 1..2: note = core
  misc_feature 3..73: note = LE
  misc_feature 74..1144: note = CDS
  misc_feature 1145..1393: note = RE
  misc_feature 1120..1383: note = bridgeRNA
tgatgatgtgaccgaccccgacggcatcactttgccaaggtgggcctgcagcgatccacaaaggagagcggtcatgtcagagattttcacggccgggctcgatctggggaagaatgtgtttcaggctcacggggcagatgcagcggggcagcctgttctgcgcaagaagctgcggaggggtcaggtgccggccttcttcagcgggttgcagccctgtgttgtcgcgatggaagcctgtggcggcgctcatttctggggccgtgagatcagcaaactgggctgtgatgtacggctcatccctcccgcctatgtgattccctttgtcaaacgccagaagaatgatgcagccgatgccgaagcgacctgcgaggccgcgctgtgtccggcaatgcgctttgtaccaataaagagcgaagagacacagcgcgcggctatggtgtttcgcgtgcgcgagcttctgatccggcagcggacccaggccatcaatgcactgcgagggcttttgagcgggttcggacaggtcgcaccgcaaggggcggccaacgcgtcgaagctgattgcaatcgtcgatgacccggaaagcggcttgccagccgatgccgcctccacactcaaggtgctgatcacggccctgaccaagttggaggcagagattgtcaaactcgatgccgggatcgcccgccgggccaaggaaaacgacgtggcgcgccgcctgatgacggtgccgggcatcggcccgctgatcgctacggccatcgcgacccttgctccgccacccgagacgttccgcaaggcccgggactttgcggcatggctcgacctcacgccccgccagcattcgacaggcggcaaacagcggctcggggccgcaacgaccctcccgggacattgcgtgtcgcaatgccctgccgggcagcggatgggcgagcggtccctgaggcgcctgctgatcattggcgccaacagcgtcatcatcaagcgtcacgtccatgccgaggccaagccaggcacgtggctgggcgggatgttgtcacgcaagccaccaatgctggtgcgcgttgcgctggcgaataaaatggcgcggatcgtctgggccttgatagcccggggtggcgtctaccagtctccggccacggtggcatgagccagcggtaggccgcgaggacgttggagcacaagagggcaaggagcagtttggcgcaacagtcgtgagacgggatcggaagaaccagcctgcaacaaagtgcctgtgagcacgcggcgttgatttgggggctgatccgcgaacaccatacgggtcctgcggcatgtgtgacgccgcatacatgtcagcacccgatgacgcgccaaaatcagcttagaaaatacttcttgcgcaaggggcggttataca

SEQ ID NO: 10040 - DNA, 1194 bp, unidentified
  source 1..1194: mol_type = unassigned DNA; note = element_fc8650c
  misc_feature 1..2: note = core
  misc_feature 3..62: note = LE
  misc_feature 63..1016: note = CDS
  misc_feature 1017..1194: note = RE
  misc_feature 985..1183: note = bridgeRNA
ttatggatggcccacccctcatcatcggcgcaggatcgcgtcgggcagaagaggagttgaccatgaccaagacgagcatttccaaaacgccagtcgccgtgctggagatcgacctcggcaagaacagctgcagcctggcagggctggataccacaggcgcggtggtgctgcggcggcgtatgacgcgggagggcttgatcgccttcgttgccaagctgccgacccgtccaaccatgcgcctggccacgctgaagagcgaagcgcagctcgaccttcaaatactgcatcgggctcggcagcggcttgtgacggcgcgcacccggttaacgaaccagttgcgcgcagtgcttctcgaacgcggcatcatcttgctgaagcgccgaacggcgctgcgccagcgcctcgacgacctgatgagcgaggagatgccgatcagcgcgcgtgccgtccgactgctcgaagatctacgcgacgagtgggcgaacgtcgatcggcggatcagggcctatgacgacgaactggcggctttgacccgcgacgatgataaggcgcgtacccttgcgaccattccgggcatcggtgtcatcaatgccactgcgctgctcgcggcggtcggtgatgcatcgagcttcgccagagggcgggatctcgcggcatggctgggcctgacaccgcggcagcattccgcgggtggcaggaccaggctgctcggtatcagtaagcgcggcaaccgatatttgcgggcaactgatccatggcgctcgcgctgccatggcgcacttcgtcaagcaggatacgacgacgggcgagtggctgcgccgactgcttgcgagagcgcatcccaacgtcgcgatcgtggcgctcgccgccaagctggcgcgcatcgcatgggccgtgttgaagcacggacgtaccttcgagcgtcaggtcgccctggcggcctgaccgggaacagcggccggcacagcgccgatgccgctcacgatgtctgtggaggtgaaggacagatggcgtaacggttgcccccgcgtcgcgagagcctggtcaaaaatgtggtgctcgacaccgcccgtctttataaggcccgaggcgcgcgtgatccatcttggccggggcagagccctgagaccggatacgttgatgcagaccagaacgtcgtccaacatcacccttgcagacgggatgggccatacg

SEQ ID NO: 10041 - DNA, 1318 bp, unidentified
  source 1..1318: mol_type = unassigned DNA; note = element_fc89a8f
  misc_feature 1..4: note = core
  misc_feature 5..62: note = LE
  misc_feature 63..1067: note = CDS
  misc_feature 1068..1318: note = RE
  misc_feature 1099..1305: note = bridgeRNA
ttatgggatggacgcctcccgtcttccgaccaacatgtcggtcaacaagaaggaggaaggcaatgacaatggagattctcgcgatcgatctgggcaagcagtcgttccacctgcacgggatcgacgccgatggggtagttatctcgcgcaaggtaagtcgtgccaagctcgagaacgcagtgaccgaacttgatcccgcgattgttgctatggaggcttgtgcgagcgcccaccactggggtcgacggttctcagcgtccggtcgccaagtgcgcctggtcaacccaaggttcgtcaaggcgttcgtgcgcgggtccaagaacgatgccatcgacgcagaggcgatcttcgatgcggcttcgaggccgacgatgcgcttcgtcccggtgaagacgaccgagcagcaggatcttcaaagcctgcaccgcgtgcgagagcggctggtcgtccaacgcacctcgctcatcaaccatgcccgggggcttctcgccgagtacggcgtagtcttacctaaaggcccgtggcgctttcgtcagcaagtcccggcagccgtggctgaggctgatttgtccaaccttgcccgcgagttgtttactgagctgatggatcagctcaccgacgtagaagcccgccttgcaaagctcgacgccaagctcgtcagcatctgccgcgagcatgaagcctgtcgccggcttgcagccttgccgggcgtcgggccggttattgcgaccgcgcttgttgccgcggtggatgacggtcggcatttccgctcaggccgggagctcgccgcgtggatcggcttagtgccaagacagtacacgaccggcggcaagcccaggctcggcggcatcgggcgacgcgccaaccattatctgcggcgccagcttattcatggggcccgggcggtgatcagccgacttgctgcaaaggacgatgggcgatcagtctggctgaagggcattgttgctcgagcaggtttcaacaaggcgctcgtggcgcttgccaacaagaccgcccgcttggcctgggtgctgctggcccggaaggaagattacctgccagcgtaacgcattggctgaacagggctaggtccccgaacgattgcgaggtggatgttgatggtgcaacggcaggggccgccgcttcgaagcctgatctacgacaaggccatcgaggccgatcatgttatgaggcaagaagtagcggactcccatcaaggccaggagcgtgaccgctccgaccacaggccggatagattcacgcaacccaagccggatgcaacgatcagaactaccttgcggcgggaggcgtccataga

SEQ ID NO: 10042 - DNA, 1554 bp, unidentified
  source 1..1554: mol_type = unassigned DNA; note = element_fc91aac
  misc_feature 1: note = core
  misc_feature 2..269: note = LE
  misc_feature 270..1481: note = CDS
  misc_feature 1482..1554: note = RE
  misc_feature 13..241: note = bridgeRNA
ctacttatgtcttttcagatcgcctgggccggcgcaggctcgggtgaggtgcccggccgggcgctctttttgcggctgcccgtcttggttggtgagcgtggctctttcatggcatgcgccctggccgggtgccgtggcgaggcgtggctcaagaagggtgtgctcagctcgaagtagcgttgcccgtcctcgctgatgctgcaacccgagcgaggaggctggcatggcagagcgggtgatcatcggggtggaccccccacaagctgtcggtgacctttgaggccagggatagccgggagatcttgcgggcgacgggccggttcggcactgacgtgcgtggctaccggctgctgctggcccacgcccggcagtggccggagcgggtctgggcggtggagggcgcgaacgggatcgggcgcccgctggcgcagcggctactggccagcggggagcgggtgctggacgtgccggccaagctcgctgcccgggcgcgggtattcggcaccgggcagggccgcaagaccgaccccgccgatgcgcacgttatcgtcatggtggcgctgcgcgacaagggcctgcgtgaactgaccaccgatcctgacctgacggtgctgcggctgttgtgtgaccgccgcgacgagctgtcccgggcccgggcgcaggccctgaaccggctgcaccggctgttcctggaactggtgcccggcggcgcgccggtgaagaagtccaccgcccagtaccaggcgctgctggccacagtccggccccgggacctggccggcaagacccgccgccggatggctgctgaggaactggccgacctgggacgcctggacgccaagctcaaggcgatgaaagctgagctcaaagccgcagtcctggccaccggctcacacctgatggatatccacgggatcggccccgcaggagccgcgcgcatcctggccgacgtcggcgacgtcgcccggttccctaaccgccaccacttcgcctcctggaccggcacagcgcccatcgacgcctcgtcgggccagcacatccgccaccgcctctcccgcgccgggaaccgccgcctcaaccacgtgctctacatggcaggaatcgtccagctccgcaacgacacccccggccgcgcctactaccggcgcaaggtcgccgctgggaaaaccccaatggaagcgatgcgctgcctgcggcgccgcctgtccgacgtggtctaccgccgctcgccgccgacgtacgggcacaaacaccaaagcaggcaggcccgggagggcactccggggcgactctactgtccagcgcggccgaccttcccccgggcatcggcacttcggaccagccacttcccggacccgcacccaagacgctacccccgccaccagcggcgcccaagacccccgcggcccccgcaggcgccaccccgcgacggcgcgcccgaggtgtcaacgtggagcgccccaccggacgaacgacgttgacaccgaccagcgccggcgcacactcgacagcttcgggaccgcccacttgacaaacaacgtcatagaagggagc

SEQ ID NO: 10043 - DNA, 1587 bp, unidentified
  source 1..1587: mol_type = unassigned DNA; note = element_fc92dc9
  misc_feature 1: note = core
  misc_feature 2..75: note = LE
  misc_feature 76..1140: note = CDS
  misc_feature 1141..1587: note = RE
  misc_feature 1347..1578: note = bridgeRNA
taatgggatggaccggcggtgctccccgcagtaccccgcgtcgaacgggggtaagcggcagtaaggagccccgccatgcctcgccagtccacagacaccgtcgccgtcctcggcatcgacatcggcaagaacaccttccacctcgtcggcctcaatgagcgcggcgccatcatcttgcgccggaagctctcgcgcgggcaactcgaagccaagctcgccaacctgccgccctgcctggtcgggatggaggcctgcgtcggcgcccaccacctgagccggcggctcaaggccctcggccacgatgccagactgatgccggcccgctatgtcagagcctacctcaagggcaacaagaacgacttccgcgatgcggaggcgatcgccgaagccgtgcagcgtccgaccatgcgtttcgttgccaccaagaccgccgagcagctcgatctgcaggcgctgcaccgggtgcgctcacgtctggtcggcgagcgcacggccatcgccaacgagatccgcgccttcctcctcgaccgcggcatcgccgtcgccaagggtctcaaccggttgcgggctgcgctgccgggcatcctgggcacgcgcacagaagtcctgtccccgcgcctcctgcacatcatcgaggacctggtcgccgactggcgccacctcgatcagcgcatcgacaatgtctcgctgcagatcgaggctctcgccaagcaggacgccggctgcgagcggctgatgacggtaccaggcgtcggtccgatcatttccagcgccacggtggccgcgatcggcagcggcgacgtgttcgccaaaggacgagacttcagcgcctggctcggtctggtccccaagcagatctcgaccggtgatcgcaccatcctcggtaagatctccaagcgcggcaacaagtacctgcgaacgctgttcgtgcaagccgcccgcgtcgtgttgctgtggccccgcagctgggagcgctacggcctcaagccctggatcgaggcggccgcccggcggctgcaccacaacgtgctggcgatcgcgctcgccaacaagctcgcgcgcatcgcctggagcgtgctccaccacggccgcaacttcgaggtcaggaagatgtcagaacccgtgtcccggtccgcgtgaggcgggccccgacatgacgagcgtgccgtcgtgctcgacgctgtccaggccaagcccttcgggtggccctgaaccgggccagcctggacagcatctgcgcgcgccggcctcggcattctgcggtcggggcgggagaaagcctgcggcgcggtcgaacaagagaaatggacagaagaaaaggtgatgatgccagcttgaggcccgattcccaccgaggtctgcgagagagaaaggaaagcgatggagcaaccggtcttcccggcgcatgcgagcactggtgacccaaacagcccgctcgaggcttgtccgctaatcagatcgaatgcgcgctcatatccatgatggccgggagcctatgagctccacccaaaggccggatacattggtgcgagaccagaatgctccaggttcaccgatttctcttgcgacgcaccgccggtccataca

SEQ ID NO: 10044 - DNA, 1348 bp, unidentified
  source 1..1348: mol_type = unassigned DNA; note = element_fc984e1
  misc_feature 1..2: note = core
  misc_feature 3..86: note = LE
  misc_feature 87..1118: note = CDS
  misc_feature 1119..1348: note = RE
  misc_feature 1121..1336: note = bridgeRNA
tgatgctggggacggctcctctaccggcacgtaagtgccagggaagcggtcgccgatggggcgaccacgattcggaggaggcaggtatggaagcggtcacagcgattggtctggacattgccaagtcggtgtttcaggtccactgcatcgacgcggaaggcaatgtgattatccgccgtcaactgaagcgccgtcatgtgcaggcgttcttccagaagctgtcgccgtgcctcgttggcattgaggcctgtgcaacgtcgcatcattggtcgcgcgaactcacggcgctcgggcacatggtgcgcctgatgccgccggcctacgtgaagccctacgtcaagcggcagaagaacgatgccgctgacgccgaggcgatctgcgaagcagtcaccagggccaacatgcggttcgtggagaccaagacgcccgagcagcagagctgcctgatgctccatcggacgcgccatctcttcatccgccagcagactgccgtgattaatgcgatccgcgcccattttggcgagttcggggtcgtcgcgccggtcggacgcaagggtgtcgaggagttgctcgacgtcgtcgccgatgcaagcgacgaacgggtacccgaggtggcgcgtgcgtgtcttggcgcgctcggcgttcaactgcagacgctgaaagcccagatcctggagtttgatcgtcgcatcatggcctggcaccgatccaatgagacgagcaggcggctcgatgcgatccccggagtcggtccggcgctggccaccgctttggtcgccagcgtcgctgatcccaaagctttccgatcaggacgggatttctcggtctgggtcgggcttgtgccgaagcagcactcgagcgggggcaaggaaaagctgggcagtatcagcaagcaaggcgatcgctatctgcgcagcctgttcacagctggcgcgctcgccgtcatccgttatgccaagatccatggcaccaagcatcggccctggcttgcggcattgctggcgcggcgaccaaccaaggtcgccgcgatcgcgctcgccaacaagatcgccagaatggcgtgggccatgatggccaagggcgagccttacaaagaacccgccgcgctcgcggcgtgatgtgagggttgggagggcgaacagcacgtaatgcagagccggtcgatccggcgatcaggacaccccacatgtgccaacgcatggtcgaatgcggggttttgaccgggacctgatccgcggagggcttggccagcggtcatgtaaaccgcgcaaacaggccgaacacatggctgcaccgaccagccttgcaaacgtgaagaaaaccttgccaactcggagccgtccacaca

SEQ ID NO: 10045 - DNA, 1204 bp, unidentified
  source 1..1204: mol_type = unassigned DNA; note = element_fc994b8
  misc_feature 1..2: note = core
  misc_feature 3..223: note = LE
  misc_feature 224..1189: note = CDS
  misc_feature 1190..1204: note = RE
  misc_feature 42..223: note = bridgeRNA
cttgtattatcaagtcgtgcttttcaaaggataatagaccgtgaaaacacacctgaggggcacctcaggtttgggtcgctggatgccgtatcggacctggaactattgaagttcgagacgtagatcattgcagcagcgacccgccctcgatcaacgatcgaacagtctcttcggcccggtttccggcagcctgcattcacaaggtagatcatttgaggttttcatgtcccgcttttatctcggtatcgatgtcgccaaagccaagttggactgcgcattacgcctgcccaacggtaaatttcgcgccaaagtcatccccaattcgctggaaggctttacagccttctcgacgtggcttgcggcacaaaaggccgactccgtgcatgtctgcatggaagccacgggtacttattgggaagacatagcccaatatttggcgaccgccggcttaaccgtcagcgttgtcaatcccgctcaaatcaaggcctattcggcttcgcgtctgacgcgcagcaaaaccgacacggtcgatgccaagctaattgccgatttctgcgccgaacgccaacctctggcttggcaagcccacagtgaagcggaagtcgcattacgtgcgttggtactgcgactggacgccttgcaaaccatgcgcacccaggaaagcaaccgcttactggtggcgcgggaggccgtgcgcaaggacattcagcaacatctggattggctggataccgctattaaccaactgatcgaagccatcaatgaccatatcgatcaccatcccgatctcaagcaacaacgcgaattgctcgacagcattcccggtattggcgagcgtaccagtgccattatcctggcgttttatgccgatacttcgcgcttcgctaatagccgccaggccgcagcatttgccgggctcgatccccgacaatacgagtcgggcagtagtatcaaaggcaaacccaggctctccaaggtcggccacgccttcctgcgcaaagcgctctacatgcctgccatggtgacgctttataaaacagcctggggcaaacaatttcgaagccgtttagccggggccggcaagcccaataagctcattatcggtgccatgatgcgtaaattgatccatgtcgcgttcggcgtattaaaatccgccaaacccttcaattcggctatgcatttggcttgacttggataacagtat

SEQ ID NO: 10046 - DNA, 1588 bp, unidentified
  source 1..1588: mol_type = unassigned DNA; note = element_fc9a9ec
  misc_feature 1..3: note = core
  misc_feature 4..266: note = LE
  misc_feature 267..1472: note = CDS
  misc_feature 1473..1588: note = RE
  misc_feature 25..235: note = bridgeRNA
tttggtactataaaagtataatagctaattactattaagtaattgattattatacttttttctattattatgattgaagtgattggataacgaggcgcttttagagataaagttctcgacataaaaagtgttatccatccttcgcataatatattcgtttaagcaagttgagattgaaatagttctcgcgtaacgaaccaaaatgaggatgtgtagaagagttggaaccaatcataatttaaaagaaaattgaaaggaagaagaaaatgaagtatggagttggaattgacatttcaaagggaaaaagcacagttgcaatattatcagtggaaggagaaataattgaagaaccatttgaaattatgcacgatattaatggtttaacattactagaagaaaaaatgaataagttgccaaaagaagatttaaaaatagtaatggaagaaactggaacatatcatttacctgttttaggttatttattagataagaactattttgtgacagctgaaaatgctttaaaaatcaaaaagtatttggatcgaggcttaagaaaagcaaagacagataaaaaagattcatataaacttgcagaatacgcttgtgataactggtttaagttaaataaggtaagagagaatgacgaaatatataatgaattaaaatttttatctagacagtatttatcaacaattgctgttcaagttaagcaaaaagttaacttttctaatttgtgcgatttattatttcctggatactatcaactattagatgataatacatttattttaggactagaaatatttaaaaaatattttcatccagagatagtaaagaagaaaaaagaaaatcaattcattactgaaattgataaaatggctaaaaaattaggacataaaggtgcaggtataaccttagcaaataagatttatacactggctcaaaacacaattcctccacgccctaataatcaatattcacaactatccgcaagtagctgtgtagatgccttaattgtaacaattaaaacaactactactattatagcagaaatggacaaacttgcaagagaattaccagaatatgatgtaataaatgaaattcctggatgtggtaaaaaattgacagcaagagtaatagcagaaattggagatgtaagaagattcaaaaatgctggaagtataatagcttatgcaggactagatgcaccaccttatcaatcaggacaatttgaagcaactaatagacacatatccaagcgaggaaataaatacttaagaaaaacaggatatgaaattatgaaatctataaaaagcaatgctaagtgcgaaaacgaacttagaacatatattataaaaaaagaaaatgaagggaagttaaagaaagtagctaaaatagcaggattaaataaatttttaagaatgtattatggaatagtaaagaaaaaatatagagaattaaatatttggtaaatttgttaacataaatcgaaaaaagacctacatagataggtctctttgttatgcttaaaatttttataaaaataatttaaaaaaattataaaaaactattgacttttgttagcaag

SEQ ID NO: 10047 - DNA, 1357 bp, unidentified
  source 1..1357: mol_type = unassigned DNA; note = element_fc9afb3
  misc_feature 1..2: note = core
  misc_feature 3..78: note = LE
  misc_feature 79..1098: note = CDS
  misc_feature 1099..1357: note = RE
  misc_feature 1099..1344: note = bridgeRNA
tgatggggtggacggcccccgaacggcatctgtgtgccacgatgaggtcgttgtagatctcaacagaggaggccgtccgtggagaagcttatccgcataggtatggatacgtcgaagcaattttttcagcttcatggtgtcgacgcagctgagcagcctgtcctgcgcaagcagttgcgtcggcgagaggtgctgccgttcttccagcgtgtggagccgacgctgatcgtgctggaggcctgtggcggttcgcattattgggcgcgcgaactcgcgggtctgggtcatgatgtgaagctgatcgcgccgcaacgggtgaagccgtacgtgccgcgtggcaagaacgacgccgcggacgcggcggggctgtgcgaggcggcgagccgtccgacgatgcgctatgttccggtgaagacggcggagcagcaggccgcgctgatgctggccggggtgcgtgaccggctggtgcgcaaccgggcgcggctcgccaacacgatccggggctatgcggcggagttcggtctggtcgccgccaagggaatggcccggatcgagggtctgctgtcgagtgcccagacggacgagacgctgccggacctggcacgcgagctgttcgccggcctggggcgcgagtatgagcggctcgacaccgagctggtggcgattgaagccaagctgctggcctggcatcgggcgagcgatctatcccggcggctggcggcgatcccgacggtcggccccgtcatcgcatcgctgctggtgatgaagacacccgatccgcacgccttcagttcggggcggcagttcgccgcctggctgggcctgacgcccaaggaccattccacggcgggcaagcagaagcttggcgcgatcacgcgcgccggcgacgagaccttgcgcagcctgctcgtggtcggcgccaccgccgtcatctggcagaccaggcgcggcaagggccgcaacccctcgccatggctggtcaaactcctggaccgcaagccacccaaactcgccgccgtggcgctcgccaacaagacagcgcgcatcgcctggaagctgatggcaaccggcgagacctacaaacaggctaccgcctgacgagatcggcgggataaaccgttccgccgaagccggacttgcaagaaaaggagcagatggtggatcgatcgatccgggacaggagacactccgtgcaatccagtggcgcccaaacgtcgcgactctgtgtggaactcccatcgcggaaaccatcttggccagcggactccaatccgcaccaaacaggccggacatatggaacgcaagcgaaccgatctacctctaaacccaaacttgcaggcagggggccgtccacata

SEQ ID NO: 10048 - DNA, 1383 bp, unidentified
  source 1..1383: mol_type = unassigned DNA; note = element_fc9e3bf
  misc_feature 1..3: note = core
  misc_feature 4..85: note = LE
  misc_feature 86..1114: note = CDS
  misc_feature 1115..1383: note = RE
  misc_feature 1088..1371: note = bridgeRNA
atgatggagtggatgccccctcctgacggcatcgaatgtgccagggtggtaatgatttcgcatcccacgaacggagagagcatccatgaaactggctagcatgatcggtctcgaccttgcaaagcggtccttccaagtgcacggcgccctcgtcgacggcggcgtggctttccgcaagaaactctcccgggagaaagttctcggcttccttgccgagcagccgcgctgcgtcgtcgccatggaggcctgcgggagcgcgcaccactggggacgggccatccgcgatcttggccacgaggttcggttgatcccacccgtctatgtcaaaccgttcgtgaagcgccaaaagaacgacgcagccgatgcggaagcgatcgccgaggctgcggttcgaccgaccatgcacttcgtcgcggtcaaatccgaggaacagcaggcgcgcgccatgcttttccgcacgcgggatctcttggtgcggcagcgtacgcagctgatcaacgcgctccgcggccatttgtcggagcacggcgtcgttgccgcgcagggaacggcgaatttgaaagttttagaggaggccgtcgagggtcaagaaacttcgcttccgcttctcgtcgtggagctggcgcgcgtcttcctcgatcagattgaagggctgtcgaaaaggatctccgagctcgagaaggtggccatccacgaagctgcgtgtggggaaacgacacgacgtctgcagacgatgccgggcgtcggccccatcacggccctggcgatcgagaccttcgcgccgccgatggatgtcttcaaacgcgggcgcgatttcgccgcctggctcggattggtgcctcggcaacattcgaccggaggcaagcaggttctcggaaaaatctcgaagatgggccagcgcgacattcggcgcctgctgatcaccggcgcgatggccgtcgtttgctcggccttgcgaaaggggccgccggagggaagctggctacagcgcatgctggcgcgcaaaccaaagatgctggtggcgatcgcgctcgccaataagatggcccgatcaagctgggccatgttgacgaaaggacaagattttcgagttcccgcggttgcggcgtcctgatcgacgatcgtacgaagcagcttgggaaacgtcgggcgtgtgaggaggacgacgaacggtaaggtcaaatgatcggtcagatccggacccggaaacgcaaatacacacatagggccacgagcccgtcaaaatgatctgcgccaggtccgcgcatctccataccggccagcggccatatcaggccgcacctgaaggcctgatacatgaccgcacccgatcacgcgatcaaaccgctcgaaaactgcttgcgcgaacgggggcatccatac

SEQ ID NO: 10049 - DNA, 1472 bp, unidentified
  source 1..1472: mol_type = unassigned DNA; note = element_fc9e7ae
  misc_feature 1..5: note = core
  misc_feature 6..211: note = LE
  misc_feature 212..1462: note = CDS
  misc_feature 1463..1472: note = RE
ctcactggtccaccattcccttgtcggtgatcgccaggctggcgatgcacctctggtgaccgccggtccatcgccaagttcgctcgcggctcgaccgccaagatgagctcagcgaggaccggcggcccaggacgcgccgactggcaatggggctgagcgccccagagcgccgatcagtgagcgaccggcagacacgtcctgggaccaccgggtgcttccccactgggcaatcagcgaagaggctgacaggcatgatcccaccgtccgctccggcggggtggactgggcgatcgacgcccacgccgtgtgcgtggtcgacgccgaaggccgagcggtcgacgagctcgacctcggccacaccgccgggggcctcgtcgagcggtgccggcgcgtccatcgcgccggggctcggcgggtggccatcgagagaccggacgggccggtggtcgaggccctgctgagcattggactggaggttgtcgtggtgtcgagccgatcggtcaaggcgcttcgggagcgctacgggacctcgggcaacaagtcggaccgctccgacgcctacgtcctggccgactgcctgcgcaccgacggcaaccgcgggcagtccctcgaaccggactcggcggcgacggtcacgctgcgggcccccgggcgggctcgcaaagacctggtggagacccgggtggcggtggccaacccgctccgagcgcacgtgcgggtcgtgttccccggcgccgtcggcctgttcgccgagatcgacagcccgatctcgctgcggttcctcgcccgcttcccctcggccgctcgggcggcgtggctgtccgagaagcgccccgcctcctggctgcgggccaacggctactgcggccgcaagccggcggtcgtgctctatgcccggctggtggaggctccggcgggcgtcgacggcgaggagggcgacgcccggggatccatcgacctcggtcacgtcgccgtcctcacggcgccgcgaggcgagatcgacgagctgaacgcccgcctcgaggagctcctcgacgcccatccggacgccgtgatcatccgctccctgccccgcagcgcctccgtccgggcggccacgctgatcaccgagatcggcgaccgcagagcccggttcaccgacgcggggtccctggcccgcctggcaggcgtcgctccgtccacgcggaccagcgggcgccaccgatccgtcaccttccgcttcagcagcaacaagaagctccgcgacgccatctgtgacttcgccggcgacagctggcgtggcaacgcccgggccgctcagcgctaccgcgagcttcgagcagccggcaggagccacccccacgccgaacgcatcctcgcccgaggctggacgctcatcatctggcgctgctggcaggaccgcacgccctacgaccctgcccgccacggcgcccaccaacgcctcgaaccggtggcggcttgacacagggcta

SEQ ID NO: 10050 - DNA, 1615 bp, unidentified
  source 1..1615: mol_type = unassigned DNA; note = element_fc9eb86
  misc_feature 1..3: note = core
  misc_feature 4..243: note = LE
  misc_feature 244..1575: note = CDS
  misc_feature 1576..1615: note = RE
  misc_feature 52..228: note = bridgeRNA
gaggggccgccccgtcttcgacgccgcgctgtcgcgcagcaaactggggctagagtagaagagcgcgcgcggggcagagaccgtcattagcactggtgtgacagcacccgagtaggagagtggtccgcacggtatcggcgtggagtcgctgaaggcacggcatgccgtgacctcgtataagagagtgaaccccttcgccaccgtgtaccccgcgcgcgcttttcaatcctgcgaggaattgtcatggcgcgcaagaaccaaaaacgctttgagattgttcatcacgactgcgccggcatcgatgtgggtagtcgtgagcattgggtcgcggtcaatcctgatcgatccgatccgcctgttcgtaaatttttgaccttcaccgatgacctgatcgcgctggccgactggcttgagtcgttgaagatcaaagtggtggccatggaggcgaccggcgtttattggattcctcttttcgaagtgctcgatgcccggggattcgaggtttatctggtcaactcgcgggcgacgcgacagacctccggccgcaaatccgatgttctggattgccagtggatctggcaactgatgacgcacggcctgttgagcggggcttttcgtccagccgatgaaatttgctcgatgcgctcgctggtacggcaacgtgccaataaagtcgccgatcaagccaaaaccatcaaccgcatgcagaaagccctgagccagatgaacatccagctggccaatgttatcagcgacattagcggcgtgaccgggatgaaaatcctccaggcaataaatcagggtgagcgcgatcctcacgctctagccgccttgcgagatcggcgtatcaaggcagaccacgccaccatcgcccgcagcctgcacggcaattggcgcatggagcacctgcatgcactacgtcaggaactggcgtgctacgactttctggaaacacaaatcgccgagtgcgacagggccatcgcacaagcgcttgaacgactgcccgtgcgtcaggaagaagtcccagcggcgtgtaaagcgcttcgcaacactcatcgctcggctgcgcaacagacggccctgcatcaggcattgggccaggtgatgggcgtggatttaaccgccatccccacgatcggggtggataccgcgctggtgctggccagcgagttgggcccggacttgtcacgcttcccgacctcacaacacttttgctcatggttgggtgtcgcgccgccaacccgaatatcgggcggcaaacctcttccgggcagagcaccgaaggtcatcaatcgagcggctcaagcgctcaagcaatcggcttctaacgcccgaaacgacaaaagttttatcggtgccagccaccgggcacgcttaagcagaatggatacgggctgcgccatcaaagcaaccgcccatcaactggctcggctgatttacgccatgctgaccaagggacagccgtatgttgagcaaggtttggaagcttacgaagaaaaaagccgcagccggcaactgcgcgccttggaacgcaaggcacgcaagctggggatgcagttggtgatggctggatagaatttagagcaaaaacaatgcgttattttttgtttgataa

SEQ ID NO: 10051 - DNA, 1437 bp, unidentified
  source 1..1437: mol_type = unassigned DNA; note = element_fca0953
  misc_feature 1: note = core
  misc_feature 2..97: note = LE
  misc_feature 98..1138: note = CDS
  misc_feature 1139..1437: note = RE
  misc_feature 1196..1432: note = bridgeRNA
taatggaatggtcgccccgccccccgaacggcacctggaagtgccgaaatgcggagaatgaaagtcccattaaccccaaccgatagaggcaagcgaaatgaacattgcgactgttggcattgatctggcgaaaactgtttttcagcttcacggcgtggatgcgcaaggccgcgcggtgctgcgaaagcaactcaggcgcgaccagatggcgccgttcttcgccaatctgccgccctgcctggtgggcatggaggcttgcggcagtgctcacttctgggccaggaagctgcaggggtttgggcacatggtcaagctcatggcgccccagttcgtcaaaccctacgtcaagaccaacaagaacgatgcggccgatgccgaggcgatctgtgaagccgtggcgcggccgagcatgcgcttcgtgccgctcaaaagcgccgagcagcaagccgtgttggcccttcaccgtgcgcggcaaggctttgtcaaggcgcgcaccgcgcaggccaaccagatctgcgggctgctggccgagtacgggatcatcattccccagggcatcaagcatattgccgatcggctgccagacatcctggaggacgctgacaacgagctgcccggtgcgttccgcctgcttctcgaacggctgcgcgcgcacctgaaggtgctcgacacccaggtcggcgaactcgatgtacagatccagctctggcatcggcagagcgaggcgagcaaaaagctcgcgcagatcccgggcatcggcccgatcacggccagtgcgctggtggcctcgattggcgatgccaggaactttgacaatggccggcagctcgccgcatggctgggcctcgtgccgcgccagcactccagcggcggcaagcccacgctgctgggcatcagcaagcgtggagacgcctacctgcgcacgttgctgatccacggggcgcgagcagtgatccgcgtcgcccaaagcaaggccgatcaggccggcggctggcttgcgaaagtgctggcgcggcgcaacaagaacgtggccgctgttgcgctggccaacaagaatgcccgcatcgtctgggcactgctggtcagggaccgcccctacgcatcgacctacccagcccaatgcggctcgacggcgtgaaggcaagcccagaccctgcgatgtagaacgaatcccggcaacccccgtttcacaggagaagcgtaccgattgcacaggcaattcaatgaagtgatggcgagaataggtcagaccgtggttgagcaaacctgatatacacaaagcgccttgagcgcgttgacttgatgaggacttgaccagcggattccatcagggaccggaggcctcgggccttcatcaaagtccggatctatggctgcaatctccacctttcgatccatcatcgaattgaatgcttggcaaacaggggcgaccatcta

SEQ ID NO: 10052 - DNA, 1237 bp, unidentified
  source 1..1237: mol_type = unassigned DNA; note = element_fca203a
  misc_feature 1..2: note = core
  misc_feature 3..83: note = LE
  misc_feature 84..950: note = CDS
  misc_feature 951..1237: note = RE
  misc_feature 1024..1225: note = bridgeRNA
agatgtatggactcctcccccttatcgggagagtacggtataaagatattgcaaaacacttttaccaaataaggagtccatacatgacacagtctaatttaagtgctatcgacttggcaaaaaacattttccaggtggcacagctgaaaggcaataaactcaagtttaataagccaatgaaacgcgaacctatgcttgagttgctagcaaaagccgagggttcaaaggtcgtgatggaagcttgtggtagcgcccagcatattgctcgcaaagcactgtcactggggcacgacgtcatgttgcttccccctaagttcgtaaaagcgtttaggcaaggccaaaaaaccgatgcaaacgatgtcctcgctattgccagtgcaagccaagcatacaacgtgaagccctgtaaaatcatgacggttgaagagcaaacgttacaatcattgagtcaagcgagagccttaatagataaacaaaataaaacacaatgcgacgctaaagcaaagctacataaacgagttgaagcgataaccaagcaaaatgacagttgccagcgtttaatggcattagaaggcgttggcccaattaccgcgatagagctgctatcctttttaggcaatacttcacaatttagtgatgccagaggggctgcggcatgtgctggtgttacaccgacccagcactcatcaggcggaaaagccaagataggtcatatccccaaaagacgaggcaatacattaaggaaaaacctgtttctcggtgcaagaacggtagtcagcaggctaaaacataaagaagcgaccacagagaaagaacgctggataaaaaacctactcgccaagaaaagcgtgaaatgtgttgccattgcattgaccaacaaaacggttagaactgcctatgccttacttaaaaacggttcaacatacgagccaaaaatcttagcggcatagcactgagtaacagaagaacaaatcaagataaacagaaaaagaaagcaaaaagcatactgagattacccccagtattgaacaagccaagatagagcattaagcggtgagacccacccttgagagcctgttaaagcgcaggtgtatacaaataccgcgtaggagataaggcacaagggcgcgaatacatcaaagaggccgaggtagcacctcatcaagagcccggatataagcacgcaatcacaccaataatgctaaaagtggcttgtacaattggaggagtccatata

SEQ ID NO: 10053 - DNA, 1342 bp, unidentified
  source 1..1342: mol_type = unassigned DNA; note = element_fca2df2
  misc_feature 1: note = core
  misc_feature 2..59: note = LE
  misc_feature 60..1091: note = CDS
  misc_feature 1092..1342: note = RE
  misc_feature 1115..1333: note = bridgeRNA
taatgggatggtccgccgcggatttctagaagttgtagagttcgacggaggaggatctcatgaaactacacgcggtcggtattgatttagggaagacggtctttcatttggtgggactagattcaacaggtcgtgtggtgatccgcaagaaatgttctcgaaaacagctgctggccttcagcgcgaatttggaagtgaagttgattggcatggagtcctgtagtggatcgcactttctcgggcgagcgttgcgcgatcaaggtcacgaggtgcggttgatgccggcgcaatacgtaaagccttatgtgcagaccaacaagagtgacttcctagatgcggaggccattgccgaagcggtacagcggccgaggatgcggtttgtgccaatcaagacggaggagcagttggacctgcaagcactgcatcgcgtgcgcgaacgttgggtgatgcgtcgcacgtcggtcgtgaaccagattcgcagcctactgctggaacgtggactgacgctacccaaaggccgccgttatgtggatcaaatgcttcccaggattttggaagacgccacgctgagattatcggattcgttccgtgttttgttggctcaactcaaattggaactggggcaggtcaccgcccgcgttgacgaggtggatcgggtcatacagaaaacggcgaaagaaaatgaggactgccagcggctgacagagattcccggagtcggcccggtcaccgcgacagccctggtcgctggagtgggcaacgccagcgaatttcgaaaagggcgaaatctgtcggcctggatggggatcgttccgggggagtactccaccggcggcaagcagaagttgctgggcatcagtaaacggggcaataaatacttacgaactctgttcattcaaggggcacgcagcgtactgcaacagcgacacaagcaagcgccgggtctgagcgagtggcttgcacaattgttggcgcgtgcgcaccaaaatgtggtcatcgtggccttggccaataaactggttcgcatggcttgggcggtcttgtgcaaaaaggaacgctatcgtgctccggttcttgcggtgacgacttaaaatccctgtttagggaaaacagttcctgccaggtctgctagcggaaaatagagatggcaatgggtctctcccacgctctcgaaacctgataccggaaaaggtctttaccagaccgtccacattatacggacgagggcgagcggatatccatcatggcccggagtcactgactccactgaaggccgaatacattggcgcagaccaaatgccattgatcgtttttcgcttgcaactctgcggcggaccataca

SEQ ID NO: 10054 - DNA, 1431 bp, unidentified
  source 1..1431: mol_type = unassigned DNA; note = element_fca4afa
  misc_feature 1: note = core
  misc_feature 2..198: note = LE
  misc_feature 199..1260: note = CDS
  misc_feature 1261..1431: note = RE
  misc_feature 11..246: note = bridgeRNA
ctgattgatgatgggggtgctgcgggacgtcgggttccgtagctttgagggttcgacgggtttggctctccatgtgcctggttcacccttcgggtgtctttgtaacgaactgtcggcccgttgaaccctcggtcgtggtgtggctcgtaagaggcgaacgccggaggcaaccagttgttgtgatcaggagtgcccaccgtggccatcccctgtgactacgacaaggaggttgacatggtcacgacgattggaatcgacccgcataaggccacgcatacagcagtggcgatcaacgaaaccgagacggtattgggagagttgactgtcccggctgaccgggatcaaacgaagaccctcctcgactgggctcagaacctcgatggtgaagggcgtgtctgggcggtggaggctgctggtggcctcggctatctgttgtcccaacagctcatcgctcatggcgaacacgttgtcgacgtgcccccagtgctcgcctctcgagtgagagtgttgggatcgggtaggtcggataagaacgatccgaatgatgctcgttcagtggcgatcgctgctctccgtcaacccgggctggcagtggtgcggcgggaggatcacacccaggtgctacggatgttggcgaaacgccacctcgaactcaccgccctgagaacccaggcagcctgtcggctccatgcggtgttagcccagctccgacctggtggtatgggacggcggttgtccgccaaacaggccagccggatgcttcaagggttacgaattgtcgacccggtcggtgaacaacgacggttgacggcccgagttcatttggctgatatccgtcggtacgaccgggagatcaaaaccaacaaggtgttgatctcgaaggcggtggccgcctcgaagaccacagtgaccgacgtctacggagtgggtcccatcgtggccgcactcttgatcggatacaccggcgacatcggcaggttcgcatcccctaaccattacgcctcatacaacggcaccgcaccagtcgaatactcctcaggaggaaagaaaaaacaccgactctcaatgagaggcaaccggaaactgaaccatgccatccacatggcagcagtcacccagatccgccacgacaccccaggccgcatctactacgacaagaaacaggccgaaggcaaaaccaagaaagaagccctccgagcgttgaaacggcgggtctccgacaccgtctaccagcagctcgtcgcagaccagcagggttgaggcccgggggacactcaggaacgtctaagtagcttgcgtggccggcctcacatcctgaacaccggctcttcagctcagtcaccccgggccgtccccaaacctacacgtcaggccggaacatccggccccgttcaacgcgtccaaaaacaaccacttgacacaaagaggctt

SEQ ID NO: 10055 - DNA, 1408 bp, unidentified
  source 1..1408: mol_type = unassigned DNA; note = element_fca802f
  misc_feature 1: note = core
  misc_feature 2..305: note = LE
  misc_feature 306..1349: note = CDS
  misc_feature 1350..1408: note = RE
  misc_feature 117..270: note = bridgeRNA
ctttaactttgcagctgaatactaagagtcttaagaactcttaaacataaaacgttagataaaactataaaaagtgataagattaacagtttttgcttacctttgttgtagaaaggaaggattaactgccagaggtcaccctcgttctcacacaaggcctgagcctattttctgttgaaggccctctggattcaagctgcaaatgccagataggaagatagactcgaagtctaattaaagtgatagccactcacagctttctttcagttaatcgcttccataactcttaaaaccgctacaaaggtatgaaaaagattattatcggcatcgacatttcgaaagaaaaaatcgacgcaagtgcgattgacgtgagaaacagcctgttgggagtgctaaaactggactatcaggcattcgagaaccgccccatgggcttccggcgcatgcttgtctgggctaagcatctgatcaagggtgtcaccctggaagaagttatgttctgctgcgagacgaccggaggttatgatcgcagcctgtgtgactatcttttcgccaagggtcttgacatctggcgtgaaagttctctgcagattaagaagagcagtggccttcgtaagggcaaggacgacaaggcggactcgctgaccatcgcagagtatgcgatgcgacacatggacaaggctgtctattacgtttctcccaatgagacagtgcgagagctgaaggcactgctgctttaccggcgcaaattggagcaggagaagacctcgaagaaggtacgtgttgcggaactgaaggctactgcagccaagagcaagtccgtcagcttcatcctccgtgatgcccagaagagcatcagggcactggagaagagcatcaaggagtgcgagaagcagattatggctttgtacgaaagggatgaggagctgaaaaggagctacgaccatcttacctccatcaaggggataagcatcgtcaatgccacggccatgatcgcctacacgaataacttcaagaacatcaccacgtccaggaagctagcctcctattacgggatagctccattcagggaaaagtccggtacgagtgtcgacaggaaggcgcaggtgaaatgctattcaagctccatgctcagggcttatctgacccaggcggcccaatggacgatcaaggaacatggtatataccgtgactactatcttcgaatgagtgcgaaggggaagtgctacggtgttatccttaacaatgtcaagaacaagctgctccacctgtcggtgtcgctgattgcaaatgacatggattacgaggagaaccatgagttcctgagggtccaaagaatggctcagtagaaataattactcagatacatattttttaactaaatatattttgtaaaatacataggaag

SEQ ID NO: 10056 - DNA, 1317 bp, unidentified
  source 1..1317: mol_type = unassigned DNA; note = element_fcb00c5
  misc_feature 1..2: note = core
  misc_feature 3..264: note = LE
  misc_feature 265..1269: note = CDS
  misc_feature 1270..1317: note = RE
  misc_feature 38..213: note = bridgeRNA
cttgtatattaaatgcatctctaaaaacacagaattatttaacccacttgtttatagtagataactgattttctggggaagccgtcccaaccttaagccttgagcttgtgtgtagattggctccccaccctcgtcatccatgccgtggagtatctgagacctgtaagctaagcttctgagtctgcattcacaaggacggtagatgaagtgtcagggttgggaaaccagatgtcatcatataacaaacgactgtcagagatgaaaatgaattgtgtaggaattgatgttagccataaagaacttgttgttgtcgttagcgtaaagggtaaagctcgaaaagctaaatcctataaaaatacagccgctggattcatcactattattcagcttttagccaagttaaaaggtcatgtcaaagtctgtcttgaagcaacaggcatctatcactttgatttagctgtctcactaagtcgtgcagagaatattgaagtgatggtgatcaaccctaaagtttctagtaactttgccaaagtattactgaaacgcagtaaaacagatgctcttgatgctgaaatattagccatttattgcgaaagaatgccttttgaagcctgggttaggccggcaaacgaaaacattgcgctgagagctcattctcgaagaatggctgccttaagcaagctcaaagcacaaaataaaaatcagctgcacgcactcataagcacagaggaaacacctgaattaatcattgaacaaatcaatgagctgattgcagtactggatcaacaaatagacgttcaacgtgatgcggcgcttgaattaattaaagagcatgcagaattaaaagcaagcttcgtcttagtgaccagtattaaaggaattgcagatacctcgggtattcagattctagctgaattgatgattttgccgcctgacatgagtgcaaaacagtgggtcgctcatgcgggcttagatccaagagtctttgaatcagggagtagtgtttctaaaaaaccgcgcattagcaaagcaggaaataaatatattcgacaagctatttatatgcctgcacttgttgctacgcgctttgaacctcatatcaagggttattacttacatatgattaacgataatggcctaaagaaaatgcaggccatttgcgctgtgatgcgtaagcttttacacgccatccatggcatgctaaaagccaataaaagctttgagggagagcgtttttataagttcccttctgaagcaacttattcctaagtatttttaggatttatttaaaataaagctggtgcttgaagagagtat

SEQ ID NO: 10057 - DNA, 1370 bp, unidentified
  source 1..1370: mol_type = unassigned DNA; note = element_fcbba44
  misc_feature 1..2: note = core
  misc_feature 3..75: note = LE
  misc_feature 76..1110: note = CDS
  misc_feature 1111..1370: note = RE
  misc_feature 1083..1358: note = bridgeRNA
tgatggggtggacgccccccgacggcatctatgtgccaaagtggaggtgttgaaacaccacttgaggaggcgtccgtgtcgcaggttaccataatcggtctggatatcgccaagaacgtttttcaagcgcatggcgccgacgagcgcggcgccatggtgttcagccgcaagttgaccagggcaaagctgctcgattttttcaccggccagccggcctgtgtcgtggctctcgaagcgtgtggcggcgcccatcactgggcccgcgaattgcaggccatgggtcacgaagttcggctgatcccgcccgcctacgtcaaaccgttcgtgaagcggaacaagaacgatgcgattgatgcagaggcgatctgcgaagcggcgcagcgcccggggatgcgctttctggcggtgaagagcgaggcgcaacaagcggcgggcctggtgttccgcacgcgggacctcatcgtgcgtcagcgcacccagctcatcaacgcgatccgcggacatctggcagagtatggctgggtggcaccgcggggcacgacaaacatgacgcttctggcgtcactcatcgacgaagaggagatggcctcgacattgccggcagcagcgttgccaatgtttaagctcatgctcgacttgctggccgagttggacgatcgcgtcgctacgctcgatcgtgaaatcgcccggcgcgcaatggaggacgaggcagctcgtcgactgatgaccattccaggcatcggccccatcgcagccaccgctatcctggcccttgctccgcccgtcgagaccttccgcaaggggcgcgacttcgctgcctggcttggccttacaccacgtcagcactcgaccggtggcaaacagcgacttggcagcatctcaaggatgggcgagcgcacaatccgaaggctgttgatcactggcggtagctcgatggtccgtcaggcatctcgcttcggggctcccgccggctcgtggctggagaaaatgctggcgcgcaaaccacgcatgctggtgtcggtggcgctcgccaacaaaatggcgcgcatggtatgggcgctgctcaccaaggcggaagattacagggctccggcagcggtcgcggcgtaagtcgcgacggcggtcagaggcgtcggaggcgtaggcggtcgaaggagggtatggcacaacagtcggtgagacggggctggaagaaccagggaatggcagagcgctagccaagcgcgcaaagctgatatggatccggtccgcgaactcccatactggcccgcagcgatggtgctgctcatcgaggccggacagatgacagcatccgactacgtgccaatacgcccgaatttatcgcttgcatccgaaggggcgtccacaga

SEQ ID NO: 10058 - DNA, 1203 bp, unidentified
  source 1..1203: mol_type = unassigned DNA; note = element_fcc868f
  misc_feature 1: note = core
  misc_feature 2..211: note = LE
  misc_feature 212..1177: note = CDS
  misc_feature 1178..1203: note = RE
  misc_feature 34..201: note = bridgeRNA
tcttaagtttgattctgtttaaattatagtattaatcagaaagaacaaaagagcaggttaaggttactatagccgttggaacttcagattccgtcaacattgataatcactgctcttttctacttagatttcgatcagttctgtgaggcgctaacctcgatttaaagttgttgaacaccaagtagatcgtcctttccaaaatctaattgttatgagtaaatatagtgaaacttatggagtagatattagcaaagatgtctttgatgtagcaaatacaacaggcttttaccgtcaataccctaatactgttgccgggttcaaaaagttcattaaagagcttgaaaaatcagcaattgtcgttatggaagcaaccggttattatcattattgtttagcacaattcctgtttgaatctggccaaccggtttctgtcgtaaatccattatctgtaaagaggtttatacagatgcgtttatctaaagtaaagacagataagagtgatgctaaagccatatgtgattatgctttgatcaacccagtgcctttatatacgggaaaggatcagaatcaagcagaatctctacaacttctacgtttattagagctgtacttaaaacagcgcactcagctaaagaataaaattcacggagaacaagctttaggtataccctcaaaagctgtttttagatctttaaacagatcaaaaaggacattagataaagaaataaaatctttagaaacacggttgttatctctagtaaaagaagagcaccagcaacagttgactaatttaaagagcattccaggtttaggagataaaacagcagctttattgatcgtgttaactgatggttttaccaaatttgaaactgcatcacagctttgtagctttgcaggaacaacgcccaccatacggcaatcagggagcagcgtcagaggtaaaagcagaataagtaaaatgggtaaccaaaaactcagaaatcttttgtttttatgtgccttttctgcaagtaaatacaataccgcctgtaggaaaatctatgaacgtattatagcaaaaggcaaaagcaaaaagttagcgctaatagcagtgataaataaactaataaaacaagcttttgcaatcgcaaagagcggcttgccctatgacccaaattatgcaacaaaattgaactaaatactcttggattttaactcagttct

SEQ ID NO: 10059 - DNA, 1715 bp, unidentified
  source 1..1715: mol_type = unassigned DNA; note = element_fcca76f
  misc_feature 1: note = core
  misc_feature 2..263: note = LE
  misc_feature 264..1253: note = CDS
  misc_feature 1254..1715: note = RE
  misc_feature 56..257: note = bridgeRNA
cctttagttttgttttatagattatatctattatgattatgatgttgaaaagagggggtctgggggagactcataagttctaaaattgtcaatatcttttacttttaaaaaaagaacggggtgaactagggcgacggctagggtaacggcctttgtagagtattagtccccgttctttataaccggttgtccaggacaagataggatagtagcctttgctaataaaggtattagtctaaacaaccttttaaatcttataaattatggatatcaaagaagttattggcattgatgccagcaaattgacattggattgctgtatccacggcagtggattacaaaatgtttttagcaacaatttaaaaggtattggtcaactggcagattgggcattaagcaattcaagttttaaaaaaaaacaggtattgtttgtattcgaggacactggactctatacatttgaattaattaactatctaaatgatagcaactattacatgttcgtaggctccggccttgaaataaagcgttccttggggattgcgagaggaaaggacgataaggccgatgccaagcgcattgcgctatatggttataggatccgtgaagaaataactccttaccatatgcccagcaaatcactggtaacactcaaacgtttaatgtcgttacgcagaaaattagtcgtgcaccgtgggggatatgtagctaacctaaaagaacagaaaagggtactgaaaaatgaagaagtgctttttgctgcacagcaggccgtggtagatgcaatcgctgttcaaataaccggtattgaaaaagaaatagaaagaatcatagcgcaggatcccgaactcgaaagacttcaaaaactactcactggaataacaggtataggaaaagtgacggcccggttcctgattgtctataccgttggttttactgcttttgaaaactggaggaaatttgcttcttatgttggtattgccccattccccaatagatctggaaccagtatcaaaggcaggaataaagtaagcaatctggctaataaggaaggtaaggcattattacatatgtgcgccacttgtgccattcggtgcaatccggaaatgaaggtttattataaaaagaggctggaaaaaggaaaacatacaatgagcacattaaacatcatcaggaacaaattgttagccagggcatttgctgtagctggaaggggaacaccttatgttgatacgatgaaattcgcttcataacacctatttcttcagatgcagattttttcaataaggaacaaaaaagggatgttcctcgccctatagcgttctataaacactgaattttttcgaggccgaattattgttttcactaccgtcccacaacgcttacctattttttgataggcaaaaaaacaatatccattcttggacagcggcataaagccaggctcgctgcactccccttttttatacgctttaccaagcccggatattgtaatgataagcatcaaaaaaaggttacgcgacggcgctatgggaagtaaatcaaaaaaacagtcttgtaaaaccgaaattgactctcaaaaatagaacgatacaaaaaatcaaaaaaggaaaacgttcaagatataataagtaaatcacctccttctctctcgtaataaaagttctaacaataaataaaaattatgataaaaaatttgctttatacataggata

SEQ ID NO: 10060 - DNA, 1515 bp, unidentified
  source 1..1515: mol_type = unassigned DNA; note = element_fccb79d
  misc_feature 1..3: note = core
  misc_feature 4..243: note = LE
  misc_feature 244..1437: note = CDS
  misc_feature 1438..1515: note = RE
  misc_feature 80..231: note = bridgeRNA
aaacgcacatgatattcttggaataacatgccccaaaaatgaaagtcctttcagttactttttttgattctgaaccccatcattaccttaggacaggaaggttgtcttttctttggttcttcgaaaccgtgaaaaaactaaccagtgaattgccatcgaaggcccaaatgtgaccttgatcacggatgccaaattgcctttgaggcaatcctactgtccatggaaatgatggagtaatgtaaattggatggagaaataaacaaatcttgtggtttagatattcacaaacaattcgtcattgctaccattctcaataaatccggtgaaaaacaactacaacgtttcgaaagagatgatgaaggtattttaaaccttaaaaattgggtgacatctgaaaaatgtgatgttgttgcatgtgaatcaacaagtgatttttgggttccgatttatgattcattgataaaccatctacctgtcatagttggaaatgcgcgcgatatgaaagcatttacacacaaaaagacagataagatagattcagaagtaattgcaaaacttgcattgaataagatgattcaaccatcaagagtttttccaaagagacacagggagtataggtcatatgtcaggcttcgcctaactctcgtgagaaaaagaacagatataaaaaatgaagctcatgcgattctttcttctgaaatgttacatcttggtaatgtgctcaaagacatctttggaaaaaatggaagagcaattctagcaggaatatcctcaggaaaaaatgttgaccagattatagcatcacttactccaaatgttaggaaaaaagctggacagataagagagattcttgacagggaaatatctcaaagcgctgccctcaggcttcagatatgtctggatctgattaaaaaccttgatgatgaaatcgaaacactggagaaagaaattttcaattatgcttatagtaagcataaaagggaaatggatctgttaatgtcagttccaggaattggagaaattggtgctgcaactctaattgctgaaatcggaaatttcaaagattttttatcaggggataaacttgcttcatggcttggactggttccaaatgtctatcaatctgcggataaataccacaacggaagaatcacaaagagaggatcaaaggtagcaaggtggattctgacacagattgctcaggcagcggcaagaaagaaaaatagcaagttaaaagagttttttaacaggaaaaagaagacaattggacatgcaaaggcaattattgccctggcaaggaaaattgcaacaataatatggcatctgatcataaatgatgagatgtacgaggatgaaacaggatatgaaaaggggaggttcaaaagagaaagattgttgagactgagacattctcggttgatgagcgtatcacaataatcagcggaataattgcaatgataggaaataagaaaggagagagtacgtgatgactcgatcatcacggactttcatgcc

SEQ ID NO: 10061 - DNA, 1496 bp, unidentified
  source 1..1496: mol_type = unassigned DNA; note = element_fcdfbad
  misc_feature 1..2: note = core
  misc_feature 3..252: note = LE
  misc_feature 253..1476: note = CDS
  misc_feature 1477..1496: note = RE
ctaatgagtgttagcgggttcgccgtccggcagactcgttagctggtggccgccggcaggtgagcactgttgtccgccgggcctggagccctgtgaaaagaccgtgcccctgccggtgaccgggagagttgatcgctgctgggatgtcgtgcccgcttgctggcgtgagcactgtgtcattagggcgctgatggttctcccgcgggctgctgacggtattgaccgtatcgggcatttcgggcgggagaattgatgcgcttgttcgtaggtgatgactgggctgaggaccatcatgacgtggagctgatgaatgagcagggccgggtgctggcccgtaggcggctgccggaaggggtagccgggatggcccggctgcacgagctgatcggggagcagctgggcgaggacgccgatgatgcggaggtgatcatcgggaccgagaccgaccgcggcccgtgggtggccgcgctggtcgcggccgggtacacggtctacggggtgaacccgctgcaggcctcgcggtaccgggaacgccacggcgtgtccggcgccaagagcgataccggcgacgcgcacatgctgaccgacatggtgcgcaccgattcccaccagctgcgcgcggtggccggcgacagcccgggcgcgggggcgatcaaggtggtggcgcggacccataagacgctgatctgggaacggacccggcaggtccagcggctgcgccaccagctgcgggagtactttcccgccgcgctggcggcttttgaggacctggacgcgcctgatgcgctggaattgctggccagggcgccggacccggcccgggccgcgaagctgacccgcgcgcagatctccgcagcgctcaagcgcgcccgccgccgcgacatccccggcaaggccaccgtcatcatggccgcgctgcgcggcgctcagctgggccagccgccggccatcaccgccgcctacgctgccaccgtgcggtccctgatcgcggtgatcaccaccctcaatgagcaggtcaagatcctgcaagggcaggtggcggcgcattttggccagcacccggacgctgagatctacctgtcccagcccggcctgggacctgtcgtgggtgcccgggtgctcggcgaattcggcgacgacccgcgccggtatgtcagcggcaaggcccgcaagaactacgctggcacctccccgatcacccgcgcgtcggggaagaagaagatggtcatggcccggttcatccgcaacgaccggctcatcgacgcgctcatggcccaggccctgtccgcgctcggcagctcacccggcgcccgcgccttctacgacgcccagcgcgccgccggcgtcgagcacaacgccgccctgcgcaagctcgccaaccggctcgtcggcatcctgcacggatgcctcaagacccgcaccctctacgacgaggcaaccgcctggtcccaccgcgaagataagcttgccgcttgacatttaagctcctgggatgt

SEQ ID NO: 10062 - DNA, 1316 bp, unidentified
  source 1..1316: mol_type = unassigned DNA; note = element_fce85af
  misc_feature 1: note = core
  misc_feature 2..90: note = LE
  misc_feature 91..1095: note = CDS
  misc_feature 1096..1316: note = RE
  misc_feature 1095..1310: note = bridgeRNA
gaatgaaagggacttccccgtcgcggcgacggcatcgaggtgccaagattgaagtgtctgagttcaatctaaatagccggaggggaagtcatggaacaggttactaccgtggggatcgatctggcaaagaacgtgttctcgctgcacggggtggatgggactggcaagacggtgctgcgccggacggtgcggcgcgatcggcttttggaatcggtggcggcattgacgccctgcctgatcgggatggaggcctgctcgggggcgcacgagtgggggcgacgctttcagcagcatgggcacaccgtgcgactgatggcgccgaagttcgtcgcgccctacaggaagagcgacaagaacgacggcaacgacgccgaggcgatctgcgaggcggtggcgcgtccgaacatgcgcttcgtaccggtcaagagcgttgagcagcaggcgctgctggcgctgcaccgggtgcgccaggggttcgtggtggagcgcactgcgatcatcaaccgtctgcgggggctgctctctgagttcggcgtggtgatgccgcttcgctcggtgacggtgcgccggcaggcggcggcagcggccgaggcgttgccgcagctcgcgagaacggccatcggcgacctgctcgagcagctgcgcctgctcgatgagcgcatcgagcgctacgacacgcagatccacgagcaggcgcgactctcggagcccgcgcgccggctcatgcagatccgcggcatcggggcgaccaccgcgcttgccatcgtggccactgtcggcaacgcccgggagttcaggaacgggcgccaattcgccgcctggatcggcctggtgccggggcagtattccaccggcggcaggacacgccttggccacatcagcaagcgtggcgatgcgtacctcagggatctgctcgtgcagggcgcacgctcggtgctgcagaccgcgcccatgcatcaggaccggctctcgcgctgggcgctcgagctccaagcgcgccgcggctactaccgcacgctgatggccatcgccaacaagaacgcgcgcatcgcctgggcgctgctcgccaaagacatgcctccaaggaaggattgatcgccctgcccaatgcaatcgacgatgacgaaacggtcagaccgacgcccggagaacctggtcaaactcgacggcagcagccaatgccgactaacgagcgaggaccgggcgtgcggctttcatcagtgccagagcgcttcgaacgctcccaaacaggccggttatagtgacgcagtcagaccttcttacgtcaccgttgcagttctggggaagtccttata

SEQ ID NO: 10063 - DNA, 1419 bp, unidentified
  source 1..1419: mol_type = unassigned DNA; note = element_fcec0e3
  misc_feature 1: note = core
  misc_feature 2..134: note = LE
  misc_feature 135..1154: note = CDS
  misc_feature 1155..1419: note = RE
  misc_feature 1174..1417: note = bridgeRNA
atgtaatggacgcctccctccccgctggggagtgagggagacagaaaagcagagagccctcgctttacctaacggcatctaagtgccaaagtggagtttcttaaaccaaccacaaacggtaatgagggctcgatatgaagattacgacaattggtctggatattgcaaagaaattttttcaactgcattgggtagatatgacgacaggtgaggttcatcgcaagcagctcaagcgcgaacagatggcagagttttttgccacctgtgagccgagcttggtcgcgatggaagcttgcggcagcgcccactactgggctcgcaagctacgggcgttcggtcacgaggttagactggttgccgcacaatttgtgcgtccctttgtcaagaccaacaagaccgatgcggccgatgcacgcgcgatctgggaagcggtgcagcgtcccgagatgaagtttgtggcgattaaaactgaagcccagcaaagcatactcgccctgcatcggttgagagagcagatggtcaagtttcggaccatgcagagcaatcagcttcgtggcttgttgtatgagtttggtgtggcattgccgcccgggcgggcaaagggaatgcctgcggcgctcgaagcgcttggggcgcttgaagagaccttgccggcgatggtgattgatgcgttgcgtcaacaaatgatacgtatccagaaactggatgaagacattgcagatattgagaaaaagctcacgctctggaaaaaagaagagcgttcggcaatgaacctcatggagattccaggggtggggatcctaagcgcgacagcggctgtggcgactataggggatgcgactgcgttcaagagtggcagagagttcgctgcatttttaggcttagtgcccaaacaaagcggtaccggcggtcgagtcaggatgctggggatcagtaagcggggcaatgtctacctcagaacattattaatccatggggcgcgtgcgcggattaacttccaaaagcagcgcgacccctggatcgaacaattgctggcgcgacgaccgtttaatacggtcgtggtagcgctagccaacaagatggcacgcacgatctgggcgatgatggcacatgatcgtacgtaccaaaagaactacgcggcaaatatcgcgtagctgattaaccataaaaaggagttggatcgctaataggttgcgcaggtaaatatgagatagatggcgggataggtcggaccgcgagaaagtaaacctgaatggttgtctggtccttaaaaggacgatcaggagacaagggctttctcggcgaattccatcagggtcagcaggcttggtgtctgcgcaaacagaccggatataagactgcaaccaccttgactgtcaaaatcaaatatttcttgccaaaccgggaggcgtccatata

SEQ ID NO: 10064 - DNA, 1533 bp, unidentified
  source 1..1533: mol_type = unassigned DNA; note = element_fcf2e4f
  misc_feature 1..2: note = core
  misc_feature 3..240: note = LE
  misc_feature 241..1419: note = CDS
  misc_feature 1420..1533: note = RE
  misc_feature 3..217: note = bridgeRNA
cttgtattatagagtagtagttattagagcccctctccaagggctgtgctacactgtaagggatgctgtggattggtgcgaacctcctaccacaagatggttctcgaaaggttccaaccacagccccttacattttgttgatcagttaaataccgccagacggtttatgtggaacaaggctacaaaagtaaggtgcactgtggatacagcattacatatttaccgctggagggatttgttatgatgatttctgttggtatcgacgtctcaaaagacaaacacgattgctttatcgtcagttctgagggggaagtcttggcagatgcgttcatgattcccaacaacatagacggatttcactgtctattgcagagaatccaggattgtgctacaccccaggacaaaataaaagtagggcttgaggcgaccgggcattacagctacaaccttctcgggtttctccttgacaacggtctgaccacctatgtcctgaaccccttgcgcacaaacctctaccgaaaaagcctcagcctcagaaagaccaaaaccgaccgggtggatgcacgaacgattgcttctatgctgttatccgatgcaggcctcaaaccctacacaaatacagcataccacaacgaggagctaaagtcactaaccagataccgttttgacaaggtacaggaacgcgccaaactgaaaagttccgtctcccggctggcctgtatcctgtttcccgagctggaaaagctggtaccgtctgtgcacattgcctcggtctacgccttgctggaggagtttccaggcgccaaacaggtcgccagcgcccatttgaccaggctgaaagccctgctggaaaccgcctccaaaggccgctacaagcgggatatggcgcttgctatccgcaatgccgccagaaactccattggttcccggatgcctgccaagtctcttgaacttcagcataccatccgcctcattcgcgaattggatactgaaatcacggaaatcgaagaacagatccagtccattatggatgaactccattctcctattaccactatccccggattgggcttccgtatggccgccatgatccttgctgaagtgggcgatttttctcgctttgactccccggacaagttgttggcttatgccgggatgtcgccctctacttaccagtccggccagcttaaaaattgctacccgcacatggaaaagcgcggctccaggtacctgcgttacgctcttttcaacgctaccaaatatgtctgccactgggataccaactttgccgcttatcttgccaagaaacgggcggagggcaagcattacaatgtcgccatttctcatgcagccaaaaagcttgtgcgtctgattttcgctatggaaaaatccgggataccctaccatttgaccgtctgaccgctttcgtcttgctaaccggggcccgctcgggcctctgctttgctataccctttttgagccatctggtttttcgcctccactcatttttggggttgacttttaatagttaat

SEQ ID NO: 10065 - DNA, 1441 bp, unidentified
  source 1..1441: mol_type = unassigned DNA; note = element_fcf41e2
  misc_feature 1: note = core
  misc_feature 2..227: note = LE
  misc_feature 228..1427: note = CDS
  misc_feature 1428..1441: note = RE
  misc_feature 12..242: note = bridgeRNA
ctactagaggattcccgtaggaccggcgtccggccagactcggtccaggtgcccggagggcttgctctcttttgggctgcccacccgtccgcgggtgtggctcgattccggtttgcagcccaccgggcaccgctgacgaggcgtggctcaagaggggactgcccagctcgtagtagcaatgcccacctcgccgtccacatcggtacgagcacaggcgggagcaacgcatggaccatgtcgtcatcggggtcgatccccacaagctgtccgcgacgatcgaggtcgtcgaccagcacgagcatctcctcggatccggtcgcttcagcaccgaccaggctggctacgccgccatgcgtgcctacgccaagacgtggccgaagcgcctgtgggcggtcgaaggcgccaacggcgcgggtcgtccacttgcccagcgtctcctcgaagccggcgaacatgtcgtcgacgtgcccgcgaagcttgctgtccgtgtccggctcttcgacaccggccacaaccgcaagaccgacgcccacgacgcacacgcggtcgcggtcgtagccgtgcgcacgacgaacctgcgggtgctcaaggtcgacggcgagctcgaggcgatgcggatgctggccgatcgccgcgaagccctcacccggcgtcgtgttcagaccgtgtgccgactccaggcgctactcgcagaactcctgcctggccaggccaaacgcgacatcaccactggtcaggccaaggcgatgctggccaccgttcgcccgcgcgacatcgccgggaagacccgtcgccgcatcgctgccgaagagctggccgagttgatcgcggtcgaggcgaagatcaagaaggccactgccgagttgaaggcgatggtcctggcgcgggaatcacggctgatggacatccacggtgtcggtgctgtggtggccgccaggatcctcgccgatgtcggagacgtcgccaggttcgctgaccgcaatcggttcgcgtcctggaccggtaccgcgccgctggacgcctcgtctggtgagcagaaccggcaccgtctctcccgcgccgggaaccgccgggtcaaccacatgatccacatcgccgcggtcacccaactccggctcgacaccgaaggccgcgcctactaccggcgcaaacgcgccgacggcaagaagccccaagaagcactccgctgcctcaagcgacgcatctcagatgccatctacaagcagctcgtcaccgacgctgtccgagccgaaggcgcggacccgggagggcactgcggggcgtctcaagaatccagcgcggtcgacctacccccgcacatcgacacttcggatcagccactcccggacccgcagacccgacgctacgccgcaccacccggcacgcggaagagccaaccgctcggaaccctcgccagcaccggttgacaacagaggggagc

SEQ ID NO: 10066 - DNA, 1541 bp, unidentified
  source 1..1541: mol_type = unassigned DNA; note = element_fcfdb19
  misc_feature 1..2: note = core
  misc_feature 3..248: note = LE
  misc_feature 249..1421: note = CDS
  misc_feature 1422..1541: note = RE
  misc_feature 3..226: note = bridgeRNA
ctcgtattatagtgtcatagccttttctttaccttttctacaggttaggctatgctgttgaagatgctgtggattggtctttttcccctaccgcattgacggtttaataaaggctccaaccacagcctctttgtctcagtgttaatcagttagataccgcatgacggtttatgtaaaacgaggttacatccggcagagagccctgtggatctacaacagcatcaatacactttaaggaggatctgattatgatctacgttggcattgatgtcgccaaggacaagcatgactgctgtatcctcggctctgacggggaggtcctgttctccccatttaccattcagaacacgcttcagggattcgatgagctttatgagaagatctggtctctgacctatgacctgacagaaataaaagtaggtcttgaggctaccggacattaccatctcaaccttctgcgctcgctccttgataacggcctgcccagctttgttatcaacccgttacatacaaatctttacagaaaaggtcaaagccttagaaagacgaaaacggataaagtcgatgctgcttcgattgctatgatgctgcttaccgataagacgctcaagtcctactcggactcatcataccacaatgaagaactaaagtctctcacaagataccgttttgacaaggtacaggaacgtgccaggctgaaaacatccgtctccaggctcgtcaacattctcttcccagaactggaaaaactggttccctctcttcatatggcatcagtatataccctgctatccgagttccctggcgcctcttttatctctgctgcccatctgacccgactgaagcatctccttcacgatgcttcaaaaggtcgttatggcagggatatggctgtatctatccgtgatgcagcatcttcatctatcggttctgttctcccggccaagtctttggagctgaaacacactcttcatctcattgaagtcctaacagaggagatcgacgagattgaagatgctatcaattccatcatggatgcgattgcttctcccattactacgattccaggtctcaaaaaccggatgggtgccatgatccttgcggaaatcggtgacttctcccgttttgatagcccggatcagatcttagcctatgcaggcctttcacctaccacttatcaatcaggccagttgacatcttcttatgcccacatggagaaacgtggttcacgatacttacgttatgcactgttcaatgcaacccggtatgcctgtatctgggatccaactttcaaagcttatttggctaaaaagcgggccgaaggcaagcattattatgttgcaatttctcatgcttgtaagaagcttgtacgcgtgatctaccggatgcagctgactggcgagtcttatcgaactgcctaggttttcccctacctttttctgtatgcgcacccttacggatgctttattcgtcatgcagttttcaaggtactttcgcctgaacgaattccttcgtttcaggcttgacttttaatagttagt

SEQ ID NO: 10067 - DNA, 1405 bp, unidentified
  source 1..1405: mol_type = unassigned DNA; note = element_fd04eb2
  misc_feature 1: note = core
  misc_feature 2..89: note = LE
  misc_feature 90..1127: note = CDS
  misc_feature 1128..1405: note = RE
  misc_feature 1175..1400: note = bridgeRNA
caatgggatggactcctcctcacctcaccggcatcgatgtgccaaaatggtgagtgagtcaaacatcactgagatgaggagaagcccaaatgaatattatccgtgttggagtcgatattgccaaatcagtttttcacgtccacggtgtagatcgccatggtaaaaccgtatggcaggccaagtatactcgcacaaaatggttaaacgcgctgagtcgcaaggtcccggcaggctgcccagttggtatggaagcctgtgcatcagcccatcattggggacgaaagctccagaaacttggctatcatgctcgtctaattcctgctcagtttgtcaaaccttacgtaaagagcaataagaacgacaaagttgatgctgaagcgatttgtgaggcaatgagcagacccaacatgcgctttgtagccctcaaaacagcagagcagcaagatatccaggctgctcatcgcatccgcgaagaattggtggggcaacgtaccgccaaagctaaccagatccgcggtttggtaggcgaatatggtgttatttcgccagttggcatccatcaactgagaagggctttaccaaaatggcttgaggatgctgaaaacgggctgagtgatactttccgcacgcttcttaatagtttggcggaggatcttcgttacctcgatgaccgcatcaaaagtcttgatgagaacatcactgagaatgtccaaaaggatcccgttgcgcgtcgcttgatgacgttgcgtggcgttggaccattaaccgcaagtgcactttccggggcgctgggtgacggcaaagcttttcgaaaaggacgtgattttgcagcgtctttaggattaacacccagacagcacagcaccggcggccgggaacgattactcggaattagcaagcgcggtgatggctacctccgcaagttgcttgtccatggtgcacgagcggtactacgccatgttgatagaaaaagtgatgggctgagtcattggttaaaatgtctggtcaaccgtaagcacattaacgtagcgaccgttgcgttggctaacaaaacggcccgaattgcctgggcgttagtcgccaatgaaacggcttatgatgaaacacttgcagctgcaagtagataatctgatgctaaagtaacaaacaaattttaacaggataaactcaacaccacgattgcaaagcttttgcttgatggcgaacaggtcgaaccggcactgagaaactccttatgtgacgaagagccttgagctcgtgtaagcgtttggaaatcagtgcgcgaatagcccattaaggtccggtgcctaccgatgcggcatctttttagagaccgaatacacgtaggcagtcgtacctactcgcgattgaacaaaatgcttgcaaaagaggaggagtccataca

SEQ ID NO: 10068 - DNA, 1709 bp, unidentified
  source 1..1709: mol_type = unassigned DNA; note = element_fd13abd
  misc_feature 1..3: note = core
  misc_feature 4..247: note = LE
  misc_feature 248..1462: note = CDS
  misc_feature 1463..1709: note = RE
cttatacagtaaactaagaacaagccctctcgacacagggctggaacaaggatacacttgttctatacaactgttggatgcgccagggaaagtctagttcctccacccggctcgaccgattaggaaagctcgcacttccccggcgctgttcctgagcagaaccgatcatgagagagtcgcgcttcgagcgccacagtataagggcacgtgagctcaggaagcaagcttgtagagaggagcattgcgcatgtggtatgccggtattgattgggcgaacgagcatcacgatgccctggttattgatgagcagggtcgtcagatcgggatgctgcgtgtcgagcacagcccacaaggcatgtccaaattgaacgcttttttggagcagatcattggctcggagtcgaaagaacagctggcctgcatcatcgagacaacgcatggcttgttgatcgctcacctgttggaagcgggctggcccgtctatcccgtcaatccgcgcaccgttgatcgtcggcgagccgcatcgggagccaagacggatacgattgacgcctacttgctggctaagaccggacgtgcggacctggtcgatttgcatcgcctcacgccagatagcgagaagattgccgagctcaaactgctcacgcgcgatcaagatgccttgatccggatgcaaacgcgtctggtcaatcagctcacggcttgcctcaaagcctattacccggtggccctggagctgtttgccaaactgcagcagaagagcaccttgctgttcttgcaaacctatcccacgccacaggctgccatggctgcttcggctgagcagatcacagaggtcctcagacaagcaaagcattccaatccgatcactactgccaccgagattgtcgcgcggctgcagcaagcccacttgcaggccgatgcggtgacaacccgcgccaaatcgcgtttgatgctggcactggtgagtcagctgctgccgttgcttgagcaaatcaagcagtatgacaaggagatccacaccctttttttgactcatgaggatcacgagctcttcgcgagcttgccgcgtgcaggcaaacgcctggctccgcgactgttggcagaaatcggcgatgatcgcacccgctaccaagatgctagcagtctgcaagcgctgggaggaacctcgcctgtcctctttcagagcgggatgtattccaaagcgcatcggcgcatgggctgtgtgaagccgttgcgcaatgccttgcatcaatttgcctggcagacgacacaaagtgaaccgtgggccagagcctattaccaacgcaagcgagcagaaggcaaaagccatagcgtggcgatacgagcgcttgctaacgtatgggtcaggatcatctttgccatgtggtcccgtcgctgccactatgaaacagccatctttaagcaagcacaataccagcatgcgcgccgagcggcctagcagccctagcgcgtgctgatcacaagcaacaagagccaaaaatcctgcattttttgggccttcaacttggcatgcccacacctgaccacgcaagcgaacggttgtcaaggaaagcgaagcggcttgacaactgtgagcggcgtggtacgcttgttcatgcctagttgaagacattgctccacctgtctcttttctgatggtttcgcttcctctcaaactggtcccaaaaaggcttgacatagagagt

SEQ ID NO: 10069 - DNA, 1368 bp, unidentified
  source 1..1368: mol_type = unassigned DNA; note = element_fd14887
  misc_feature 1..2: note = core
  misc_feature 3..313: note = LE
  misc_feature 314..1114: note = CDS
  misc_feature 1115..1368: note = RE
  misc_feature 1087..1356: note = bridgeRNA
tgatgggggtggacaccccccggcggcatcgatgtgccatagtggaggtgttgatcaccactaggaggaggcgtccatggcagaggttagcacgattggtctcgatattgcgaagaatgtttttcatgcgcacggcgcggatgcgcgcgggcagatggtgttcagccggcggctgacccgcgtcaagctgctggagttcttcgccgcgcagccgcgctgtgttgtggcgctttaggcatgcggaggcgcccatcactgggcccgcgagatcgcctcgcttgggcatgaggtaaagctgatcctgccggcttacgtgaagccgttcgtgaagcggaacaagaacgatgcggtcgatgccgaggcgatctgcgaggcagcccagcgcccgagcatgcgctatgccgcgatcaagaccgaagcgcagcaggcagcgggcatggtgttccccacgcgcgatctgctggtccgtcagcgcacgcagctgatcaacgcgatccgcgggcacctgaccgagttcggatgggtagcgctcaagggcccgtcgcacgttagcgtgctcgcaagcctgctcgaggaaggcgaggagatcggcgcatcgctgcccgaagcggcccgctcgatgttcctggtgatgacggggcagctcgagcacctgaacgagcagatcaagctgctcgacaaggagatcgccaggcgtgcccgcgaggacgaagcagcccggcgcctgatgaccatccccggcatcgggccgatcgcggcaacagcgttgctggcgctggcaccgccagtcgaaggctttgcgaggggtcgcgactttgcagcctggctcgggctcacgccgcgccagcactcgaccggcggcaaggagaggcttggtgcgatctcacggatgggcgagcgcacgctgcgacggctattgatcatcggcagcagtgcggtggtgcttcatgccagcaagcgcggagctccgcgcggctcatggctcgagcagatgctggccagaaagccgcgcatgctggtcacggtcgcgctggcgaacaagaccgcccggatcgtctgggcggttttgatgaagggcgagaattacaaggctccggtcgcggcagcagcgtaagctgaggcggaccataggtcgtcggtagaggcaagagaccgaaggagggtatggcaccaatgtcggcgagacgggaccggaaaaccagtgctttccacagtgcctcagagcacgcctgggtgatgcggatccggttcgcgaactcccatacgggccagcggcattacgccagcgcaaacaggccggacagatggcagcatccgactaccgccaagacccgattttactcttgcatcttctggggcgtccacaga

SEQ ID NO: 10070 - DNA, 1564 bp, unidentified
  source 1..1564: mol_type = unassigned DNA; note = element_fd15f0e
  misc_feature 1: note = core
  misc_feature 2..266: note = LE
  misc_feature 267..1304: note = CDS
  misc_feature 1305..1564: note = RE
  misc_feature 1..247: note = bridgeRNA
tgtatgataaatatataaaatatttatctatacatcctcctttcatagtttattttatttattattttttgtataatttatttatactgtggactttttatatttcactaaagagcttctgctactttttaaaggagactactgccacactcttttaactcatatacttatagttggataagtccctgaactttcatataccgcaagaatgtattgttttttaagatgtggactccacagttactattttttaaggatgtgattctatgtttttactaggtattgatattgccaaacttgaccatgttgcttcctgtatcgattcttcctccaatgaagttattttttctaattttaaattcaaaaatgatttcagaggtttcagttcccttctagataaaatcagaacttttgatgctgaaaatcttattatcggaatggaatcaacttcccattatggagaaaatcttatcagttttttatttaaacaacattttaaagttgcacttattaatcctttacaaacttcacacctgagaaaagctaatatcagggatgctaaaaatgataatctggactcccttaatattgccaaagctttaagttttgctaaacttaactttatttccaagaaaaacattgactgtttctcactgaaaaaacttaccagatttagaagtaatctgattaaacagagaagtaaaaccaaaattcaattaacttctttacttgatttactttttcctgaattacagtatctttttaaaagtaaaatccatagcagggcaatctactcccttcttaaaaaatatccttcagcagaggagatagcagccctgaaagatgatgaaatatctaatcttttatatgcttcttctaaaggacatttcaaaaaagcaaagtccattgagcttaagagtcttgctaaaacctctgttggaattaaggatacttcaatatcattacatgtagttcaattaatagaactaattgaactgtatgataaacaaattaaagatattgtatctaaaatatctgatacagttgataaaatggatacaaaactactgtcagttcctggaataaatattattgcctgtgcaataatattaggcgaaacaaataattttgaaaatttttctagttctaaaaaattacttgcatttgccggtcttgatccaaagataagacagtcaggtaatttttatgcctcatcctgcagaatgtccaaaaaagattccccctatttaagacgctttagtttttactgcatggaacattgtcagacactcagaaaagtttaacagatactactgtttaaaacgttcacagggcaaatctcattacaatgcccttggacatgttgcacataaacttgtgagtgttatatttaccctgataaagaaagatattatttatcaggaagaaaatttaagataatacccactaaatttcaactattgtagaaatcaggagcttaaacctctaattttgttatgtcaaaaattattatttaaaatttttttcctttttttaaaaaaagttcttgacttttcatagttgg

SEQ ID NO: 10071 - DNA, 1437 bp, unidentified
  source 1..1437: mol_type = unassigned DNA; note = element_fd23376
  misc_feature 1: note = core
  misc_feature 2..137: note = LE
  misc_feature 138..1157: note = CDS
  misc_feature 1158..1437: note = RE
  misc_feature 1198..1434: note = bridgeRNA
atggtatggacgcctcccaccttaaaggggtgagtgagtggcgcagtttgtgaaggaagtggaccctccgtgccgacggcatcaaagtgcccaaggtggaaggtgttcagtcttcacaggcaaccggagggtccgacatgaatcgtatcgtgattggagtggatatcgcagagcgggtgtttcagctgcattgggtggagcctgcgacgggggagattgtggcgctgcagcttaagcgggagaagtttttggagcattttgccaatcgtgcgagctgtgtgatcggcatggaagcgtgcggcggctcgcagcactgggcgcgatcgctacagaagctgggtcacgaggtgaaattgctgtcggcgcggatggtgaagccgttcgtcggcggcaacaagaacgatgcggcggatgcgcgcgggatctggacggcgatgcaacagcctgggattaaagtggtggcggtcaagagtgaggagcagcaagcggtattggcgctgcatcggatgcgtcagcaactggtgaagttccgcactgcgcagatcaacgggctgcggggtcttttgagcgagtacggcgaagtcatgccgcagggccgagctgggatcaagaaagatattgccgccgctctgcaacgcatcgcggagcgtttaccggccgtactcatcgacacgctgcgcgaacagtatgcccgcttgggcgagcttgatcagcagatcctcgagatcgagcggcgcctgcggcagtggcatcaccaggatgtggacagtcaacggatcgcggagatccctggtgtgggattgctcaccgcgaccgcggcggttgcgatgatgggcgatgcgaaagcctttaagtcgggtcgcgagtttgcggcgtggctggggttggtgccgcggcaaagcggtacgggcggccgagtgcgcttactcggcatcagcaagcgcggcgatacctatcttcgcacgctactgatccacggcgcgcgcgcgatcctgacgcacagcaaatccccacccgagtggttgagtgaattagtgaagcgccggcccaggaatgtggccgtcgttgcgatggcgaacaagatggcacgcacgatatgggccttgacggctcatgagcggacgtatcagaaagggtacgtgagtcagcgcgcttaaggctggtccacgcaatattgataaacaacttcaaaaggggatagacgctaaaaggttgcgcagggttaacaacgtgtgatggcaaacaggtcagaccgtgacccgccaaacctgcatggcacatagagctttgagctcttgggttaaataaggcgcgggtcagcgaaatccatcagggcccgcaggctttggcctgcatcaacaggccggatataaacctgcagcctcatctgtgggtcatcgcaccaagaaaaccttgcacccgggaggcgtccacata

SEQ ID NO: 10072 - DNA, 1556 bp, unidentified
  source 1..1556: mol_type = unassigned DNA; note = element_fd26167
  misc_feature 1..4: note = core
  misc_feature 5..270: note = LE
  misc_feature 271..1446: note = CDS
  misc_feature 1447..1556: note = RE
  misc_feature 18..251: note = bridgeRNA
gtcttgtatgataaatacataaaatatttatcgatacaacctcctttcatcatttattttatttcttattttttatataataatttatacactgtggactttttatcttattctaaagagcttttgctacttttttaaggagactactgccacactctttgaactcatatacttatagttggataagttttaaacttttatatatcgcaagaatgtattgttttttaagatgtggattccacagttatcattttttaaggatgtgattttatgtttttattagggattgatattgcgaaactgaaccatgttgcttcttgtattgattcttctacgaatgaagttgttttttctaattttaaattcaaaaatgattttgaaggttttagtgcttttttagataaaatgaaaagttttgatgctaaaaatcttatgattgggttagaatccacttctcattacggagagaatcttattcattttttatttcaacatggttttaaagttgtacttatgaatccattacaaacttcgcaccttagaaaagcgaatattagagatgctaaaaatgacaatttagactctattcatattgcgaaatctttactttttacgaaacttaactttatttctgagaaaaacatggattgtttttctttgaaaaaacttaccagatttcgaagtaaccttatgaaacaaagaagtaaagctaaaattcaattaacttcattacttgattttatctttccggaattacagtatctttttagtagtaaaattcatagtaaagctatttatgctcttttaaaaaaatatccatccacagaggaaatcgcagccctaaaagaagatgaaatttctagtcttttatatgcttcttccaagggacatttcaaaaaagaaaagtccctagagcttaagagtcttgcgaaaacctctgttggtatgaaagattcctcaatatctttccatgtcattcaactaatagagctaattgagctttatgaaaaacaaataaaagatatggaaagtaaaatcgctgatattattcacaaattagattctaagcttttatctgttcccggaatcagccttgttgcttgtgcaatcattctaggggaaacgaataatattgatcgtttctctacttctaaaaaattactcgctttcgctggtcttgatccgaagataaggcaatctggtaattttaatgcttcttcttgtagaatgtctaaaaaaggctctccttatctaaggtatgctttgatttttacagcttggaactgtgttagacattctagaaaatttaatgaatattatcttttaaaacgttctcaaggaaaatcacactacaatgctcttggacatgttgcgcataaactagtaagagtgatatttactttgataaaaaaagatattctctaccaagaagaagaattagattaaattttttagttaaaatcatatgaaaaatcaagagttttcaaactctaattttgttatgccaaaaattcttattttaaattttaaaaaaagttcttgacttttcatagttg

SEQ ID NO: 10073 - DNA, 1646 bp, unidentified
  source 1..1646: mol_type = unassigned DNA; note = element_fd268ce
  misc_feature 1..2: note = core
  misc_feature 3..297: note = LE
  misc_feature 298..1545: note = CDS
  misc_feature 1546..1646: note = RE
aatcaaccattcggccgcgttgcgtccgcacaaatagggatgaaagcgtgcagacaaacggccgcctttcttgtaaaattatgttgaggaggatgcacactacaacgcacggtgggaggagtcgtagactgcatttcaaacctaaaacagtatatcaatcagtgctggaaccgccttttcaagcacaaataagtggcgtcttgagcccgtacactaaggattgttttaacacctgttaaattgcttggaggttcagtccctgcattctcctcacaattttatagaggaggttttgttgtgaaagtcgtattcccaacctgctgcggtgtagatgttcacaaaacattcctggttgctaccatcatcaccacccccgcagacagcttgcagcccaactatcagaagaagcgattcagcacctttaattcggatttgaaccgttgtgcggactggctgctggaacacaattgtctggatgtctgcatggaatccacggggaagtattgggttccggtattcaacatccttgaaaagcgtggtattcgggttgtaatagcgaaccccaaatgggtaaaggctgtaaagggaaacaaggatgatacgaaggattccaaatggatcggggatttgtttcgcattggccttgtgaaaagcagcttcatcccagacctgaatatccgcattctgcgtgagtttacccgctaccgctataagctggtgtccatgaaaagcagtgagaaaaatcgctttcagaatgcgttcacagtctgcaatgtggctctggattctgtcgtgtccgatatgtttggtaaatccgcaactgcaattacggattacctcacatccgacgagtcctttgacgccgaacattgtgtttccctgttacagcgctccctcaaaaagaaggctgaacaagtactggaatccattgaaggcttttccattgccgatgagcagaaggcccgcatcaaaatcatccgtgagcatcatgatttcattgaggaaatgattgccacggtagatacccgtgtcaatgagatggttgcaaagtatgaaggaaacatcaatcttctttgcaccattccgggtattgaccgtaggtctgcaattaccatcatctctgaaatcggcacggatatgggccagtttggctcctcaaaacggctttgctgctgggctggcctgacacccggcaacaatgaatctgccggaaaaaagaagtctgtgcggatttcccgtgccggtgtatacctgaagcctgctttggtacaagtcgctcacgctgcggtaaaggacaacgatcatccttactacaagctgaaatacgagcgaattgccaagcgcagaggcaaaaaacgagcaattattgccattgccagaatgattctgactgctgtttattccatgttctgcaccggcgaagtgtggaatcctgtggacctctacaaagtcgatatgccgggatgtttgaaggagcagcagcttgccaaagcaattaagcaggctacgcgcttccttgaaaagcagggattatctgtggcttagctcggattgaatacgctttgaccttgcaaaacaagctgtttgcaaggatgttttcgtgcgccttctttcctctgcgctggtcaggtactcactttcacact

SEQ ID NO: 10074 - DNA, 1210 bp, unidentified
  source 1..1210: mol_type = unassigned DNA; note = element_fd29a8f
  misc_feature 1..2: note = core
  misc_feature 3..229: note = LE
  misc_feature 230..1207: note = CDS
  misc_feature 1208..1210: note = RE
  misc_feature 44..206: note = bridgeRNA
tcctttagattagcaaaacagaaaaaagataatttttatatttagaaagagaaagggaagttaggtaaactatgacaaccgctctgagttataaaagctcatgcgccgattcagacctgacttcctttttcatcaaaaactcaaatagaaattcgggattttaagcccattattaaggagttaagttaatgatgaatttctcatttctgtttcacctaaaagctaatttatgaaaaacatttttattggaattgacatcagtagtaaaaccttagatatttgtgaaaaagtggggcaagatgttacctattcaaagattaaaaataatcaacaacaaattcgaaagtttttaaaagcttatcaaggacaaaaagttgtcgtatctatggaaaatacaggtagatacaattgggagctctatgacgttcttcctgagtttgattttaaagtttatgttttaaacccgataagtttatctaaaagccttggtttagtacgcggtaaagatgatagaacagacgcttatagaatcgtttggtttacagaaaaaaacatggatgatttgaagccttggagacagagttctacggccattagaaaactcaaagtactaatgacagagcgaaatgcaaggattaaatctaaaagaagattaagcaaacaaaagcatgattacaagaaaatgaagcctttaggtttaaccgaaaacctaagtaattggaatcaacaacaggtgaatcaactcaacaaacagatagataaaatagaacagttgatacaggaaataatcaatcaagaaccttcattaaaaaatcaacaaaagttgatgcttagcattcctggagtgggcaaaatagtttcttggactttactagctaaaacagaaggttttgtgaaaattcaagaacctagaaaaatggcgtgttactctggagtggttccatttgaacatcaatcaggaacatccatatacagaagaccaaaagtatctgtatatgcagataaacaagtcaagtccatactccatttggcggctatgagtgctataaggtttaataacgatctagggatttattatcaacgaaaagtaaaggaaggcaaaaataaaatgcttgtaattaatgcggtaagaaacaaaattatacatatcatttttgccttaatgaaatccggaaataaatatcaaaatcgtttggttttatcatagaaa

SEQ ID NO: 10075 - DNA, 1419 bp, unidentified
  source 1..1419: mol_type = unassigned DNA; note = element_fd2cae6
  misc_feature 1..2: note = core
  misc_feature 3..87: note = LE
  misc_feature 88..1128: note = CDS
  misc_feature 1129..1419: note = RE
  misc_feature 1183..1415: note = bridgeRNA
ataatgggatggtcgccccctccctaaccggcatcaacagtgccaaagtggagcgtgtgacgtaccactgacaggaaggaggcgacaatgaaggttacaacggtaggagtggatctcgcaaaggccgtttttgcggttcacggagtggatggccggggcaaggtggtgttccggaaggcccttaagcgaactcaggttcttacgttcttcgccaacttggagccctgcttgatcggtatggaggcctgtggaagcgcccatcattgggctcggcagcttacggcgttgggacacacggtgaagctgatggctccgcagttcgtaaagccctatgtgcggaccaacaagaatgatgccgccgacgccgaggcgatctgtgaagccgtgtcccgtcccagtatgcgcttcgtgcccatcaaagccaccgagagtcaggcggtcctggccctgcatcgcgcccgccagggattcgtcaaagcgcgcaccgcgcaggggaatcagatccgcggattgctcgcggagttcggtctcgtgatcccacaaggcctgagccacatcacaaagtacatcccgcgaatcctggaagacgccgagaatgacctgcccgacaccctgcgcgcgttgatcgcacgcctaacggcccacctgggtgagctggaccgccaagtccatgaactcgaggcccagatccaggcctggcaccgacagaacgcagatagtcagcggcttgccgcgatccccggcatcggcccgatcacggccacggccctcgtggcctcgattggtgatgcgaagaccttcgccaatggccgccaactcgccgcttggcttgggctcgtgccccggcagcattcgagcggtggcaagcccacgttgcttggcatcagcaagcgcggagacgtctatctgcggacactcctcatccatggtgcccgtgcggtgacccgcgtccccgcaggtaaggcccggacggacgcctggctgaagcggctactcgaccgccgccacaagaacgtcgcggcggtggcgcttgccaataagaatgcgcgtacggcgtgggcgctgctcgtccacgggcgcgattatcgaccagactacacatcatcctcaacgccggtggccgcatagccgcaccggcggaataaagacgaggaccgagacacgcgggttacacccaggaggctctcccaacggttgcttcaggcaatcatgacgtgatggcaaggcaggtaggaccgtgaatggctcaatctgacagactcatagcacctcgagtgcgttgaaatgatgagacgccattcagcaaattccatcagggacagaggctttatgcctcatcaaaagtccggatgtatggctgcataccgtaccttcttgacatcgtgaaatgagggcttggcaaactgggggcgaccatgt

SEQ ID NO: 10076 - DNA, 1296 bp, unidentified
  source 1..1296: mol_type = unassigned DNA; note = element_fd2fb47
  misc_feature 1..2: note = core
  misc_feature 3..191: note = LE
  misc_feature 192..1139: note = CDS
  misc_feature 1140..1296: note = RE
  misc_feature 28..201: note = bridgeRNA
cttgtgtccggaaaattcggcagaatgtgcgaacgggcggttctgaccaaccgcccgtcgctggagctgagcccgtgtcgcccaaaagccagagagcttgagggagagcgagggacagcgccggtgtcttcctcaacccgaacagttgcatgggcttcgagcccgtaccgagcaaggaagggagtggaatgatggcacaaggcgatggcattgtcgtcggcatcgacgttgcgaaggacaaggtggatgggtgcgttcgcaagctgtcggtacggcagacgttcccgagcacggcgcaaggtcaccgcaagctgattacctggctgcgcaagcacaaggtgaccaaagcggtgatggaagcaagtggcggctatgagcgcggctgggccaaaacgctgcgcgcagccgggatcgcggtacggatcgtggatcccaagcgcgtgcgcagctttgcccaatcggctggacgtttggccaagaacgatgtgatcgacgccgagatgatcgcctggttcgccgagaccttcgatgcggcccccgcccaatgctacgatgcggcgcgcgaggagctgcagacgctggtaaatgcgcgccaggcattgctcgatatgcgcagcaagctccacaaccagagtgaacacgccgtgccgccgcccgtgcagcagatgcagacgcggctgtcgaagagcattgccgccgagattgccgcgatcgccgccatgatcaaagcgacgccgcattttgccgcgcgtgccgagatcatcgagagtgtgccggggctggccgatgtcgccaccttctccctggttgccgcattgccagagctcggccaagtcaacgacaagatcgctgcagcgctgttgggagcggcgccttacgatgacgacagtggtcgacgtcgcggcgagcgccacatcaggggcggacgccgcaagctccgcaatgcgttctacatggccactctcggagcagcgacgcaacacaatccgatgctcaaggcgttctaccagcgcctgattgccaagggcaaaaaaccgaaagtcgcgcttgtcgcctgcatgcgcaagctgatcgtcattctcaacgccatgatccgacgcggtgaaaagtgggaccccaatcgctacgcgatccgctaaacgggcgcgctccagcgcgctcggtcttcgaccgagcgcgctggagcgccttcgagaccggcgagcggacggggtcaaggccgcaagccgccggaggcgggggcgcgcagcgccagccttgagcccggccgatcaccggtctagttcagcacagttg

SEQ ID NO: 10077 - DNA, 1230 bp, unidentified
  source 1..1230: mol_type = unassigned DNA; note = element_fd30a4c
  misc_feature 1..2: note = core
  misc_feature 3..104: note = LE
  misc_feature 105..1196: note = CDS
  misc_feature 1197..1230: note = RE
cttgtatcttaaatcttatagtggttagctactactatacgcaaattgtaaagtttgatgccatactaaaactttaagtttctacaaaagataaaacttacaatttgcatctaccactcatacaactctggacggtaactaagcgctctgatgttgcattcacaagaaaagatggtggtcatttaaaacaatatttttctctaggagaatttgttatgttttatcttggtattgatgtttcaaaaaacaaactagattgctgttttttctatgaaaaagattatccaaaaaagaaaaataaaatttttcctaatcagactaaagggtttgatgcattaaatttatggttatccaatttaaaagttgatccccaacaaaccatagtattaatggaggcgacctcgatttatcatgagcctcttgcggaatttttattttctaaagattttaatgtctgcgttgctaatcctgcacgagcaagatattttgcaaaaagtatgtccaaacttaataaaacggataaagtagatagtgaagtattagcgcaatttgccatgacttcagacttacattattggaaacccttagccccacatattaaattgctgaatgccttactcgaacgtagagcagtgctgttagaagatttattacgcgaacgaaatcgcttagaaaaggcagattttattaatcttgtagagcctgttttagcttcaattcaagcgagtattcaatacttgcagtgtcaaattaaagatctagatcaacaaataaatgatcatatcgatcaaaattctgatttaaaaaaagatagaaaactgctgtgtagcattccagcgattgcggatcaaaccagtttactcatgttatcttttttccatagtcatacatttgaaaaagcaagccaagccgctgcatttgtaggattagttccaatccacaggcagtcaggaagctcagtccgaggtcgaagtcaattatcaaaagctggctcagccaagattagatcgggattatatatgtcagcagtcgttgcaactcagcataatccacatattaaagagctgagcgaaagattattgtcgaatgcaaaaagtaagatgatggcaataggggcagcgatgcgcaaattaattcatatttgctttggtgtacttaaacatcagcaaccctatcaggcaaattattcaacttaatttgaataatttcacttgacgttcgagacggtat

SEQ ID NO: 10078 - DNA, 1446 bp, unidentified
  source 1..1446: mol_type = unassigned DNA; note = element_fd339d2
  misc_feature 1: note = core
  misc_feature 2..106: note = LE
  misc_feature 107..1132: note = CDS
  misc_feature 1133..1446: note = RE
  misc_feature 1169..1390: note = bridgeRNA
gaatgaaagggacttccccgtcccgaggcggcggaagtcgcgaattgtgatcaacgtgccatgatgaaggttcgaatgttcatcaacaccaactggaggggaagtcgtgtctatagttaccgtaggaatcgatctcgccaagaatatttttgccctccacggtgtcgatgcggccggcacggccgtgctgatcaagcctcgcgtctcgcgtgatcagttggtaaccttgatcgcacagttgccgccgtgtcttatcggcatggaagcgtgtaccggagcgcatcattgggctcgcgtgtttcagcagcacggccacgttgtcaaactaatggctccacagctcgtggcaccgtatcgcatgtccggcaagcgcggcaagaatgatgcagcggatgcggccgcaatttgcgaggctgtcacacgtccgagcatgcgtttcgtgccgctgaaagacgaacatcaacaggcgacgctttgcctgcaccgaacccgtcagggatttgtcacggaacggaccgcaatctataaccggattcgcgggctgcttgccgaattcggcgtcgtactgccgcaaagccctgatcgcttgcgcagagaaattgcccctcacctagatactattccgggctgggcgcgacgctgcatcagcgacctgctcgagcatgtcggcgatatcgaggtgcgactcgccgaatacgatcgtgcgattggcgaaattgcgcgagccgacgagcgcagccgtcggctcatgcagctgcgcggcattggaccgacgacggcgagtgcgctgcttgcgagccttggcaccggacatgatttcaggaacggtcgccaggtggctgcctggatggggctcacacccggtcagtacagtagcggtgggaaggcgaggctgggtagcatcacgaaggcgggcgacgcttatttgcgcggcttgctggtaatcggtgctcgtgctgtcatcggcagccttggcgaaaaacaagaccgcttcagccgttgggtccgaagccttgtggagcggcgcggtttctggcgcgcggctatcgcgattgcagccaagaatgcacgaatggcgtgggcaatcctgaagtacggcgacaacttcaagcatgaaccgcttgccgcgtgagatcgcgcgtgccaaccgattgccactatgaaggcaagatgtccatgattgaatagaagatcactttgcactgccgtcggtgatgtgaagcgggttggacccgcgtgaggcttacctgaagtgacgactggaacttctgtttccggataaagaatgaggtcctcgcgcgcgtctttcatcagggtccgggctattggcccaacatgaccggttgtagtaccgcagtccttcaccttctcacacgacgtcggcaaggcagcaagtagcaacaaaaaccacgtcgggcgcttgcgttcaacggggaagcccttgta

SEQ ID NO: 10079 - DNA, 1550 bp, unidentified
  source 1..1550: mol_type = unassigned DNA; note = element_fd356d3
  misc_feature 1..2: note = core
  misc_feature 3..268: note = LE
  misc_feature 269..1270: note = CDS
  misc_feature 1271..1550: note = RE
  misc_feature 3..246: note = bridgeRNA
cttgtatgatgtatttagaagcaaatacacatacttttcctttcttttgatttgtgattataatacattcagatgctgtagactttagattgtttttctgtggttcgactacttaaaggagtgtattgccacaactttatctgaatcatttatagctggatgtgcctaggctattttattgcctataagtacttatctcaatcaagtctatgatgataaatgtctgtgtagtgtcacagtatcaacacttatgaagggagatattcctatgatttatgttgacattgatattgccaaattcaatcatttcgcctcagatctatcttctgatgttgaaataatacttcaaccgtttaaatttacaaatgactatgatggcttccaaaagctgatttccaaactcaattcctttgagaaagacagcctcatcataggtcttgaatcaaaggctcattatgacaacaaccttgttgaatttcttgtttcaaataacaataaggtttgtgtcatcaaccctattcaaacatctactatgcgtaaaaataacattcgcaaaacgaaaactgataaggttgataccctcatcattgctaaaactctattaatgtattctcataggttctttacttcttatgctatcgatttacttcatctaaagaacctaggacgttttagacaaaaactcatcaaacaacgtacgcgtcttaaaatacagctgatgtcttatgtagatcagtcttttccagaactacaatacttcttcaaatcaggcattcatatggatacctgttacgctcttctgaaagagtctccatctgcaaaaactgttgcttctatgcatttgactcatttaactcatctgcttcaactcgcctcacatggccattttaaaaaggatacagcggtaaatttaagagttctagcacaaaagtctgtcggctctaatgacagttctatatctattcaaataactcaatctattgaacaaattgaattactggatagcaaaattgataaagtggaatctgaaatggctcatattctaaatcctgtagattccgttatcatgaccattcctagcattaatgctataaatggtggcatgattttaggtaaaattggcgatattacgtgcttttcttcttctagtaagctattagcatttgctgggttagaccatgcagcatatcagtcagaaaactttagtaccaataacacaagaatgtctaacatagttcaaaacctttacgtttcgcactggttaatgtagcacataatgctgtcaaaaataataaaaaatttaagtactactatgacaaaaaatgagtgaaggacgtagtcattataatgccttaggtcattgtgctggcaaactagtccgtattatttataaaatgctgaccgataatatatcatttaatctagaataatatttttacaatagtattacttttaagggcttttaatagctttattaaagttacccatttttaggtaaaattaaacataaaaatcttagctaattttttacttgacttttcatagttggt

SEQ ID NO: 10080 - DNA, 1323 bp, unidentified
  source 1..1323: mol_type = unassigned DNA; note = element_fd38aa3
  misc_feature 1: note = core
  misc_feature 2..285: note = LE
  misc_feature 286..1284: note = CDS
  misc_feature 1285..1323: note = RE
  misc_feature 108..266: note = bridgeRNA
cattaagtttgcagcatcgttgcggacgaagtccgccaaaagcaaacaaaatgttaatataatacgaagaatgccaggttgatttcttacttttgtcgtattaaagaagaagtcaaccctcctttgaagtaaaataatttgagtaatagtcttcaagactaaagggggttatatacttcaaaggagcggcatccttagacgagatagaatgttaggctcgtagcctatttaatgtttgagtcgtgggacgccgattgtcgacttcataaattgatttacaaaggtatgataaatttctttattggcatagactttgccaagacaaaatttgatgtggttatccttcataaggatgacctggtgggaaaaggtgagcacaaccagttcagcaacaccaaggatggagtaaagcaactcgagaaatggctgcgccaggtttgcggtaagggcgtctccatggaaagcgtgatatgcggagagaacactggcgtttacagcgtgctcgcagcaaagacgctgtcgcacgatggttacactgtatgcctcgatagcgcccttcgcataaaacgctccatgggaatttcacgtggaaagaacgacaagaaggatgcccgggacatcgctgaatattcagcccgccattatgacaagctggtggtgtatcaagagccatcacagacctcagaggccctcaaaacattattcacccaaagacgccttctggtcaagcagagatgtgacttgcagcggcgcaacaaggagttaaacggactatacaaggacaatcctctgctgaaaagaatgctggcctccgacacaaggatcatcaacactatcaatactgagattgacaagatcgaggcgcacatgatgcagattatagaaggggatcccgaggctctaagggtgtatggcatcctcacctcgatgaaaggcatcgctctggtcaatgcagttgccttaattgtgtacactgacaatttcaagcgttttgactacgatgcaagacgcatctgctcttactggggcattgcaccatttgccaaccagtcgggcacatcgattaacggaaagccacatgtatcacactttgccgaccattacttgaaatccctactctctcaagctgtcatttgtgccatccggttctgccctgctatcagcaattacgctcaacggctgatagccaagaaaaaacatatctcaatcgtgcacaacaactgtaagaacaaaatggcgatggttaaaaatggcacctattatggtgaaattcaaaaaaagtagaaaaaaagtgacttttttcttgcatttgaacatagaatg

SEQ ID NO: 10081 - DNA, 1321 bp, unidentified
  source 1..1321: mol_type = unassigned DNA; note = element_fd56fc0
  misc_feature 1: note = core
  misc_feature 2..89: note = LE
  misc_feature 90..1094: note = CDS
  misc_feature 1095..1321: note = RE
  misc_feature 1102..1316: note = bridgeRNA
gaatgaacgggacttcccctgcgcggtgacggcatctaggtgccaagattgaagtgtctgagttcaatctgataaccggaggggaagtcatggaacaggttactaccgtggggatcgacttagcaaagcgtgtcttcgctatgcatggggtggccggctcggggcgtgtggtgctgcgccgggtgctgcggcgcgagcagctgatggaggtgatggcaagtctgccgccttgcgtggttggaatggaggccggctcgggtgcccaccaatgggcgcggcgcttccaggagctggggcatacaccgaagctgatggcggcgaagttcgtctctgcgtaccgcaggaacggcaagaacgacggcaacgacgccgaggcgatctgcgaggcggtgagccggcccggcatgcgcttcgtgccggtgaagtcgctcgagcagcaggcgctgctctcgctgcaccgcgtgcgccaggggttcatcgccgagcgcacggcgacgatcaaccgccttcggggattgctcgccgagttcggcgtggtgctgccccagcgtagcgacacggtgcgccgtcaggcgtgcaaggcggccgaagacctgccagtgcttgcgcgccgcgcgatcgaagatctgctagtacatctgcgtacgctcgatgagcgcatcgcggcatacgaccgcgagctgcaagagcaggcacgccaatgcgagccggcccagcgcctgatgaagatccgcggcatcggcacgctcagtgcctcggctatcgtcgccactgtgggtaacgcgcgcgacttcaagagcggtcggcagttcgccgcctggctcggcctcacgccccgccagcattcctcgggcggcaagagcaggctagggcacatcaccaagcacggcgacgcttacctgcgaggcttgctcgtgcagggcgctcgctcggtactgcacacggcgcctcgacacaccgaccatatgagccagtgggtgcaggctatcgaatcgcgtcgaggctaccaccgggccctcgtcgccatcgcttccaagaacgcacgcatcgcctgggcgctgctcagcagaaacgaggtgctgcgcccagcataaacagctcttccgccgagaccgcaaacgctgatgtcgaatcggtcagaccggcgcccggagaacctgaaccactttatggcggcatccgatgccgactaacgtgcgaggaccgggcgtgcggctttcatcagggccagagcattcaatgctcacaaacaggccggttatagtgacgcagtccgacctcttcgcttcgtcagcattgctcaaccggggaagtccttata

SEQ ID NO: 10082 - DNA, 1399 bp, unidentified
  source 1..1399: mol_type = unassigned DNA; note = element_fd639f9
  misc_feature 1: note = core
  misc_feature 2..78: note = LE
  misc_feature 79..1104: note = CDS
  misc_feature 1105..1399: note = RE
  misc_feature 1165..1390: note = bridgeRNA
taatggaatggcctgctcccaccctattacgctgtgttggtgagaaatccacgcagcgagacgaggaggaaacagaccatgtctattgcaacgctcggcatcgatcttggcaagacctcgatgcacatcgtggggctggatgcgtccggcaagccggttcatcgcaagaagctcacccgcacggccctgattcgcttcctctccaacctggcaccgtgccgggtcgccatggagtcctgcgccggctcgcatgacatcgcccgcaaggccgatgccatgggacacgatgccgtgttgctccctgcccagttcgtccggccctataccaagggtcagaagaacgacaacagcgatgccgaggcgatcgccgaggcggccacccgaccaaccatgccgacggtgtcgatcaaggatgccacccaacaggaaatccagttcctgcaccgaactcggcaaggatggatcaagcagcgcacggaaacggccaaccgggtccgagcgatgttgctcgaattcagcatcacggttcccaagcggatcctgaatctgcgccgggcgttgcccggcatcctcgaggatgccgagaacgacctgcccgacggggtgcgccagttggtcgcggaccactggcaacaacttcaggatctggacgacaagattgccgacatcacgcagcgtgtcgaacggatcccggtccgggacgcccgggccgcccgcctgatgagcattccgggtatcgggccgatgatcgccaccgccatggtcgccgccgtcggggacggcacccagttcacccaggggcgaggtttgtcggcgtggctgggactggttccccagcagttcacgaccggcggcaagccgaggttgttggggatcagcaagcgaggtaaccggtacctgcgcaccttgctgatccacggcgcccgggccgtgctgcagcaggcgcaccggggcgacgatgcgttacgccgctggattcagcaggtcaacggccgagtgcatcggaacaaggcggccgtggcgctggccaacaagctcgcccgggttgcctgggcggtactgacccgaggcgagacgttccgggcgagcgccgcggcggcctgatccctgatcgcaaggagtccaaatgaaatgaccgatccgagacggatcggtcaccagacaaccagccaacgattgcaagcgtccgaacggatggcggaaacaggcaccggcccgtcgcgaacctggcagacacaatggctcggtgaagccggttttttaatcaggaacgacaggcgcggatttctccatcgaggcccggagcactgaaacgctccaacacgaggccggatagattgacgcaacctgattatccaccaccccaccgggggcttgcgatcggggagcaggccataga

SEQ ID NO: 10083 - DNA, 1552 bp, unidentified
  source 1..1552: mol_type = unassigned DNA; note = element_fd6bc44
  misc_feature 1: note = core
  misc_feature 2..408: note = LE
  misc_feature 409..1443: note = CDS
  misc_feature 1444..1552: note = RE
acgtataataaaaaccgtctcgaaaggggggtttttattatttctcctttcctcaaaaatggttgtacagcaggagtagctacctgcggtataatcagacaagtactgtggatctgtgcctatattattacagcaagactgtttagaggtgactcagaccgcagtgacttgtctgcattggtgattagttggttaacgcttgacgttttcatttgcgtgaatacatgaacaagccgcatatggagacagcggtgctaatctaaataaaggaggaaatacatgtactttgtaggaattgacatctctaagttcaaacacgactgcgccattcttgatgaactcggtaatagcatcgcaccctcatgatccttttctaatgaccgggagggtttttcacatctcaaggaagtgctggatggtctggaaagagaaaagaaaataggacttgagtctaccggtcactatgggcaaaatctgaagctgttcctcgaatccaacggcctcaccttcatggagtttaatccgcttctggtttccagatttgttcgcagaaaatcactcagaaatacgaaaaccgactccattgacgcacgcagcatcgcccattatgtgatgacggtagagtacaagccctatccgccatcattctaccacttggacaagctgaagtcactcacaaggttccgggatagcctggttcgccagcgcagccgacaactggtggatcttactaacgtgctggataagctgttccctgagttcaagccctttttcaaaggcagattctctgccacagctctgtacatccttgtgcattaccaaacgccggagaggatcgccaacatgaacgcacgctcttatgaatccctgcgcaagctttctcgcggaaggtttaccatgcgtcattttgttcaactcaaagccttggcaaaaaacacggtcggggtaccaaacgattatctccttgaccagatgaatatcctcctggaactttactcccagttggactctaaggtggatgaattggattctcaaatcaaagagtgcgttcgggggatcgatccgccctgcctgtctcttcttggtatcggagagttctctgttgctgtgatcatctctgagttcggggacttcagcaaatttcagagtccctcaaagatgctctcctttgccggcctggagccgggctatttccaatctggccagtccgagtttaccggccacatggtcaagcatggctcgtcccagctccgctatgccctaatgaactgctgtttgccccttattaccaatgagccggtttttgcagagtattacgccaagaaaagagcagaaggcaagccttaccgcgtagccctgacccatgttgcaaaaaaacttctctgggttatttacacaatgcagaccaagaacatccgttacgatccaaccatgatccgttaaaatgcagccattctttttcaagtcctacgccagagagtttggttttctgtgccctttttcttcccttaaaaatttcttcgcgaaagacttaacttcttagtagttggtc

SEQ ID NO: 10084 - DNA, 1456 bp, unidentified
  source 1..1456: mol_type = unassigned DNA; note = element_fd6d265
  misc_feature 1..2: note = core
  misc_feature 3..253: note = LE
  misc_feature 254..1405: note = CDS
  misc_feature 1406..1456: note = RE
  misc_feature 37..239: note = bridgeRNA
ctcatatctttgtttctaatttaaatataataaaaatacctttgattaataattaacaataaacaaaacaaagttgccaaattgtgctacggctagatacgtttttatgacgatattgactaacagggaaatcaactttgtttcattacattcaagtcacaataagtacttaagcgcttgatttcgtattaagacgctgtataaaaatgagctaagaccagtgtgatatttgtttattaaaaaacaataaattatgaccataaagtattctgtcgggcttgatatttcaagtaaaaaagtaaacggaagtattagtttaattgatgaaaatcaaaaagtcactgtaaagtcaagtattgtgttctacaacactttaaaaggattttcggagttgtcactttggattaaaaagtggcatatcaaacccgaagttcctctggttatttgtatggaggctacaggtgtttatcacgagaactgcgctctttatttatttgaaaagggatataatgtttctataattctccctaacaaagccaagcactatttaatctctatgggattgaagtccaaaaacgattctattgatgcaaaaggattgtcaaagatgggtgccgaacagtgccttgatttatggcaaccttcaggtaaatatttttatgaactccgccaatatacccgtcaacaccagaatttgcaagaacaaaaaacagtcattaacaatcaattacatgccttagaatttggtatgtatgatgtcaaacccgtagtgaagcaactcaaaaaagtaattcaactctttgacaaacaaatcaaagagctagaaaaaattataaaaaaacatttggaaagtgatgaaatcgttaaccaaaaagtagctaatatttgccaaataaaagggattggaatcttaaccatagccactattttagcagaaaccaatggttttgaattgtttaaaaattacaaacaattggttagctatgcaggctttgatgtagtagaacgtgagtcgggaagtagtgttacagggaaaaccaggatttcgaaaaaagggaattcacatattcgtcgggcactatttatgcctgcatttacagctgtaaagtataaagaaccatcgttttttggactttatgaacgaacctatgctaaacacgccatcaaaatgaaaagttatgtagcggttcaaaaaaagttactcacaactatttatcacctatggaaaaaaagcgaagcatataatcccaactacatttttattatccaagaaaaggaacaggagctttcttctttgctcggctttgaaaaagccgtatcaacacaaaaaaatagccccaatcaagttgaggctatacaaggtaaacatccagcgaaaaatcacagtaggcttcctctttgctaatgcaaatttagcaaaaataatgtcaagaaaatttgttttttaaaatagtac

SEQ ID NO: 10085 - DNA, 1370 bp, unidentified
  source 1..1370: mol_type = unassigned DNA; note = element_fd710e5
  misc_feature 1..2: note = core
  misc_feature 3..78: note = LE
  misc_feature 79..1104: note = CDS
  misc_feature 1105..1370: note = RE
  misc_feature 1081..1357: note = bridgeRNA
cgatggggtggacgcccccgacggcatcgcgatgtgccaaggttgcagtgtcgaagaaccgctacagaggaggcgtccatgacagaagttactatgatcggcctggatctggcaaagaatgtctttcaggtgcacggaatgcgaccggatgggagcgtcgcgtttcgtgtgaagctgtcgcggatcaaggttctcacgtttttcgcagcgcagccgatttgcacggtggcgatggaagcttgcgccagcgcccattactggggtcgtgagttgagcgggcttggccatgatgtgaagttgattccgccgatctatgtgaagccattcgtgaaacggcaaaagaacgacatggctgatgcggaggctatcgccgaggcggcctcgcgtccaacgatgcggttcgtcgccgtgaagagcgaagagaagcaagcggcgggaatggcattccggacccgagatctgttcgttcgccagaagacccagacgatcaatgcactgcgcggccacctggctgagtatggcgtcgtcgcgccgaaaggcccggcgcatcttggccggctgatccgagctgtggaggaggtcgaaagcggcttgccagacccggtcgtcgcactcgcccggatgctgctcgatcagattgcgatgttacaggccaagatagacgagctcgagaaagagatccggcatcaggtacggcgcgacgatgtcacggcgcgtctgatgacgattcccgggatcgggccgatcagtgccgcagcgatgatggcgttcgcgcctccgcccgagagctttgcgaagggccgcgatttcgcagcctggatgggactgacgcccagacaacattcctctggcggcaaagagcggttggggcgcacttcgaagatgggtcagcgtgatctgcggcgattgctgatcaccggcgcgatggctgtggttcgatgggcgacgcgtcgcggggcgccggaaggcagctggctttggaggatgctgcagagaaagccacgcatgctcgtcgcggtggcgctggccaaccgcatggcgcggatcgcctgggcgctgatggcgaagggcggcgtgtacaaggatccgtcagtggccgcgtgaggtggccgctgttcgggtgacgtcggggatgtgagcaggtcggaggacagtaagggcaaacggtcaacgagaccgggtcgggaaaaccagcaaccggacggagcgccttcgagcgcgcgtaaccgatatggacccgatctgcgcatctccatacaggcccgcggcgtttgtaaggccgcatcacgaggccgaacacacgtcagcacctgaccacatgcccagatttgtccaaagaaaaagcttgcatccgaaggggcgtccacaca

SEQ ID NO: 10086 - DNA, 1807 bp, unidentified
  source 1..1807: mol_type = unassigned DNA; note = element_fd7387a
  misc_feature 1: note = core
  misc_feature 2..358: note = LE
  misc_feature 359..1378: note = CDS
  misc_feature 1379..1807: note = RE
  misc_feature 112..289: note = bridgeRNA
tagtataataatggtgtagtcaatcaagactacttggttaataagtttctataaatcagataacagaagaagggattcctccttcatcagatgttatccataataattatcatgtctgacggttcctgatagacactagataaaacataaggtattatctcttaggataggacaaagaatgttcgcctccttgggaagtcacttctgtgactgatacctacaagaaagtcaattagtccattcgacagggttttatgttttagctggttgggagccggaaggcaatacccgaataacgcgctaggttgtgtacctgccagattggaaatggattcctatcagaaaggagctatcgctcatgtcaaacaaagttatttttaatcttgatgaattattcatctctgttggtattgatgtcggtgctgacttctcatggatgtctatcgcacttccaaaccaacaattcgtaggaaaaccttacaaaatcctgcataacagtattgattcccttacaaccgctgtttctaaaataaaagaagcagaagagttgtattctttggaaagtcgcattttcctcgaatccacgggaatttatcattacccactcttctgctatcttcgtgataagggttttaactgctccgttattaatcctatcatcactaagaatagcacaaacatcaacatccgaaaagtgcataatgatcgttttgattcaaaaaaagctgctttggttggcttgaaaccggatttaaaggtttcacttatgccatcagatcttgccctaaactgccgtaacctatgccgtgaatactacgatttaatggataatcgcagtgcctatgtgaataagcttcagggtgaattacgcatggcgtttccacagtatcttagcatcttttccaaggttacaatcaacacttctcttacactgttggagacttatacatctccctctgcttttcttgaagcagacaagcaagagattattgatatcatcaaatcaacagctcgctttgggcttacatatgctcaaaataagtataatgccataattcaggcggcaactgatgcaaatcagtttggttacatcatagacagcaacatcaagcgtattcgcctttatatcagcttcatacgtaaatatgatgaagaaatcaacaacattcttgaatcgctccatgagcttgttgatgctaatgaagatgccgactttgtcaagcagattcatttgattgaaacattcaaaggtgctggtttcttgtctgctgtatccatcatgggtgagattggtgacttttcagcattttcaaaaccaaaacaacttttcgtttatttcggtcttgatccggcagtaaaacaatccggaaaaatttgaaggtaccaaagttcaaatgtctaagcgtggttctgccatagccagacgtgttattcacacgttaaccttacaaagcattagtatctcccgtaatggagaagctaaaaatccagttcttcgtgagtactacctcaagaaatgtgactcaaaaccaaagctcgtagcaatgggagctgtttcacataaggtatgcaatatgatatttgcaatactcagagacaacaagtcttttgaaatcatcactccacaggagcatatcaaacaatacaatgcttccaaatgcgacatggctgcataaaatactgtacatccaacgaatcaatatctttcaaaagaacgatattttcaccaagggggacgtctacccttttttagccaaaaaataagagcaattttttcatttaactattgacatttattagctggact

SEQ ID NO: 10087 - DNA, 1603 bp, unidentified
  source 1..1603: mol_type = unassigned DNA; note = element_fd765b7
  misc_feature 1..2: note = core
  misc_feature 3..91: note = LE
  misc_feature 92..1276: note = CDS
  misc_feature 1277..1603: note = RE
  misc_feature 1347..1559: note = bridgeRNA
agacataatgttttgacctgtcctgcctcaagaacgtggattatgttaggtgagattcaccaacacctagccacaattgaggaggacaggcatgaagaatactaacgcaatcaacggaaaagcgagagagatctttgagaatgaagcaccggagtatccggcatacgtagggctcgatgtccataaggagactatcgtggcggcgatcgcccgggagggtcggggaaagccggagtcgcttggaacgatagcgaacaaaccgaaggaggtggcgaagcttgtcgagcggctgagccgggagttcgggggagaggttctgctgtactgctacgaggcaggtccgtgcggatacgttctgtaccgtcagctggtggagatggggcaggaatgccatgttgtggcaccgtcgaagatccctaagaagcccggcgacaggataaagacggaccggcgggatgcgaggaagctggcccggctattgaggagcggggatcttacggcggtatgggtgccgggagaggagcaggaggcgatgcgggacctggcgcgggcgcggaacgacttcaagatccaggagcggaaggcgcgccagcaactgagcgctttcatgctccgtcacgggcattcgtggcccaagggaaagacgcggtggacgaagggccacttcgaatggatggagacgcgcaagttccctcacgaatggcagtatgttgtgcttcagggatacatcagagcggtgaatgcggcggagaagagggtggctgacatcacggcggaaatgagcatggcgctgccgcactggtcgatggctccggtggtctactcgctgatggcgttcaggggtatcgacatggtcagcgcgatggggctcctggcagaactcggggatctgacccgcttcgactcgccgaagcaactgatgggctttctggggcttgtgcccagcatacacgcctccggcccgacaaagcgcgagggtgagataacgaagaccggcaactcgagggcccggcgcctgctggtcgaagccgcctgggcgtaccgccatccggcgcgcatgacggctcatttgagacgaaaggcgaagaacgcgtccgaagaagccagggagatatcctggaaggcccagaaacgtttgtgcggaagataccggtcgctggtctactcgggcaagaacaagaaccagaccacggtggcagtcgccagggaactctcgggctttatctgggacgtgacacgggtcgagatggccaggtttgaaacccccgcccgctagcgggccggtaacgcatcgcaaagaagtatccgacaagaggaaaagaagttaaccacagaagaaaaggaggtcagaggcgctccaggtcagggcattcgcagacagatcttctgaagaatcccggtcacggctagaacggcttccccgaaaggggaatgatccacgcttttagataagaggaaagcttcgcgacgaagacaagtcaggtaggtaaccaatccacgtatatcagcatgatccatcgtcgcttaccgtccgcaatgccctgacctcaggcgcttctgacaaacgagaatatgtagaggggttgacaggtcaaaacatatc

SEQ ID NO: 10088 - DNA, 1491 bp, unidentified
  source 1..1491: mol_type = unassigned DNA; note = element_fd767ff
  misc_feature 1..2: note = core
  misc_feature 3..302: note = LE
  misc_feature 303..1463: note = CDS
  misc_feature 1464..1491: note = RE
ctcctcctcctacggggcaatccacgcaaaacaagagaacgaataaaaccaagtattacaagagaaaaggaaataaacaagtaaggagaaaaacaacataagctcatagaaaacatggggataaaaccccatctacaaggctagctgtgaagcccctagaacgatctaacaagaggggataaaaacccccgagtaggaggttgtaacaaaatactctaggggctgaaacacttaacactatgcaaagaaaacaaggtattatgagaacaaaaaatatctcgagaaacgcgtaatacacaagcatggaattaaaagttacaaacaaggccttcgcaattgatatttcacaaagcaaactaacagcagcaaagggagaactagtagtagaacaagaaaaatcagcagtatacgtcaaggaggtaaaggaattcaaccacgacaacgagggaatagaggaactaattaaattcctaggagaatataaggaaggaataatagaggcaactggaatatattacttctacctacacgaaaaactaacggaaaaaggatacaaggtaacagtaataaacccactacacctaacagaaatactagggaaaaagacagacaaactcgacgcacaaaggttactagtagcacacatgaccggagtaatcaagggatcatacataccaacaggagaaataatggagctaagagaactaacgagatatagggaaagcttagtagagaagacaacacaagtaaagaacgagataaggaaaatattagaattcgcgggatataaaatacaaccattcgacaagaagggaagaaaactacttgaaaagctagtaaagggggagggactaagcaaggaagagaaggaggaactaaaagaaaaactagggagaaacttaaacgacgcggaaaaactagcgttaaaacaattagttgaactgttaaaaaacttggagaaaatgattaaggaggttgaggatatgataatttccaagattccaaaaccagtaattgagttgagtaagatccccgggattggtttgattagtgctgcaactatttacgctgagttcggtgatgtttcccgtttttccagttctaaggctgctagggcttatgcaagctttgcacccaaaactaagcagagtggtgatagcgagtctcactccggtatgattaggggtaataagtatttgcgtagagctctctacttggttgccaaggttgctaggggtcttgagccttttaaagggtattatgagaggcttattgctagggggaagagtgttactcaagctacttgtgctcttgccggaaagcttgcaagcatttgttatcatgttataaaggacggtgtttacaagggagttgtcaagaagagttttaggattcctaggggtaaggaagttaatgtcaaggacttcgacgtgggagacgcgctagactcgttatccccataggtttgttagaggcgtcagcatgtagtgc

SEQ ID NO: 10089 - DNA, 1223 bp, unidentified
  source 1..1223: mol_type = unassigned DNA; note = element_fd7dfca
  misc_feature 1..2: note = core
  misc_feature 3..209: note = LE
  misc_feature 210..1124: note = CDS
  misc_feature 1125..1223: note = RE
  misc_feature 12..191: note = bridgeRNA
cttatctgagcggaatctggcagtttaggtgtcgagagccgacgtgggccgccgttcgagcctggatctgagcgatcgtcttggagcaaggcgcccacgccggaatctcccttggtccgcccgaacagttgctggagctgacactcgaagcgataagactgggcaagcgggggagctctcgacctttccagactatacggagtcgggcgatgaacgggatcgggattgatgtaagcaagcgccagctggatgtcggcacaaccaacagagagaccctgcaggtcaccaatagcccctctggctttgctgaattggatgcttggctgaagaaacacccgtcgaaccagatcgtgttggaggccaccggtggctatgagcagcccgtgctggacttcctgcacagggccggtcatcgggtggtccgggccaatgccctgcgggcaaggaaactggcgcaggggcttggccaggcggccaagaccgaccgcctggatgcctatgcgttggcgcagatggccgcgctggtggagctgccggcctaccagccgctggggccttggcagcggaaactgcgggaatttgtgcgggcacgtcgacaggtgatgcaggccctgaccgtagcgcgacagcagcaggaaatggtcggtgatcgtgaactgcgccgactcttgcaggccaacatcacacgcttgcagacactggccgaacgcctgggaaaacagattgccgagcaggtcgctcaacagcccgagctcacggttctgaagtcgatgaagggcgtggggccggtgctgcaggcggtgctggccagctacctgcctgagctggggcatatcagtggaaaggccatcgcaagcctggtgggcgtggcgccgatgtcccatgacagcgggacgatgcgtgggaaacgaagcacccacggcggtcgagccgagatccgtcaggtgctttacatggccagcatgtcggccatgcagcatgaacctcgattgcgggacttttaccggtcgctgcgggcccggggcaaggaggccaaagtggccatcgtggcggtaatgcgaaagatgctggtgatcctcaacgcccgcgtgcgcgacgctcaacgcggatcaacccccgcctgaagcgcgccggggcgcatatccaaacgctgccggccagcggccggcactaccgtgcccgtctgctggaggtccgcccccccccctccagcaacacagttg

SEQ ID NO: 10090 - DNA, 1426 bp, unidentified
  source 1..1426: mol_type = unassigned DNA; note = element_fd9649a
  misc_feature 1: note = core
  misc_feature 2..128: note = LE
  misc_feature 129..1148: note = CDS
  misc_feature 1149..1426: note = RE
  misc_feature 1188..1426: note = bridgeRNA
aattgatatgaacgcgtcccaccccgtgaccgagtgagcaaaggaaggtggatcctcacgggccaacggcatcgatgtgcccaaagtggaaaatacggaattttccaaagcgaccggaggatcctgtgatgaatcgtacagcagtcggtgtggacatcgcgaaaaacgtgttccaggtgcattacgtcgatcaggaaacgggtgagcttgtgaacaagccgatcaagcgggaaaagttcctcgagcacttcgcgaaccgggcaccctgcgtgatcgggatggaagcgtgcggtggagcgcaccactgggcccggcaactgatgaagatgggtcacgaggtgaagctgatgccggcagagttcgtgaaggcgttcaacatacgtaacaagaacgatgcggcggatgccaaggcgatctggctggcagtgcagcagccaagcaaggcggtcgcgataaaaaccgagatgcagcaagcgatgctggggctacaccgtatgaggcagcaattgatcaagttccgaacgatgcagatcaataatctgcgaggactgctgatggagtacggcgaggtgatgagcaagggccgggccaagctggacaaggagataccgttggtacttgaacggatctctgagcgcctgcccgcggtggtcattgatacgcttcgcgagcagtggaacggactggcaaagctggacgagcaggtagcgcagatcgagcgccgcatgcgcgagtggaagaaggaagacatgtcggtgaaagccattggcgagattcccggcgtcggcctactgacggcaacggcggcagttgcaatgatgggtgatccgaaagcgttcagttctgggcgggagttcgccgcgtgggtcgggatcgtaccgaagcagacaggctcgggtggcaaggtaaacctgcacggcatatcgaagcgcggcgacacgtatctccgcacactgctgatccacggtgcgcgtagcgtgattgagaacgcaaaggaacccggtgaatgggtcgagcagatgaagaaacggcggccgaagaatgtggtgatcgtcgcattggccaacaagatcgcgcggacgatctgggccgtgctcgcccatgaccggccgtaccagaagtgctacgtgagcgtgaagccggcttaggcggatcattcgcggtagaagatcaacgtttaacacagggtgaacgtcgaaaggttgcgcagctatcgagtgtgatgacgagcaggtaggacctgggacttgctaaacctgaattcaaccgagagctccgagctcgcgaggagaatgaggcgcgagtcagcggatttcataggggccagcagcggcaacaccggctgcaagaaggccggatatagagctgcagcccatcctgtctatcaaaacacaagacaactgttgcaaacgggacgcgttcatat

SEQ ID NO: 10091 - DNA, 1386 bp, unidentified
  source 1..1386: mol_type = unassigned DNA; note = element_fd9abdd
  misc_feature 1..2: note = core
  misc_feature 3..82: note = LE
  misc_feature 83..1105: note = CDS
  misc_feature 1106..1386: note = RE
  misc_feature 1126..1375: note = bridgeRNA
tgatgatgtggacggccccgcctagggggcatctaagtgccgaaaggtggtcgctggagcgccaccaagagggaggccgtccatgcggaaatatatccgaattggcgtcgacattgccaagaattgctttcaagtccacgcgctggagagcgaagattgttccgccacgaaacgcagactgagccgttcggggatcgtcaaattcctcgccgaggtcgagccgtgcgcgatcggcatggaggcttgcggctcggcgcattattgggcgcggcggtttcgggcgatgggccacgaggtgaaactcacgcctccgatttacgtgaaaccctatgtcaagcgcggcaagaacgacgcggcggatgcggcggcgatctgcgaggcgatgtctcggccaaacatgcgtttcgtcgccgtcaagagcgaggaccaacaggccacgctgatggcgcacaagacccgtgaactgctgatcaagcagcgcacgatgagcgtgaacgccttacggggtcatctggcggagttcggtgtcatcgccgccaaggggatcagccacgtcgaggaactcctcgagagagccgccgccgccgaccttccggcgatggtccaggcgacgctgggggttctgcttgcgcaattgcggtctctcgacgcggcgatcgacgagctcgagcgcgcgatcgtcgccgaccatcgacgcgatccggtcagccggctggcggcgagcgtccccggcgtcggcgcgctcgccgcttcggcgattctggccagcgcgccagatccgcgggccttcaaatccggccgcgatttcgccgcctggcttggcgcgacgcccaagcagaattcgaccggcggcaaggagaaattcgggtcgataaccaagcagggcaatcggtatatccgacggcttctggtgttgggcgccatctcggtcttgcgggcggcgccaaagcgcaagggcgcgttgtgcgactggctggccgcgctcagagcgcgcaaaccggccaaggtcgtggcggtggcgttggccaacaagctcgcccggattgtctgggcgatcatcaccacgggcgaggccttccgcacctccatctacgccaaggcctgatcccaatcgggggcaacgcacttgaaaggagaacgcaggctcaagagtttggcgagcgcgacgacgacgtgatgaacgacacggcgagacgatcgaagaccatcggacactccgcaatgggtcaggagcccaaagctcgcccccttgatcgggagccgagggtcgtcggacttcatcagggccagcggacccagtccgcgccaacaggccagacatatgaccgaaggccgccagccgttcaccgccgaaataaaaacgcttgccaaggggccgtccacata

SEQ ID NO: 10092 - DNA, 1261 bp, unidentified
  source 1..1261: mol_type = unassigned DNA; note = element_fd9cda8
  misc_feature 1..3: note = core
  misc_feature 4..221: note = LE
  misc_feature 222..1235: note = CDS
  misc_feature 1236..1261: note = RE
  misc_feature 24..200: note = bridgeRNA
catataaaggagttgtccttttcaaatcatagaaaagggtaagctggagtgaggagaagagactaagccgtcaaaagccgttgagcttctcgggatgccatgatctcttctcactctggcgatttaagagcttcttttaacaggtatcgtcaaatcgactttaacgaatatgataaagccaaaaatcgccctccagccattactgagggtaatagattcccatgagaaaagcatccactgttaaggttttcagagactgtttgggtattggtattgatgtgtccaaagctgaactggtcgttgttgggctcaccaccagcgagccgtacatcaaacggataagtaatcgactgacggccgtcaaagcctttgttcgggctttgaaaaaatcaggctatcgcggcaaaatgatctgtgaatcgacgggtcattatcatttgaagctggcgctggcgtgccatgagacaggcatggatatcatcgtgctcaatccgttgcagtcaagcaaacatagcaaggccaatgtacgtaagaccaaaacagatccggcagatggattgatgttggccagcatgtgcatgacggagccaaacctgccaaagccaactcgactaactgtatctaaagcattgatccgtttgaagatggggcagttggcctcgattgaaaagcaactgcagaagtctcagctcagcctgaaccaatatgaagaaacctatgccgcactggggcttgagttaagtgagttgcaactgcgcttgcgtgatcacttccagttgctcaagcaactgcgtaaacagatggaaaaagagttagaagaactgttggtggaaaacatggcggaccgtaagagctttacccggttgtgtaagttccccggttactctgatgtggtcgctggcctcgtaggccaattagaccgacaggtcaaaggacccaattcgtgggtggcctatgtgggtgtggatgtcagtgtacaggaaagtggaacctggaaaggacgtggtaaattgaccaaacgaggcaatgcctatctacgaaaaaggttataccaggccgcctggggtgcctgtatgaattatgactatgtaagagcctattacgatgagctcaaagcaaagggccgtaaccacgtggaggctaactgcatcatctccagaaagctattgcgtattgcttatcatgttgtggttaatgaaaaggaatatgatccaagaatagcattctcaagctaaaaaagttgacacgaccctttaacagg

SEQ ID NO: 10093 - DNA, 1441 bp, unidentified
  source 1..1441: mol_type = unassigned DNA; note = element_fdac6f9
  misc_feature 1: note = core
  misc_feature 2..266: note = LE
  misc_feature 267..1232: note = CDS
  misc_feature 1233..1441: note = RE
  misc_feature 6..209: note = bridgeRNA
tcgtattattaggtcaaccagagtttactggttggtcttttttattggttgctttacgatggtggtagccgggagaacgtgacagcccctgggggggaaccccgtgaaaaaaaacagttctctcactatcgccttctaccatgtttgagctggttgaggcaaatgacctcgtataacaagcatttttaaagcgaaatgttccctatggccgagatcaattgattttgcattcaccaaaaggatttgaacgattgtttcaaactttaatggaattagaagttaagacaaatcggaagcccgttgttatcttggaaccaacagggcactaccatcgtgtccttgttaactatttacaaagcgtaggatatgagaccattctcgttaatcccctgcaggcacaacgcgctcgaagaacgaatctacgtaaagtgaagacggatgcatcagacgcttggcatctgggggatttatactaccaggaggagagttggcttgttcatccgagtcctaaagaatcgttaatggacttacagttcataactagacaacacgagtttattactagtctttaccttcaagcgaagttgaatacgcggacgctggtcgatcaggtatttccaagctatgaaggtgtatttaaagatctattctcaaaaacgtcattaaacttactagaaatgtgtctctcgccaaaaggcattgaggagcgagaccataatacttgggctgcggtcgtaagagaatccactaaagctgctcgttctgaagattggatgaaccgtaagattgagcatttaaacgtagctataaaggataatcctgttatgcatgtcccatatggattagaaatggctctacgcagtatgctaacggttatccgtgacttgcaaaaccaactagctgaactagaaaaaatcatattagaactgtctgaaacgatagcagaagttcaacttttagaatccattccaggagtaggtacaaagctggcaacctctattgctgctgaaattggtgatgcttcgcagtttcggcatccgaagcaactagtagcttatgctggccttgatcccagtgtctttagttcaggcaagtttgtagcaacgcaaaaccgaataacaaaacgtggctccaaacgattaagacgtgcagtttatttagcagtaacctgtggtctacgaggagatctaaatctccgtatcagagagtactatgacaagaaaaaaaagtgaagggaagccccataaagtagctgtgattgcttgcgccaacaagttattacatcacatctacgctatgctcaaaaaaggcaaccctacactttatagtcccgaaatccataaacttccatttatatggaggtttatttcgtatgctttcttacagtataacaaatttctttcgcttcaaatagcttgacttgacaaaccattagctggtt

SEQ ID NO: 10094 - DNA, 1412 bp, unidentified
  source 1..1412: mol_type = unassigned DNA; note = element_fdb4299
  misc_feature 1: note = core
  misc_feature 2..289: note = LE
  misc_feature 290..1105: note = CDS
  misc_feature 1106..1412: note = RE
  misc_feature 1182..1403: note = bridgeRNA
taatgagatggtccgccgcttgtttttcatccccagcaggtgatcgctgggagcaagctgtgacaggaggatcatcgctatgcagatacattcgattggcatcgacctgggcaagacgacgtttcaccttgtggcgttgggtgcttcgggcaaggtgctggtgaagaagaagtttactcagaagcagttgctcgcttacaccgccaacctgcagacttagctgatcggcctggaagcttgctcgggcgctcacttcctcggccgggcactgcgcaagcagggccttgaggtgcgactgatcgcagcgcagttcgtgaagccttttgtgaagtcgaacaagaacgacttcatcgatgccgaggcgattgctgaagccgttgagcgcaagaacatgcgtttcgtaccgatcaagaccgatgaccagttggacctgcaagcgatccaccgcgttcgcgaccggctggtgtcccggcgtacagccgtgatcaaccagatccgtgcatttctgctggaacgcggcctggtattcgcgaagaggccagcccaactcaaggccgcgatggcagacgtccgggagaacgcagaagctgacctcacccccatgatgcgcaacctcatcaacgttctctgggaggagtggaagatcgtcgatcagcagatcgaggagcttggcgatgcgttggaacggatctccgctgcggatgccggctgcacgcgcatccggaagatcccaggcatcggaccggttgtcgctacagcgatcgttgcggcgatcggcaacggtgctgctttccgtaagggccgggagttcgctgcatggctcggcatcgtgccacggcagtactcaaccggaggccaggccaggctgctgggcatcagcaagcgcggtaacgtgtacctccgcaagatactcattcatggcgcccgagcagccgtgctgcggatcaagcgcgatagagcacccatcggtgcgtggctcgatcggctcgatgccagggctcacaagaacatcgtcatcgtggccatggcgaacaagattgctcggatcgcctgggcagtgctgtcgagcggcaacgaatacaggccagcagctgtgccagcataacgggcgcggaaaagacgccttcggcctggaagcgctacgcgctcccactttcccgcaccacgacgacgaacaagctctccaccgaagtctgcacagggtcagcaaggacgaaagaacagtcacaacggtgtatccacagcttggttccgacaatgggcttcaacgtccgatcggcttataaggatggatacgcgcgcagctcatcatggccaggagaaacgatctccacataaaggccgaatacatttgcgcagacttgtcttctcgaccaaacttccccccttgcagtcgcgcggcggaccataca

SEQ ID NO: 10095 - DNA, 1592 bp, unidentified
  source 1..1592: mol_type = unassigned DNA; note = element_fdc226a
  misc_feature 1..3: note = core
  misc_feature 4..248: note = LE
  misc_feature 249..1229: note = CDS
  misc_feature 1230..1592: note = RE
  misc_feature 8..226: note = bridgeRNA
gttcgtattataaggttagccagatatttctggttgacctttttttatatcgatatatgattgcggtagccggggtagaacgtaagcacccgtggggctattgatcccgtcaactaaacagttcgccccctacttgtagaaacatgattgaggctggttgggactctgatctcgtataacaagcgaagctatgatactacatggaggaataggggttaccggttaattgtatgacaaggaggaaaataatgatgaatccagtaattggtctggatgtggcaaaaggcgaaagtcaggttcaagcattcttagataaaaaacaaccgtataaaaagagctttaaagtagcacacacactggaagggctgacaattcttttagagtttattagagaaatagaagtggcttctggagaaaggccccccattgttttggaatccactggccactatcatacaccagttgtccaatttttcgaagacagaggttatttaataatcatggttaatccactcgtttcgtatcgagcaaaaagttccagtttacgtaaagtaaagacagatatcatagacgctcgtcatctctgcgagatgttttataaagaggacttagagccttataaacagcgaggaatccagctcttaaatttacgtcatcttacaagacaacatgaaaatattacaggtatgtatgtacaaactaaactacaattccaatccgttttagatcaagtatttcctgaatactgtggggtctttggagatctttattcagatgtctccttactgaccttacaagcatttcctacttctgaggaagtgattgcaacacgtgaagaaacagtcgccaaaaaaataaaggaattctgtaaaagtcgttctcaaaaatgggcaaacagtcagtcagaaaagttaaaggctgccgcagatcgcaacccattccagaaaaccttatacaatagtcttatcttaagcataaatatgtatattaagatgcttctagaatataaaaaacatctatcagatctggaaagagagatagatgctttagcaaaaagcatggaagaatataagattctccaatccatccccggtattggtgagaaaatcgcagcaacgattatttcggagattggggagatcgatcggtttaatcatcctaaaaagttagttgcctttgcaggaattgatccaagtgtttttgaatcggattaccaaaagaggttctagtagactacgacatgccttatatatggccgttaaaagtgccattcgtgatagtcgcaagaagaaaacgacagatgaactcattcctcgaaataagaggttaagggagttttatgataagaaacgtgaagaaggaaagccctttaaagtagctgtaatagcatgtgcaaataagcttttacattggatttatgcacttttaaaaaacaaatcatttttccaagatcttacctagttttaaaatataactaaaaagcctaaacctttccaaaagcagaaaattgaaaggttatttggcatgcacaattttagtatagcatgaactaattttttttttattaataaatattgacaaactattggctg

SEQ ID NO: 10096 - DNA, 1369 bp, unidentified
  source 1..1369: mol_type = unassigned DNA; note = element_fdc52f0
  misc_feature 1..2: note = core
  misc_feature 3..212: note = LE
  misc_feature 213..1181: note = CDS
  misc_feature 1182..1369: note = RE
  misc_feature 41..218: note = bridgeRNA
cttgtattagcgcgctcgcctatagtggcgccgttccgtgaggaatggcccggcccgggtggccacccgagccgggtcgccgttcgatcggatcgatacccatcgaagccttgagggctgtctgacgtagcaagatcgcgatcggcacttcatcgggacccgaatggttgaacgaacttgaggttcgcatcacaagggagggatcgacgaagatgaccaaacataccacgatcagtgccgggatcgataccggcaaacgcaagctcgacgtggcgattgaaggccgccacgagccgttgcaggtggagaacgcgccggaaggtcacgaggttctggtggcgtggcttcgacgtcaccgcgtcaaacgcgtgggcatcgaggcgagcggcggttacgaacagcctgtcgtcgccgagctgcggcgcaagcggtttgtcgtcgtggtgttccagccggcgcaggtccgggcctatgcaaaattccacttgcagcgagccaagaacgacaagatcgatgccgctctgatcgcagcctgcactgcggcagtgcgcaagatccatgccgcacccgatcctcggttgctgccattcgcggagcagctgaccatgatcgatcaggtcaacgaggatattgcacgcctcaagaaccggaccgagagctgccgcaatgcgctgttcaggaagctctggcaggaggatatcgtccgcctccagcagcgagagaaggcagagctcaaggctctggtcgccgcgatccgcaagcaccccgacctcgccaggaggcttgcattgatcaacagcgtagacggcatcggactgccgaccgccgtggcgatcctggtgcgtctgccggagatcggccggatcacaagagagcaggctgtcgctctcgccggccttgcgccctatgacgacgacagcggcgagcaggtcggtgctcgtcatatcgagggcggtcgaaagcggctgcgtcgcgccctttatacggcttcactggctgcatcgtttcgctggaaccggcagctcattcaactttaccagcgcctgaccgcggccggaaaggaacacaagcgcgcgctcgttgcctgcgccaggaaaatgctcatcttcgctaacaccgtggttgctcgcggaacgccgtggcgcgaccaaccgcctgagagaacattgtccgtttcttagttcgaccggccactcgtttcttcgtcccgacctgcgactccccatgacgtcgcgcgcagcggccgtcaaggatggccgtcgctcgccacagcgtcacatctcgctgcagccaggcccacgccttgacggccgggagcacggcgtcatcatggttcggcaggacgatcagtggtcgctcttaatggttg

SEQ ID NO: 10097 - DNA, 1522 bp, unidentified
  source 1..1522: mol_type = unassigned DNA; note = element_fdc73d6
  misc_feature 1..3: note = core
  misc_feature 4..245: note = LE
  misc_feature 246..1196: note = CDS
  misc_feature 1197..1522: note = RE
  misc_feature 3..219: note = bridgeRNA
cttatattataattagcgcagttagctactgccaaagcccaagtggtatacttggaataagccactgtggattagttcatttcctccaatcgcttgacgatttccgaaaggctctaaccacagcttttgtttcaattggtaatgagtttgataacgcatagacgtttgatctcgtctaaggtaacaaggcaaaaaattcgtggataaccaagtagacttgaaatactatatctggaggtactcccatgctttatgtgggcattgatatcgctaaaaataaacacgatgttacagccttgaatgttccaggaaaaactgttcttaaaccactcactttttcaaataataaagctggttttgaactcttagatctgtctcttcgacagctcaaccaagactgtctcatcgctcttgaaaataccggacattatgcctttaatctactgaacttcctgcatgaacaaggatataaagtttacacctacactcctttgctcatcaaggaatttgccaaatcattatcacttcgcaagactaaaacgaataagaaagacgctcatggcatcgctcttaaacttctttctgaccccaatcgtgaacaatttcaacacgataatcggcaagtagaactaaaaatactggctagacatattcatcgtctcaagaaaaaacagtctgattggaaagtacaatacactcgttgtcttgatatcatctttcctgagttggataaaatcgttggaaagcattcagaatatacctaccaactcttgacacgctaccctaatcctcagaaaaggcttgaggcaggatttgataagctgatagaaattaagcgattgaccgcttctaaaattcaggatatcctctcagtcgcacctcgttctatcggaacaacatctcctgctcgtgaattcgaaatcatcgaaatcatcaaacattacaagaggctcattgacaaggcggaaacatgtgtcaatgacttgatggctgagttcaactcggtcatcacgacgggtactgggattggggatcgtttaggggcggtcattttagctgagattcgaaatattcatgcctttgataatcctgctcaattacaagctttcgctggactggattcttctatttatcagtcaggtcagattgatttagcaggaagaatggtcaaacggagttcccctcatctgcggtaggtactcatacaagctgccaaagcatgccctcgcttttcgcctgcttttaaggcctatcttaagactaaattagaacaaggaaaacattacaatgtagccatcatccaccttgcaaaaaaacttatccgaaccctgttttatatcctaaaaaagagctgccatttgacgaacaaaaagtgatgtaatttctgaaattaacacaggattacctttgaaaaaatggactttttcaagggctttttgccgtgctctaaaatcatcgccaaatcatcaaattgaaataagaaatagtttagataaaactattgacttttcttatagtttgt

SEQ ID NO: 10098 - DNA, 1609 bp, unidentified
  source 1..1609: mol_type = unassigned DNA; note = element_fdcfd30
  misc_feature 1..2: note = core
  misc_feature 3..277: note = LE
  misc_feature 278..1309: note = CDS
  misc_feature 1310..1609: note = RE
  misc_feature 12..297: note = bridgeRNA
ctattacaataaatttggacaggaaagccagacctttttcatccagctttccttccatctcgtgcctaaactacaataagaggagcaactggctgaccttagcctccttgggcttttacgtccgtcggaaagactgtcagccatcctcttgttgtagtgttcgattaagcaggttgagccaccgctttgccggagtgttcgtgtcacgcaatagtctgaatcggcaacgagattagatggggtccggttgcgaattctttgtattggatgtttttctatgaacgctgtcggcattgatgtttccaaaggtaaatctatggttgctgtcatgcgtcccttcggtgtggtggtgctctctccttttgaagtttctcactcatccagtgaactgagcaagttggcaaggctgctcaaaagcctggatggtgagtcccgtgttgtcttagaatccacgggcaactaccatgcaccggtggctaagatgctccatgatgctggtttatatgtttccgttgtcaatgctatgctggtgcatgactacggaaataacagtttgagacgggccaagacggataagaaggatgctgtgaagcttgccaactatggtcttgaccactggctttcgctgcctcgatatgttcctgaagaagatacaaggctgcttctaaagacttgctatcgtcagtaccagcaatacacgaaggttcagacgatgttaaagaacaatttgatttctttgttggatatgatctttcctgctgtaaatcgtctttttggaagcccagcccgttcagatggcagcgagaagtgggtggattttattgatgctttctggcatgtgcaatgtgttaccgctctgtctatgaaagcttttggtacgaagtatctgaaatggtgccgcaaacacggctacaatttcagtgaagaaaaagctgcggagattcacgcggtagcacgtgaacatgttgctattatgccaaaaaatgacacgacaaagcttttggtaaagcaggctgtcgctcagctgcgcacggtatctgctgcgaaggctgcgatccaaaaggaaatggaagttcttgctgcttctttgccagaatatcctgtggtgatgaagatgtttggcgttggtccaaagctgggacctcagctcatggcagagattggcgatgtgcgcaggtttcattctaagaaagctttggtggcttatgctggaatcgatgcgccaccatatcaatctgggcaaatgaatgtgcatagccgaagcatttccaaacgtggttctcccacattacgcagaacacttttttagtaatgagtatctacctgcagaatgctccgccggacgaaccagtgtaccaatacatggcaatgaaacgtgctgaaggaaaaccttatttagtttacatgatggcttcggcgaataaattcttgcggagatactatgctacggtaaaagcatatcttaatgctttggaatctggctgatccatgcaacaccatatccgatctggctgccgtttcaaattgaaacgttttgtggcttattttagtgcgccataaatctgtgaagaaaaatcacggatttatgacttgacttttattagcaggt

SEQ ID NO: 10099 - DNA, 1369 bp, unidentified
  source 1..1369: mol_type = unassigned DNA; note = element_fdd7a87
  misc_feature 1..2: note = core
  misc_feature 3..65: note = LE
  misc_feature 66..1106: note = CDS
  misc_feature 1107..1369: note = RE
  misc_feature 1079..1356: note = bridgeRNA
tgatggggtggacgcccccaaacggcatctgtgtgccaaagtagaggtatcaacaacactacttgatggaggcgtccgtggagaaggttagcataatcgggctggatatcgccaagtctgtttttcaggcgcacggggcggaagcctcaggcgctgttgtgttccgcaagaagatcaaccgcgccaagctcttggagttctttgcgtcacagccgccgtgcacggtggcgatggaggcctgcggcggagctcaccattgggggcgcgagatggccaagctcggccatgaggtcaagctgatcgcgccgaagtacgtcaagccgttcgtcaagcgccagaagaacgatgcggccgacgctgaggcgatctgcgaggcggcatgtcggccgaccatgcggttcgtggcggtcaagagcgagacgacgcaggcaagcgccctggtcttccgtacccgggatctcctggtccgccagcgcacccagatcaccaacgcgatgcgcggccatcttaccgagtatggcctcgtcgttccgcaaggcgccgggcatttcaagaagctggtcgcgcatctggaggatccagcgtcccctcttcccaacgaggttcgctcgatcctgtcgctcctctcccagaccgcaatgaggttggacgagaagatatccctgctcgacaaggagatcgcccgccgcactcgggatgatgagatcgcacggcgtctgatgaccattccaggagtggggccgatcaccgcgaccgcaattgcggctctggcgccgccggctgcaacgttcaggaagggacgagacttcgccgcctgggtcgggctcacgcccttgcagaaatccacggggggcaagcagaagcttggcgcgacctcaaagatgggggagcgaaccatacgtcgcctgctcatcatcggggccgccgctgcgatccatcacgcgacgcgtcgaggcgttccgccgacaacctggctggggcgcatgctcgcccgcaagccgcgcatgcttgtgaccgtggcgcttgccaacaagatggcccggatcgtctgggcgctcctggtcaagggtgaggactacagggctccggggggcgcagcggcgtaagccgcggcgctccccgcgaggtcgttgaaggcgtaggtggtcaaaggaaaatatggcgcaacggtcgatgagacgaggtcaggaaaaccagtttggcccaacgtgccccaagcacgccgctttgatgtggtcctgaccttcgaactcccatatgggcccgcggcgatcttctggccgcaacagaggccggacagatggctgcacccgactacgcgctcaaatttttctgagaaacatcttgcgccggggcgggcgtccacaga

SEQ ID NO: 10100 - DNA, 1335 bp, unidentified
  source 1..1335: mol_type = unassigned DNA; note = element_fde2b7a
  misc_feature 1: note = core
  misc_feature 2..63: note = LE
  misc_feature 64..1059: note = CDS
  misc_feature 1060..1335: note = RE
  misc_feature 1113..1329: note = bridgeRNA
taatgagatggtccgccgcgcgatcaacccgatggcatgattgcgagaaggaggatcatcgacatgaagattcgttcgatcggcatcgatctcggcaagacgacctttcacctcgtagcactcgcggagcgcggcaaggtcattgtcagaaagaagctatcacgcaagcagctgttggcattcaccgcgaacctcgattccgcgctgattggcatggaggcttgttcaggctcgcactttctaggccgtgcgcttcgcgagcaagggcacgatgttcgtctcatcccggcgcagttcgtaaaaccctttctaaagtcgaacaagaacgacttcctcgatgccgaggctatcgccgaagcggtcgaacgcgagaacatgcggttcgtgcctatcaagaccgacgaccagctcgacctgcaggcgctgcaccgagtgcgggaacggttggtctcacgtcgcacggcggtgatcaaccagatccgagcgttcctgctggagcgcggcgtgacctttcacaaggggtcgtcgagcttgcgccggcagatgccagagatcctcgagaacgccgatgcacagttgtcgcctcggattcgtggcctactggcgacgatgtgggaagagtggaagcagctggatgaacaggtgaagtcgtttgacgcacagatcgagaccatcggcaacgatgatccgatctgccaacgcctgcgcgagataccaggagtggggccactgatcgccagtgccgtggtggcgtcgatcggcaacggagcggcgttccataagggccgcgagttcgccgcctggttgggcttgattccgaaacagttctccaccggcggcaaggtgaagctgctcggcatcagcaaacgaggaaaccgctacctgcggacgatgtttatccatggtgctcgttcgctcgtgctccgcgcgaaccgcgagcgctcaccagtgggcgcctgggatcagcagcctggaggccagggcgcatcgcaacgtggtgattgtagccatggctcacaagctggcgcgagtcacatgggccgtgttggcgagcggtgagcgatatcgacccgcttcagtggcagcgtaagcaccctgggaaaacctttccacgaagtctgctaaggagaagcgacggacgaaggaacagtcaagcggcgtgcctgagaaactgtgttgtgaaatgtgtctgacaagaccgcccgattagagaggacaggcacgcgcggatctcatccagtgcccggagatggattctccaacaaggccggatacatttgcgcagactgatctccgttccgaagatttccttgcaggcgcgcggcggaccataca

SEQ ID NO: 10101 - DNA, 1448 bp, unidentified
  source 1..1448: mol_type = unassigned DNA; note = element_fde64e5
  misc_feature 1..5: note = core
  misc_feature 6..498: note = LE
  misc_feature 499..1431: note = CDS
  misc_feature 1432..1448: note = RE
  misc_feature 1..240: note = bridgeRNA
cccccgttacctttttcgtggctcctgatcaaggagctgctggtcgccaggcccggcatgacttatgcccccagtcgaagtgatgatccggggggtggtgtcaccgggtttggcggcatcgagggaccgctgatagggacacggccgcccgcgagggcaggtctcgtcgtaacgtggctgccggccgtcgatgcctgactggtagaccagcagcgacgacacgaaagacaccgcgagtgaaccacgactacaacgtcttcctcggcctggacgtcggcaagagcgaccaccacgccgtcgggctggaccccaccggcaagcggctgcacgacgcgccgctgcccaacagcgaaccgaaactgcgggcgatgttcgacaaactcgccgcccacggaacgatcctggtcgtggtcgaccagcccaacacgatcggcgcactcccggtcaccgtggcccggggcctgcggccacgacgtcgcctaccttcccggtctggcgatgcgccggatcgccgacctgtatcccggcaacgccaaaaccgacgcccgcgacgcgttcatcatcgccgacgccgcccgcaccctggcccacgcactacgcagcatcgacgtcgacgacgaagccctcgccgagctcgacgtactggtcggctacgacgacgacctcgccgccgaagccacccggctcagcaaccgcatccgcggcctgctcaccgggacccaccccgcactcgaacgcatcctcggccccaaaatcgcccaccccgcagtactggaaatcctcagccgctgcggcggaccaaccgggatccgcacagccgggcgccgcaaactcaccacgatcgcgaccaagtacgcacccagaatgggcaccaaactggtcaacaacatcctcaccgcgctcgacgagcagaccgtcgtcgttcccggcaccgctgccgccgacaccgtgctgccacgcctggccgaaagcctcaaaaccgtccttgcacaacgcaaaaccgtcgccggcgaggtcgaggagatccttgatgcgcaccctcttgcgcaggtcctgatctcgatgcccggcatcggcgtcaggaccgcagcacgcatcctcctcgagatcggcgacgcctccgccttcaaaacctccggacacctggccgcctacgccggcatcgcacccgtcacccaccactccggcaccagcatccgcggcgaacaccccgcccgcagcggcaaccgcaaactcaaacgcgccttcttcctcgccgccttcgccgccctctcagaccccaccagccgcgcctactacgaccgcaaacgcgccgaaggcaagaaacacaacgccgcgctcatctgcctagcccgacgccgctgcgacgtcctgttcgccatgctccgcaccaaaaccccctaccaaccacccacactccgcgcagcttgacgaaccccatagggaca

SEQ ID NO: 10102 - DNA, 1238 bp, unidentified
  source 1..1238: mol_type = unassigned DNA; note = element_fdebb0b
  misc_feature 1..2: note = core
  misc_feature 3..260: note = LE
  misc_feature 261..1220: note = CDS
  misc_feature 1221..1238: note = RE
  misc_feature 6..212: note = bridgeRNA
cttatatctcgattctgaccgaaaaaagcggcagaatccccgactgatcatcggggggcgatggggaagacgtgcccaccctgaggcttgaaagcctgccttgtagatagttctctccatcgcccgcactcactttaaagttcgaacggtattctaagggcttggttcgccttgaccctgtattcataaggctgaactttgcgagtgtccattctgatcaagcagtctaagtttgtcatttttacccagagatagcgctcatgacttctactatcatcggcatcgatattgccaagctcaaattcgacgtagcccggctcgccgaaggcaaatataaacatgccaagttcgccaacaacctcgagggctttgccgcgttcgccgcttggctagacggttttggcgacaccgaccggcgcctttgcctggaagccactggcgcttacggcctgcccctggcagagtttctcgccgacggtggctacttcgtcagcgtggtgaaccccgctcaaattcatgccttcggaaaaagcgagctgagccgcgccaaaaccgataaggccgacgccaagctgattgcccgctatgccctgcaagccgacttggttgcctggaagccgctacccgcgaatctgcgccagttgcaagccctcacgcgtcgcttggagcacttgctggagatgcagcgcatggagcaaaaccgactggagacagctgataccgctattgtcccttccatcaacactgtactggcaacattggcggccgaactgaaggctacccgtcaagccatccaagaccatgtcgataaggatcccgatctcaagcagcaaagcgatctgctgacctccattccgggtatcggccccgccacgaccgcctatttgctcgtggccttaagtcctcaccatggctacgccaacgccaaacaagtcgtggcccaagccggcctcgcacccgccatccgacagtcaggacaatggcagggcaaaacgcgtattgccaagaccggtgacgctcggttgcgcaaagcgctttatctacccgctttggtcgcctggcaacataatccagccattcgcgtccaatgccaacgactcaaagctaatggcaaaaacggcaagctcattgtctgcgccgccatgcgtaagctcattcatctggctttcgctatcttgaaatccggtaaaccttttgatcctaatttttcccttgcatgagcgggtttaagacggtat

SEQ ID NO: 10103 - DNA, 1389 bp, unidentified
  source 1..1389: mol_type = unassigned DNA; note = element_fded0f1
  misc_feature 1..2: note = core
  misc_feature 3..249: note = LE
  misc_feature 250..1287: note = CDS
  misc_feature 1288..1389: note = RE
  misc_feature 30..229: note = bridgeRNA
ctcctatgtttgatgaaataaaagaggagtgttaatcttgaataaaattaagtgaaaaagtgtgagagtaaacggagccctaaacaatttttaaaatatgttggtcaagagatattacctcacacttttttatcctttagagtttgaacagaatgtaaggaatattgcattgcagtatatccagaatatccaaccaggagaagagacgaagaaggattattcactttaataattatttaaaccaaagtgatgacaaacattgtaaaacaagtagtcggaattgatgtagcacaaaaggagttggtggtttccctggggcggatcgatcaacttattcaaaaagaggtatatgcctgcaagacatttgccaataaaccatcaggatttgcagctttactcgaatggataaaaaagcataccgatagctcgataactgttcgatatgtaatggaagcaacaggggtctatcatgaacaattagcttattacctaaccgaacaaggctttgaagtaagtatcgttttgcctaataagatcagtaattatcttaagacactggaaacgaaaaccattaccgataaaaccgtatcacagggtatatgccagtatggactggaaaggacattggaaatgtggcaaagacctaaaaagatattcagaacactaaaacaactgacacgtgaacgggatcaactcatagcagagcgtacaatgataaagaaccaattacatgccgaacaagcagaagcccatcccagtgaatacagcatttcaagaatgaacgaacgtatcaatcttattaacaggcaggaaaaagagatccgttctgagatggcagaaaatataaagtcagatacaggtctgattaaacagatagccaatattacttcgataccgggagttggaaaactaacagcagtgacagtgttggcagaaactaacgggtttgacctgattcgcaataaaaagcaattggtcagttacagcgggctggatataaaagaaaaagagtcgggtacatccgtcaaaggaaagcccaaaatatcaaaaaagggaaaccggtatttaagaaaggctatgcacttgccggctttatcagctatcagaaacgaagatcgttataaagctgtatttgtaagattagtatctaaacacggtattaaaatgaaggctacagtagccgtacagagaaaattattagagttgatatacataatttggaaaactaatcaaccctatagcaaagaacacttacaaaaagcgagtgataatacaaacgcggcttaaaagggttagggcagccattaaataatgaactgccctaaacaggctgacttaagccgcctttaataatcaaaattaaaaaatatttgattattaacacagaat

SEQ ID NO: 10104 - DNA, 1114 bp, unidentified
  source 1..1114: mol_type = unassigned DNA; note = element_fdf30a2
  misc_feature 1..2: note = core
  misc_feature 3..163: note = LE
  misc_feature 164..1108: note = CDS
  misc_feature 1109..1114: note = RE
  misc_feature 1..165: note = bridgeRNA
cctgtgtctggcaattctgtcatgatggggtgggcgggaagccgttgggtccctggcgcatgacgccgtgagccggctcggtctcccgcccgtttcgatcacttcaatctgaacagttgcacgaggctgcgccaacagacctcgcatcacagggacaggccccatgattatagcccttcgctgcgtcggaatcgacgtctccaaatctatgctcgacatttttgacgatgccatcggcgcgcctgagcgcgtagccaacgcgccacagcctatcgcacagcaagtggcgcgttggcggaacaacgaggtgtttgtcgtgttcgaggccaccggcgtctatgatcgtgcacttgccgaagcgttgcgccaggccggtatacgatatgcccgcgttaatcccgcccgcgcccgtgacttcgcgcgcgccagcggacggttggcaaaaaccgatacgatcgatgcccggatgctcgccgactttgcgcgggcgatggccccggctgccgacccgccacctgaacccgcccgtaacaccttggctttcatcgcaaaacgacgcgaccaactggtccacatgcgggctcaggagaagaaccgccgcagcgaagctcatgaccccgccatggccgatcacatcgctgtccacatcgacttcctcagccgcgagatcgaagccatcgatgccaggatcaaggccctcatcaaggccgagccgcagatctgcgagcaagcgcgcttgttgcgatctgcgcccggcgtcgggccggttgcctgcatgcaactcatcgcccagatgcccgaactcggacgggccggtcccaagcagattgccgcgttggccggcctggctccgctcaatgtcgacagtggctcatatcgcggcaagcgggccatcggcgggggccgcaagcgcgtccgcgatgccctctatatggcggccctcaacgccgtgcggcgcgatccgaacatcaaaagcttctatcaaaggctgcgaacagccggaaagccggcaaagctcgccctcatcgctgtcgcccgaaagcttctcaccatcctcaacgccatgctacgcgaccagaagatatacgccgttccgagccccacataacagttg

SEQ ID NO: 10105 - DNA, 1358 bp, unidentified
  source 1..1358: mol_type = unassigned DNA; note = element_fe0befa
  misc_feature 1: note = core
  misc_feature 2..70: note = LE
  misc_feature 71..1099: note = CDS
  misc_feature 1100..1358: note = RE
  misc_feature 1130..1349: note = bridgeRNA
tactgggatgatccgccgcttgatcttcacttgggagatcttgtaggcagatagaaggaggatcatcgacatggagattcgatcagttggcattgaccttggcaagacgagctttcacctggtggcacttggcgataagggcaaggtactgctgaagaagaagttcacacagaagcagttgattactttcaccgcgaacctgcagagctgcctgatcgggatggagtcctgttccgggtcgcacttcctgggccgagctttacgcgagcaaggccatgaggtgaagttgattccagcccagttcgtgaagccatttgtgaagtcgcacaagaacgattttgtcgatgcggaagccatcgccgaggccgtggaacgcgagaacatgcgcttcgtaccgatcaagacagacgaccagctcgatctgcagtcgttgcatcgcgtgcgggagcggctcatgacgcgcagaactgccctgatcaacctgattcgtgggtttctgctggagcgcggcatcgtgttcgccaagagtccgatccgattgcgagaagccatgcccgaggtgctggagaacgccaacgagaacctcaccccgaggatgcggaacctgatcgcgatcctgtggagcgagtggaaggacctggagcttcagatcggggagatgaacgatgaagtggaacggatcgcttcgagcgatgctgcgtgtcagagactgcggcagattcctggtatcggaccgctggttgcaactgcgatcgtggcctccatcggcaacggcgcagcgttcagcaagggacgagagttcgcggcttggttagggctgctgcccaaccagcattcgaccggaggcaaggcgaagctcggtgccatcagcaggcgcggcaattgttacctgcgcaagatcctgattcatggagcacgcgcggtggtattgcgatccaagagagaccggatcgcgatgggcgcctggatgacctcgcttgagaccagggcgccacggaacatattgatcgtggcaacagcacacaagctggcgcggatcgcgtgggccgtcctctcgaccggccaggactatcgggcagacgtacccgcggccgcctaaacagattcgttcaccagcaacatcaagtttccccaccgaggtctgcactggataagtgaagatgaaagaacagtcaaaacggcgtgcctgaaacctaattagacaaatggccctacgaggccgagcgttttctaaggacaggtacgcggcggatcccatcgaggccaggagagcactctccaccgaaaggccgaatacattgacgtagaccttctttcattcgaaacttttcccttgcattcacgcggcggatcataca

SEQ ID NO: 10106 - DNA, 1609 bp, unidentified
  source 1..1609: mol_type = unassigned DNA; note = element_fe15973
  misc_feature 1..2: note = core
  misc_feature 3..282: note = LE
  misc_feature 283..1494: note = CDS
  misc_feature 1495..1609: note = RE
  misc_feature 14..302: note = bridgeRNA
ctactataataaatttatgggtaagttacacggcagccagccgtgtatctatccatcttgttgctgaaactgctataatgagagtgcatggcctgacgttaacctccttggacttttcgtccgtaaataagtccgtcagccagcctctcatttcgcagtcgttcgatttatgcaggttgcactgtcgctccgacacgtccgtatcaccccacagtagattgaatcagcaatgagaaaaggttggtttgccattgcaaaaatccatgtcaggagttgataaaaatgaacgctgtcggtatcgacatctccaagggcaagagcatggttgctgttgcccgtccactcggtgaaattgtttctaagccgtttgaagttcatcataccacagacggcattgcctctttggttgcgtatctgcacaccttatccggcgacacacgtattgtaatggaacataccggcagatactatgaaccgatggcccggcagcttgccaaatccaatttctttgtcagcgccgtaaacccaaagctgattaaagattacggaaacaactcgcttcgcaaggtcaaaaccgacaaggccgacgcgcttaagatcgcccgctatgctattgacaactggcaaaatttatgccagtatacaagcatggatacgttgcgaaaccaattaaaaatatgcaatcagcattttgccttctacaccaagcagaaaattgccgcaaagaacaatctgattgctttgctcgacatgacataccccggtgtaaataccctttttgatagcccggcacgagaggacggttctcagaaatgggtagattttgccgcgtctttttggcatgtggactgtgtccgcagtattgggcttgccgccttcacagaacgttaccgcaaatggtgcaaacgccacggctacaacttccaaccacacaagccgcaggaaatcttttgtgccgctaaaaacctgattgccgtattcccgaaagacgcgatgtctaaagcattggtcatgcaagcaatcagcggactgcatgcaatttcaaaaaccgtggagcaccttagaaaacagatgaaccagcttgcctcacagttaccggaatatcctgttgttatgacaatgtacggtgtgggcgaatccctcgggccccagctaatcgctgaaattggggatatctcccgttttcacagacgcgaaaacctgaccgcctttgcaggcgttgaccccggcgccaatcaatccggtacataccaggcacagagcgttcggacatccaagcatggttccccaaggcttcggaaaacattgttccaaattatgaattgtcttgtgcaaacaaagccccgggatgatgctgtctaccgctttattgacaaaaaacgtgcggaaggcaagccatatttcgtttacatgaccgccggtgcaaacaagtttttgcgtatttactacggcagagtaaaagaatatctggcttccataaccgaaacggattagcctgctttttcccattttgaccggcgcttttgcggtggtctttttggtttacgcttttttctgcataaatcttgcttcattttttctaaaaattacttgactttttctttgcagg

SEQ ID NO: 10107 - DNA, 1353 bp, unidentified
  source 1..1353: mol_type = unassigned DNA; note = element_fe1b9d3
  misc_feature 1..2: note = core
  misc_feature 3..147: note = LE
  misc_feature 148..1116: note = CDS
  misc_feature 1117..1353: note = RE
  misc_feature 1149..1348: note = bridgeRNA
tgatgtaatggatgtccctctgtgtaagttttgccatacttatgctgagcgattttatttacagaggtactacatcatgaacgagattaaagttatcggtatcgatctggcaaaatctgtctttcaggtttgtgtctggatggatgaatgaatgggaatattgcatttaaccgcaaggtttcccgggctaaattgctggataccattcgtcaattcccttccgggtcgatgattgcaatggaggcttgcgttacttcccattactgggggcgtacttttcagtcaatcggctttcaggttcggctgatacccacgcaacacgtaaaagcattaacacatcaccagaaaaatgatgccaacgatgctctcgctatttgtgagacagcttttctcccaggcattcattttgtcgttataaaaacacttgaacaacaagatattaaggtcctcagagctgcccgtcagttgatggttgaacagcgcactgctctggcaaatcaggcccggtcactggcggcagaacaaggtgttgagatccctgtcgggattcatattttacagcaacgactgcccgatattattgaagatgcagaacagttaatttcttccgtgctgcgccagttgctgttctcgttgctagaaaatatacattcactaaatgaacgtattctttctgtagagcacagtcttgcagctctttgtcagcaacaacccaaatacaaagtactgatgacaataccgggtatcggtccacttattgcagctgcttttttaagtgaagttaacgcagcgcaatttactaacggacgacaattatcggcccggtgtggtctggttcctaggcaacacagttctggaagaaaaaacagcctttttgcgatgaccaaaaacggcaatcgtgatctccggacattgatcattcatggtgcgcggtctgttatgtactgtgctcataaacgcgatgacgcgctgggaatgtggctgaaacggcttactgaacgaagaggaaaaatgaaagccacggttgcgctggctaataagatgacacgtattgtcaggcggttactgacagaatccacaagttttaatatcgacaaggcttttgcgatgaactgaccgtagttgtatccagagaagaggatttatcctgagtttgcaggcactgatgagaaaacggtacaccgaccctgtaatagcctgaactatgccatggtagtgacataccgatgtagtgataaggaaacagggggcggatgacatcatggcgctggtcattagagccactaacgacgccgaatatatggaagcaaaccgtatcaactcagagcttgcacaacacgggacgtccatata

SEQ ID NO: 10108 - DNA, 1449 bp, unidentified
  source 1..1449: mol_type = unassigned DNA; note = element_fe25858
  misc_feature 1: note = core
  misc_feature 2..220: note = LE
  misc_feature 221..1249: note = CDS
  misc_feature 1250..1449: note = RE
  misc_feature 14..232: note = bridgeRNA
ctgattgatgatgggaggtgcgttgcggtggttccgtagcgttctgatgatccggctggtgggctctcgacgtgcccgctgcccgttcgggttggctttctatcgaattgtccgccggtcggtcatctgaccgtggtgtggctcgaaagaggcaagagcacatcgaccccgaatcaggagtgcccacctcggtttcaccactaccaaggaggcatctgtcatgaccatgatcggtatcgatccacacaaagcaacccacaccgcggttgctatcgacggcaacgaacacgttgtcgatgagttcaaactccgagcgtcgagtcgccaggccgaacggctccgcacgtgggcggaccgattcggtgaacgcgagtgggcggtcgagtcagcgaacgggctcggctatctcgttgcccagcagcttgtcgctgccggcgagacggtgttcgacgttccacccgtgctcgccgcgcgggtgcgggtgctgggctcggaacgctcgcagaagaacgacccgaacgacgcccggtcggtcgcaatcgcggcgatgcgatcggaccgactgtcgctcgtgcggcccgatgatcactcccgggtgctgcgtctgttggccaaacgccatcgcgatatggcccggctacgcaacaagcactgcacccggctgcacgcgttgctgctcgagttgaaaccgggcgggatcagctccgagatcactgtcgcgaaggcaaacaccctgcttaacgccgtgatggtcgacgatcaggtgacgcgtcatcgggtgatgatcgcgaacgaactcgttgacgacatcgcccgactcgacgccctgttgaaggcatcgaagaagcgcgtcgagcaagctgtggtcgcgtccgggacgacgctcaacgagatcgtcgggatcggcccgatctgcgcggcgatcatcattggctacaccggcgacgtcaccaggttcccaaccaagggccacttcgcggcctacaacgcgaccgccccggtcgatgcgtcgtcggggcctcgcccgaagcaccggctgaaccagcgcggcaaccgcaaactcaaccacgcgatccacatcgccgcgatctctcagctccgtttcgacaccgagggccgcgcctactacgaacgcaaactcgccgagggcaagtcatccaaagacgcgatccgatccctgaaacggcggatctcggatcgggtctacagacacctcaacatcgacgcccaacgcctggctgccggctgagaaaagtgggcccgggaggacactcaggaacgacaccaaatccagcgtgaccggcctcgcatcctgaacagccggctcttcggatcagtcactcccgaacccgaacaccaacgctacgaccctcagccgcatcaggcaagcgggtccacctcgacgcgcccgaacagccttagaaattgccccttgacacaaagaggctt

SEQ ID NO: 10109 - DNA, 1583 bp, unidentified
  source 1..1583: mol_type = unassigned DNA; note = element_fe2a084
  misc_feature 1..2: note = core
  misc_feature 3..250: note = LE
  misc_feature 251..1453: note = CDS
  misc_feature 1454..1583: note = RE
  misc_feature 7..224: note = bridgeRNA
ttcgtattataaggttaaccagtttttactggttgacctttttttaatagattctattatagcagtagccagggtaggacgtacgggtgcgtggggcattgatcccgtcaactaaactgtccaccccctacttgtagaaacatgtttgaggctggttgggacgtagatctcgtataacaagcgaagctatgatacttcaaggtggaataggggttactggtaaataaattgtgagaggaagagataaataatgaatccagtagttggtctggatgtttcaagaggggaaagtcaagtccaagcatttttagataagggtaagccttacagaaaaagttttaaagtatcgcacaccaatgaggctttagattccttacttcattttttaaaagaggtagaaaatgaatcagggttggagccaacggtgatattggaatcaacgggtcattatcacgctcctataattcagtttttagaggaaaagaattacttgtatattatgatcaatccattactgtcttatcaggcaaaaaaatcgagcttgcgaaaggtgaaaacagatgcgattgatgcttttcacttatgtgagttgtattacaaagaggatctggaaccttataagaaaaggggtattcaactcttaaaccttcgtaatctaactagacaacacgatacaattacgggtctgtatgtgcaagctaaattacagttccatgccatattagatcaagttttccctgaatataaaggtgtattcggagatatgtattcgaaagtctctttaaatactttattggaatttaaaacatccgaatccgtgttacaagctggggagcgtaatttaacagataagattgcgggtttatgtataactcgttcagagcgttgggcacatgaaagggcgaagaaactgattgaagcggcacagcgtaatccatttaaaaatacattgtatcagagtcatttgataagtcttgaaatgtatattcagatgcttctccagtaccaagagcatctagcaaagttagatgatcaaatagatgccctggcaggagaaatagaagaatataagattatccaatcaatctctgggattggcaaaaaaatcgctgcaacgattctttccgaaattggtgaggttgagaggtttaatcatcctaaaaaactggttgccttctctggaattgatccgagtgtacattcgtctggtaaatttacagcgacgataaatcggattaccaaaagaggttcaagtaggttacgacatgcattatatatggctgttctctgtggaattaggggctctcgcaataagaagttaaaagagttctatgatagaaagcgagatgaaggaaagccctttaaagtagctgtgattgcatgtataaacaaacttattcattggatttatgccttactaaaacgtaaagaaactttccttgatttagaataaaagtgacaattaagcaatacatgaaaaaccttccattacggaataggaaggttatttggcatgagcacttttagtatatcattaagtacataacaattttacagaaaaatattgacatcctattagctgg

SEQ ID NO: 10110 - DNA, 1502 bp, unidentified
  source 1..1502: mol_type = unassigned DNA; note = element_fe2ffda
  misc_feature 1..2: note = core
  misc_feature 3..224: note = LE
  misc_feature 225..1181: note = CDS
  misc_feature 1182..1502: note = RE
  misc_feature 9..180: note = bridgeRNA
cttgtatcttagaaatagtagtagaccgtcccaacctaggtcataatagaccgctttgtagcatgggtcactacaataatctccatgacagaactcgaacagtcgccagggtcaaagctttaaacactgattttaaagtatacagtccgcatcgggcaaggatgagtgaaatcaaggggatgaattaaaagcagggtagattataatttttgagagcaacaaaaatggaaaatacctctcagtggataggcatcgacgtaagtaaagcgacacttgatgtttacatccgtccaattgggaaagcattaaaggtcgcaaatactgagtcaggaatagtagatttagttgaacaactattatcatacgatttaaatataatcgtaattgaagccacaggtgggttagaaactgaacttataattcaactacaagcagcacttttaccagttgcattaattaatccacgccaaggacgagattttgccaaagccacaggaaaattagccaaaactgacgctattgatgcacaaatattagcgcactttggggaagcaatgaagccccaaatattggcaattgaatctgaatctgcacgtcaactctcagaattaattagtcgaagaagacaattagtcgagatgcaaactgctgaaaaaaaccgaagtgctcgcgctcgtggtaaagcattgctcgatgtggaggagcatataaaacaccttgatgaacgtctggagaaactaaatcaagaaattgagcaactaacccaaaacaaccaacaatggattgataaagctaatttgctcaaaactactcctggcattggtaaagttatttctacaactctagtttctgatttaccagaacttggtcaattaacttccaaacaaatatcgcgtttagtaggtgttgctccaattaatcatgatagtggacaacataaaggtaaacgtatgattaatggtggtcgtgctcatgttcgtgcaactctttatatgggtgctttggttgcaatacgtcataacccaattatcaaggctttttatgaccgtcttgttgaacgtggtaagccaaagaaattagcgattacagcctgtgttcataaaatgttagttattttgaatgctatggttcgggaaagtaaaccttggtctgctgcacaagataatttacaaacaacttaaaagctcttttcccaactaattgtaatagctaattaatcctagtttttttctggcttgatcattcatttttcatgcccttatttgaccatgattatttttgccaaatcattcatgtttatgctcatttcatttattgccctacgagtggttcagcaactggagaagattcggtggcacagcggagtgtcaggtgggggtaagactatttataccaccaactcaaggtcttgctgcccctacctgacaccaccgaatctagcgaagcgttctccagttgcgtcaacttttttttgcgatcgcacttgacaactaagacagtcg

SEQ ID NO: 10111 - DNA, 1196 bp, unidentified
  source 1..1196: mol_type = unassigned DNA; note = element_fe40271
  misc_feature 1..2: note = core
  misc_feature 3..230: note = LE
  misc_feature 231..1193: note = CDS
  misc_feature 1194..1196: note = RE
  misc_feature 22..206: note = bridgeRNA
cttgtatggtttctctgcaggtccaaactgggacttgtcagggtggaggggcaagcggcgcttccggccttacggcacggactgtgggagatttctgcccccacccttctcatcaaagcgccgatagagaatccatcggcggagcctgccgctcatgaccgacgaaatgttgcaagccagcgttcgatgagccctgacaagtgaaatcactttagcttggagggtgagacatggcaaagcccattgagccaatcaggatcggtatcgatgtcagcaaggccgagctggtcattgcctgcagtgactcgaagagtctggagaagattgccaacacgccacgagccatcagccgctggctgaagacgctgccttgcgggaccccgctagcgttcgaggccacaggcgcctaccaccgcaccttggcgtcactggcgcatcaggctggctttgcgctctatctactcgatggttatcggctcaatcggtatcgcgatggcattggcaaccgcgccaagaccgacccggctgatgcccggttgatcctgcgctacctgagcaaggagctgagcgagctcaagccctgggtgccacctcacgaggcgttctatcgcatccagagcctgctgcgacgccgggcttcgcttgtgcacacccgcgtggccctgacccagagcctgggcgatgtacctgagctcaagaacgcatccaagcgcctgagcaacaacatcaaggacatcgagcgattgatcgagcgatgcctcaaagaggccatggccgaagtgggctggcggccggatgcccagcgctgcaaggctatagagggcatcggcgatctcacctcggtagcgctggccaacaccttccaccgaggcgaattcaagagcagtgacgccttcattgcctacctgggtatggacgtcagagtacgagactcaggcaagcaggttggccgccggaaactgaccaagaaaggggatccagaactgcgacgcctcttgtataacgccgcgatgtcggctcgtcgaacaaaggcttgggctggtcagtatgaaacctatctcagccagggactgaagacgacccaggccttggttaagctcgccagaaagctggcccgaattgccttcgccttgatgaaaaaccaatcaacgtatcgaccgaaagtgccggttacctgttgtgctgtgccatagaat

SEQ ID NO: 10112 - DNA, 1326 bp, unidentified
  source 1..1326: mol_type = unassigned DNA; note = element_fe45d10
  misc_feature 1..2: note = core
  misc_feature 3..250: note = LE
  misc_feature 251..1285: note = CDS
  misc_feature 1286..1326: note = RE
  misc_feature 24..195: note = bridgeRNA
cttgtatgattaatttaaatgaattttagccaggaaatactttaagctgtaccgagttcattgggaggccgcttgagcctgaggactggattaaaccagagcctgtcatgtagattggcccccgccctattcacctataccgcggagtatctgaggcttagagcctgcattcacaaggatggtaggtgcatacgcagggtcgggaaccaatgactagtttactttccttatcacagaataacaattaaacatggcagatcaacaaattaacagcgcttcacttgacacacaaacccgtatcttcgctggcgtcgatgtaggatctaaagaactggttttggtggtgcgcaaaaatggcaaacctttcaatccgcagaagttctccaataccccagctgatcatgcccggatggccaagaaactgaacaaattgtccggcattatcgtgtgtatggaagccaccggcagttatcatttcgatttagccgttgcgctccatgatgccggcgtcaaggtaatggtcatcaatcccaaggtctctcataactttgctaaagtgttgatgaacaatagtaaaacagatgatgtggacacgaatactctggcggtgtatgccgaacggatggattttgtgccttggtcccgtccttcgaatgaaaagatcgctttacgttgtttctcacgccgtattaatgcgctaaccgatcaaaaaacagcagcaaagaatcagttgcatgccttaagcgcaacagttgaaacacccaaagccgtgctaaaagatgcacaagcagccatcgatcaattagataagcgtatcgatcagttaacggctggcgccttggcattgatcgaaaaacatccggaactcagtcgagcattagttttgttcacgaccattaagggtattgccaataccagtgcgattgccctcatgggagaactactgattttgcctgcggatatgtcgcaccgtgagtgggtcaagtttgcggggctcgatccaagagcttttgattccggcacgagtgtccacaaaaaaacgcgtatatccaaggccggtaacagccagattcgcgccgccctgtatatgcctgtctggagcgctgtgcagcatgatcgccatattaaggcgtattaccaacatctccttgatatgggtaaattaccgttgcaagcctgttgtgcggtcatgcgtaaattgttacatgcgattcacggcatgctcaagcatgataaaccattcgataacacgcgtttttatgcaattccgtcaatcgctgaatagcagaaaaatgcctatttttaacttgattttaaacagagtat

SEQ ID NO: 10113 - DNA, 1362 bp, unidentified
  source 1..1362: mol_type = unassigned DNA; note = element_fe4b927
  misc_feature 1: note = core
  misc_feature 2..77: note = LE
  misc_feature 78..1103: note = CDS
  misc_feature 1104..1362: note = RE
  misc_feature 1127..1359: note = bridgeRNA
taatgaaatggtcaccctccaccttacaggcggttacgcttgtaaggtgtttttaccttctgagcgaggagaccatcatgcaagacgtcatactgatcggcattgaccttgggaagcactctttccacctccacggccaagacgcccatggcaaagcggtgttccgcaagaagtgctcccgcaagcagctcattaccttcctcgctacgtttcatccctgtaccgttgtcatggaagcctgtgccggcgcccatcatatggcgcggcacctgatgacgtttggccaccaagtcaagctcatcagtcctcagttcgtccgtcccttcgtcaagggaaacaagaatgactttattgacgccgaagcgatctgcgaagctgcctcccgtcccaacatgcgctttgtcacaccaaaaactgaagtacaacagattctcagcgccctgcatcgtgtaagggaatcgcttgttcgtgaccgggtcaaggcctccaatcagatccacggctttctgctggaattcggtatcagtcttcccatcggttcagccgccatcaaacgccttccttccgtgctggcagaacacccgctgccagcacggctgattgccattctcaatcgcctgcacgctcactacaagtacctggacgaacagattgctgaagtggagaaggaattgcagctgcagctgcaggaagacgatctggggcagcgactgatggcggtgccgggtgtcgggccaattacggccagcctgttgtcggccgagcttggcgatggtaagcagtacagctgcgggcgagacttcgcggcctccgttggccttgtgccgcgccagtacagtacaggaggacgagccactctcttcgggattagtaagcgaggggataagaatctgcgccgcctgctggtgctgtgtgccaggtcgtacatgcagcgtctggacaagcagaaaggaatgctggcggactgggtccgcgcgatgctgtcacgccgacattccaatgtcgtcgcttgtgcattggctaataaactggctcgcacagtttgggcgcttgctgcccgccacaccgaataccgcgccgctcaggcttcaaaggcagcctgagcggcgtacaaaattgagtagtacgaagtacccacctggttttgcgactgtagaaattggatgacgtgaacggcataacggcctggcagataacctgatcgaaaaaccggctctcgaagccgccgaggtttttaggactgccgggcgcgactttcatcgtggcgcggagaaacgccctccaatcagacgccgtatagatttaggcaagccaatcacaaaacccaaaatctacccttgcaaaaaggagggtgaccataga

SEQ ID NO: 10114 - DNA, 1674 bp, unidentified
  source 1..1674: mol_type = unassigned DNA; note = element_fe57b48
  misc_feature 1..3: note = core
  misc_feature 4..251: note = LE
  misc_feature 252..1463: note = CDS
  misc_feature 1464..1674: note = RE
  misc_feature 1..217: note = bridgeRNA
cccttacctttttcgtgggcgccgggcaacggctcggcgcttacggaagtccggcggtgccggtatggctctttgccccctgcagtagtcatggcctggggggtgttgccgccggcaccgctggtgcgtgaacctctgatggggacatgcggcacggatcgctggttcgtaaggtggatgacggcgagcgcaccgctccgggcttcccgcaggtcaactgggatccttcgatgcaaggggaaggagctggggtggcggcgcccgggcaggtgagcgtgtgggtcggtctcgacgtgggcaaggagtcccacttcgccgacgtgctggacaacgacggggaacggctgttctcccgtgccgtcggcaacgaccaggccgacatcgaggccctgctggaccgtgcctccaggcacggcgtgcccggcctggtcatcgaccagcccggctcgattgcccagctggtcctggccgtggcggcgaaacgggaggtcccggtcgcctacgtgcccggcctggtgatgcggcgggccgccgatctttacccgggcgaggcgaagaccgaccggcgcgacgcgttcatcctggccgacaccgcccgcacccgccgcaagcaggtccactggctggatgcttccagcgacgagctgctggcgcagctgcgcgtgctgaacggcttcgacaccgacctggcggccgaccagacgaggatcaccaaccggctgcgcgactccctgaccagcatcagccccgtcctcgagcgggccctgggcaacagggtgcaccaggccggcgtccgcgacctgctggccgccttcccgacgctgacggcactgcgggaggccggcccggacaaggtccgggccgaggtcgcccgccgctcgccgcggctggcgtccaaggtcgccggggccgtcgcgaaggccctggccgcgcaggacgtcacagtcccggccgagaaggcggccggccgggtgatcgccgagctctcgggcgagctggacaggatcttcacccgcagggacgccctcgcaaaggagatcgaggaggtcttcctcgcccaccctttcggtgagatcctcgcgtccctgccaggaataggcccgcgcaccggcgcgaggatcctcgccgagatcggcgacggctcggacttcgccagcggcgccaagctcgcctcctacgccggcctcgcccccgtgaccaggcagtccggcaccagcctcaacggtgagagccgcagccgccggggcaaccaccggctcaagaacgccatgttcctcgccgcgttcgcctcgctgcgagatcccgcgtccaaggccttctacgaccgcaaacgcgcagaaggcaagcggcacaacgccgccctgatctgcctcgcaagacgacgctgcgacgtcatcctcgccatgctccgcaaccgcgagcactaccagcccgaccgcaaccgggccgccaaggccgcctgacccgcccggcgggctaagtgccacctggcacttaccccgcacgccgaacaactgcacccgccccgccggaacgcccggcagggacgggcctttgcgctgccctgagacacaaccaccccgaacggtcgcgtcgcccggtatcccaagtccagggcaaggaaagccggcaagcccgcttagccccaaacccttgacaaagaacatggggaca

SEQ ID NO: 10115 - DNA, 1406 bp, unidentified
  source 1..1406: mol_type = unassigned DNA; note = element_fe5c47f
  misc_feature 1: note = core
  misc_feature 2..91: note = LE
  misc_feature 92..1144: note = CDS
  misc_feature 1145..1406: note = RE
  misc_feature 1172..1401: note = bridgeRNA
taatggaatggacgcccacttcctaaaacggcatctgagtgccaaagtagtgatggctttacgatcactaaattagaaaggggcgtccgacatgaagattacgacagttggtattgatttggcaaaggcggtatttcagattcacggcatagatgaacaaagccgtgctgtgttgcgcaagcagttgaagcgcgcagagatggcggagttctttgcaaatatggagccgtgcctaattgggatggaagcctgcggcagtgcgcatcactgggcaaggaaactggaagtatacggtcatacagtgaagctgatggccccacagttcgtcaagccatacgtgaagacaaacaagcacgacgtggcggatgcggaggcgatctgcgaagcggtgagcaggccgaacatgcgctttgtcccggcgaagacggttgagcagcaagcgatcctgtcggtgcaccgggcacgtcagggatttgttaaggcgagaaccgcgcaggcgaaccagatacgcgggttgctttctgagtttggaatcgtgataccacaggggatcctctcgattgtgaaatggataccggagattctggaggatggcgagaacggcttgcctggcatgatgcgaaacttgctggagcgactgacagagaacctgaaggaaatggatcgtcaggtagatgagatggagaagcagattcagttatggcaccgtgaaaacgaagccagtcggaagctggcagagatttctggaattggcccgatcacggccagtgcaattgcggcaaccgtgggcaacgcaaaggaattcaaaaatggccgtcagttggcggcttggatgggattggtgcccaggcagaactccagcggaggcaagcaaactctgctgggcatcagcaagcgcggagatacctatctgcgcaccttgctgatccacggagcgagatcagtaatccggtttgcgaagaataaagccgagccagatggttggctgagaaagctgatagccaggcgcaacaagaacgtagcagcagtggccctagccaataagaatgcccgggtcgtgtgggcgctcctggccaaggacagaatgttccgacccgattacaccccggtgccgtcgttgccggagcataaccgggtcggttgagcaaaccccgagtaataacgagttaaggagttccaacgattgcacaggcaatcatgaagtgatggcgagactggtcagaccgtgagtagcagaacctgaaagtaacacagcacataaagtgcgcccccgtgatcaggagctactcagcgaattccatcagggatagaggcgagagcctcaccaaaaatccggatgtatggctgcaatctttaccttcgacccatcatcgattgaaagcttggcaaaagtgggcgtccatgta

SEQ ID NO: 10116 - DNA, 1229 bp, unidentified
  source 1..1229: mol_type = unassigned DNA; note = element_fe5e080
  misc_feature 1: note = core
  misc_feature 2..226: note = LE
  misc_feature 227..1201: note = CDS
  misc_feature 1202..1229: note = RE
  misc_feature 36..214: note = bridgeRNA
tcttaacttagcatttcactaaattagataaattaatcataaagaaccaaagggaggaataaggttaatatacacgtagagacctagatctcgtcaatcccgaagcttcgggattaatcccttctcttttctacgttaaattcgttcagttctatgaagcttttagacttcgattttaagttgttgaattcacagtagattggctctttacaatcctttttttgttatgaataaagatattaaatattttggactagacattagtaaagatgtctttgatgtttgtgatgacaagcaaaattatcatcaatttaagaacacggtttcaggttttaaaaagctgttagaactgttagatttcaatacagtttgtgttatggaagctacaggttgttatcatcttcggttatcctattttttgatagacttaggttatggggtcagtattgtaactccattaaagataaaacactttatacagatggatctatcaagagttaaaaccgataagagcgattcaaaacagattcagcgctatggtttagagcaatgcccagaactgtggttaggtcaatctaaaatccagcaagagagcttacaactatcgcgtttgctagatgtttacacaaaacaaagtacacagttaaaaaataagctacatggcgaaacagttttaggcgcaccatcaaaagctgttgttaggtcgttaaaacgacaattaaaagctctagtaaaagagatgaaacacttggaagaaaagttagaggctaatgtaaaatcagaatatccagagtcaattacgctgttaaaaagcatatcaggtataggtactaaaacagccataatattattggtttttaccgatgggtttcatagatttaaaagtgcaaaagaattatgcagttatgcaggacttacaccagtaattaaacaaagtggaagtagtgtaaagggacgatcgagaatcagtaaaatggggaaccccaaacttagaaacttattgtttatgtgcagttttaatacctgtaaatacaacaaggcctgtaaggcattatttgataggttggtatccaagggcaaaagcaaaaaactagctcttattgcagtgtgcaacaagttattaaaacaagcatttgcagttgtaaaaaatagattgccatacgatgcagattacagaagctctttagtaataaataagtaatagtttacttgttttttacctcagttct

SEQ ID NO: 10117 - DNA, 1592 bp, unidentified
  source 1..1592: mol_type = unassigned DNA; note = element_fe69aaf
  misc_feature 1..2: note = core
  misc_feature 3..277: note = LE
  misc_feature 278..1471: note = CDS
  misc_feature 1472..1592: note = RE
  misc_feature 10..255: note = bridgeRNA
gtataatatatttaggttaataaaggcaacctataatcctttattagcgaagtaattatgcatctaagtgtataattactttattagatagagtgatgtcgtaccttccttgagacaaagatctcgtacttgaaagactgacacctctttctgataaatagtttacgaataagttggatgttgactaattaaattagtacttcgaatatagaacaaggcggtaacgtttatcagaatagaggaactatctaaaatacatttgttgtggtgaataaaaatgctttatttaggaattgatatcggtaaaaacaatcatgtagcttctttaatcgatgaaaaaggaaagattgtctttaaagctttttccttttctaatactactgatggtggtgaaagtttgctttctaaactcaataatttcatcccatctgttagtgatattgaaatcggcatggaagctaccggtcattactggttgtctatttactcatttcttgttgaaaaaggctttgtcattcatgttgttaatcccatccaaactgacggttggcgtaaaggaactgaaattagaaaacgtaaaactgatattattgattctgttttaattgcagaactcattcgttacggtgattttctggaaacttccttagctgacgaaaataccatgtctcttcgtaacctttctcgttttcgaaactatctaattagttctataggcgatcttaaacgtaagacgatttgtgttttagaccaggtttttcccgaatatcaatctgtattttctaatatttttggacaaacatctaaagaaattttacttagttttagctcaccggctgattttgaaaacatctcctcagatcagctgcaaaatgcattatctgaaataaccatgaaaaagtttgctgctaataaaatcaatcaactttcatcattagcccaacgttcttttggagtaaccttttgcttagatagctttgctttgcagctaaaattattaattgaacaaattaactttattgaaaaccaggtcaaagatttagaaaatcaaatctgcactttacttgataaaatcaattccaccattactactatccctggtattggcaaggttacagctgcaacaatacttggagaaattggtgacatttcaagatttagcactccagctaaacttgttgcttatgctggaattgatgcttctatttctcagtcaggtgaatatcacagtacaaacaacaaaatgagtaaacgtggttcaccttaccttagaaaggctctttttagtgctgccctggttgcttctaactgtgaccctgtttttaaagctttttatcaaaaaaaacgtgctgaaggaaaacatcacttaactgctgttggtgctgttgctcgtaaactttgttataccattcatgctattttaaaaaataacagttcctatgaggtacgactcccggatagcaatcaatagcgcctcctttattaccatattttaacttaggcttgtttttaacaggtctatttgtgatgcatttttattcggttcttaacactcaggattttttgttttggttgttgactttttatagttg

SEQ ID NO: 10118 - DNA, 1419 bp, unidentified
  source 1..1419: mol_type = unassigned DNA; note = element_fe6fb1a
  misc_feature 1: note = core
  misc_feature 2..5: note = LE
  misc_feature 6..1154: note = CDS
  misc_feature 1155..1419: note = RE
  misc_feature 1183..1418: note = bridgeRNA
atggaatgaacgcccccacctacgaagtgggtgacgccgaagaggcgaaccctaacgggccgccggcatcaaagtgcccaaatggaagatcattgaggtcttcacaggctaaccggaagctccaatatgaagtatacgacggtcggggtggacatcgcgaagaacgtctctttcaacttcactgggtggatgccggcacgggcgagattgtgaacaagcaactgaagcgcgccgcgttcctcgagcattttgcgaatcgcgaaccttgcctcattggaatggaggcccgcggtggtgcgcagcattgggcacggcgattgattgagatgggccatccggtcaagctgatgccggcgaagttcgtcaaggctttccatatcggcaacaagaacgattctgccgatgctcgggcgatctggatggccacgcagatgccgagcaagcccgtcgctgtaaagaccgaagcccagcaggctgtattgacgctgcatcggttgcggcaacagaagatcaagatccgcacgatgcagatgaacagtctacggggcttgctaacagaatacggcgaggtgatggccaagagtcgcgccgcgctggatagagcgattcccggggtactggcgaagttggccgagcgtctaccggcgatgctgatcgactcattacgcgaactctggaatgaccttgatcgactggacaaacagatcgctgacattgagcgacgtttgcaaacgtggatgaaagaggacaaagcatgcaaggcaatcgccgcgattcccggcgttggtctgctgacggcaacggccactgttgccacgatgggtgacgcgaaggcgttcaggtccggacgggagtttgcagcgtggctcggtctcgtaccaaagcagatcggcactggcgggaaggtccagctcctgggtatcagtcgacgtggcgacacgtacgtccgtacccttttgattcacggcgcacgcagtgtgctcttccatgcgaaacatgctggaggctgggtcgagcagatccgaacgcgacgaccatcgaacgtagtagccgttgcattggccaacaaaatggcgcgcacgatctgggctgttctcgcccacgatataccgtacagttcggatcacgtcagcttacgaggagttcgaaactgaaagttcagagatgttaagaagttcgggcacgaggtcgaaaggttgcgctggcaattgagtgtgatgacgagacaggtcggaccgtgattcgcaaaccctgaatcttgttttgagcatctagctcgcgagtcaaatgaggggcgagtcagcggatttcatcggggccagcagcgaatgaggctgcaaaaaggccgaatataaagctgcaacctatcctgtcaatctgagcacaagaaaaacctggcgcatcgggggcgttcatata

SEQ ID NO: 10119 - DNA, 1445 bp, unidentified
  source 1..1445: mol_type = unassigned DNA; note = element_fe7d2c4
  misc_feature 1..2: note = core
  misc_feature 3..116: note = LE
  misc_feature 117..1157: note = CDS
  misc_feature 1158..1445: note = RE
  misc_feature 1190..1393: note = bridgeRNA
agatggagtattcggcctgccatcccatggcttgggctagaaaggcgcgcgccgcgggacgatgatgaaacctggtctgttggatcaagcacaagcatcaggaaaggaagcctagcatgaagcactatgctggactggacgtctcggtgaaagagacgtcggtgtgcattgtggatgaaacgggtaggatctgtcgcgagacaaaggtgccgagccacccagacgatctcgcgcaagtcctccacgatcctgcttggcggctcgagcggatcggccttgaggctggccctttgtcgcaatggctgttcagtgggcttgcagaagccggtctgcctatcgtctgcatcgagacccgccatacgaaggcattcctcaaggcacaggtgaacaagagtgaccgcaacgacgcacgtggcattgcgcagatgatgcgggtgaatctgttccgaccggttcatgtaaaaaccctgaccagccaaaagcggcgcgccctcctgaccgcccgcaagttgctgcaggagaaggcgattgcatttgagaatgatattcgcggcctgctgcgcaacttcggcctcaaagtcggcatcgttggcgcagccaaattcgacatccgcattcgcgaactccttgactgtctgcctgacctggcagagatcatagagccgctgctggccagccggcgaaagcttcgagaggagttcgagcgtcttcatcgaaagctgctatcgattgtccgcgacgacggtgtttgtcgacgcctgatgaccattccaggggtcggtcccgttgtcgctttagcctatgccagtactatcgacgttccggctcgcttccggaactccaaagccgtgggtgcctccctggggttaacgccggtgcttcatcagtcgggtgagagcaaccggatcggccgcgtctccctctgcggggatggcatgatgcgaacgctgttgtacgaagccgctcaagtcatgctgacgaatgttcacgtgaagtggtcgtggttgaaagcatgggcgatgaatatcgccaaacggcgtggtgggcgaaaagccattgttgcgctggcccggcgtctgggcgtgatcatgcaccgcatctggagcgatggcaccgtattccgctggacgagggaaagcatacccgcagctgtctaagatgccataccggaacgggcaatgagataactcgaattccgccagaaggcggaagaaagacgtccttcgcaggacgatggatcaggcgagctcgtggatgcgcttgtatcggccgcgctgccgcggccagaacgccccatagattgagccacctcatcctacgaatcccatggtgggagggcaaatgtgccgatcccggagagaagcaaggccctgcgagagacgactgcctggaggtgggatggccgatgccttaaaagcgcttgacttggaggggccgaatagaga

SEQ ID NO: 10120 - DNA, 1334 bp, unidentified
  source 1..1334: mol_type = unassigned DNA; note = element_fe80a3f
  misc_feature 1..2: note = core
  misc_feature 3..80: note = LE
  misc_feature 81..1112: note = CDS
  misc_feature 1113..1334: note = RE
  misc_feature 1093..1319: note = bridgeRNA
agataattggactcccccgcactttaaatacggggtaatatctttgttaccacacaaaaaatattaagcgagtccaacaaatgaataatacaatcgtcggtgtagatttagcaactaaggtaattcaagtttgtgtatcaacaaataaaaaagtgcgttctaatcaagaaatgacaccgtcagaatttaaccaatggttaataacttctaagccaatgacgattgtatttgaagcttgtggcagttcaaattattggaagcaagttgcacttaaagctaaacatgatgctcgattgatttgcccaaagctagttgctcatataaggcaaagtcaaaagacggataaaaacgatgcattggcaatagtacaagcctcacaattgcctgatattcgatttatttcaggtaagaaccatggtcaacagcaattgcaaagcatgatgcggttacgagaattagcggtcaagcaaaaaacggctttaagcaaccaactgaccagtctattacttgaattcaacatacgttgttttggtaaaaaaggggggttaaataaggtgataacagaagtgcttgaagacggagaaaatggtttttcttttgcttttagagagatgcttcatacagccaggcaacaatacctagcactgataaaatcaatagcaatatatgatgacaagttagaagaagcagctaaagagcattcagattgtcataaattacggcaaatagaaggaataggcgtactcagtgcgattaacctgtatatcttacttggttgtaccgatttacttgccttaaaaaaagcaaaagatgcttcagcttgtataggattaacgcctctgcaacactcatcaggtggcaaggtaaagataggagcaatagggaagcacattaaaaatagcatgatgcgaagttaccttattgtgggggcaatgtcggcgattaatcaaatagttaaacgtagtgcaaaaactaaaaaggaacaatggatacaacaattggttgagcgcagaggaaagcgctgtgctgcggtggccctagcaaataaaaatgtgagaacagcatttgcaatgataactcaaggctcacagtacaaggctgaattgctctgagcctaacataatgtaaacaatagaaacgctaattagtgataaaaaatcagcagacgaattcagtgaataacaaagagccgtgagctcactctgtagatttgaacgtctgttcgcgaaaatatcaaggagccagagttagctactcaacgagagctcgaacataagtaagcgattatattcttaagaagcgaaacctattgttgacataggggagtccacata

SEQ ID NO: 10121 - DNA, 1285 bp, unidentified
  source 1..1285: mol_type = unassigned DNA; note = element_fe8cf78
  misc_feature 1..2: note = core
  misc_feature 3..158: note = LE
  misc_feature 159..1271: note = CDS
  misc_feature 1272..1285: note = RE
tccattagacttgtttgttagtaatatgatataatggaacatacgttctttgaattaacctaagcaccgaatagagggctgaataagtctatggttcctcataagtaaaacttatattgcgattaagacccagctcccttgatgattaaagctaaatagtgcttccattgctttttaaagcaattattaatggagacagttcatatcatcgtttattcggcacaaacaaagaaaggggttccattatgtcaaataacatgtattttataggccttgatattgcctgcaatgactttgccgcaagtatatatcagtctcctgaaaaaccgattattaccaaagaagctattttaaacaacccagatggttttaatatgttaatctcatggttaaagagcaataatatcaacaatacaaactccattatctgcatggaggcaacaggggtttattcaaaagcaattaccaattaccttactgcagatggttttaatgtctgcgtagaagcgcctttaaaggtaaaacgtgcttttgatcctgtaggccataagacagatgctgttgacagcaagcaaatagctgagtatgcctatagataccgtgatgagctaagactctggaagcctaaagatgaaatcctcgagaaggtcaggcaattattagctgccagggaacgcttcacaaaacagagcaccgctatacagaatgcgtcaaaggcttatgaaaaagaacctatcaaggtagctttaatcataaaatctcataagcaggctttaaaacagcttaagaaacacattgctgatattgacaaagaactggataaacatatacatcaaaatccagctatatttcaaaatacaaataccttaaagagtatacctggctatggcatgcttctatccgctaaccttatggttattacagataactttgaaaatataaaagaccataaacgtttatcagcttttattggtatagtaccgtatcaacatcagagcggcacatctataaacaagaaagcaagaatccggcactttggaccacagactactcgtaagctgttacggcttgcggcacagtctgtggcaacacataataaaggattcaggcaatactacttgcgcaaacaggctgaaggtaaagctaaaacattagtattaaataacattgctaacaaactaattaagatcgcctgtgctatgatgcgtgagaataaaagctatattaaagagcatcgttctatacatcctatgtgcttaaaaacagcttgacaaagtcatagtgt

SEQ ID NO: 10122 - DNA, 1350 bp, unidentified
  source 1..1350: mol_type = unassigned DNA; note = element_fe8ec79
  misc_feature 1: note = core
  misc_feature 2..72: note = LE
  misc_feature 73..1098: note = CDS
  misc_feature 1099..1350: note = RE
  misc_feature 1101..1340: note = bridgeRNA
tatggatggcccgccccttagctgagctttggtcgtaagctgaccgggttctgataaggaaggagcgaagtcatgcaaatttcagttttgggtattgatcttggcaagaacagctgcagcatcgtagggctggacgaggctggcaaggtggtggtgcggcgtaggatgcgacgcgagacggtaatcgcgttcgcggccaagctatcaggctgcgtcgtcgcgatggaggcatgttgcggcgcgcatcacatgggccgggtgctagcgggccaagggcacaaggtgcggctgatgtctcccgagtatgtccggccctacgtcaaggcgcagaagaacgacgatcgcgatgccgaggcgattgcagaggctgcgaccaggccgaccatgcgctttgtcgaactgaagagcgaggagcagctcgacatgcaaacgctgcaccgcgttcgtgatcggctcgtgcgtgaacgcacctcgctgatgaaccagatcaggagcctgcttctcgaacgcggacacatcgtgccccaaggccgcgcgaagctggcagtcagactgaacgaactgctcgacaccgaggagcagatcctgcgaccgcgcatccgcatactcatcgctgacatgcgtgagcgctgggaggcgctcgaccggcggatcgccagtctcgacaccgagttcgtcgaacacgcacgttccgatgatcgcgccagacggctgctgaccatccccggtatcggggcgctcaacgcgacggcgctggtcgcagcggtcggtgacgccaacacgttcgggcgcggtcgcgatcttgctgcatggctcggtctggtgccacgtcaggcaaccaccggcggcaagccgcgcttgctcgggatcaccaagcgtggcagccgatacttgcgcaagatgctgatccagggtgcccgggcggcgatgccggcgctcagcaagagcaagacacagctcggagcatggttgcgtgggctgctcgcgcgatctcatccaaatgtcgcggtcgtggcgcttgccgccaagctcgcgcggatcgtgtgggcgctgctgcgatacgggcgcacctatcaaccggtcgcgctggcgacctgaacaagatcggtcgacgcctgatgcatcgaccggataatgtctgcgggaggtgagtgaagatggcctgacagtcgaccggtgtcctggaaccctatggcgtaaaatggcgcatcgacgccgacccctttatgaggaccaggacgcgcggatctccatcttggccaacggcaatagccgaaaggccggatacgtttatgcagactgcttcaagcccatcatcacaaaccgcttgccgacggggcgggccatacg

SEQ ID NO: 10123 - DNA, 1385 bp, unidentified
  source 1..1385: mol_type = unassigned DNA; note = element_fe9415d
  misc_feature 1..2: note = core
  misc_feature 3..104: note = LE
  misc_feature 105..1121: note = CDS
  misc_feature 1122..1385: note = RE
  misc_feature 1092..1371: note = bridgeRNA
agatggggtggttgccgtccgccccaaacggcatcgagatgtgccaagtaggtggtgtttacagccacgtaatggaaaggacggcaaccgtgacgaggactatcatgatcggcgtggatttggcgaaaaatgtcatccaagtgcacgctgcaagaatgaccggcgaggtcgaatatcgcaagcaactgtctcgcgaaaagttccgccggttcatggccgagcaacctcccgcggtggtggtgatggaagcttgtggcagcgcaaattattgggcgcgagaactcggtcgcgttggtcatgccgtgaagctgattgcgccgcattatgttcggcccttcgtcaaacggcagaagaatgatgcagcggatgctgaggccatcgtcatcgcggcgcagcgacccgaaatgcgtttcgtcgctgccaagtcagagcagcagcagggacgggcgatactgtttcgcaccaggacccgtctcgtccatcagcgcactgagttgatcaacatgcttcgcgctttcctctacgaattcgggcatacagttccccaaggaattcaacaatgtcagcggattgaagcgatcattgatgaggccaacagcgaccttccagaaatcgttcgctcagaatgccgcgaaattctggatcagcttgccgggatgacggagcggatcaaacgaagcgacgagcggattagggccttggcggctcaaactgacacctcgcgccggttgcagacgatgccaggcattggccctatgacggctctcgccgtagaggcctttgccccgcctatggagagctttcggtccggccgtgattttgcggcatggctgggattggtaccgcgtcagcattcaagcggcggaaaggcccgaaatggacggatctcaaaagcaggtcaggctgacattcggcgcctcttgataatcggcgcaatgtcccgcctaaactggatgggtcgcaaagctattccgccagggtcatggctcgcgaacctgagtgcacgcaaacctcggatgttggtagcgattgccttggccaacaagatggcgcgggcgatctgggccatgctcaccaggcatgagaacttccgcgatccgatggcagcaaccgtggcatgatcgaaccacgataagctgacatcggtaacggggagcaagaaggcaataatttgaatgggaaaggatcgaacagaccggaccaggaaaaccagccctagcacgtgagcttccatgctcggaaagtagatttggacctgatccgcggatcaccataccggccagcggtctctgaaatgccgcaaatcaaaggcctgacagaagaccgcgctcgatcaattgctcaatcaatcacaaccctcttgcataacggacggcaaccacaga

SEQ ID NO: 10124 - DNA, 1344 bp, unidentified
  source 1..1344: mol_type = unassigned DNA; note = element_fe9a349
  misc_feature 1: note = core
  misc_feature 2..68: note = LE
  misc_feature 69..1091: note = CDS
  misc_feature 1092..1344: note = RE
  misc_feature 1112..1338: note = bridgeRNA
gaatgacatggatcccccctcatgtggatttgccacacttaagtgccatattcaaaaccggaggttccatgtcttctttaatcttttgcggtgttgacctcgccaaacaccacttctcattgcacgctgtcgatgagcgaggaaaagtcactcttcacaaatcggtgtctcgcgctaaattgctgtataaattagcaaatatgccacctatgcgtataggtctcgaagcttgcagtggtgcgcattattgggcgagagagttcattaaactcggtcatgatgcccgcattatggcggcgaaatatgtgggaccgtatcgtaccaaaggcaaaaatgaccttaacgatgccatcgctatctgtgaagcggttcagcgtcccaatacgcgctttgtccccgttaaatcgcctgagcgacaagctatcttgtccattcaccgaatgcgtgaacactgggtacgagagcgcacggctctcatcaaccgtattcgcgctctgctggctgagttcggtattgtttttcccacaggtcgcgctgctattcatcgtgaagtgccactcattcttgaagcggcggaaaacggtttgcccgacattgcacgtgcggtcttagctgactgtttcgaacatcttcaaacgcttaatcagcgcatcagtgaagcagagcaaagctttgatcttgtggtaaaagcgagtcctagtgctatgcgcatcatgaaagtaagaggtatcggccctcaaacggctaccgcaattatcgccactatcggcaaaggggaacaatttgattcaggtcgagactttgccgcttggctagggttagtccctaaacagtattccaccggtggtaagcccagacttgggcggatcactaaacatggcgacaaatacctacgaacattactcgtccacggtgctcgagccgcaatcaccaatatcggtgagaagcaggacaggctcagtaattggggacgagatgtacttgaacggcgaggcatgaaccgagcgattgtcgcactcgccgctaagaacgcacgaattatctgggcgttattacacaatcaaactgaatatcaagactacgcggcctaacacccaagtcacgtagagaaacaccccaaccgggtcattgcagacgcagctgatgagaataggttaagaccatttgcagagagcctgttaatgcggcgggcacatttgatgccttctaacgaataaggcactgcaaccgcgcaatgtcatcagggccatgacgagagtcagataaaggccgaatgtagagcggcagtccataacatatctcagaatgtcttgcggatgtttgacgtacggggggatccatgta

SEQ ID NO: 10125 - DNA, 1439 bp, unidentified
  source 1..1439: mol_type = unassigned DNA; note = element_fe9b122
  misc_feature 1..2: note = core
  misc_feature 3..151: note = LE
  misc_feature 152..1186: note = CDS
  misc_feature 1187..1439: note = RE
  misc_feature 1210..1434: note = bridgeRNA
agatggggtaacgggccggccgcccgctcgctacggcgcgctttggaagcgcgctcgcgagcggcctgttggttggaaggcggtcgtccctcaaactgatggtgtcaacggagtcgggcaagcccgctccaagcatcattaagggacgaccatgtaccactatgcaggaatcgacgtgtctttggaatgctcgagcgtctgccttgtcgatgggacgggtaagattttgcgcgaggcgaaggttgcgagcgagccggaggccttgatcggctggttccggtcgctggggttggtgctggaacggatcgggctggaggctggtccgctgtcgcaatggctctacgcagcgatgcgggatgcgggcctggcagtcgaactgttggagacgcggcacgtccgcgatgccttcaaggcgatgccggtgaagtcggaccgcaacgatgcccgcgggatcgcgcaactgatgcggctgggctggttccggccggtgcactgcaagtcgatcgaagcgcaggagacgcgggcggttctgacggcacgcaagctgctgcagtcgaagctgcgcgacatcgagaacagcctgcgcggcgtgctccgcggcttcggtctgaaggtcggcccgaccaccgagcgcacgttcgccgaacgcatccgggagctcgtagcgggccatcctggacttgaggtggtggcccaggcactgctcgaagcccacgccgtgctgcggcgcgagttcaatggcctggataagcacacccaaaggctcgccaggtcgcacccgcaggcgaagctcttgatgacgacaccgtccgtcggcccgatcgtggcgctcacctatgcctcggcgatcgacgacccgaagcgcttccggtcatcgaaggcgacgggagcgcatttcggcctcaccccgaagaagtaccaatcgggcgaaaccgactataccggccgcatcagcaagatcggcgatgcctccgtgcgcgaggcgctctatcaggcggctcatgtcatgctgaccaagccggtcaggaactgctcggcgctgaagggctgggcgatgcggatcgcccggcgcgcaggcatgcgcaaggccaaggtggcgcttgcacgcaagctcgccgtgatcctgcatcgcatgctcgccgacgccaaaccgttcaacccgatggccaaggcctcggcaacctaagcaaggagcagcaatcggctctgggcgggccacgacaccaggctctccctgagcgaggtcccttcgccgggacgatggatccggtcaggccgccatccgggaagtggctcacaaccacgcttccgtagattggccggccggctcctcaatgcaccccatcaggcgacggccaccgcgccgatcccgtacagaagcaagtgcccggcgagtggatcacgcaaaaagggattgacttaccaaggcccgttacaga

SEQ ID NO: 10126 - DNA, 1351 bp, unidentified
  source 1..1351: mol_type = unassigned DNA; note = element_fe9e990
  misc_feature 1: note = core
  misc_feature 2..292: note = LE
  misc_feature 293..1336: note = CDS
  misc_feature 1337..1351: note = RE
  misc_feature 12..285: note = bridgeRNA
ctgtgagagttggggtggctggtctgggactggctgccaggatggcgtagaccgtctcgtcgtgggtgtgacccataggaaccttggcccctgcgggtgccctcgggacgacctgtccgcccgggacgagggggtcggcgccgtcctggcccaccacggtgacttgatagaagcatgcccggcacctggtgccgtggctcgtcacaggtgtgtcccggggtgaccttcctccaggccggcgccgacccttggcggtcggtcctgcccgtcctggagagaggaagtcccgaccatgagcattgtcgctcatgcccacccgttcgtcatcggtgtggacacccacgcccgcaaccacgtcctggccgtgctcaaggacaccggcgagcacgtggacacagccagcttcccggccagcgcccagggcctggagcgtgctgtcgggtgggccgcccggcgcaccggcggcgacctggcagcgctgtgggtcgtggagggagccgggtcctacggcgccgggctggcccgcgcggccaccagcgccgggtaccaggtcctcgaggcgccacggatggcccaggcacgcccgtgcggcaggtccgaccccctggacgcacgcaggatcgccgccgccgccctggtcacaccccacgaccagctgcgccgcccgcgcgccgacgacggcgtccgcgccgccgtccaggtcctgctcaccgcccgggacagcatggcccgcgaacgcaccgccgccgtcaacgccctgacagccctgctacggaccgccgacctggggatcgacgcacgccgacccctgggcgccgcccaggtccgccaggcagccgcctggaccgaccgccccgagcccgtcgccgccgcccgcaccgaggcccgacgcctggcccagcgcgtcctggacctggccgaccacctcaaggagaaccagaccaccctggccgagcacgtccaggcctccccagccgccaccctcctggaccacacaggcgtcggacccgtcagcgccgccgtcgccctcacggcctggtcccaccccggccgggtccgcgacgaggccgcgttcgccgccctcgccgggaccagccccctacccgcctccagcggcaacaccacccgccaccgcctcaaccgctcaggagaccgacgcctcaaccgcgccctgcacaccatcgtcctgacccgcgcccgctgcgaccccgacacccaggcctacatcacccgacgcaccagagaaggactcacccggcgtgagatcctccgctgcctcaagcgctacctggcccgacacatctaccgcaccctcaacgccgccgccaccgcttgacaaacatagaagcgt

SEQ ID NO: 10127 - DNA, 1415 bp, unidentified
  source 1..1415: mol_type = unassigned DNA; note = element_fea0879
  misc_feature 1: note = core
  misc_feature 2..119: note = LE
  misc_feature 120..1139: note = CDS
  misc_feature 1140..1415: note = RE
  misc_feature 1179..1414: note = bridgeRNA
attgaaatgaacgcgctccacccgtaaccgccagaaaggatcgtggatcccacagaccaacgcaatcgatgcgtggaggtgcaaaatgcaccaattcccgataaccggaggatccagagatgaactctatggcggtgggcgttgatatagcgaagacggtgtttcaggtgcactacatcgatcaggaaactggcgagatcgtgaacaaacagatcaagcgggcaaagtttctcgagttcttcgcgaaccgggctccctgtctcgtcggtatggaagcgtgtggcggggcgcaccactgggctcggcagctcacgaagatgggccatcaagtgaagctgatgcctgccgaattcgtcaaggctttcaacattcgcaacaaaaacgatgcggccgatgcgcaggcgatctggcgggcggtgcaacagcccagcaaaccggtggcggtcaaaacagaaatgcagcaggctgtgctggcgctgcaccggatgcgcgagcagctggtgaagtttcgtacaatgcagatcaacgcattgcgcggtctgctgactgaatacggcgaggtgatgggtaaaggacggactgcgctagataaggcgattcctgaagtgctcgccagggtggccgaacggctgccggccgtgcttatcgacacgatgcgcgaacagtggaacggcctgacggcactggatgagcagattgccgggatcgaacggcgcatgcgcgagtggaagaaggacgatccggctgtcaaggcgatcagcgagattcccggtgttggactgctgacggcgacggcggcagtcgcaatgatgggtgatcccaaggccttccggtcgggccgagagtttgccgcatgggctggactcgtgccgcggcagacgggctcgggcggcaagataaacctgcatggcatcagcaagatgggcgacacctatctgcgcaagttgctgattcacggcgcccgcagcgtgctcactcatgcgaaggaaccagggccgtggatcgaccagatcagcaaacgccgaccgccgaatgtggtaaccgttgcgctagccaacaagatggcacgcacgatctgggcgttacttgcccataacaggccttaccagaaagaccacttgagcgtgaagccggcgtaagccactgctgtcatggagaaaatcaacgtttaatgcagtacgagcttcgaaggttgcgcaggcaatcgtatgtgatgacacacaggtaggaccgtgacccgccaagcctgaaagacgtgaagagccttgagctcgcggagtgaatgaggcgcgggtcagcggatttcatagtgggccgcagcgtagcaactgcaataagcccggatatagagctgcaaccgatcctgtcatgtcagaacacacgagcgcttgctcaaacggagcgcgttcatatag

SEQ ID NO: 10128 - DNA, 1667 bp, unidentified
  source 1..1667: mol_type = unassigned DNA; note = element_fea1929
  misc_feature 1..2: note = core
  misc_feature 3..472: note = LE
  misc_feature 473..1567: note = CDS
  misc_feature 1568..1667: note = RE
taatctccattccgccgccaagcggcggcacaatagtaatgaaagtattccaacttctactctttggtgtaaaatagcttgtgagaagctacactacaaagcacgggaggagaagttgtaataactttcttcgttttagacagcattttaatcagtgtaagttctgccttttcaagcacaaataagtggtactatgagtccatacactaagaattgtttaagcgccttagtttaattgtgtggcagttcagtcaatggcctctcttcttttacgtaaggagtctgacttatgaaagttacttaccaaacctgttgtggtgtcgatgttcactaatcttttctcgttgccacaattattaaaacctctggcggaattgagccttcttatcaaaaaaagcggttttctacctttaacaattctattcttgaattcaagcactggcttctcgacaataactgccgggatgtctgtatggaatccactgggaaatattggatccctgtctttaatcttcttgaagatgaaatcaatgtcactattgctaaccctaaatgggtaaaagcggtaaaaggtaacaaagacgatacaaaagattctaaatggattggtgacttgttccgtcttggacttgtgagaggcagttatgttccttgtaagaccatccgtattttacgtgaatatactcggtatcgctacaaacttatttcctgccgttccagcgaaaagaatcgatatcagaatgcgcttaccgtctgtaatgtcgcattagattctgttgtttccgatatctttgggaagtcatccacatccattattgactacctgcttgaacagtccggtcactctattaaccacgaagaaatcgcatcaaaacttcttagacgtctcaaatctaaaacagatgccgttatagaatccatcgagggatatcagatgactgatgcccaaaaataccgtatgcgcctcgtccgcgcacatatggattatatcacagccgaaatcactgatatagactctatgatagaaaatctgatttcttctgattctgattatgaaaatactgttcagttactctgtaccattccgggtgtaaaacatgacagtgcaatcactatcatctccgaaatcggtattgatatgtctcagttctgtacctcgaaacgtttatgttgctgggccggattaactcctggcagcaatgaatctggtggcaagaagaaatccgttcgggttacacgtgccggtgtctacctcaaacctgcattagtgcagtgtgctcatgcagccgtcaaatccgagaaatctccttactacaagaagaaatatgaatctctgatgaaacgccgtggcaagaaaagagccattgttgcaattgcccgaatgattcttactgcaatttaccagatgttatcaactggtgaatcatggaatccaagcgatttgtataaaatcgatatacctgaagctttactggaaaaacaaaaagcaaaagccatcaagcaagccatgaaactattgcaacgcgagggattatatcctctaccacaagaatcaaaagcttcataatcatcattatcaacatcaacttacctttttcaaaagttgccattaatgacagcttgttcaagtgtgccatttattggctgtcctctacattctttcacac

SEQ ID NO: 10129 - DNA, 1743 bp, unidentified
  source 1..1743: mol_type = unassigned DNA; note = element_fea2a68
  misc_feature 1..2: note = core
  misc_feature 3..366: note = LE
  misc_feature 367..1599: note = CDS
  misc_feature 1600..1743: note = RE
  misc_feature 61..340: note = bridgeRNA
ctcgtataataagtttatagttaatagttacaaagtaccttgataactaaatagatactaaaataggtcactcggtttgttagtacccatgatataattgaacatcgtatcaatcaggtattagttcttttatttcctgttgaatcagcattgattacttcatggaaagtctgttcccctgacatggaagttaacttcaaaccaactggctgtttgttggagttcatgacctgcccttttgcagtgggggtcgcatcaggccatctccaaccgaattctaataccgcgaggatgttgatgctccatgatcgtgggtattaccaagccgattgaccctaaatcctactacgaaagaaggtgatccttatgaacccactttatgtcggtattgatgtgagcagcaaatccaacgtggtctttctcatgaagcccgatggttctaaacacagctgtttcccggtgaagaactccctcgatggttcacgccagctcgttaagcgcattctccatactctctcttccgaatcccttacagacgttatcattggtctggaggccacctccgtctatggtgacaatctcgtctgcttcttaagggacgatggctctcttacgccgtttaacaggaagattcacgtcctcaatccaaaacaggtcgccaagttcaagctttcttataatgacctgcctaaaaatgattatgtggattccttcgttatcgctgactgcctgcgctttggtagaatcaacaaagaggtctatctggatgactaccgctacaaagccctccagaaccttacaagagccaggttcttcgctgtccagaacctcgtcaaggaaaaacagcggtttctgaactacctgtttaagaagtattctacgatggcgcaggagaagatattttccgataccttcagcacaactgccctggccgtctacgaaaaattcgaatccgcagaggccctggctgagatggacttacaacagctcaccgattttattatcaagaacgggaagaaccgcttccctgaccctgacgcggtggcgaaagccatccagaaagccgcccggagctcctaccgcctgccaaagacggtaaacgactccgtaaaccaggtgctttctatatccataagctcaatacgagcaatggagcaacagatcaaagcctttgataaggccattgccgaacagatggctctgatacccaataccttgacctccatcaagggaatcgggccggtgttctcggccggcatcattgcggaaatcggtgatatcaaccggttccccaatcaggccgccctcgcaaaatatgcggggcttgcatggaaacagcaccagtccggtgactttgaagcgcaaaacacacgcatgatcccatcaggaaaccgatacttgaagtactacctgggagaagcagctatgtctcttgtgagatgcgacgcagaatacagccgcttctaccgcctcaaatacaaagaggtgaacaagtatcagcacaaacgtgccctcgcattaactgcccgtaaatttgtgcggctcgtctttcgactgctgaaagacaactgcctgtatagggcaccggagtccaactaggtttggacgctttcggtgatagtaggcccggcttttgaaaaaatcaaaatcgacggggcttaggtaagtgcacccttttaaagggaaatacaacaaaaaacctgcattttttattcattttcctcttgacatatcaccgctgga

SEQ ID NO: 10130 - DNA, 1353 bp, unidentified
  source 1..1353: mol_type = unassigned DNA; note = element_fea30b2
  misc_feature 1: note = core
  misc_feature 2..70: note = LE
  misc_feature 71..1108: note = CDS
  misc_feature 1109..1353: note = RE
  misc_feature 1122..1347: note = bridgeRNA
taacgggatggtccgttccgattccaagtggagcacactgaagtcaagcagttgacggaaggagaccgccatgaagaagcgcattgaaggagttacgacgtacggcatcgacattgggaagaacaccttccacgtcgtcggcctcgacagttcgggcaagccggtgttgcacagcaagttccgacgcgatcgattgcttgtccattttgcgaacactccggcagcgcttatcggcatggagagctgtccaggatcacagtggctggcacgcaagctccaagcgtcgggccattcggtcaagattatccctgctcagttcgtaaaaccctacgtgaagtccaacaagaacgacatggtcgacgcagcagcgatcgccgaggcagtcacccggccgacgacgcgattcactcagataaggcatccggagcagtgcgcccggcaggcgctgcaccgggtgcgcgatcgctatatgagccaacgtacgggcctcatcaaccagatcagagggtttttgctggagttcggtgtccctattcggctaggcgtgggcgtcttccgattggatgttccacgagctcttggagatgaggagaacgaactgccgccatccatgcggtcgctccttgccgatctgtggaacgacttcaagctcctggaggccaggatcgaagaactctccaggcagattcagcgcagcgtgcagtatagcgacacagcccgacgactcatgacggtacccggcatcggaccgcttgcggccagtgctcttgaagcctcagccggcaacggtcatcagttcgcgaacgggcgattctttgcagcatggcttggactcacgccgcgagagtattccactggcggcaagacgaccttgctcagcatcagtaagcgaggaaacacctatcttcgaaggctattggtccatggagcccgatcctgcgtgcagacctgcgacaggcagcgtcatcagctgggagcatggatcaccaagcttgaacaacgcatgcatcgcaataaggttatcgtcgcactggctaacaagatcccccgagtcgcctggaagattctcaccaagcccgaagagatctatggctgggcggaggtctgacacaagcttttcccaagtttgctgcgcagagaacagatggcacaacggtcgatcggcatgctataaacccgctcggggaaaccggtcttgttcaagaccgaaccaagttattggtaacagcatgcgcggatctcatcatggcctggtcgccaaaagcggccgactcgcgagaggccggatacatttatgcaaaccgctatgtgtcaaaagcaaactgcgcttgcaaaaacggagcggaccataca

SEQ ID NO: 10131 - DNA, 1407 bp, unidentified
  source 1..1407: mol_type = unassigned DNA; note = element_fea6692
  misc_feature 1..3: note = core
  misc_feature 4..83: note = LE
  misc_feature 84..1118: note = CDS
  misc_feature 1119..1407: note = RE
agcatgcgtaattgggctgcctctgttctgaggtcgagctcccgataagatcacagagtgtctgtgaccaagggagatagatgatggaatactttgctggactggatatttcactgcgctcttgtgcgctatgcattgtcgacacgaacggaaaggtgatccttgaacgtgagctggcttgcgaagtcgacgacatctccgagtgcctttctcaatttcaatatccgatagaacgggttggctttgaagctggaacgatgagccagcatctcttcttttggctgaccaacaaaaggtttgatgtcgtttgcatggaagcccgacaagtgaatgccgcgctgtctgcgatgaggaataagaccgacaagaatgatgcacggggcatcgctcaggttctgcgcaccggatggttcagcccggttcacatgaagagccgcgaggcgcatggccttcgtgcgttgctgagtacccgcaaggcattgctcaagaagacgatggatctggccaatgaggcccgtggtctgctgaagatattcggtatccgtctgcctagaaccgtgaagcatggtagtttcgacggtgttgctaggccaatgatcgagatggatgatgttcttgcacatgctttggtgcccctgctcgatgcgcgagtggtactgtatcaacattttctggagcttgatcggcgggtcaaacgggccgccagccaagacgaggtctgcatgcgattgatgacggttcccggagttgggccaatcgctgcgcttacgttcaagggagctattgacgatcctgcgcgattcaaacgatcccgcacagttgctgcgcactttgggctcacaccgcgacgataccagtcaggggagcacgataatccaggtcgcatatcgaaagcgggtgataaagatgtccgagcaaccctatatgctgccgcaaatgcgttgctcatgcgaacgatggcaagttcgcagatcaaattatggggcatgcggatgatgcgtacaaaaggccgccgcagggctgttgtcgccgttgcacgcaagctcgcagttctactgcatcgcatgtggatagatggcacggaattccgtcaggaccaggtgggaggcagggtatgatctaaaacgctaaccacccaatcctaacggggtcgtcctcaccggacgaggtctgtgccctctcgggcatggaaacatgccctgtctggtaatagatgaagccgaaaatggctgctgcgccacttgaagcgcgcctgagagcaaggttctccactgccaatccgacatatgcgtgcagcggtgccatcacggcataaaatagactgcgcaaagaagcgtgacccggatgagcgacaatgccccaaaagaaacagggaaaacgagcttgacccaaacgcccaattagaga

SEQ ID NO: 10132 - DNA, 1424 bp, unidentified
  source 1..1424: mol_type = unassigned DNA; note = element_fea8fbe
  misc_feature 1: note = core
  misc_feature 2..226: note = LE
  misc_feature 227..1411: note = CDS
  misc_feature 1412..1424: note = RE
  misc_feature 14..237: note = bridgeRNA
ctacttgttccattgacccaggaccggtgcttggcaaggctcggtccaggtgcccgggtcgtcgctcccacatcggctgcccacgactggtcgtgtggctctctcatggcttgcgcggctcgggtgccgcctgagcggggagaggctcaagaggggtttgctcagctcgaagtagcggtgccctccctgctcgacaaccacatcggttcgagcagcggaggacgacatggtgcagtcaggtcgcgtggtcatcggaatggacccacacaagcggtcggtgacgatcgaggtcatggccggcgacgagaccatcctgggcggtggcaggttcgccaccgacccggacgggttcacgacgctgcgtgagtacgtgcgcgcgtggccggaccgggtttgggcgatcgaggggtgcaacggcatcggccatcacgtcgccctgcggctcctcgccgaggcgcaagaggtggtggacgtgccgccgaagatgtcagcccgggcgcgggtgttcgccacgggtcagggccgcaagaccgacgccaccgacgcccactccatcgccctggtcggcacgcggatggccgggctgcgcccggtcatcgacgacgagcagctggcggtgctgcgcaccctggcagaccgtcgccgggcgttgggtcaggagcacacccggatggtcgctcagctgcatcacctgctcctcgagctggtcccaggcggagcgaagaagttcctgtccgcggcgcaggccaaggagatcttgagcaaggtgcgcccgcgggacgccgcgggcaaggtccgccgccgggtcgctgccgaactggtcggcgacctcgagcggacctacaagcgcaagaaggccgccgacaaggaactcaccgaactcgtccgggccacgggcaccagcctgctggacctgaccggcatcggcccctccggggcggcccggctgctggtcgaggtcggcgacatcacccggttccccgaccgggctcacttcgcgtcctggaccggcaccgcacccatcgacgcgtcctccggcgaccacgtcaggcatcgactctcgcgcggcgggaaccggcagatcaaccgcgtcttgcacatcatggccaccgtccaactacgcagccccggcatcggccgcgactactacgaccgcaagaaggccgacggcaagacctcgatggaggccatgcgcgccctgaaacgacgactctccgacgtcgcctaccgggccatgctcgacgacgccgtcgcccacaccaccgacgcgaggacgggcccgggaggacaccggggaacgtctctcacatccagcgcgaccggctcacatccccacaccggcacttcggatcagtcacttcccggacccgtcacccacgaccctagaaccgcactccccgccgcgtcttgacacagaggggagc

SEQ ID NO: 10133 - DNA, 1365 bp, unidentified
  source 1..1365: mol_type = unassigned DNA; note = element_feb7ee3
  misc_feature 1..3: note = core
  misc_feature 4..88: note = LE
  misc_feature 89..1111: note = CDS
  misc_feature 1112..1365: note = RE
  misc_feature 1130..1353: note = bridgeRNA
tgatgaggtggacggcccccacccaaacggcatcgagtcgtgccatgatggtgctgtcatcgaccatcagtaggaaggagccgcccacatggagattaccacgatcggactggatatcgcgaaaaacgttttccaggtccatggcgtagattgcgaaggtaaggtggtgctacggcgcaaggtcaagcgggaccagctgctcacgctgctcggcgagctgcagccatgcctgatcggcatcgaggcgtgcgcgacggcgcatcattgggcgcgtcagctccaggcacttggtcacgaggtaaggctgatgccgccagcctatgtgaaggcgtatgtgaagcggaacaagaatgacgcagccgacgccgaggcgatctgcgaggcggtgcggcggccgacgatgcggttcgtaccgatcaaatccgccgacgctcagagcgtgttgatgttgcatcgtgcccgccatctgctggtccggcagcggaccgcacaagtcagcgcgatgcgggcgcacctggcggagtatggggtcatcgcgcccaagggtcgcgcgcatgttcgcgagctggtcgaagcgcttgccagtggcacggcgctggtaccggagctcgcacgccagaccctgctgctgatcgctgacatgatcgaggggctgagcgggcagatccgcgcgattgagatcgagttgatgagatggcatcgcgccaccattgcttcccgtaggctggagacgatccccgggatcgggttcatcaccgccaccgcgctcgcggcaaccgtcggcgacgcccgcgtcttccgctcgggtcgccagttcgccgcatggctcgggctcgtacccaaacaacactcctcgggcggcaaggagcgcatgggtgggatatcgaagatgggcgatcgctatctgcgccatctcctcgttgtcggcgccactgctgtcctacgctacacccgccgcaagacgacggccgtcagcatctgggcggaccggctgctggagcgcaagccggcgagactggtgagcgtcgctgtcgctaacaagacggcgaggatcgcctgggcggtcatgacgcgagaggaggattaccgcgcggctccggccatcacctgaagcacgcacggaacaaagtctgggcaggagagaacgaaacgaatgatgccaactcggtcaagccggggatcggaacaacctgcgtgattcaccgcgccgcgagcgcgacacagtgatgaggatccgatccactgacaccatcatggccagcggcctctcgcgccgcgcgaataggccggacacatgaatgaacctgaccaggaaaagcttcatctgccgaaaatcgctcttgcccaccgggggtcgtccacaca

SEQ ID NO: 10134 - DNA, 1395 bp, unidentified
  source 1..1395: mol_type = unassigned DNA; note = element_fed6a48
  misc_feature 1..2: note = core
  misc_feature 3..140: note = LE
  misc_feature 141..1121: note = CDS
  misc_feature 1122..1395: note = RE
  misc_feature 1095..1382: note = bridgeRNA
tgatggcgtagatgccccctcctgacggcatcgcaatgtgccaatgtgatgagtgttgaggtcatcacagaaggagagagcatccatgttcgaagttaccattgttgggatcgatctggcaaagcgcgtcttccagttgcatgttgcatggagcgagccgcgacggggccgtcgtatttcgcaagaagctgtcccgaggtcaggttctgacgttcgttgccaaacttccgcggtgcgtgatcgccatggaagcctgcgcgacggcgcatggatggggccgagagattgagaggttggggcgcgaagtgcgtctgatcccaccgatctatgtgaagccgtttgtcaaacgccagaaaaatgatgcggccgacgcggaggtgatcgtcgaggcggctctgcgcccgaccatgcgttttgtcgcgctgaagacgatagaccagcaggcccgtgccatgctgtttcgtacgcgacagatgttcgtcggtcagcgcacccagatgatcaacgccctgcgcggccatcttgccgagcacggtctggtggcggcccgagggcctgcccatctcaagcggctcgcggacgcgatcgaggatagcgacacggccttaccttccgaggttcgcgaactgggccaggtgtatctggaacaaatcgaagtgctgaacgcacggattgcacagcttgacggaaagatgaggcgggtggccaaagatgctgtcgtagcgcaccgcgcccagaccatgccaggcgtggggcccgtcaccgcgcttgcgatcgagacatttgcccctgacttggccaacttccgacgcgggcgcgattttgccgcgtggctggggctgatgccgaaacagcactcgaccggcggcaaggcccggctgggcaggacctcgaaaatgggacaacgtgatatccgaacccttctggtctccggcgcgatggccattcttcaggcggtcgagcggtttgacaggccgcgcaatggctggctcaagcgcctgctgacccgcaagccgcgcatggtcgcggcgatcgcactggcgaacaagatggcgcgtggcctctgggcgatgatgacgaaacaggaggattatcggaaaccggcggcggcaatggcctgagcgcaccgctcttgccaagccgccccggtacgtggggagtgtgaggaggtcgctgaacagtaagggcaaaggatcgatcagattcgggtcagaaaaagcagcaagtgtgcaggagccaccgagctcggtctgttgatatgcttctgatccgcgcatcgccataccggcccgcggctgtgtcaatcgccgcaacgagaggcctgatacatgaccgcacccgatcacacgctcaagccgctcaaaaaccacttgcaccaacgggggcatccataca

SEQ ID NO: 10135 - DNA, 1504 bp, unidentified
  source 1..1504: mol_type = unassigned DNA; note = element_fedfa1d
  misc_feature 1..2: note = core
  misc_feature 3..245: note = LE
  misc_feature 246..1484: note = CDS
  misc_feature 1485..1504: note = RE
  misc_feature 6..229: note = bridgeRNA
ctaatggcttgtgccggcctgctgcggcagttccggttccggtagcggccagcggggcagcactcttctcatctgacccgtggaggtctcgcggcagaccgtgcgcccgttggtcgtgaggaggcgtaaaccgctgctgggatgtcgtgccccatcggtgatggtgagcacttggaccattagatcgctggctgtcctcctccgcgctgctgaccaatgagatggcgagtagggaggccgaggcgatgctcttcatcggagatgattgggccgaggatcaccacgacgtcgagctggtcgacgacgagggccaggtcatggcacgcagacggttgcccgaaggcatcgaaggcatcgccggactgcacgcgttggtcgccgaccacctgcccgaggactgggccgagctggaacccgagcaggtgcagggcctggtcaaggtcggcattgagactgaccggggaccctgggtcgcggctctggtcgctgcggggtacgaggtcttcgcgatcaacccgctgtcggtggcccgctaccgtcaacggcactccacctccggagcgaagtccgacgccgcagacgcccacctgctggctgagattatccgggtcgaccgggctcaccaccgtccgctggccggtgactccgaggaggccgaggcgatcaagcttgtggctcgcacgcaccagagcttgatctgggagcgcagccgccatgtgctccggctgcgctcggcgttgcgggagttctttcccgccgcgctcgaggcctttgctgacctcgatgcacccgacgcgctcgagctgctggcgttggcgcccgagcccgaccgcgcccgtcagctgacacggcgccggatcaccgcggcgctgcgaagggcgaaccggcgcaacgtcgacgccagggtcaacgagatccagcagatcttgggtgccgagcagttgcaccggtcaactccggtgcagtcggcctacgcggcgatcgtggccggccaggccgccatcgtggcgaccctgaacgcccagatcgaccagatggcggcggtggtggacgcgcattttggccaacacccggacgctgagatctacacgagccaacccggcctcggcgtggtcctcgcagcccgggtgctcggcgagttcggcgatgacccccaccgctacaccgacgccaaggcccgcaagaactacgccggcaccgccccgatcaccaaagcatcagggaagaagaagatcgtgttggcccgctacgcgcgcaaccgccgactcggcgatgcgctgcagcaatgggcgttctgctcactccgcggctcatccggagctcgggtctactaccaacagctccgcgcccgcggcaccggccaccaagccgcgctacgccagctcgcgaaccggctcgtcggcattctccacggttgcctgaagacccacaccacctatgacgaacacaccgcctggagtcaccacctcaccagcgccgcttgacatcgaaaaacctaggatgt

SEQ ID NO: 10136 - DNA, 1580 bp, unidentified
  source 1..1580: mol_type = unassigned DNA; note = element_fefeee3
  misc_feature 1: note = core
  misc_feature 2..258: note = LE
  misc_feature 259..1458: note = CDS
  misc_feature 1459..1580: note = RE
  misc_feature 9..245: note = bridgeRNA
cgttaccttcttagtagcccttatcgagtaagaattggggttgttggcctgtcggtcccggcatgattaattcccccagtcatcaatgatccggggggtgttgtcaccgggattcgataggcgccaggggatcgctaatggggaccggaccagcgcaaggaagcaccgcgtaggtcagccgtaacgtggatgccgggccttgccgccgcgggacatgccaacacagatttgacggacacaaattctgggaggtctgcgttgatcaatgaccataaactcgtcgacatcttcatcggtgttgacgtcggcaagagcaatcaccacgcggtcgccatcgatcgccagggcaagaagatcctcgaccgggcactgccccaggacgaggccaaattacgctccatcatcaaggccgtagcgggcaagggacgcgtgctgttggtcgttgaccagccctccaccattggtgccctgccggtcgccgtggcacaggcagagggcattatggtcggctacctgcccggtctggccatgcggcgcatcgctgacttgcaccccggcgaggccaaaacggacgcccgggacgcggcgataattgccgaggctgcccggtccctgccgcacacgcttcgctccatcgtcgtcgccgacgagcaggccgcggagctgtcgatgttgtgtggttttgatgatgacctggccaagcaggccacggccacctcaaaccggatccgcgggttgctcgcgcaggtccatccggctctggaacgggtcattggcatgcatttggaccacccggccatggccgagctgctggtcaagtaccccacgccctccactctgcgcaaggccgggcagaacagggtcgccacgctcctgtcccgccacgctccgcgggccgggaaggcctgggctgccgaggtattcaccgccttgggagagcagaccgtcgtggtcgccggcaccaacgccgcaggcatcgtcctgccgcagctggcagcgatgctcaagcagttgcgaacgtcccgggacgagatcctcacccaggtcgaagcgcttgtggaggcccaccctcttcacaccgtcctgacctccattccggcggtcggggtcaggacggaagcgcgaatcatcaccgaagttgcgggcaaggaattcaagaccgccggccatcttgcctcgtacgccggactggccccggtgacgtggcggtcgggcacctcgatccgcggcgaccatccttccaaaaaaggcaacaaaagcctcaaacgggcattcttcctctccgctttcgccgcgctcaaagacccactctcaagggcctactacgaccgcaaacgtgccgaaggcaagcgccacaaccaggccctcatcgccctcgcacggcgccgctgcgacgtcctcttcgcaatgctccgcgacggcaccctatacgaagcacccgggactcaaagcgcctgaacggcctggcctgtcagctggcggcgacacaccgctggccatgcatctctgcccacaaacaggtcacaccacttgcaaagaaaaccggggcccaacgcttgacaaaaaacatagggacaccc

SEQ ID NO: 10137 - DNA, 1326 bp, unidentified
  source 1..1326: mol_type = unassigned DNA; note = element_ff0a4f3
  misc_feature 1: note = core
  misc_feature 2..73: note = LE
  misc_feature 74..1096: note = CDS
  misc_feature 1097..1326: note = RE
  misc_feature 1101..1321: note = bridgeRNA
taatgaaatggccagcccgatccccgcgaccgttctacgataggaagttcggcccacggtagaggagagcgccatgaacgagatcacactgatcggtatcgatttgggcaagcacgtgtttcatctgcatgcccaagacgtgaaaggtcacgaggtatttcgtaagaagctgacgcgctcccaactcttgccgttcttcgggaatctgaagaccgtgacggttgtcatggaggcgtgcgcgggatcgcattggctggcacgtcaattgatcgccatgggacatgccgccaagcttatttcgccgcagtatgtccgtccgtttgtgaagagcaacaagaacgactacatcgacgccgaagcgatctgcgaggccgcggcgcgcccatcgatgcgcttcgtcgaaccacgctcggaggcccagcaaacgcttgctgcgctgcatcgggtgcgcgagggactcgtcgtagaacgcacggctaccatcaatcgaattcacggcattcttctggaattcggcatcagcctgccatcatccaaagccgtgctgcatcgcttatccgatgccttggccgtcaatgagttgccgcgtcgactagccgagcttctgcaccgattgcacgaacattaccgatatctcgaccagcaggtccatgacatcgacaaggatctgacattgcagttacgtgaggacgaaaatgcggcccggctgctgtcgattccggggatcggtgtcgtcacggcaagtctcctcgcgtccgagatcgggaacgttagccagtatgaaggcgggcgcaactttgccgcgtcgatcggcctggttcccaagcaacacagcaccggaggccgcaacgtcttgtatggaatcagcaagcgaggtgacaagcatctgcgtcacctgttggtccaatgtgcgcgagccgtcatccagcgcgtggcgctacgaactgatcggcttggcgagtggatccgatcgatgctcacacgacgccattcaaacgtggtggcgtgcgcggttgccaacaagctcgcgcgaatcgcgtgggccgttctgacgaaacacgcggcgtacgatccgtcgctcggttgtcgtgcttgaaattttgtcacaccaggttttgcgactgctgtaactctgatgatccaacggcacagcgaccggacgaagaacctgacaagttgtacagctcccagcagctgccgacattttgaggatcgaccggtgcggttttcatcgtggaacgaggctcaacctccgattccggatagatttgcgcaagccaaagacatcagaaaccaggggttgcaaaattcgggctggccatagat

SEQ ID NO: 10138 - DNA, 1409 bp, unidentified
  source 1..1409: mol_type = unassigned DNA; note = element_ff0e827
  misc_feature 1..2: note = core
  misc_feature 3..80: note = LE
  misc_feature 81..1124: note = CDS
  misc_feature 1125..1409: note = RE
  misc_feature 1123..1396: note = bridgeRNA
tgttggtgtggacggcccccagcacggcatcgatgtgccagaatgaggtcgttgaagatctcaagcaaaggagaccgtccgtggaacatattattcgaattggcatggatacgtcaaagcacgtgttccaactccatggtgtgaacgcgggtgaagacccagttctgcgcaagaagcttcggcgcaaggagatggtggcgttcttcgagaaagcgccgccgacggtgattgcgatcgaggcgtgcggcggatcgcaccattgggcccgactactgcagtcgttcggccacgaggtgaagctgattccgccgcagttcgtcaagccatatgtcaagcgaggtaagaacgacgcggctgatgccgaagcgctgtgcgaggcgatgagccggccgacgatgcgcttcgtgccggtgaagacagccgaccgccagacggcgctgatgctggccggtatgcgcgaccgactaatccgtaatcgcacgcaactcgccaattcgatccgcggttatgcggccgagttcgggctgactgccgccaaggggatatgcaagatcgagccgctactcgagcgcatcgcggccgatgagacgctgccggagctggcgcgggagctgttcgcgctccacggcgcggaatatgcgcagttgcaagcgcggctggaagaggtcgacgccaagttgatggcctggcatcgggccgatgaatgcagccgccgtctggcgcaaatccccggcgtcggtccgatcggcgcatcgcttctgatgatgaagacgccaacgcccgagggcttccgatcaagccgacactttgccgcctggatcggcctgaccccgaaagatcactccacagccggcaaggtccggctcggcgtgattacacgcgccggcgacgaagcattgagaagtacgctggtggtcggcgccaccgctctcctgcgacgagtccgcgacggacggggcaggaattcctcgccctggctcctcgatctcctcaagcgcaagccgccgaagctcgtcgccgtggcgttggcgaacaaaatcgcgcgcatcgcctggaagatgatggtgaccggcgaagcgtaccgaaccaatgctgtgccgcctagtatggcgagcgcggcctagaagatcagccgaacacggggagcagacgaaaatgcgaccgtgcttgttgatgtcggaacttgcaagagaatgagcaggtggtgtgatcgatcgatccacgacgcaagatactccggatgacccactggccgttgtaggtcgcagtcatgttaggaactcgcgttgcggaaaccatcttggcccgcggtcatgtgcgaccgcacaaaacagaggccggacatatgatcgcaagcgatccgatcaaaacgctgctcaacaccttgcgaggagcgggccgtccacata

SEQ ID NO: 10139 - DNA, 1492 bp, unidentified
  source 1..1492: mol_type = unassigned DNA; note = element_ff18819
  misc_feature 1..2: note = core
  misc_feature 3..247: note = LE
  misc_feature 248..1471: note = CDS
  misc_feature 1472..1492: note = RE
  misc_feature 6..246: note = bridgeRNA
ctaatgggctctaccgggtcggcttgaacccggcagactcgggtctggtagcggccagcgggtgagcactctcagcgcctggtatttgatgcctaaagttagaccgtgcccccgctggacgcgaggagggcaggaccgctgatggggtgacgtgcccgctgggatatggcgtgagcactgatccattaggccgccggtgtcctcttccacgctgccgaagacgggatctgaatatgcggaggggcatgtgctgctggtcggggatgactgggccgaggatcaccacgatgtcgagttgcagaacgaggctgggcggcggctggcgcgggcccgcttgccggagggagtggccggggtcgcccggctgcatgagctgatcggtgagcatcttgccgcagacgctgacccgggccaggtggcggtcgggatcgagaccgaccgcggcggctgggtgcaggcgctgatcgcggccgggtacacggtctatgcgatcaacccgcggcaggtggcccggtaccgggaacggcatggcacctcgggcgcgaaaagcgacgcaggcgatgcgcacacgctggcggacatggtgcgcaccgaccggcatcagctgcgggcggtggctggtgacagcgcgcaggcccaggcggtcaaggtggtggcgcgggcgcatcagacgctgatctgggagcggcaccggcacatgctgcggcttcggaccgcgctgcgcgagttcttccccgccgcgctggaagcgttcgctgatctcaccgcgcctgatgcactggaactgctggccagggcgccggatcccgtcagcgcggcccggctgtcacggccccagatctctgccgcgctgaagcgggcccgccgccaggcagaagacaaggccgctgccatccagggcgcgctgcgcaccgtgcacctggcccagccaccggccgtggccgctgcctacgccgcgacagtacggtccctggtgagcatgatcaccgccttcaacgcccagatcgctgccatggaagagcaggtgaccgcgtgttttgggcaagcccgggacgctgagatctacctgtcccagcccgggctgggacaggttctggcggcccgggccctcggtgagttcggcgacgacccgtaccggtacgccaccgcccgcaaccgcaagaactacgccgccaccagccccatcacccgcgcctccggcaagaagaagaccgtgctggcccgcttcatccacaacgaccggctcgtcgatgccctgcaccagcaggccttctgcgccctcaccgcctcccccggcgcccgcgcctactacgaccagctgcgccgccgcggccagggccatcatgccgcgctgcgccagctatccaaccggctcgccggcatcctgcacggctgcctcaagaccggcaccctctaccacgagcacaccgcctgggcacaccaccgccaagatcagcaaactgccgcttgacactcacagcccatggggtgt

SEQ ID NO: 10140 - DNA, 1482 bp, unidentified
  source 1..1482: mol_type = unassigned DNA; note = element_ff247e7
  misc_feature 1: note = core
  misc_feature 2..127: note = LE
  misc_feature 128..1186: note = CDS
  misc_feature 1187..1482: note = RE
  misc_feature 1172..1449: note = bridgeRNA
gaatgaaagggacttccccgtcccaagcgagccgcgtcccatcagggttgcggtttacggcaacagagtgccaagatggagaggcgaatcttttcatcaactcacttgtttattggaaggggaaatcatgactatcgtaaccgttggaattgaccttgcaaaaaacgtctttgccgttcatggtgttgatgccacaggcaagcctgtgttgctcaagcccagcgtgccacgcgccaagttggcggcacttattgcgtctttaccgccttgccttattggcatggaagcctgctcaggcgcccatcactgggcaagactgtttgccacctttggtcacaccgtgcgcctgatggcgcctaagttcgtcgcgccgtaccggctttcgggcaagcgtggcaagaacgatgctgctgatgcgtcagccatctgcgaggcggttacgcgcgccaacatgcgctttgttccgatcaaaacactggaccagcaaggccaactcatggtgcaccgtgctcgtcagggatttgtagagcaacgtaccgccacgatcaatcgcatccggggtctgctttctgaattcggggtggtgttgccactcaaggccgctgttgtgcgtcaacaggcgctacaacacctggaagacctgccaggttgggccaataccgttgtgggtgacttacttagcgaggtgagccactttgatgagcgcattgcccaatacgaccaccacattgcaacgctggccaaagcggatcccgcagcacgccaactcatgcaattgcccggcgttgggccgactacggctacagcactggtcagtacgattggccatggacatgacttctccaatggtcgccagctcagcgcctggctgggcttggtgcccgggcagtacagctcgggtggtaagcagcgcctggggcacatcaccaaagcggagactcctacttgcgctctctgctggtgctgggcgcaagggcggtactggttgcagcaaaaaacaagactgacccgatcagccgctgggcaaccagcctggccgagcggcggggttactggcgcgccattgtggcgattgcggccaaaaacgctcgcatgtgctgggcagtactgcacaggggagatgcgttcaaacttcccgtgtgattctgatctgagaaaaaggagtttcgtttccaccaccgcgtgacgctagcgttgatgtgcaaaggttggacctgcgtggggagtgactgactacattacggagacacctttggtgtgctcggctaacgaatgagtcccccacgcgcgtctttcatcagggtccgcaagttttgcgcttgcatcaatgaccgtttgtagtttcgctgtccgtacctcttgccgtttgagcaccgcagccaatcgctcaaggtggaatcaggttgatagttccggtgtcaatcgcttgtgcgatttaaccccggtggaaatttgtttgacaaaagtggggaagcccttgta

SEQ ID NO: 10141 - DNA, 1467 bp, unidentified
  source 1..1467: mol_type = unassigned DNA; note = element_ff2f3e1
  misc_feature 1..2: note = core
  misc_feature 3..259: note = LE
  misc_feature 260..1435: note = CDS
  misc_feature 1436..1467: note = RE
  misc_feature 8..232: note = bridgeRNA
ctactatagtaattaaagatttcggtatcgccagccgaaaggctgatgatataataccgttgtatgggtgaggattccttttcctccttgcggcacagtccgctgaatacgagagtggaacctctcccttcacgggaattcattgatgagccggatgaagcggcccggtgtgagctgtcttctcatttcgcagtagggtatgacccgtgaagaacgagaggcgcaaccatacgaaacctgaaccaaaggagtgttccgcatgtacatcgtgggcatcgacatcggcaaacgacatcatgaggcaagcatcatcgacgggcagggcaatctccaagggaagtccctgcgcttcaccaacacacataccggcttcaataagctacttgaagcggcgagaaaggcagcggatagggatcatcagattgtctttgggatggaggccaccggccactactggctggccctctatacgcatctgagacgggaaggttaccctgtccatgtcatcaatgctgttcagtccgacgccctgcgcggcatgtatatccgccaagccaagaacgacagtcgggattctttcatcatcgccgaggtcatccgctttgggcgcttctgtgaaaccgctatctccgcgcctgatctccatgtcctgcgcgagctatgccgccaccgtttctggatcgtggattctatttcagacttgaagcgcaaggtcatagccctgctggatcaggtcttccctgaatacgagaaactctttaccaacacctttggcaagacctccttgcagcttctttctgagtacacaacaccggaagaactactggccgtcgatacggacaagctggccgaaaccatctatgccgccagccacggccatcatggtctggagaaagcgctggagattaaagacgccgcacgcaattcctttggcatcctgctgacctgtgactccattgctctgctcatccgtcagtacatcgaacagatccgttttgtggaaaaacaggttgatagcatcgacatagaaatcgcacggttgttttctgcttttgacaaccaacttaccaccattacaggcattggcccaaccttggcagctacaatcctcagcgagattggcgatatccgacgctttgacgctcccccaaagctggccgcttttgctggcatcgacccttctgtaaaacagtccggcaactttaccggcactcgcgttcacatgtccaagcgcggttctccttatctgcgccgcgccatttggttggttgccaccgttgccgctttcaaagactctgccatttccatttattatcagcgcaaacgcgccgagggcaagtcccatctcaccgctttaggccatgtttcccgtaaaatggtgaatatcattttcgctgtcctccgtgacaattccccctattctccggctgtttgactcttttcgcttgacaaatctttatagccggt

SEQ ID NO: 10142 - DNA, 1661 bp, unidentified
  source 1..1661: mol_type = unassigned DNA; note = element_ff32082
  misc_feature 1: note = core
  misc_feature 2..452: note = LE
  misc_feature 453..1385: note = CDS
  misc_feature 1386..1661: note = RE
atctccattccgcggtcaagcctgcgcacaaatagtaatgaaagtgttttacatctcaactctgtgatttaaaatagataacaagaagctatactacaaagcacgtgaggagaagttgtaaaaactttctctgtttttagacaacataaaaatcagtgtaagttctgcctttttcaagcacaaaataagtggtatcacgaatccgtacactagaattgttaaagctcttcgttttattgtgtggcagttcagtcaatggcttcttatcttttacgaaaggagttacactatgaaagttacttaccaaacctgttgtggtgtcgatgttcacaaatcttttctcgttgccacaatcatcaaaactaccggtggtattgaaccttcttatcaaaagaagagattctctacattcaacaattctattttagactttaaatcatggcttcttgaaaatgaatgccatgatgtctatatggaatctacaggtaaatactgaggttcctgtctttaatcttcttgaagaccaaatcaatgttaccattgctaatcccaaatgggttaaagctgttaagggtaacaaggatgataccaaagattctaaatggattggagacttatttcgacttggacttgtaaaaggcagttatattccttgtaagtcgattcgtattcttagagaatacacaagatatcgctacaaacttgtttcttgccgttcaagtgaaaagaatagatatcagaatgctcttactgtttgtaatatcgcattagattctgttgtatccgatatctttgggaagtcatcctcatccattatcgattatctgcttgaacaatcaggtactacgattaaccatgaagaaatcgcttcaaaacttcttaagagcctcaaatccaaagaagacgctgtgattgaatctatcgaaggatatcagatgactgattcccagaaatatcgtatgcgcctagtccgcgcacatatagattatatcacagctgaaatcaatgatgtagataaacagattgaatctttgatttcttctgttcctgattatgttaaagctatccggttactaactaccattccgggtgtcaaacatgatagtgcaattactatcatctccgaaattggtattgatatgtctcagttttgtaattctaaacgcttatgttgttgggcaggtcttacccccagcaacaatgaatctgccggtaagaagaaatctgtccgtattacacgtgccggtgtctacctcaaaccggcattagtacagtgtgctcatgcagcagtgaaatctgacaagtctccttactacaaaagaaatatgaatcccttgttaaacgccgtggcaagaaaagagctattattgccattgcccgtatgattcttacagccatctaccagatgctgtctaccggagaggcatggaatccaagcgatctttacaaaatcgatatgcctgcacctttagctgaaaaacagaaggctaaggctatcaagcaagccaaaaaacttttacaaaaggaaggactacttcctcctgataaacctttagcttcttgatcaatctactaaatctatatcctcaaataagttgcctacttaagacagcttatttaagtgcgccggtttatggcttacctctactttctttcacact

SEQ ID NO: 10143 - DNA, 1140 bp, unidentified
  source 1..1140: mol_type = unassigned DNA; note = element_ff3409a
  misc_feature 1..2: note = core
  misc_feature 3..168: note = LE
  misc_feature 169..1125: note = CDS
  misc_feature 1126..1140: note = RE
  misc_feature 10..183: note = bridgeRNA
cttgtatctttaagcctcggaccaactcgggtagcccgatgcgcctctgggttgaaacacgtagcccgtgcctgagcactgggcacccgggttggaccgtcctttcttgcagcccgaacggttgtaggaatctagagttcgcataaacaaggatgggagcgaagggacgtgtccgatactgttttcgtgggaatcgatgtatccagccagacgctggaagtggccgtcagcacgcagactgcgacgtggcaagcaagcaacgatacgactggcatcgaaaaactggtcagccagttgattgcacttgagcccggcttgatcgtgctggaggccaccggcggctacgagttcgaggccgcgtgcgcgcttcaagccgcaggcctggccgtggccgtggtcaaccctcgcatggcgcgcgacttcgcgcgtgccatgggtgcgctggccaagaccgatgcgctcgacgcaagaatgctggccgcatttgctcgcgtgctgcaccagcatcccgagcgcgagcgtttcgtcaaacctctggccgacgctgaactccagcggcttcaagccttggtgctacggcgtcggcaactggtccagatgatcactggcgagcgacaacgcttgcggctcgcccatgccgcagcccggcccagcctcgaacgtgtcatcgatttcctaaaaaaggagctcgacgacagcgataccgaagtcgccgaacacgtcgagcgtcaccacgccgaactggcgcgcaccttgcgtagcgtacccggcattggctcgaccagcgtcgccgtgctgctcgccgagctgcccgaactgggtaggctcgatcgcagacgcattgccgtactggtaggcgtggccccactaaaccgcgactcagggctcatgcgcggccaacgctgcatctggggcgggcgggccgacgtgcgccgcaccctgtacatggccacgcttaccggcgtgcgctacaacccagtgctacgcgactactaccagcgcctcgtccaggcaggaaagcgaaaaaaagttgccctggtcgccgccatgcgcaagctactgaccatcatcaacgccatcgctaaacaccgcgtcgactggaattccagctttcatatcgcttgacctacaagacggttg

SEQ ID NO: 10144 - DNA, 1301 bp, unidentified
  source 1..1301: mol_type = unassigned DNA; note = element_ff4612d
  misc_feature 1..2: note = core
  misc_feature 3..191: note = LE
  misc_feature 192..1151: note = CDS
  misc_feature 1152..1301: note = RE
  misc_feature 28..201: note = bridgeRNA
cttgtgtccaacaaatctgacagaataagcgaacgggcggttgatcagaaccgcccgttgctggaactgagcccgtagcgccccaaagcggcagagcctgtgcaagagcgagggacagctccggtgtcttcctcaacccgaacagttgcaagggcctttgagcccgtaccgagcaaggaagggagtggatgatggcacagaatgatctcgttgtcgtcggcatcgatgttgccaaggagaaggtagatgtgtgcgtgcgcgcattcgcatcgcggcagacgttcccgagcaccgcaccaggccgccgcaagctggttggttggcttcgcaagcacaacgtgaacaaggctgtgatggaggcgagtggtggctatgagcgggattggaacaaggcgctgcgccaagccggcatcgaggtgcggatcgtcgacccaaagcgggtccgtagcttcgccctatcggccgggcggctggccaagaacgatgcgatcgacgcggagatgatcgcctggtttgccgagacatttagcgaggcgccgagccaaacccatgatcccgcgcacgaggagttgctcgcgctggtaaaagcacgcatagctctggttgagcttaagacgcgtttgcaaaaccagaacgaacatgcggcatcgggaccggttcagaaagcgcatgcccgcatcttgaagagcttggccgccgaaattgccaagctcgaggccgcaatctccgccaaggtcaaggctacacaagattttaccgagcgcgccgagatcatcgagagtgtgccgggcttcgccgaaacgacatccgcgaccctccttgcggggatgccggagctcgggcaggtcagtgatgagatcgctgctgccttgatcggcgttgctccttttgacgacgatagcggcaagcggcacggcgagcgccacatcaagggaggtcgccgctgggtcagaaacgccatctacatgccttgccttggcgccgccacgcagaacaaccccgtgctaaaagccttctatcaacgcctgattgccaagggaaaagaaccaaaggttgcgctcactgcctgcatgcgcaagctgattgtcatcctcaacacgatgatcgcacgacggcagaagtggaatcccacccgctacgcagtggcctaacgagcacgccgcgctcggtcctcgaccgagcgcatgcaaagcctaaagaccggcgagcgggcggggtcaaggccgccagccgccgaaggcggtggcgcgcagcgccagccttgaggccggccgttcgccgcgtctacttcagcacagttg

SEQ ID NO: 10145 - DNA, 1516 bp, unidentified
  source 1..1516: mol_type = unassigned DNA; note = element_ff511b1
  misc_feature 1..2: note = core
  misc_feature 3..195: note = LE
  misc_feature 196..1494: note = CDS
  misc_feature 1495..1516: note = RE
  misc_feature 34..171: note = bridgeRNA
ctgatggctctaccttcccttcgcacggcggttcccggcagggagcgcttcgactgcttgtcccgcgaggactgagatgagacggcgcccctgccgggccccggcgaaggcctgacgccctggagggtgtcgtcccgcgaggactggttcatcagcacgacgcagcgccttcccggtccgccgtgcaggacggccatgatggtcacggcggagggagatgggcgggtgctgggaatcggcatcgactgggccgaggagttccacgatgtcgcggtggggacgccggagaaaggagtgatcgagcagttccggatcgagcacgggcccgacggtgtggccgcgctggtcgagcgtgcgctgcgtctggagccggacccggccgaggttcgggtggtgctggagacccggcacgggctgctggtcgaggcgctgctcgacgctgggttcaccgtggtgccggtcaacccggacctggtcgcccgccggcgcggcccggcccggaagaaggacgacgccgaggacgcgcggatctgctgcctgctcgccctggatcggcacgccgggctcagggcgctggtcccgcacggcgagctcggtggggagctgcgcgcgatcgcccgtgacgacgaacgcgccgcccgcgaccagcgccggctgctcaaccggctgcgcgcggacctgcagaccacctacccggccgcgctcaccctggccggcaaggatctcggcgcaccgacggtgctgcggctgctgcagcgctggcccacccaggccgagctggccgcggccacccgcgaggagctggtcaccttcgccctcgccagcaagcatggctggcccgagcgcttcgccgaccgggtcaccgctgcgctggccaccccctcgctgcccacccgcgactacctggtgcgggccaagtcggccgggatccggctggccgcggtccagctgctggccctgcacgaggcccgccgcggctgggagcagcggatggccgagttgctgctcggcggccggcggaccggccgcgatcacaccgtgaaggatcccgatccggggaaggcattcccgggcggggcgatctacctgagcttccccggcctgggagatcgcctggcagctcgggtcgctggtgagatcggcgaacacgtcacccagtacgagtccccgaacgccctgcagtgctacgccggtcgggctccggtcacccgtcgttccggcaagagcgacttcgtcgtcgcccgccggctggcgcacaaccgctaccttggcgacgcggtccaccaatgggccttctgcagcctcacccaaagcggctgggcccgcgagttctacgaccagaagatcgccgccggaaagagccaccacaacgccctgcgcgccctcggcaaccgctggctggagatcctctggcactgcctcagcagaggagttccctacgacgaggccacccacgtcgccaaccgcaaccgcgccctcggacgcgcggcctgaggtggtggttgacagagggtgt

SEQ ID NO: 10146 - DNA, 1193 bp, unidentified
  source 1..1193: mol_type = unassigned DNA; note = element_ff5d2e7
  misc_feature 1: note = core
  misc_feature 2..421: note = LE
  misc_feature 422..1183: note = CDS
  misc_feature 1184..1193: note = RE
  misc_feature 33..198: note = bridgeRNA
ttgtctctcaaatctatgctttaatgtttgggaagctgggatcgaaccccgggatggccatcccggggttcgcgcggcaaagcgcccgtacaggaataggtgtcaacgaccgacctcatgaagggactttgccgctccagcttcgcatcgcttgctgacttgaatgggctatccgaaggacacgcccgcagacaattcgaagcatggagcccaattatgatggcagaacccgccgaaatccagtccgtcctcggcctggacgtctcccgcgacaccgtcaccctgtgcgacggccgtacccgccacacggtgaccatcgccaatgatgccgacgcgctgcgcaccgccctgttgccgtaccagggcaccgccacgctcgccgtccgaggccaccggcggccatgaggataccctgctcggtgtgctcctggaactggccattcctgcccatcgcgccgatcccgccaaggtcaaggcctatatcaaatccttcggcaagcgcgccaagaacgatccgatcgacgcccgctggctgtcccgctatggccgcgaccgcgccgccacactgccccgctggcagtcggccgatcccacccagcagaagctcgagctgctcgtcgcccgccgtctcgacctcgtcgccatgcgggtgcaggagcagaaccgcctgaaagccccgcgcagccgcctcatagccgataatatccgcgatcatctcgccgaactggagcgccatatcgaagccctcaatgccgagatcggtgctctgatcggcgaaagccgcgatctggcactgcgggccgaacaactgcgttcggtgccgggcatcggcccggtcttggcgctgctcctggccgtcatacccgaactcggcaccctcaaccgccgccaggtggcaagcctcgccggtgttgccccgcatcccaaagacagcggcaaggccagctggcaccgctcaaccaccggcggacggcgccagatccgaccggcgctcttcatcgccgcacttgccgcttgccgcggcaacaatggcctggctaccgcctacaaggcgctgctcaaggccgcaaaacccaagcgcgtcgccctcacagccatcatgcgcaagatcatcactatcgcaaacgcccgtgtcagggacgccgtgcgacaccaaaatgaaataatgcagatcaacgcataaactgacttgg

SEQ ID NO: 10147 - DNA, 1581 bp, unidentified
  source 1..1581: mol_type = unassigned DNA; note = element_ff60d8a
  misc_feature 1: note = core
  misc_feature 2..260: note = LE
  misc_feature 261..1229: note = CDS
  misc_feature 1230..1581: note = RE
  misc_feature 9..246: note = bridgeRNA
cgttacctttttagtagccccctaatcgagtaagaattggggttgttggcctgtcggtcccggcatgattctgtcccccagtcgttgatgatccggggggtgctgtcaccgggattcgataggcgccagaggatcgctaatagggaccggaccagcacaagacttgaaaatgtaggtcggccgtaacgtggatgccgagctttgccgccgcaggacatgccaacaccataaagaacaactcaatttctgggaggtttgcgttgatcaagaaccatgaatccatcgacatcttcatcggtgttgacgttggcaagagcaatcaccacgccgtcgccatcgaccgcaccggcaagaaactcctcgaccgcgccctacctcaggacgaggcgaaactccgggccatcatcagggctgttgccggcaaaggaaccgttttgctggtcgttgatcagccctcgaccattggtgctctgccagttgccgtagcccaatccgagggcatcctcgtcggctacattccgggcctagccatgcgccgcattgctgatctgcatcccggagaggccaaaacggacgcgagagacgcaatgatcattgcttccgcggcccgcactatgccccacacgttgcgttccattgtcatctccgacgagcaagctgccgagctgtcaatgttgtgcggtttcgatgatgatctggcgaagcaggccaccgcggcatctaacaggatccgtgggttactgacccagattcacccggcgttagaacgcgttatcggacctcatctggaccatccggccatgcccgagctgctgatcaaatacccatcacctcaggcactgagcagagccggccaatcccggatagcaatgctgctggcaaagcatgccccgcgggccgggaaacgctgggcagctgaaatcttcgctgccctaggtgagcagagcgttgtcgtcgccggaagtggcgcagccggcctcgtcttggcccaactagcagccatgctcaagcaactacgaacggcccgagaagaactgctgacccaggtagaagctctggtggaggcccaccctcttcatctagtcctgacctccatgccggcggtcggtgtcaggaccgaagcgcgcatcatcaccgaagtcgctggcaaggaatttcagagctccggacatctagcctcgtacgccgggctatctccggtaacttggcgatcaggcacctcgatctgaggcgatcactcgtccaagaaaggcaataagaaccttaaacgttcattcttcctctcggcgttcgcttcgttgaatgatcctcgttcacgggcctactacgacaagaaacgcgctgaaggtaaacggcacaatcaggccctgatcgctctggcccgcagacgctgcgatgtcctctttgccatgctgcgcgacggaacactttacgacgcaccagaacccaagaccacataacaactagcgactaacagccggcgaggaacacccgcgctggccgacattctctgccaagaaccagccgcaagaaacccctagaaaaagtccccaaccccttgtgaaaaacatagggacaccc

SEQ ID NO: 10148 - DNA, 1423 bp, unidentified
  source 1..1423: mol_type = unassigned DNA; note = element_ff6cfec
  misc_feature 1: note = core
  misc_feature 2..91: note = LE
  misc_feature 92..1147: note = CDS
  misc_feature 1148..1423: note = RE
  misc_feature 1186..1418: note = bridgeRNA
taatggaatggacgcccactaccctaaacggcatcgaagtgccaaagtagtggtgcaataaagcccactaaataagagaggagcgtccgacatgaagattacaacgataggcattgatttggcaaaagaagtatttcagattcatggcgtggatatgtatggtaaggcgttgctgcgcaagcagttgcgccgtagcgagatgtcaaagttttttgccaatctggagccttgcctgattgggatggaagcctgcggtagttcacaccattgggcgagaaagctgtgcgaatttgggcacaccgtcaagctcatgtcaccccaatttgtcaaaccctacgtcaagaccaacaagcatgatatggcagatgcggaagcgatctgcgaagcggtaagccgacccaacatgcgttttgtatcgatcaagaatattgagcaacaagccattttgtcagtgcatcgtgccaggcaaggtttcgtcaaagccagaaccgcacaggcaaatcagatacgcggcctgctttctgaatttggtattgttatcccacaagggatccgttcgattatcaatcgggtgccggatattctggaagatgctggaaacgatttaccaggatcaatgcgtcatttactgaaacagttgaatgatcatctcaaacaactaagtcgacaaatagaagagttggaattgcagatcaagctgtggcacaaggagaacgaagccagtcaaagattggaagctattcccggtattggcccgattacggcgagcgccattgttgcaacagttggaaatgccacagagttcaagaacggcaagcaactttcggcatggtttggattggtgccaaaacagtgctccagtggtggcaagcagatattactcggcatcagtaaacgtggcgacacttatctgcgcactttgctgattcacggagcaagagcagtcatccgttttgctgaaaataaggaagaaccagaaagctggttgcgtaaactgatagctcgacgcaacaagaatatcgctgctgttgcactagcgaataaaaatgctcgtattatctgggcgttgctcgcccaaggcacaacattccaccataatcgcgctacgacatcagttgctgccgagcatgattatggtgttgcatagaaatttattgatagcactgcagcagatttaaggagaaaaatttcaaccgattgcacgggcaatcatgacaatgatggcgaaactggtcagaccgtgagtagctaaacctaaacagcacacagtgcatagagcacgctgaggtgataaggcgctactcagcaaattccatcaggggcaggggcaatgcgcctcatacaaagtccggatgtatggcagcaatctttacctgctcaaaatcattgactgaaagcttggcagaaagtgggcgtccatgta

SEQ ID NO: 10149 - DNA, 1368 bp, unidentified
  source 1..1368: mol_type = unassigned DNA; note = element_ff7b315
  misc_feature 1..2: note = core
  misc_feature 3..88: note = LE
  misc_feature 89..1117: note = CDS
  misc_feature 1118..1368: note = RE
  misc_feature 1133..1354: note = bridgeRNA
gatggggtggatggctcccgctcccggcatctgagtgccacagtgtggaagctgtcaaagcgtccacgagcaaagggagccacccgctatggagattagcacgatcggcctcgatttggccaagagcatttttcaggttcacgcggttgatacgtccggcgagatcgtcgttcgcaaggcgctgaggcgagcgcaggtgctgccgttcttcaccaagcttccgccgtgcctgatcggcatggaggcgtgcggcacgtcgcattattgggcgcgcgagttggtgaagctcggtcacgaggtgaagctgatgccgccagcctacgtgagaccgtatgtgaagcgcgggaagaccgatgcggccgacgcggaggcgatctgcgaggcggtgacgcgtccgagcatgcggttcgtgccggtgaagtcggccaagcagcaggcagcgctggcgctgcaccgtacgcgcgacctgctggtcaagcagcgcacccagctggtgaacatggtgcgcgccctactcgccgagttcgggatcgagatggctcgcggcctgcaccatgctctgtccctggcagcacggctatcggccggcgacgcgcccgaggtgccgccgcttgcccagcgcgtggtgaagggtctggcagaccagatcggcgcgttgcaggtccagctgggtgctctcgagaaggagcttcacgcgtggcaccggtcgagcgagctgtcgcagcgcctggcgacgatccccggcatcggagtgatctcggcgactgcgcttgccgcttcagtcaccgagcccgagcgcttccgctcaggccggcagttcgccgcctcactggggcttacaccgctccagaactgctccggaggcaaggagcggatgggccggatctcgcgcatgggagaccgctatctgcgccggttgctggtgctcggcatgacctcgcttgtccggcgcgcgcggaccaagccggagagcgtcgatccacgcctggcgacgatgctcgagcgcaagccggcgcgcgtcgtcacggtcgccgccgcgaaccgtaccgcgcgcgtagcctgggcgatcatgactcgcggcggcacctaccaggcgccgctcgccacagcagcgtaggaggagacgagcttcacgaggttgcgaggacgatgagagatgatggcgcgccggtcagaccgggagccgggacaccccgttgacagtccaaggcatcatagcctgcaaagcagagtgggacccagctcgcggataccatcaaggccagcggtcactatgcagaccgcgtaaacaggccggacagaagactgcacccgacccagcgccaaaccctcaaattaccccttgcaacgcgggagccatccacagaa

SEQ ID NO: 10150 - DNA, 1561 bp, unidentified
  source 1..1561: mol_type = unassigned DNA; note = element_ff7d222
  misc_feature 1..2: note = core
  misc_feature 3..178: note = LE
  misc_feature 179..1438: note = CDS
  misc_feature 1439..1561: note = RE
tcattttttctcttgtatgatgtttatagaagctaaacacatactttcctttctttttattagtgaattataatacattcagatgctgtggactttagatttttttcctgtagtccaactacttgagggagtgtattgccacggttttatctgaatcatttataagctggatgtgccaatgggttatccctgtcagagcacttatttcaatcaagtctatgagggtaaacaccagtggaattgtcacagtgtcaacactcagaaaggagcttttatgatttatgtaggcattgatattgccaaactcaaccattttgcctctgccttatcttcagatggtgaaataatgcttcaaccgttcaaatttacaaatgactatgatggcttccatctgctcgctcagaagctcgattccttcgattctgacgaactcatcataggtcttgaatcaacggcccattatggcaacaaccttgttgaattccttgttaatcatcactacaaggtctgtgtcataaaccctattcagacttctactatgcgaaaaaacaacattcgtaaaacgaagactgataaggtagatacttttattattgctaaaactttgatgatgaatcctcaccgcctctattcccagtatgatatttctctcatgcatttaaaggaattaggtcgtttccgtatgaagatcattaagaaacgtacacaggctaagattcagcttacatcctatgtcgatcaggctttccctgaattgcagtacttctttaaatctggcatacatcagaaatctgtatacgctgttttaaaagaagcaccaacaccggatgcggttgcttctatgcatatgacccatctgtcacatcttcttgaaactacctcacacggacattttaagaaggattctgcaactgaattaaggattctggcacagaagtctgtcggtagcaacgacagttctatatctactcagataacccagaccattgatctgattgagttactggatagccaagttaaggatgtagaatctcagatggagctgattgttacttcactggattctgtcatcatgacaattcctggcattggttttatcaatggaggaatgatactgggcgagattggcgatataacacgcttttctaacccttcaaaagtgcttgcattctctggtcttgatcctactgtctatcagtcaggtaacttcaatgccagccacaccaagatgtctaaaagaggctctcgtcctctaagatttgctctggtgaacgctgcacataacgttgtcagaaacaataaaacctttaaagattactatgatcaaaaaatctctgaaggaaagtcccattacaatgccttaggccattgtgccgggaagctagttcgcatcatatataagatgctcacagacaacgtcgaatttaagcttgattaaaatctgaccttttacataaatttttaaaatgagccttagttggctttattaaagtcagccttttttcggtcagaaatataaatacatttttttgttaatttatggttgacttttcatagctgg

SEQ ID NO: 10151 - DNA, 1448 bp, unidentified
  source 1..1448: mol_type = unassigned DNA; note = element_ff7efd4
  misc_feature 1: note = core
  misc_feature 2..504: note = LE
  misc_feature 505..1425: note = CDS
  misc_feature 1426..1448: note = RE
  misc_feature 9..232: note = bridgeRNA
cgttactttattcgtaccccttataatggggtgttagccagccagacccggcatgattactgcccccagtcgtccatgatccggggggtgatgtcaccgggtctggtggggcgctggtaaccgctaataggggtcaggtcaggcacttttgccgggaccgtctgtaacgtggatgccggtacctgctccccgtggttatctggttaacccatatacaagggagacagaatgaccgaatccagcgattacgaatccgtccaggtctttatcggcgttgatgtcggtaaagatacgcatcacgctgttgccattaatcgttcaggtaaacgcctgttcgataaagcattacccaacgacgaaaacaaactcaggtcgctaatatctgacctgaaacaacatggtcagatactgctggttgttgatcagccagctaccatcggtgcgttacctgtcgccgttgcccgctcataaggagtccttgtcggatacctccctggactggccatgcgccgcatagccgacttacacgccggtgaagctaaaactgatgctcgtgacgctgccatcattgccgaagctgcccgtaccctgcctcacgcgctacgcacgctgaaactggctgacgagcaaatcgccgaactctccatgctctgcggcttcgatgatgatcttgccgcacagacaacgcaggccagcaaccgtatccgcggccttctgacccagatacatccggcactggagcgcgttctcggtccgagacttgagcacccggcggtactcgatcttctccagcgatatccctcaccagaaaaactcgcttcgctgggtgagaagaagctggcagcccagctctgcaaacttgcgcctcgtctgggtaaacgccttgcagcagacatagctcaggcactggccgaacaaaccgtcgtcgttcccggcacgaatgccgctgccgtagtactgccacgtctggcactccagctcatcacgctgcgtaagcaaagagacgaggtggcgcttgaggtagaacagcgagttcttgctcaccctctttacccggtcctgaccagtatgcccggagtcggtgtcaggaccgcagccagacacctcaccgaggtcgcctgccgcgccttcgcctctgccgcacatctcgctgcttatgctggccttgcgccggtaactcggcgatccggctcgtcaatacgcggtgagcatccctcgcgacggggtaataaagctctcaaacgggcgttgttcctgtcggccttcgccgcgctcagggatccgctctccagggcttactacacgcgcaaaatgagtcagggaaaacgacacaatcaggcgcttatcgccctggcgagacgacgctgcgacgttctgttcgccatgatgcgcgacgggactttttataccccgcaggggtcataacatgcttgacaacttaatagggg

SEQ ID NO: 10152 - DNA, 1223 bp, unidentified
  source 1..1223: mol_type = unassigned DNA; note = element_ff876d7
  misc_feature 1..2: note = core
  misc_feature 3..218: note = LE
  misc_feature 219..1208: note = CDS
  misc_feature 1209..1223: note = RE
  misc_feature 12..190: note = bridgeRNA
cttgtatctttgtttccgtcgcggttagctcccgcgacacggggtgaaagaagcttgagcccacccttatgggtaaaccttgctgcgtagataaagcctttcaccccacctacacacctgcatcgacactggacggtatccaagggcattgaccctgtatgcacaaggcaagtgggtgtgtcatggttaagagtaggtcattcaagaaaggagcttgcatgcgtttttatctgggtatcgatgtttccaaagccaagctcgactgctgcctgctcgatgtggccagcggcaagcgcaagtccaagtcggtcgagaacagcgcggccggtgcggcgagcctgctcgcctggtgtgccaagcaccaggcgctgccgggcgacgttcatgtcgtgatggagcccacgggggtctaccatgagcgcgccgccctggccctcaccgacgccggtctcaccgtctcgctggtcaatccactgcatctgcgccgtttcgccgacagcttgggtgcgttgcgcaagacggatgccgccgatgccgccgtattggcccgcttcgggcgcgagcgccaacccgagccctggcagccgcctcgccctgccgtgcaccagctccaggccttgctggcgcgacgcgacgcccttgcccgcgacctgcggcgcgaacgcaatcgcctcgagcaggccgcgctgggcaaggcgccccaattggtcctcgattcgatcggcaacagcatcaagcacctcgacaagcaattgcgcacgctcgagcaagccatctccgatcacatcgaccaggaccccgatctgcgccagcgccgcgagctgctgctcagcattcccggcgtcggcgatcgcttggcccaccgctttaccgccctgctgggcgacggacgctttgacagcgccgaacagctggccgcctacctgggcctgatcccggtcgagtggcaatcgggcacctcggtgcgtgcgccagcgcgcttgtccaagaaagggccggctcacatacgggccttgctctacctgcctgccgtggtcgccaagcagcacaatgcgcacgtcagagcgctctacgagcgcctgctcgcgcggggcaagtccaagatggcggccatcggtgccgccatgcgaaagctcgttcacctgtgctttggcgtcgtcaaatccggccaaccctattcgcccgtttgggacccgaaaaacccttgacggccgagacggtat

SEQ ID NO: 10153 - DNA, 1471 bp, unidentified
  source 1..1471: mol_type = unassigned DNA; note = element_ff8a9b8
  misc_feature 1..2: note = core
  misc_feature 3..227: note = LE
  misc_feature 228..1451: note = CDS
  misc_feature 1452..1471: note = RE
  misc_feature 7..226: note = bridgeRNA
ctaatgggagtcgaccgggtcggataggacttggttccgagcccgctggtcggtgagcactttcctcgcctgagacttgatctctggggtcagagcgtgccccggctggttggtgaggatctccagagcaccgatggggtgtcgtgcctcgagcactgatccattaggccgtgtcggggttcctccgagggttcgtgtcctgtttccaacccaacccggaggacgaggtgatctttctaggagatgactgggctgaggcccaccacgacatctacatctgtaacggggccggtgaccggctggcggcgcgaaggctctctgagggcatcgcgggggtgacgtcactgcacgagctcgtcagcgcccatgccgagtcgccatcagaggtcgttgtcggtatcgagaccgaccggggcctgtgggtccagtcgatggtcgaggccggctaccaggtgtacgcgatcaatccacgggcggcgtctcgctaccgcgaccgtcaccgcctgtccggggcgaagtccgatgccggtgacgccaagatgctcgccgagctggttcgcaccgaccgtcacaaccaccgccaggttgccggcgacagcgacctggctgagggcgtcaagatcgtggcccggggccaccagaacctgatctgggaacggacccgtcacaccaaccggctccgcagcagcctgcgcgagtactacccggcagcgctggacaccttcgatgacctggccgatcgcgacacgctcgccgtgctcgaccgggcaccgacccccgcgcaaggccaagcgttgacccccggccaggtccgcaccgctctgcgagccggcggacggacccgcaacatcgacacccgtgcccacgcaatcgttgaaggcctgcgcgtcgagtcgctccaagcgccagacctgatcgtgtccgcgttcgctgccaccacaaggtcccaggtcgcgatcctgcgcgcgctcaacgagcagatcgcagcactcgagaccgaactgaccgcccattttgaacagcacccggacgccgacatctacctctccctgccaggattcggtgtcgtcctcggcgcccgggtgctcgcagagttcggagacgatccgaaccgctacgccaacgccaagtctcgcaagaactacgccggcacgtcacccatcacccgagcatcaggcacacgccacgtcgccctcgcccgcttcgtccgcccctctcggctcgccgacgccctcgaccaatgggccttctgcaccctccgggtcagccccggctgtcgggcccactacgaccaccgtcgcgcccagggcgacacccaccaccaagccctccgcgccctcagcaaccacctcgtcggcatcctccacggctgcctcacccaccacaccacctacgacgaaaccctcgcatgggcacaccgccatgaccccgacgccaacatcgccgcttgacccttccaatcctggggtgt

SEQ ID NO: 10154 - DNA, 1571 bp, unidentified
  source 1..1571: mol_type = unassigned DNA; note = element_ff8fdc5
  misc_feature 1..2: note = core
  misc_feature 3..126: note = LE
  misc_feature 127..1143: note = CDS
  misc_feature 1144..1571: note = RE
  misc_feature 1346..1533: note = bridgeRNA
agatggggtaacgggccggactagccatctggctagttacgcagatgtgtggtcgtccctcaaactgatggtgtctgcaaccggagtcgggagtttgcctgctccaagcatcatcgaggaacgaccatgaactattatgcgggaatcgacgtgtctttggaagctttgagcgtttgcgtgatcgacgcgaccggcaagatctttcgcgagacgaaggtagcgagcgaacctgaggcgttgatcggctggttgggttcgctgggcgtgagtttgatgcggatcgggctggaggccggaccgctgtcgcaatggctttatgcagcgatgcggcaggctgggcttacggtcgagcttttggagacgcggcatgtgcgcaatgcgttcaagatcatgccggtgaagaccgaccgcaaggatgcccgcggcatcgccgagttgatgcggctgggctggttccgtccggtgcattgcaagtcgatggaggcccaggaaacgcgtgccattctgacgtcacgcaagctggtgcagaagatgcttcacgagaccgagatgagcctgcgcggtgtgttgcgcaatttcgggctcaaggtcggcaaggttgcagcggggcagttcgagtttcgcattcgcgagcttgtcgaaggtcatccgaccttgacggcgatagcggcctcgctgttggcgacccgcgcgacgttgcgacgcgagttcaatgccctggagaagcggctgcgcgctatcgctcgcaccgacacgcgggcgcggctgttgatgtcgacgccaggggttggcatgatcgtggcgctcacctatgccagcgcgatcgacgatccgtcgcggttcaagtcatcgaaaatcgtcggggctcatttcggcatgacgccgagcagatatcagtccggggaaactgaccgcagcggccgtatctccaagatcggggacagctcggtgcgcgcggtgctctacgaggccgcccacgtcatcctcaccaagccagtcaaaggctgcacgactttgaagagctgggcgatgcggatcgccaagcgggccggcatgaacaaagccaaggtggcgctcgcccgcaaactcgccgtcatcatgcatcggatgctggccgatggcacgaccttccagccagcgtagcgccgtgctcggcgccgtcaaggacaagccgcctacggcggtggccatccttcgccaagcgctcaggaggccatccttgacggcgcctgcgcgcgacgctccgcaaatctcaggtcgggacgaaggaatgtcagtcacggtcgaacaaaggaatgggacttagaagaaggagaacgatcgaagggctttcggggcggtcatgacaccagccttcccgaagcgaggtcccgacgccgggacgatggatcaggtcaggccgcattgcgccgcgtggcatcagaccacgctcaccgtagattggccgacctatcctcttcaaaccccatcaggtggcggcctcgcgccgaccccggacagaagcaagaccccggcgaaaggattcctcgcaagtggagaagagggattgacaaaccaaggcccgttacaga

SEQ ID NO: 10155 - DNA, 1838 bp, unidentified
  source 1..1838: mol_type = unassigned DNA; note = element_ff917c1
  misc_feature 1..2: note = core
  misc_feature 3..280: note = LE
  misc_feature 281..1582: note = CDS
  misc_feature 1583..1838: note = RE
  misc_feature 13..330: note = bridgeRNA
ctactacaatggagttcggttaggagatgtccagctagcagctcttaactgccttgttgttgaagctgtacaatagagatgcaatggatggactgggaagatctggaacatcaccgttcgctcgagagcccgtcttccggcatcctggtacagcgtccgttttaagcaggcggatctggtcatcttatgaccaagttcatgtaccttagtagataggataggcatcagggaattgctggagtctgtacattgttcttttgtagtaaagaggcgcattgtgatggaattatctaaatgtaatgaaactgtgaaagtgtctgtaggtatcgatgtttcaaaaggacatagcacggtttctttttttcgtgaaggagataagtctccgtcgaagccatttacgattgatcatgacttaccgggcctaaagtttttggagagaaagcttgaccattacaagactaatggtacattgagaatttacatggaatgtaccggtcgataccacctcggccttgcgagtagtcttcagaaggatggatataccgtgtatacggtgaatccgaagcttcttgcagactttcatgacgattctcttcgtaaaccgaagacagactcgatagatgcgcagaaaattgcaagctatggaattcaatactggaataaggagaggaggccctttagtcagatggattctaaaagggaatgcctcaaagaatgtgagcggcagtacaaactatatactgatgaatgtgtgacatttaccaataatctgctgtcccttaccgatctcacctgcccaggagtgaacaagctgttctcaagcaaccccaatcagaatggacacttgaaatgggtagattttgtgaatacctggtggcatgttgactgcatcagaaaaatgtctatgaatgcattttctaaccggtattgcaaatggtgtcagaagcatggttatgaattcagtgaagataaagctgaagacatcatgaactgggcaaaaaaggcactggctgctatgcctaagagcatagatataaagaaaactatacagatagccgtcaatgcaataaatgaacttcttgagactatccaagataccaaggagcatatgaaccagctggcatctcagctcccggaatatccggtagtcatgaagatggacggtgttggtgaggtaacagggcccatcattatgggagaattgggcgatgttacaagattcaccaagcgcagccagataactgcgttcgccggtgttgacccccaaaagcatgaatcaggtgacgacaagccgaaaagctctcgagctacaaaaatcgggtcaccggaacttcggcgggcattatacctgatcatgacatcaaagctggccagaaaacctcaaggagaccgggtatatgactttatagtgaaaaagcgcagtgaaggtaagaaatatctcgtttatatgacagctggtgcgaataaatttctgaggatctattacggtacagtacgtgattatatgcaaaataaacagaattcattgtttattcaggataagacgtcagcaggtcagatgaatgtatccaaaactgcgtaaaaagtcatatagcccagattgggtgaatcatgtagtctaaatcaggtcagggcagttttccatgcctttatctgatttagtctcacatggcccaatgtagtccaagaaggagtaagagcaagtttagcggcattaggctgaattactgtagaaattaatataagctaaattattcccacctgaaatggtgggcttttggcgtgtagcaaacagagccaaaaaaattataaaaaaggcttgactttatgttagcagg

SEQ ID NO: 10156 - DNA, 1437 bp, unidentified
  source 1..1437: mol_type = unassigned DNA; note = element_ff9180e
  misc_feature 1: note = core
  misc_feature 2..241: note = LE
  misc_feature 242..1267: note = CDS
  misc_feature 1268..1437: note = RE
  misc_feature 11..253: note = bridgeRNA
ctgattgatgatgtgggggttgcgggacgttgggttccgtagctttgagggttcgacgggtttggctctcggtgtgcctggctgatccttatcggatggtctttgtgacgaactgtcggcctgtcgagttctcggtcgtggtgtggctcgtaagaggcgaacgctggaggcaaccgttgttgtgatcaggagtgcccaccgtggcctctgatggatgtgatctcaacaaggaggttttctgatggtcacgacgattggaatcgacccgcataaggcaacccatactgcggttgccatcgacgggtccgaaacggtgttgggcgagctgacggtgctcgccgaccggtatcagacggagaagctgatcgactgggcttcacagctgaacggtgatgaccgccgctgggcggtggaggctgccggtgggctcggctatctgttgtcccaacagctcatcgctggaggtgaagaagtggtggacgtaccagccgtgttggcgtcccgagttcgggtgctctcctcggggcgctcggacaagaacgatcccaacgatgccagggcggtggcgatcgctgctctccaccagcccggcctggcggtggtgcggcgggaggaccacacccaggtgctgcggatgttggcgaaacgccatctcgagctcaccgctctgcgaacccagactgtgtgccgtctccatgcggtgttagcccagttgaaacctggtggaatggcccaacggctgtccgtcaagcaggccagccgcatacttcaagggatacgcaccctcgatgctgtcgggcaccagcgacggctgacagccagaacccatctggctgatatccgacgtctcgaccgtgacatcaaaaccaacaaggtgttgatgtcggaggcggtgatcgcctcgaacacgacagtcaccgacgtctacggagtcggcccggtcgtcgcggcgttcctgatcggatacaccggcgatcccacccggttcgcatcagccgaccactacgccgcctacaacggcaccgcccccatcgagtattcgtcgggcggcaaaaccaaacaccggctgtcgatgagaggaaaccggaaactgaaccatgccatccacatggccgcagtcacccagatccgccacgacaccgcaggccgggtctactacgacaagaaacaggctgaaggcaaaaccagaaaagaagccctccgaactttgaaacgacggatctctgacgccgtctaccggaaactggtggccgacgaacagagatagggcccggggggcacccaggaacgacttctcagcttgcgtggccggcctcacgtcctgaacaccggcgcttcagcaaagccaccccgggccacccccaaacctacacctcggccggaacacccggccccgttcaacgcgccaccacaccccgatttgacacaaagaggctt

SEQ ID NO: 10157 - DNA, 1210 bp, unidentified
  source 1..1210: mol_type = unassigned DNA; note = element_ff9e636
  misc_feature 1..2: note = core
  misc_feature 3..195: note = LE
  misc_feature 196..1176: note = CDS
  misc_feature 1177..1210: note = RE
  misc_feature 12..201: note = bridgeRNA
cttgtgtctctctcgatgtactgattagctatccgtgcatcaggtgaggtggtgagtctgtttcggccctgaggcctttagagcctgcgctgtagattggaccccacctcgcaaatctcttgtaaaactggatggtatccaagtccgcgccctacggcgatgaggctgtacctacaaggcaagtggagagagcacatgaacgtcatcggtattgatgtcagcaaagcaaaactggattgtctgtggatacgggatctgtcgaccctgaaggttaaaagcaaggttcaccccaacacccccaaaggctatcaggcgctgctggattgggcgatgcgcgaaacgggtgaagcgccggctgggctgcactttgtgatggaagcgaccggggtataccacgaggccttggcgtacgccctgcacgatgcgggggcccaggtgtcggtcgtcaatccggctcgggttcgggactttgccagaagcctgggcgtccaatccaagacggacaagaaggacagcgtggtgattgcccgttttggcctgatgcagtcaccgccgccgtgggtgccagaagctgcggaaatccgccagctgaaggcactgattgcccgttgtgatgcggtgaaggcagacattcagcgggaagtgaatcgtctggagaaagccacggcaagcgatgccccgacagcggtgcgggcgtccattgagaccgtgcgcagccagttggaacaggagagacgccgcctggaatccttgattgatgatcacatcgacaagcatccgggcctgaagaaagaccgggcgttgctggagagcatccccggcgtgggcccggtgattgcccagcaaatggtggcggtgatccgcagccgcccgtttacccgggccagccagtgcgccgccttcctgggggtggtaccggtagcgcatcagtcgggcaccagtgtctatagtccgccgagattgtccaagcgcggggatggccgtgtccgacgcaagctgtatatggcagcgatcgtggcgaccctgcacaacccggatatccgctgccagtacgcgcgactcttgagggcgggcaaatcaaagaagtcggccattggtgcggcgatgcgaaaactggtgcagatctgttttggggtgctgaaacaccaggcaccctattcgcctcaacttgcctgatcggctggttgtgggcaactgagggagatggtat

SEQ ID NO: 10158 - DNA, 1469 bp, unidentified
  source 1..1469: mol_type = unassigned DNA; note = element_ffa3984
  misc_feature 1: note = core
  misc_feature 2..274: note = LE
  misc_feature 275..1465: note = CDS
  misc_feature 1466..1469: note = RE
  misc_feature 90..249: note = bridgeRNA
ctttacctttgcattatcagatattaattataaaaagttcatctctgattcagcttaaaaatgagattgttcttacctttgttgtttaaaggaagtcaacctccccacagagcaatccaatgttttgaccaggctttgagccttaggtgtgtcgtgggctctgtgggtttataactgaactccaaatagaatgataggctctgagcctaagtaaagtcttagatgcagcagttatataggctgaccttgatgtataatattagatgcaaaggtaatgagaaatgatgtaactatctacgttggcattgatttttcaaaggaaaaattcaatgcttgtctcctaatggagcaaggtgttatgggtgaaagtgagtttcccaattcaaaaacgggctacctcaaacttaccaaatgggtaaagaatacttcggaactgggacgttcatttgcctcttccttggtgttgttctgtggtgagcacacaggcacgtgcagtattggactctgcgaatatctttatgccaagggaatgaaaatctggctcgaaagcgcattgaaaatcaagtacgggtcaggattgaagcgtattaaagacgataaggctgatgcggaaatgatagcttattatgccaaacgtttttatgagccaggctcatgtgcattatttgaaccagactccgccgatcttaagacattacgcactctttatcagttccgcaatcgtgtggtttgcgaccgtgtagccatagggaatcgtatatcaagcggtgcttttgattgctcaactctggtgagaaacaggatggtcaagcatcataaagaagcacagaaggacgagaaagacattgaaaaggaaatggtgaaactgatggaaacatcagaggaattagcctcaaattatcaaatacttatttcatttaagggcataggacctataacggcagcggctctgattatatatacctccaattttaagaagtttgataacccgcgaaagtttgcatgttactgcggcatagctccctttggcaaacaatccggaacatccattaatacaaagcctcatgtgagtcgttttgcacatatcggcatcaaagcagctatagtacaggcttgcaagtctgctatgcagcacaatgcggtaatcaaagcatacgcacagaggctgtacgcaaaaggcaaacatgagggaattgtcatgaataatgtaaagaataaggttatgcacattattttcaagatgatacagacacaaaccttatgggaacaggaataccaacaaaaacacatgaaagagtgcaaagctattccgggaaagaatggaataggagccaccgaagcagctcctataattaatgcgacattgaaaacatcctcatctgttgttgaatgcacattcttagaagaacattcttttcaaaagaacagcaaaaaaacttcaagtttttcttgtgtagaaacatagaatg

SEQ ID NO: 10159 - DNA, 1425 bp, unidentified
  source 1..1425: mol_type = unassigned DNA; note = element_ffa5a2f
  misc_feature 1..2: note = core
  misc_feature 3..140: note = LE
  misc_feature 141..1175: note = CDS
  misc_feature 1176..1425: note = RE
  misc_feature 1208..1395: note = bridgeRNA
agatggggtaacgggccggccgggtcgtagcaggctgccgggttaaggcctgtttgcgaggcggcggtcgtccctcaaactgatggtgtcacaacggagtcgggcgcgaggcccgctccaagcatcatcgagggacgaccatgaaccactatgccggaatcgacgtgtcattggaatgctcgagcgtgtgtgttgtgaacgcgagcggcaagatcatgcgggaggcaaaggtggcgagcgagccggaggcactggtggcctggttcagctcgctgggcttggcgctggagcggatcgggctggaggccgggccactgtcgcagtggctctatgccgagatgaagaaggccggccttgcggtcgagctgttggagacgcgccacgtacgcgatgccttcaaggcgatgccggtgaagacggatcgcaaggacgcgcgcggcattgcgcagctggtccggctcggctggttccgtccggtgcattgcaagtcgatggaagcgcaggagacgcgcgcgatgctgacgtcgcgcaagctggtgcagtcgaagctgcaggatgtcgagaaccatttgcgcggcattctgcgcggcttcgggctcaaggttggcaaggtctcggatcgtagcttcgcgccgcgcgtgcgggagctggtggatggccatccgagccttcagatcatcgccgaggcgttgctcgcggttcaggccgtgctgcagcgcgagttcaaggcctttgagaagcgggtgcttgcaatggcccgtgctgacgaacgagcgcggctattgatgtcggtgccgggcgtgggcgcgacagtatcgctgacctatgtcagcggcatcgacgatcccgcgcggttcaaggcatccaaggcggtgggggcgcattttggaataaccccgaggaggtatcagtccggcgagacggatgtcaccggccggatctccaagatcggagacgcaagcgtgcgcactgcgctttatcaagccgcccacgtcattctgacgacggcggtcaaaggcggggccctcaagagctgggccgccaggatcgccaagcgcgccggcatgcagaaggcgaaggtggcgttggcgcgcaagctcgccgtgatcctgcatcgcatgctggtcgatggaaagccgtttgactttgcggccgccgccgcggcacgccagtaagggagagatcaagagttttcgggcaggtctcgacaccagccttcccgaagcgaagtccctcgccggggcgaggaccaggtcagacctcaatccgcccagtggcatcaccatgaccacgcagcacgtagattggtcgcctgtccttcttagaaccccatcaggtggcggccttgcgccgaccccggacagaagcgagctcccggcgagcggatgacgcaaaagggattgactgagcgaggcccgttacaga

SEQ ID NO: 10160 - DNA, 1410 bp, unidentified
  source 1..1410: mol_type = unassigned DNA; note = element_ffab3e2
  misc_feature 1..2: note = core
  misc_feature 3..164: note = LE
  misc_feature 165..1400: note = CDS
  misc_feature 1401..1410: note = RE
ctcctaccattaattcctgtataactatcttataagcaggtaagatttgccccaagaaaggcagggggacttattgcttcccgggtcaccgaacccttatttcagtctgtcccctgcctcttggagccatgataagttgattgggccaaagagcccttgtcactatggaggattggccggaggcactacctgtcttttttatactaccatgggaggtgtttgtcatgagcttttttgttggaatcgatgtgtcgaaagagaaatttgatgcctgttgtataggagaacaaggagaaaagatattctctctcacgtgttccatggaccggggaggatttgagaagttcatcgtccagttgccagaggacaaaacatctttcctcctggggatggaatccaccgcctcttatcatattgctctcttctcttatcttaccgcacaaggctatagggttttcattatcaatccgcttctcatcaataatttcgcaaagcgttccttgagaaaaacgaagaccgacagaaaggatgccctcactatagcccagttcttgatgcacgagcaggagactctctccacacaaacctcttctcacttgacaacggaactcaaagacctcgcgaggagaagagaaaagctcgccgatcatgtgacctcgctgaagggcaacatgaagaggatcctctctgtcacgttccctgaactcgaacacttaaccggagtctttacgaagacgatccttcgtcttttggccgagtatccttctgcccatgccttgcgggaagcgagttgctctgctgttacggatattgttatgacccggtccaggggcccgaagccccaagcctctgtcaaggcgcttatggccgcggcagcatcatccatcggcgtagcaagccgtgcaaaagagctcgttctaaaacaggaagcctcactgctcctccacgttcaggaacagatgaaggagaccacaaaactgctcatgagcctcttaaacgaaaggatgaaacaggatatggagatcctctgctctatgaaggggataggagagaataccgccatgaacttcctgatagaaatggggacagacgtgggtatgtatgagaatgacaagaagctgatcgccgcatccggccttgatccttcaacctaccaatcaggtaaatacgagggaaggagcagaatcagcaagcgagggaatcgacatctaagaagggtgatttggctcatggcaacgaaggtcattatcaacaacaatctcttcagaacctatttcttcaaaaggagaaaagaaggactgccttataaaaaggcggtccttgccacagctcataaacttattcgagttatgttcgcaatgctgagtcgtaaaacatgttttgttgaaggggggaattaaatatagttga

SEQ ID NO: 10161 - DNA, 1614 bp, unidentified
  source 1..1614: mol_type = unassigned DNA; note = element_ffab849
  misc_feature 1..2: note = core
  misc_feature 3..276: note = LE
  misc_feature 277..1494: note = CDS
  misc_feature 1495..1614: note = RE
  misc_feature 13..296: note = bridgeRNA
ctactacaatatatttatggttaatatcccttacagccagtaaggaattatccatcttgttgcttaagctgttagaatgagtggtgcaataggtctggccttcacctcctaggactttacgtccgtgaataagtcagccaaccagcccctcatccgcagcattcgttttacgcaggttgaacccataggcgttcgtgtgaaacacccagtagattgaataggcaatgagaaaactggtattgaccattgcgattacatttcaaaggagtatctcttatgaacgctgttggtattgatgtttctaaaggaaaaagcactgtcaccatccggagaccgggagatgtggttcttatgccgccctgcgatatcccccacacacagtctggcataaatgacctgattgtgtacctccaaaaccttgatggggaaacgaaagtctgtatggagcacactggcagatactatgaaccggttgcctcatggctttctgatgccggcatctttgtcagtgctgtaaatcctatcctcatcagggatttcggtgatggttccctgcgtactcccaagacagacaaagccgattctaaaaaaatcgcacgttatactcttgaccgttgggccaaactgaagcaatatggaagtatggataaaacacgcaaccaactaaaaaccatgaaccggcagtccgccttctatatggctcagaaaactgccatgaaaaacaaccttatttcccttcttgaccagacttatccgggagccaatgatttctttaacagtcctgcccgcagcaacggcagccagaaatgggtggattttgtccatacctactggcatgtggattgtgtcaggtctaaatcattgaacgcttttaccgaacattatcagagctggtgcagacgcaggggctataacttcagtgcagataaagctgagaaaatccatcatctttcttctgatctgattgccgttttcccaaaggatgacatcaccaagatgctgatacggcaggctgtggcattgctgaatactgcctccgaaacggagaaatcccttcgtctgaaaatgaatgagcttgcttccacgctgccggaatatccgattgtcatggatatggacggtgtaggtcccactcttggaccacagcttatagctgagattggggatgttacccgctttacccaccgcgaagcccttaccgcctttgcaggtgttgaccccggaaggaacgattccggacagcatgtccagaaaagtgtacggaccacaaagaagggttccccttacttgcgtaaggccctctttcaagtcatggacagccttatcaaacgctcgccggttgatgatcctgtttatgcctttatggataaaaagcgggcacagggcaagccttattacgtttacatgaccgccggggcaaacaaatttctccgtatttattacggacgggtaaaagaataccttaccactttgccggaaaacgaaggagtctaatatctttctcagcctcatgtcagaccagcgcactgcggtggtcttgttttggtgcctttcattcaacctgtataaatttttcaaagttcatcaatttctgcttgactttttatttgcaga

SEQ ID NO: 10162 - DNA, 1389 bp, unidentified
  source 1..1389: mol_type = unassigned DNA; note = element_ffb3016
  misc_feature 1: note = core
  misc_feature 2..71: note = LE
  misc_feature 72..1103: note = CDS
  misc_feature 1104..1389: note = RE
  misc_feature 1146..1384: note = bridgeRNA
caatggtatggaccccgccgccccagcggggcgagccttcgaacgacaacggcaatgaaaggagaagcgttgtgcagatcgttcgaattggcctggacctggcgaaatacgtcttcgaggtgcatggagtggacgcggatgagaccgttgtccttcgaaagacattacggcgggatgctgtcgtttcgttctttgccgacctgccaccctgcgtcgttgacatggaagcgtgcagcagcgcccattactgggcgaaggtgctctctgatctcggccatgaggtgcgtctgatgtcgccgcagttcgtgacgccctacgtgaagtcgaacaagagcgaccgcaatgacgccgaggccatctgcgaggccgtgggccgcccctcgatgcggttcgtgccgcagaaatcgcccgatcagctggctctgcaggcggtccatcgcgtccgtcaacgcctggtgtcggaccgaacccggctggtgaaccagatccggggccttctggcggagcaaggcatcgccatcgcgcgcgacatctcccgcctgcggcatgccctcgcgaagattgtcgatggcgatcgctccggtctcggcgatctgatcctcgaccttgtccgcgatgcgcgtgacgaactcgaggctcttgaccggcgcatctcatcctacaaccggcggctcaagaccctcttccagtccgacgagatgtgtcgccgcatcggcgagattgagggaatcgggccggtcacggccacggcgttggtcgcggccgtgggagaccggacctgcttcaagaacggccgtgagttcgccgcatggctcgggctcgttcctaggcagagatcgagcggtggtaagacacggctgcttggcatctccaagcgcggcgaccgatacatccgaacgctgatgatccatggcgccagagccgtcctcggaagagccggcggcaaacaggacacccgcagtcagtggatcgggcggatgcgcgaacgccgccatccaaacgtcgtcgcggtcgccctcgccaacaagaatgccaggatcgtctggtcgatcctggcgcggggcgaagcttacaggcccgctttggttgcgaccgccgcctgatcaaagcgctcatgaggtagaatacgggagggctcacccccagacattgcagcgaaatggcaggagatggagaaagggtcacggcccgtcgcctcgggagcctgatgtgtggactggcacggcgcatgccgaggtctcaggggcattgaggacgaagcgcgcggaaacccatcggggcttgcggcaacgatatatcgggccgctccagaaagccggatatacgtcagcaatcgtgatgccatatccagacctaatcatgtcgttgcaatcaggcggggtccatata

SEQ ID NO: 10163 - DNA, 1634 bp, unidentified
  source 1..1634: mol_type = unassigned DNA; note = element_ffb5afd
  misc_feature 1..3: note = core
  misc_feature 4..125: note = LE
  misc_feature 126..1316: note = CDS
  misc_feature 1317..1634: note = RE
agtaattatgtaagaaaagcatagcgcagggaatgcggtcatcctccaataaaggagggccgaaattttaatttttaagcgataactttaagtttcgcaatgattaacaattaaaaagctgcgctatgccaagaacaaatttgcaaaaacaaaatgactttagcggtcagaatttttatgttggacttgatgtccacaagaaatcatggtctgtaacgatccggagtatgggtatccaggtaggacacttcacgcagccgcctggagctgaggcattacatgattatttacagcgaaatttcccgggcggatcgtatctctccgcctatgaagctggcttttgcggcacttacgcacacgaggatctttgtaaactgggcataaagaatattcttttgcatgccgctgacatcccggtaacagataagcaaaagaagaacaaatcggatatgcgtgacagccgggccattgccgaaaacctggaacggggcaatttgaaaggtatccatgttttaacacgcgaccaacaggaattgcggggcttgtttcgtttacgggaaagtaaagtggccgacgtggtccggagcaataataagctcaaaagctttctgatgtaccacagtatagtagtacctgaaacggtttccaaaactgaatttttatccggcaaggtattggattggttagctatcgaattgtgcagtacagcgggtacgctcacattaaagcaatatatcgcagacttaaaataccagcgtgaacaactatcaaagattaccaaattattacggactgagatcataactatccataaacaggcctatgaaaacctgctttccgttcccggtatcgggagcgttacggcaatggggctacttgcggagcttgcagatttcagcaggtttgatgatccggatgaatatgccagttatctcggtttatgtccatgggaggacagtaccggagattatattcagaccaaggggatacagccccgttgcaacaaacacctgcggcccttgttagtcgaggcttcctggaaagcaatcagtagttcccgcaacatatttgcttattacagcaagcatgcggttggtaaaaatgggaaaaaggcgatcatcaaagtagcccgtaaactggctatgatcgccaaaggagtagtaacaaccggcaagccttaccaggaagattatctgaagcaaaaacagctggaatatgaaaaaatgaaagcggaaaggttttcttcaggtatgtcggaacagcataataataaacagccaggcaaagaacggtttgttgtgtctatacctggctgatatgcattatccggctgtaatatccctggcgggttgctcctcagcagagcctgcttctgtttcttacagcactataaaattattaaaacagattcagtaaaataaattgcagctcaaaaaaacataaggggaaaacgcagtttgaaaacggtaattaattacattacgaagtattcgtacccctttttcaactcacacaattactggcggcaatgatcgcatatagcagtttgagctttttttatatactgaaaataaaattatacctttatgtgaacacaaaatctcatacctgttcgctatgcttttctacatagc

SEQ ID NO: 10164 - DNA, 1358 bp, unidentified
  source 1..1358: mol_type = unassigned DNA; note = element_ffb7db4
  misc_feature 1..2: note = core
  misc_feature 3..80: note = LE
  misc_feature 81..887: note = CDS
  misc_feature 888..1358: note = RE
  misc_feature 1077..1346: note = bridgeRNA
tgatggggtggacacccctcgacggcatcgatgtgccaaggtggcaggtgtttaacctccacaacagaggagtgcccgaaatggaaattagcacaattgggttggatctggcgaaaaatgtctttcaggcgcatggcgccgatgcttcggcggccgttgctttccgaaagcaattgcggcgcgacaaggtgttgagcttcttcgctgcccagccgcgttgcgtagttgcaatggaagcttgcggtggagcgcattattgggcgcgcgctatcggtgatctcggccatacggttcgtttaattccgccagcctacgtcaaaccgttcgtcaaacgccagaaaaatgacatggccgatgctgaggcgatctgcgaggcggctcaacggccgacgatgcggtttgtcgcggtgaagagcgagcagcaacaggccagttcggcggtatttcgagttcgagatatcctggtgcggcaacgtactcagttgatcaattccctgcgtggtcatctggcggaatacggactgatcgttgcccaagggccggcgcacgttgccaagttggttgaaaaggtaggagatcccgaaagcgatctaccggaagcagcacgtacagtgcttctcatgctcgtcgaagcgctcagatctttggaggagaagatcaagcaactcgatcgcgaaatcgtacgacgcacccgggaggacaaagacgctcgccggctgacgacaatccctggcgttgggccgataaccgcaacggctcttattgcgctggcaccaaacgccgcaaccttcaagaagggtcgcgactttgccgcctggttgggcctaacgccattgcagcgttcaacaggaggaaaacagaaactgcgcgacgtcaaaaatgggtgagcggacgcttaggcggctgctaattatcggcgccagcgctgtggtccaacaagcttgtaaacgcggcggtcgacaagggacgtggcttgctcgcatgctcgcccgtaaaccgcgcatgcttgtgatcgtggctctggccaacaagctcgcccggatcgtatgggcactgatggcatcgggagggacgtatagagctccggcagcggcatagctgcacagcctgaggcgtcgagaatgtaggaaggtcaaaggaaggtatcgcgatacggtcgatgagaggggccagaagaatcagttcacgacgaagtgcatcaaagcacgctttcgtggtttggatctggttcgcaaactcccatacgggcccgcgacatctgaaggtcgcaacaaaggccggacagatgtcagcacccgactacttgcaaatgatacctgactgaaaattcttcttgcattcaccggggtgtccacaga

SEQ ID NO: 10165 - DNA, 1421 bp, unidentified
  source 1..1421: mol_type = unassigned DNA; note = element_ffbb148
  misc_feature 1: note = core
  misc_feature 2..91: note = LE
  misc_feature 92..1141: note = CDS
  misc_feature 1142..1421: note = RE
  misc_feature 1191..1416: note = bridgeRNA
taatgtaatggacgctcccttcctaaaatggcatctcggtgccaaagtagtgattgcaccatcaccacgcaaccagaaaggagtgtccattatgaagattacgacgattggaattgatttggcaaagactgtatttcagattcacggtgtagatgaacatggcaaggtgatcttgcgtaaacggcttaatcgatctgagatggccgtattctttgccaagttatcaccttgtctgatcggcatggaagcctgcggcagtgcgcatcactgggccaggaaactaagccagttcggtcatgttgtaaagttgatggcaccacaatttgtgaagccatatgtcaaaaccaacaagaacgatatggctgatgctgaagccatttgtgaagcagtagcacgacccaacatgcgctatgttgctgtgaaaaatatcgagcaacagggggtgctatcgatccatcgtgcgcgtgccggatttgtaaaaagccgaaccgcactagccaatcagatacgcggattgctcgctgaatttggcattgtaatcccgcaaggcattcgctctatcatgaagaaaatgccatcaatactggaagatgaggaaaacggtttgccaggtgtgatgcgcaatctcatgcgcggattgactgagcatctgaaggggctggacacactggttgcagaattggaaatacagattcagcggtggcaccgtgagagcgatgccagtcggaagctggaatctattcctggcattggcccgatcacagcgagcgcgatcgtggcaactattggcaatgcaagagagtttaacaatggtcgccagttggctgcatggttgggtttggtacccaggcaacactcaagcgggggcaagccaacactgttggggattagcaaacggggtgatgcgtatctgcgaactttgctgattcatggtgcgcggtcggtgatccgggttgcagaaacgcggatggatggtgataactggctgcgtaagttgttggcaaggcgaaacaggaatgtagcgtcggtggcgttggccaacaagaatgcacggatcatctgggcactgctggtgcgtgaacagtcattccaacctggttatgttacgacaggcaattgggctgtgacatcttcagactaagagggtatcagggcactatagttgaaatagcaggttcaaagtgtaagttccacagattgctcaggcaatcatgatgtgatggttagacaggtcagaccgtgagtggcgtaacctgcctcagacaaggcacttcgagtgcgcaggactataaggttctactcagcggattccatcagggacagaagcaaaagcttcacctaaagtccggatgtatggctgcaatctttacctttctatcatcatcgattgaaagcttggcataactgggagcgtccatgta

SEQ ID NO: 10166 - DNA, 1312 bp, unidentified
  source 1..1312: mol_type = unassigned DNA; note = element_ffbfc2c
  misc_feature 1: note = core
  misc_feature 2..90: note = LE
  misc_feature 91..1095: note = CDS
  misc_feature 1096..1312: note = RE
  misc_feature 1095..1306: note = bridgeRNA
gaatgaaagggacttccccgtgccggcgacggcatcgaggtgccaagattgaagtgtctgtgttcaatctaaatagccggaggggaagtcgtggaacagattactactgtgggcatcgacctggcaaagaacgtgttctcgcttcatggagtggatgcggcgggcaagacggtgctccgccgcacggtacgacgcgatcggctggtagaggtggtggcggctttatcgccctgtctgattggcatggaagcgtgctcgggtgcgcacgagtgggggcggcgctttcagcagcaggggcacacggtgaaactgatggccccaaagttcgtggcgccctaccgaaagagcgacaagaacgacggcaacgacgccgaagcggtgtgcgaagccgtggggcgtccgagcatgcgttttgtgccggtgaagagcgcggagcagcaggcgctactcaccatgcaccgtgtgcggcagggatttgtggtcgaaaggactgcgctgatcaaccggctacgtggactgcttgcggagtttggcgtggtgctgccgcttcgctcggtgacggtacgtcgccaggccgccgatgcggccgaggtgttgcccgagctcgcacgccgcgccattgccgatctgctggagcagctgcatctgctcgatgggcgcatcgacgcctatgacacggagatcgaggcccaggcacggctctcggagccggcgcggcggctcatgaagattcgcggcatcggcccgaccacggcactggccatcgtggccaccgtgggcaacgcccgggagttcaagaacggccggcaattcgccgcctggatcggtctggtccccggccagtactccaccgggggcaaagcgcgtctcggccacatcagcaagcgcggcgatgcctaccttcgcaatctgctcgtccagggtgctcgctcggtgctgcagaccgcagcggcgcacccggaccgcctctcgcgctgggcgctcgagctgcaggagcgccgcggctactaccgcacgctcgttgccatcgccaacaagaacgcgcgcatcgcctgggcgttgctggcgaaaaacgagcagctgcacaagaactgattccgcacggctgcaatcgacgatgacgaaacggtcagaccgacgcccggagaacctggtcaaactcgacggcgacatccgaagccgactaacgagcgaggaccgggcgtgcggctttcatcagggccagagcgctaagcgctcacaaacaggccggttatagtgacgcagtcagaccttctctcgtcaccattgcagccaagaggaagtccttata

SEQ ID NO: 10167 - DNA, 1411 bp, unidentified
  source 1..1411: mol_type = unassigned DNA; note = element_ffc04f4
  misc_feature 1..2: note = core
  misc_feature 3..87: note = LE
  misc_feature 88..1152: note = CDS
  misc_feature 1153..1411: note = RE
  misc_feature 1172..1406: note = bridgeRNA
agatggcgtaacgggccggccgccggcgtaggcagccaaggtggtcgtccctcagactgatggtgtcacgaccggggtcgggccggggtggcctgccccaagcatcagcgagggatgatgatggaccattacgctgggatcgatgtgtcgctggaactgagcagcatctgcgtggtggacgccaccggccggatcatgcgcgaagccaaggtagcgagcgagcccgaggcgctgatcacctggctgcgcgggcttgacctcgagctggcgcgggtggggctggaggccggaccgctatcgcagtggctctacgccgcgatgcgcgaggccggcctgccggtcgaactccttgagacccgacacgtgcgcgacgcgttcaaggcaatggcggtcaagaccgaccggaaggatgcgcgcggcatcgcccagctgatgcggctcggttggttccgacccgtgcactgcaagtcggcaccggcccaggagacccgggtcttgttgtccgcgaggaaggtgctgcagacgaagcgcatcgacgtggagatgagcttgcgcggtctgctacgcggcttcgggctgaaggtggggccaaccactgctcggaattttgccgggcggatccgggagctggtcgagtaccacccgtgcctcacggctgttgccgaggcgttgctggctgcgcgcgaggtgctcggggtgcaactggccggcctcgagaagcgcctacgcgacgcggcacggaccgatgatagagcacagctgctgatgaccacgcccggcgttggcgtcatcgtggcgctcaccttcgtctcggccgtcgacgaccccgggcgcttccgatcttcgaaggccgtcggtgcccacttcggcttgacgccgcggaagtaccagtacggggaaaccgacgtgaccgggcgtatctcgaaggccggcgacgctggcgtccggacggcgctctacgaggcggcgaataccattctcacccgcgccgtgaaaggttcggcgctcaagagctgggcggcccgcatcgccgcccgtacaggcatgaagaaagcgaaagtcgccttggcgaggaagctcgcggtggtgctgcaccggatgctcgcggacggcaaaccgttcgtcgccgatcgcgctgccctggcggcatgagacagaaggagagatagcgggttcgggcgggcaaggcatcaaccgcctgaagcgaggtcccgtcgccgggacgctggatcaggtcaggccgtatacggtcaggcagcgccgcaaggatgactgcgcgttgtaagattggccgacctgctcctcatccaacaccatcaggtggcggccatgcgccgaccccggacagaagcgagacaccggcgaggggattggcgctcaagagggttgactaccgaaggcccgttacaga

SEQ ID NO: 10168 - DNA, 1464 bp, unidentified
  source 1..1464: mol_type = unassigned DNA; note = element_ffc1085
  misc_feature 1..2: note = core
  misc_feature 3..138: note = LE
  misc_feature 139..1206: note = CDS
  misc_feature 1207..1464: note = RE
gaggtggcatgaaagaggccgcgcccattgagagaacggatcactgagatgcaggtgatgatcgagggacagtcacacttccagcctttcggcttatcctgttggggtttcgcagatctcaacaagggagttggaagcatgactgcctcttataattaccatatcggcgtggattaccacaaatcctatagccaccttgtggtgcaggatagcagtggcaagacgctgcgatccggccgcgtgaagaacgatcgccagtcgctcggtgggtttctagagcggtaccgcgagaactcgcatgcggttgtcgaagcgacgcgcaactggatggcgatgtacgactggctcgacgacatttgtgatgatgtcgttctcgcccatcccttgaaggtcaaggcgatcgccgacgccaagatcaagaccgacaagatcgatgccacggtgctggcgcatctgctgcgggccgacctggtgccggaggcctgggcacctggcgaacgcgcaagagaactgcgcgtcgcgctgcgcgagcggatgttttacgtgcggctgcgcacgatgacgaagaaccgcattgtcacggtgtttgatcgctatcccgagcaaacggcacagctgaagaagctcggcgatctgttcggcaaggccggccgcattcagctggcgcaggtcaacgtctcagagatcgaccgcgtccagatcgaccgtggcctcgacttcatcggcgacattgacgtgcgcatcaagcagtcggaagcaacgatccgggcgatgaccaaggccaatgcccatgtgaaggtgttgaagacaatccccggcattggcgagttcttcgcccggctgatcgacgcggagattgacgatatatcccgcttccgtaacccgaagaagcttgccgcctatgccgggcttgtgccgtcgacctattcgagcggcggcaagaccttccacggcaagatcatcaagcagggcaaaaagtggctgcgttgggccttcgtggaagcggtttctcccgccatcgctacagatgcgcagcttcgagcccaatacgaccatctgaagatcagaggaaccaacaaggcgcgcgtggcgattgcgcgcaagcttttgacgatcgccttccaaatcctgcgtgaccagcgcgcctacgagccgcgcggcaccagcaccacggaaggcgcgtcgacgatatcccggttgtcctgatgtcgttctagcgagcccggcaggactgggctgcgctcttcaaggagaatgggaaaccgggagccgaacgccactctgtgaccgaagccgaggcatcagggtcacgaattggagcatggttcgagaaccgaaggacatctttgtcctgcggaagatagacgtttagccgatcggcgaaaatgccggtcaaataacaaatgaacccaaggaaaagcccgcaaatgctggtgttttgcccccttgtgttctttcattgga

SEQ ID NO: 10169 - DNA, 1379 bp, unidentified
  source 1..1379: mol_type = unassigned DNA; note = element_ffc5e95
  misc_feature 1..2: note = core
  misc_feature 3..86: note = LE
  misc_feature 87..1118: note = CDS
  misc_feature 1119..1379: note = RE
  misc_feature 1149..1367: note = bridgeRNA
tgatgctgtggacggctcctccaccggcgcgtgagcgccatggatttgggtgctgctaaggcccccacgattcggaggagccaaacatgcaaacggtcacgacaatcggtctcgacatcgccaagtcggtctttcaagtgcacggtgttgatgctgcgggccaagtggtcgtccgccgtcagttgaagcgccgttatgtcttgacgttctttcagaagttgccgtcgtgccttgttggtattgaggcttgcgcttcatcacattattggtcgcgcgagctacaggcgctcgggcacacggtgcgcctgatgccgccggcctacgtgaagccctacatcaagcgacagaagaacgacgccgctgacgccgaggccatttgcgaagcggtcacccgggcgaacatgcggttcgtcgagactaagacgcccgagcagcagagctgcctgatgctccatcgcacgcgccatctcttcatccgtcagcagacggcggtgatcaacgcgatccgcgcccatcttgcagagttcgggatcgtcgcgccggtcggacgcaatggcgtcgaggaactgctcggggtcgtagccgatccgagtgacaaacgcgtgcccgagattgcgcgcacgtgtctcgccgcgctcggcgcccagttgcggatgctcaaggcacagatcctggagttcgaccgtatgatcaacgcctggcaccgatccaacgagacgagcaagcggctggatgagattcctggtgtcggtccggcgctggccaccgctctggtcgccagcatcactgatccgaaggctttccgatcaggacgagacttctcggcctggatcgggcttgtgccgaagcagcactcgagcggcggcagggaaaagctcggcagtatcagcaaacaaggcgaccgctatctgcgcagcctgttcaccgccggcgcgctggccgtaatccgctacgccaaaatccatggtacgaagcaccggccatggctcacggctttgttggcgcgccggccgacaaagatcgccgccatcgcgctcgccaataagatcgccagaatggcttgggccatgatggccaagggtgagcgctacaaggaacccgtcgcgctcgcggcgtgaacgagatcacgccggccatccggcgtgatgtgaaggttgggaggacgaacagcacgtaatgcagagccggtcgatccggcgattaggacaacccacatgtgccagtgcattgtcgaatgcgggcttttgaccgggacctgatccgcggagggcattatggccagcggtcatgtgaaccgcgttaacaggccgaacacatggctgcaccgaccaagcctgcgacgtgaagtttttccttgccaactcggagccgtccacaca

SEQ ID NO: 10170 - DNA, 1209 bp, unidentified
  source 1..1209: mol_type = unassigned DNA; note = element_ffcf629
  misc_feature 1..2: note = core
  misc_feature 3..207: note = LE
  misc_feature 208..1194: note = CDS
  misc_feature 1195..1209: note = RE
  misc_feature 12..188: note = bridgeRNA
cttgtatcttttcttctgtggtggttagctaccatcacacgaagcagaggcagcttgagcccaaccttaaggcttgaccttgttccgtagatcaagccctctgcttcacctttcgccaacacggacactgaacggtagccaaggggaaaaccctgaatgcacaaggcaagtgggcgaagttggccaacattgtaacaggaggtcatcatgttttatctcggtatggatgtcgccaagtccaagctggattgttgtctgttgctggatgaatccagtggcaagcgcaagaccaaggtggtgaacaacaccaagcccggcatcgttgatttactggcctgggtcgccaaacaaaatatctcccaagatgagttgcatatcgtcatggaagccacaggcatctatcacgaacaagccgctatggcactggcggatgccggtgtcacggtttcaatcgtcaatccggcgcagatcaaggatttcgggcgcgggctggcggtgcgcaccaagacggatggcgtggatagctttgtgctggcccgttatggggcattactcaagcctgctgcctggcagccaccaccgcccgaagcgcgggttttgcaagcgctgttggcgcggcgcgaggccatcgcacaagacttgcaacgcgagcgcaaccggcaagagaaggccgatgcaaccgataccccggagcggatacggcaatcccttgccgacagcatcgagtttctcgtcaagcagctcgccgatctgcaacaagatattgaccggcatatcgataagcattccaacctcaaggacgatatggctctgctccagagcatcccggcggttggcccgcaggtgagcggcaatttgctctcggtgatacacagccacgatttcgggtcagccgagcagttggccgcctatctggggctggtgccggtggagcgacagtcggggagctcggtgctgggacgtgccaaactttccaaggttggacctgccagaatacgtgccgtgctgtacatggcggccatcgtggcaacgcgctataacccgcacgtcaaagccgtctatgaccgtttgctagcccggggcaagtccaagatgtctgccctcggcgcagcaatgcgcaagctggtgcatttgtgtttcggcgtgcttaaaacacgacaaccttaccaagcaaattatgcaaaaatcgcttgactggaaagacggtat

SEQ ID NO: 10171 - DNA, 1235 bp, unidentified
  source 1..1235: mol_type = unassigned DNA; note = element_ffcfb93
  misc_feature 1..2: note = core
  misc_feature 3..221: note = LE
  misc_feature 222..1211: note = CDS
  misc_feature 1212..1235: note = RE
  misc_feature 12..189: note = bridgeRNA
cttgtatcttaattcacatagtgattagctctcactatacgcaaacagcagagtttggttgtttactaaaacttaaagtttggcccaaagataaaacctgctgtttgccctgactgcctgcacaactctggacggtaactaagcacctcgatgctggattcgcaagaaaagacggcggttatgctgaaaaaaataattgaataaataaggcaggtaagattatgttttatctcggtattgatattgcaaaagctaaaattgactgctgtctgattttagaagattctgcaggcaaaaagaaaaccaaaacctttccgaatacgcccaaaggctttgaacagcttcaggcctggctgaatcatcatgctgcaggccctgcgcaggccattgccttaatggaagccacttctgtctatcatgaacgcctagctggatatttatttgatgcaggctttcaagtctgtgtggcgaatcccgccagagcccggtattttgctcagagcatgtccaggctgaataagacagacaaggctgacagtgaagttctggcccggtttgcgatgactgcggatctgcatttttggcagcctctgcctggacatattcaactgctgaatgctttgctggatcgaagggctgtgcttggtgaagatctgcagcgtgaagaaaaccgtttggaaaaagcggagtctaccttcacgatagaaccggtacttcagtcgatccataagaatattaagcagttaagcaggcatattcaggatctcgaccggcagattgatgaccacattgatcagcatcctgatttaaaaaatgacaaggcgctgctcagcagcattccggccattgcagaccggaccagtttattaatgctcagcttcttgcgcagccatgcttttgaaagggcgagccaggcggcggcctttgccggcctggtgcccattcaaaggcagtcgggcagctccattcacggcaggagccgcctatccaaagccggcccgtcgaaaatacgggccggcttatatatggcggcgattgtcgcaacccggcataatccccacataaaggggatgaatgacaggctgctggccaatggcaaaaccaagatgatggcggttggcgctgcaatgaggaagctgattcatctttgttatggcgtactcaagcaccagcggccttatcaggagaattattgcgccaattctcaataatcctcttgacctctgagacggtat

SEQ ID NO: 10172 - DNA, 1205 bp, unidentified
  source 1..1205: mol_type = unassigned DNA; note = element_ffd0f9d
  misc_feature 1..2: note = core
  misc_feature 3..227: note = LE
  misc_feature 228..1190: note = CDS
  misc_feature 1191..1205: note = RE
  misc_feature 28..203: note = bridgeRNA
cttgtatgttccccccggctcctacgaggtatgtaggagccagggtggagggaccgacaagcatggatctgcggatagcagccgacagacgagccgagcgatccccatcccgcacacgaacgtcgataaaggatcgtacggcccccaaaaggggatcgtcgatgtaggcaagctaacgtcggtgcggtaccaccccagccccttaaagatagctgggagtagtgcaaatgtccgattctcgtgtgattggtctggacgtggactcgaaggagttcgtgccagcggtagccgactgtaaagccggcgaacggatccccaatactcgcgccggcatcgccaaatggctcaagacccttcctccgcgctgccggattggcatggaagcgaccggtcggcaccatgaactcgtggcgcgtatggccggtcaggccggtcatgtggtctacgtaatcaatcctcgcttgatcaagaactacgcccgggcgatgggagcccgcggcaagaccgatgcgatggacgcccaggtcatcgcccggtacgtaaaaaaagagagtgatcgtctgcgtgaatacgtacctcgcagcgacgaacagcagcagatgcacgatctgctgcgcaagcgccaaacactggtggagacccgggcgcgcctggagcagtccttcgacgccaccaaaagcgacccgcgcgagctggcagatatcttcagggcactggccagcacgctttcgacactggaaagcgatctgcagcgcctaggccgtgacggtgaacaaggcccgctctacaagcgcctgctgaccatcccggggatcggcccagccgtcgccgcgcacctagtctactacatgacgcgctggccgctggccaacgccaacgcttggatcgcctgcacgggtttggacccccgacccaacgaatctggtggcagaaccggacggcgtcgattgtccaaacaaggcgcccccgtactgcgccagatgctgtacatggcggcgatgggccttaaacgctgtcggaacgggcagccgctttacgacgcactgtcagggcgtggccatcccagtacagcggtattcaacatcctggccagaaaactggccaggattgcgtggggtgtattcaagagcggcaaggacttcgacccagccatgttgaaagtgggtcaagcctgcttccagcaggcttgactgcgaacataggat

SEQ ID NO: 10173 - DNA, 2135 bp, unidentified
  source 1..2135: mol_type = unassigned DNA; note = element_ffd661d
  misc_feature 1..2: note = core
  misc_feature 3..272: note = LE
  misc_feature 273..1487: note = CDS
  misc_feature 1488..2135: note = RE
  misc_feature 11..250: note = bridgeRNA
ctcgtataatagatttacggtttaactggggtgggaaaccgcaggaaacccacttgttgtttcatcatccagatgagataataaggccagcaggcagagggcgcagatgtactccttgaagaactgcttccaacgaaagaattgcgcctctgtctttgcgggttgacacgaatgagctggatagcgaagttgcgctgtatatctaacgaggttgtgtcccgcaaagaagtgtgaggaaactctgtctgaaaattgaaacaggaggtttcgctatgttctactgtgggattgatatcgctaaatacaagcatgaagcttctgttatcgatgcgaccggggtagcactattagatagcatatcttttccaaacagcaaggaggggtgcgaaaaattgttggccctgtatagacgacagggcatctccaaagatgatctgctcatcggtatggaagccactggccactactggttaagcgtgtatggatatctgttggaccagggttttgaagtcaaagtcatcaatcccattcaatccgaggcattccgaagaatgtacatccggcaaacaaagaacgaccgaaaagacagctttatcattgctcagatcatgcgctttgggcagttctctgccacagaattggcagaagaggctgtcgttgcgctccgacaattgagcagatatcggttggctttggtagatacctgcggagactgtaagcggcgaattatctcattgttagatcaagtttttccggaatacaacagattgttctcagatacttttggagccacatctaaagaagtccttgcaaaatatccaacgccggaagacctgcttgcagtttcccccgaaaagcttgccaacatgttggaaaaagtcagccacggacgatttggtaaagaaaaagcaaagcagttgaaggctgcagcatctacctcattcggtgtgagctttgccaagcagtcctttgctcttcaaatccggcagcttattgaacagttggaatttctggaagggcaaattgaagaattggaggaacagatttctttattgctcaagcaaaccgaaagtcatattaccactattcctgggattggagacaccctgggtgctattatcttaggagaaattggagatatccatcgttttgacgcacccaataagttagtggcatttgcaggattggatgtgcgagtctcgcagtctggtgaattcattggtacacgtcagaaaatttccaaacgaggttcgccatatctccggcgtgccatttggttggctgcctccagggcagctttttgtgaccctatcctctcggaatactatcaatcccttcgtgcccggggaaagcaccatctcaccgccattggcgctgtttcacgtaaactctgcaatatcatcttcgcgattctgagtgagaaccgactctacgagactgtgccgccaagggaaattcgacaaacttcggcacctttcacaatgtgaacttagcgttcgtcgacatcaatcaatttttggaatattcttcctctcattgaggagggatactatggccgatagaaagagaacgccaattcacatttttgccgctcgcctttgtgctgttcgaaatgaacggggaatgacgcagcaacaggttgcggattttcttcgtcgttccagacgttggtatcaaaaaattgaggctggaacctcgaaacccaattggcaggacacgattttacttttgactctttttgaacttgatccagcatctattgtggaggaggtggggattcgtgtttcagtacttacccatagaaaatgagatgatgtctccatatctcggcagctatcaaacatttggactccgggtttgtagaatcgatacttgcactgacgaagaaatcatgtgtctaccagatatctctacaaactacttttttgtacttcgccttgcggaactgttcacgcgcaaacagctggatcctcttcatttgctggaagtattagaggatctgctataaatctatacataccccttgattttaggctcacatcttgtgagtctttttatgttacccacattgttatgctagtttttgtactcctcttgactttttatagctggtctcttgactttttatagctggt

SEQ ID NO: 10174 - DNA, 1425 bp, unidentified
  source 1..1425: mol_type = unassigned DNA; note = element_ffeb32d
  misc_feature 1: note = core
  misc_feature 2..61: note = LE
  misc_feature 62..850: note = CDS
  misc_feature 851..1425: note = RE
  misc_feature 1202..1419: note = bridgeRNA
tactggtatggtccgccgcctgtgcccctcggggtgtagaggtaaacagaggaggcgttccatggagattcgcaccatcggcatcgatttagggaagactgtctttcaccttgttggcatcaacgcacggggtgaagttgtagttcgcaagaagagctcgaggattcagctgctgcgtttcacatcgaaccttcgcgcgtgcctgatcggcatggaggcttgcggaggatcacattttctcggccgcgctctgcgggaacaggggcacgatgtgcgcctgatgccggcacagtatgtaaagccgtacgtgaagacgaacaagaacgactacatcgacgccgaagcgtgtgccgaggccgtaacccggcccacgatgcgatttgtgcctatcaagtccgatgaccagctcgacctgcagtcgctgcaccgggtacgcgagcggtgggttgtgcgccgtaccgcggtgatcaaccagattcgcggattgctgctggagcggggcatcacgatccgcaagggacgccaacatattgaaatggctctacccggtatcctggaagacccagacaacaagctgtctggcgcattgcgagtacttctgacacaactgcggttggaaatgcagtatctgcaggggcagatcgaggaatccgacaagctgatcgtgcgcatctgcggcgaacttgaaccatgcaggcgcctggtcgcgatccccggaattggaccggtcactgcgacggccacgatcgcagcgatcggcaacggggctgcctttaagaagggccgaggttttgctgcctggctgggagtggtgcccggcgagcactccaccgaggcaagcaaaagctaaccggtaccagcaggcgcgggaacaaatacctgcgaaagctcttcgtccaaggagcgcattcggtgctgctgcagagaacgaaacaaacttcagctttgagtacgtggcttgccaatctcgcatcacgcaagcgccctcaggtggccaccgtggcgttggccaacaagatggcgcgcatggcctgggtggttttgtacaaaggagaagtctatcgcccgccgctggtaccacaaacagttgcagcctgatggcctgcatatgacgcctggcacaggcgccaggcttggaaatcgctgaagcgattcccacatctgcagtccaacggcgactgatcgagttttgagattcctgccaggtttgctggcgaaccatgagatggcacaacggtcgatcccggcgctcccgaaacctgtaaccggaaaatgcctccaaaggcagcgttactaaaaaggacgagggcgcagcgcattccattcaggccaggagatcgctactccaataaaggccggatacattcgcgcagaccttttctgtcatcctcattcttcgcttgcaaaacggcggcggaccataca

SEQ ID NO: 10175 - DNA, 1423 bp, unidentified
  source 1..1423: mol_type = unassigned DNA; note = element_fffa977
  misc_feature 1: note = core
  misc_feature 2..218: note = LE
  misc_feature 219..1241: note = CDS
  misc_feature 1242..1423: note = RE
  misc_feature 16..230: note = bridgeRNA
ctggttgagacttctaggcagacgcttcgttagttcgtagcgtttagaggtccggatgggttagctctcgaagtgcctgccgccagctccggctggctggctttcgaacgagtggcttctcgtctggaccttgccgcgggtggctcgaaagaggaacgtgcacgagatcccaaccaggagtgcccccgcgtccctaaccgacgacgaaggaggaactcatgacagtgatcatcgggattgaccctcacaaggcatcccacacggccgtggctatcgaccgcgacgagcaacggctggccgagatcaaggtgcgcgccaccattcagcagtcaacgaagctattggcgtgggccgagccactcggcgatcggacgtgggctgtcgagtcggctggaggaatgggctacctgttgtcccagcagctggtgggggcaggcgagcgggtccttgatgtgccggcgacgctggcctcgagggtccgggtgcttggcaccgggaagtcggacaagaacgacccgaacgacgccctgtcggtggccgtcgccgctcttcgttcgcctgggctccgcttcgtcgagatggccaaccatcgagaggtgctgcgcctcctcgccaagcgaaacaaccagatcgggaggctccggaacatcaccgtgtcccgcctccatgctgcgttgatcaatctctcaccaggcggaatttccaaggagctcaacgcttctgacgccatgcggctgctcaatgacttcgatccagtgactccggtggagcagatccgctttgatctggcccacgagctactcgacgatgtggagcgactggatgcacaactcaaggtgtcccacaagcgcatcaaagatgcggtcaaggcgtcggggacgtcactgacggatctctatggcgtcggtcccatcctggccgctgccctgatcggctacaccggtgacgtccgtcggttctccaaccgggaccagttcgcctcctacgcgggtgtagcccccatcgaacactcctcgggaggcagggtcgtccaccgcctcagcagacgaggaaaccggcaactcaaccacgccatccacatggtggccatctgccaaatccgccagaaggactccgagggtcgggtttacttcgagcggaaggtggacgagggcaagaccaagcgggaagcgatccggtccctcaagcgtcaggtcagcaacgccgtctatcggcagctcctcatcgacgcacagaagtaagggcccgggaggacaagcgggaacgactcatggcctgcgtggtcggctctgcaccctggcggccggctcttcggcgaagtcactcccggacccaccaaaccttaggcatctgcgccatcgacggcacgtggttcaacgcgccccatagtcccggaaattgccctcttgactcaaagaggatt

SEQ ID NO: 10176 - protein, 326 aa, unidentified
  source 1..326: note = protein_IS621
MEHELHYIGIDTAKEKLDVDVLRPDGRHRTKKFANTTKGHDELVSWLKGHKIDHAHICIEATGTYMEPVAECLYDAGYIVSVINPALGKAFAQSEGLRNKTDTVDARMLAEFCRQKRPAAWEAPHPLERALRALVVRHQALTDMHTQELNRTETAREVQRPSIDAHLLWLEAELKRLEKQIKDLTDDDPDMKHRRKLLESIPGIGEKTSAVLLAYIGLKDRFAHARQFAAFAGLTPRRYESGSSVRGASRMSKAGHVSLRRALYMPAMVATSKTEWGRAFRDRLAANGKKGKVILGAMMRKLAQVAYGVLKSGVPFDASRHNPVAA

SEQ ID NO: 10177 - protein, 328 aa, unidentified
  source 1..328: note = protein_IS621_161642
MENEIHFIGIDVAKAKLDVNMLRPDGRHRSKKFANTPGGHDELVNWLRGHQVIHAHICMEATGTYMEDVAAHLSDAGYQVSVINPMLSKAFVQSQGIRSKTDTVDARQLAYFCREKRPAIWEAPHPVERALRALVLRHQALTEMHVQEQNRRESARDVQLPSIDMHLLWLDTELKRLEKQIKDLTDDDPDMKHRRKLLDSIPGIGPKTSAVLLAYVGLKERFREARQFAAYAGLTPRQHESGSSIRRVSRMSKMGHVSLRRALYMPAMVTLYKTEWGREFRERLEKNGKNAKLIIGAMMRKLAQVAYGVLKSGRPFDATLHSKNACMA

SEQ ID NO: 10178 - protein, 326 aa, unidentified
  source 1..326: note = protein_IS621_127209
MEQELHFIGIDVSKAKLDVDVLRPDGRHRSKKFANTPKGHDELVRWLNSHQAAPAHICMEATSTYMEDAAAHLSDAGFTVSVINPARGKAFAQSEGLRSKTDAVDARMLAEFCRQKRPAAWQAPHPVERALRALVLRHQSLTDMHTQELNRLETARDVQMPSIDAHLLWLDAELKRLEKQIKDLTDDDPDMKHRRKLLESIPGIGEKTSAVLLAYIGLKNRFGGARQFAAFAGLTPRHHESGSSVRGAGRMSKAGHVSLRRALYMPAMVAVSKTTWGRAFRDRLAANGKRGKVIIGAMMRKLAQVAYGVLKSGESFDASRHVPVAA

SEQ ID NO: 10179 - protein, 322 aa, unidentified
  source 1..322: note = protein_IS621_55201
MEQELHFIGIDVSKAKLDVDVLRPDGRRRSKKFANTTKGHDELVRWLNSHDVAPAHICMEATSTYMEDVAVRLCDAGFTASVINPALSNAFAQSEGLRSKTDAVDARMLAEFCRQKRPAAWEAPHPVERALRALVLRHQSLTDMQTQELNRRETAREVQMPGIDAHLLWLKAELKRLEQQIKDLTDDDPDRSTAESCWRASRVSGKKPRQYAGLKGRFPQARQFAAFAGLTPRQHESGNSVRGVSRMSKAGHVSLRRALYMPAMVATSKTEWGRTFRDRLMSNGKRGKVIIGAMMRKLAQVAYGVLKSGKPFDATLRVPVAG

SEQ ID NO: 10180 - protein, 326 aa, unidentified
  source 1..326: note = protein_IS621_145219
MEQKLHYIGIDVSRAKLDVDVLRPDGRHRCKKFENTPKGHDALVSWLNGHQVAPAHVCMEATSTYMEDAATCLSDAGFIVSIINPALSKAFAKSEGLRSKTDAVDARMLAEFCRQKRPAAWEAPHPLERRLRALVLRHQALTDMHTQELNRLETARDVQMPSINAHLQWLEAELKRLEKQIKDLTDDDPDMKHRRKLLESIPGIGEKTSAVLLAYIGLKNRFAHARQLAAFAGLTPRIYELGSSVRGASRMSKAGHVSLRRALYMPAMVATSKTEWGRAFRDRLAANGKKGKVILGAMMRKLAQVAYGVLKSGVPFDASRHNPVEA

SEQ ID NO: 10181 - protein, 326 aa, unidentified
  source 1..326: note = protein_IS621_23122
MEQELHFIGIDVSKAKLDVDVLRPDGRHRSKKFANTPKGHDELLRWLSGHRVAPAHICMEATSTYMEDVAAHLSDAGYTVSVINPALGKAFAQSEGLRSKTDAVDARMLAEFCRQKRPPAWEAPHPVERALRALVLRHQSLTDMHTQELNRLETAREVQRPSIDAHLLWLHAELKRIEKQIKDLTDDDPDMKHRRKLLESIPGIGEKTSAVLLAYTGLKERFTHARQFAAFAGLTPRRYESGSSVNRASRMSKAGHASLRRALYMPAMVAVSKTEWGRAFRDRLAGNGKKGKVIIGAMMRKLAQVAYGVLKSGVPFDASRHNPVAA

SEQ ID NO: 10182 - protein, 349 aa, unidentified
  source 1..349: note = protein_ISAar41-192
MTIVADRCTHVMGVDTHAKTHTYAIVQAATGAVVAAATFPVTPAGLDRALAWAQRRAPGYVAAVEGTASYGATLTARLQQAGTVVFEARPPKRASRAGRGKSDQIDAVAAARSVLSEPLERLATPRSGELRRALQLLLTARRLLERQRAQDHNALTAIVRRIELGIDARKALTDRQVEQIAAWRTRTTDSIAQAIARAEATRLARQSRLRAAELKDNKAMLERHVRTLAPELLEEVGIGPVSAAACIAAYSHHGRVRSEAAFASLAGVAPIPASSGNTQRHRLNRHGDRRLNAALDTIVRTRLRSDPTTRAYRDQHLAEGKTNADIRRLLKRYTARSTYRTLKKILNNT

SEQ ID NO: 10183 - protein, 351 aa, unidentified
  source 1..351: note = protein_ISAar41-39
MPIVADEYTHVIGVDTHARTHTYAIVETITGRLATVAEFPTNPAGLARAITWINRHSPGQPLVAIEGTGSFGAGLAAVLENQGVPVVEARPPRAATRAGRGKTDAFDAEAAARAVISTDTAKLGWPRAGKIRSALRVLLTARRAIDTRRTCDRNGLTALLRTIDLGLDARKPLTDRQVSLIAAWRHHPTDDVEQAVAREEATRLARNVIHATIQLDANHRALGRHVAELAPGLLAFRGIGPVTAAVFLTAYSHPGRVRSEAAFASLAGTAPLPASSGNTTRHRLNNRGDRRLNSALDVVARVRMAHDADTRAYVERRRSEGRTPKEIKRTLKRYISRQVYRQLTATMASQT

SEQ ID NO: 10184 - protein, 348 aa, unidentified
  source 1..348: note = protein_ISAar41
MTIVAETYDYVIGIDTHARTHTYAIINTRTGSREACQAFPTSPAGMNRTLAWITKRTTGTLLAAVEGTRSYGATITHALTMAGFPVVEVKPPRRQARARVGKTDEIDATAAAMGILYQDTERLLTPRAEGTRSALNVLVASRERIDAERTRNRNALTALAREIDLGVDARKALTDMQVKQISAWREHPTDSVAQRYARAEASRLATAVLDADKLLAANKTQMAELDEQMAPGLAAEFGYGPVTVAWILIAYSHTGRVHSEAAFASMAGVAPLQVSSGNTVRHRLNRHGDRMLNQAVDVIAKVRMQFDPQTKDYVEKRKAEGLSYREIKRVLKRYIVRKVFRRLRVLVP

SEQ ID NO: 10185 - protein, 348 aa, unidentified
  source 1..348: note = protein_ISAar41-74
MTIVADEFTHVIGVDTHARTHTYAAVEARTGEILGTAVFPTSPAGLARARSWINRRAPESMLVAIEGTGSYGATLTRALQAEGIEVREVKPPRRATRSAHGKSDEIDAIAAARTAIASPLSELSTPRAEGIRSALRVLLVARQALDSRRTADNNMLTALLRSFSLGVDARRPLTVSQVQTVGGWRERCTDDSVIGTIRSEAKRLATSILAATRQLDQNHAALAHHVQELAPGFLNIKGVGPVTGAIILAAYSHRGRIRSEAAFASLAGVAPLQASSGNVVRHRLSRRGDRQLNRAMDIIARTRMVSDAGTRAYVDRRTAEGKSRREIRRCLKRYVARQIFRQLNSLMG

SEQ ID NO: 10186 - protein, 348 aa, unidentified
  source 1..348: note = protein_ISAar41-12
MPLVTEKYDYVIGIDTRARTHTYAAINTGTGAQEGCEAFPVSPAGMRRAIAWIGRSSTGEVLAAVEGTRSYGSSITAVLTAKSIPVVEAKPPKRQARAGVGKTDKIDARAAAMGVLGKDTAALIYPRAEGVRAAISVLLASRRRLDHQRTVNRNALNALVREINLGLDARKALKDRQLIDISAWRQRTDDTAEQRIARDEAIRLAAAVLHADKQLKRNKEQLAELGEELAPGLQNQTGVGPVTAGAILVAYSHHGRVRSEAAFAALAGAAPLQASSGNTVRHRLNRHGDRQLNSALDVIAKTRMRCDEQTKQYVERRTAQGLSYREIKRILKRYIARSIYRQLQHLTA

SEQ ID NO: 10187 - protein, 359 aa, unidentified
  source 1..359: note = protein_ISAar18
MTTIANTYAFIIGVDTHARTHTYAVIAPNGEQIGTESFPNSLAGRKRAIAWVNRRTQSEVRVLWVIEGVGSYGALLAGAVSNSGYRVVEAPRRYAPARRGAGKTDPIDAAAIAAAALPLIEQELRIPRQADGIRAALRVLTAAREQMTLERTSKINALTALLRIVDLGVDARKPLTETQIVQVSSWRERDEGIDRVFARAESTRMAKRVLVLNVDLKDNQEKITELIESSPAAPLLEVTGVGPVTAAVVYAAWSHLGRVRSEAAFAALAGVNPIPASSGNVERHRLNRGGDRRLNSALHMATIVRTIHDPDTRAYAERRKSEGKSSREVRRILKRYLARRLYRILNALHSLPDAPLSSC

SEQ ID NO: 10188 - protein, 348 aa, unidentified
  source 1..348: note = protein_ISAar41-86
MSTVADTYKYVIGVDTHAKTHTYAVVAAATGAVIDTASFPTTDAGTARAIAWIERRSDGQQLAAVEGTGSYGATVTRALTTAGIRVCEVKPPKRQARDGHRKTDQIDAVAAARTALGTDATALILPRADGLRSALRVLLVARHSIDSQRTSDRNALNALLRIINLGLDVRAPLTNTQVDIIATWRDRSSDDTAAAVARSEARRLASAIHQRTRELETNHAALSKHVDELAPGIQDIPGVGPFTAAIILTAYSHQGRVRSEAAFAALAGGSPIPASSGNTTRHRLNRHGDRQLNRALHIIARCRMITDPTTKSYVDRRTAEGKTRREIHRCLKRFIARSIYRSLATLTA

SEQ ID NO: 10189 - protein, 349 aa, unidentified
  source 1..349: note = protein_ISAar41-36
MTIVAEKYTHVIGVDTHSRTHTYAVLAAATGQVIDTSTFPASQAGISHAISWMQRRTTIGEVLIAVEGTGSYGAGLTRALRDAGLPVCEARPPKRQNRGSIGKSDEIDARAAARAVLGTDIAALAQPRAEGARDALRVLLAARRSMDGQRTADRHALTALARTMDLGIDARKAITDRQLHTIAAWRDRPKDDVSTKVARSEATRLATAVLRHTSALETNRADLAQLVDQMAPGLQDLRGLGPVTGAIILTAYSHPGRIYSEAAFAALAGVNPIPASSGNTTRHRLNRHGDRQLNQALDVIARTRMASDADTRAYLDRRTQEGKTRREIRRCLKRIIARQIYRKLTTLMA

SEQ ID NO: 10190 - protein, 356 aa, unidentified
  source 1..356: note = protein_ISAar29
MSIVAHSHAFVVGVDTHARNHVYAIITATTGELVDTRDFPTTGAGINRATAWVARRTGADLAVLWVIEGAASYGAILAGTVVTKGYSVVEAARMDAKSHHGVGKSDVLDAQRIARAVLPMQEKQLRRPRLNEGVRAALRVLVSARHSMTGERTRAVNGLTALVRVNELGLDARKALTGAQITEVSRWREQDEELALSVARTEAVRLAKRIGDLDKDVAGNTQQITELVKVSEAAPLLDVKGFGAITAATCLTVWSHQGRVHSEAAYASLAGVNPIPASSGNTVRHRLNRGGDRSLNSALHMVAITRMTHDEETREYVQKREAEGLSTKEIRRCIKRYLARRVYRIFNSQAEALIAG

SEQ ID NO: 10191 - protein, 355 aa, unidentified
  source 1..355: note = protein_ISAar29-423
MSTIVADTHPFVVGVDTHARTHTLAVLAASGRPVATGTFPTTPAGRRRAIAWAARRADHDPNLLWVIEGSATYGATLARDLATAGHQVVEAARANPRAARGTAKTDELDATRIAAAVLPLPTDRLRRPRADDGIRDALQTLLTARETMTSERTRAVNALTAILRTTDLGIDARRPLTARHITQAAGWRARTEPIATATARTEATRLAQRVTDLDRQLRTNQTTITGLIRQSPAAPLLATLGIGPVTAAIAFVTWSHPGRIRNEAAFAAIAGANPIPASSGNTTRHRLNPGGDRRLNRALNTIALVRMTHDPTTRAYVEKRRTQGKTDKEIRRCLKRYLARHIYRTLNNAASLDKT

SEQ ID NO: 10192 - protein, 360 aa, unidentified
  source 1..360: note = protein_ISAar29-364
MPIVAETYRHVVGVDTHAATHTYAVVGCPTGALIDQATFPTSSTGLARALAWVGRRTGGDLGSVLVAVEGTGSYGAVLSDRLDELGYRVVEAPTPERHRGRGKTDQLDALNAARASLAMDLAYLRDRRGGGPDAQVRAALQVLTTARDQANAERLRCLNALTALTRTHDLGIDARRALTRVQIATIAGWRARNEPLGAATARVQAVRLARRITELDQDLAANHDQIAALLPPQQAPQLLHLPGVGAVIAATVLTAWSHPGRIRSEAAFARLAGTCPLPASSGNTTRHRLNRGGDRRLNRAINTIVLTRMRIDPRTRAYIDRRRAEGKTNREIRRALKRYVTRQLYRTLNNQPTPQPLDAT

SEQ ID NO: 10193 - protein, 350 aa, unidentified
  source 1..350: note = protein_ISAar41-54
MTMVAETYEFIVGVDTHSRTHTYALMAARTGAIEETKTFPASEAGINRAVAWIHLAGGPERSVLVAIEGTGSYGAALTRALTSSGLNVVEARPPRRGSRGSRGKSDAIDATAAARATLALDTARLVRPRAEGTREALTVLLAARRRLDTARTINRNALNALVRTTDLGLDARRALTDAQIELVAAWRPRAADPIQVAVARNEARRLAREILTSTASLKENKALLGELVQQLAPGLQNEAGVGPVTAALVLAAYSHHGRVRSEAAFAALAGACPIPASSGNTTRHRLNRNGDRQLNRALDVIARTRLTFDSRTRAYAERRTSEGMNRREIQRCLKRYVARQLYRRLQTIMA

SEQ ID NO: 10194 - protein, 346 aa, unidentified
  source 1..346: note = protein_locus59881
MTHITTIGLDLAKQVFQIHGADAEGSPIVNRKLRRAEVLRFFEKQPACLVGLEACGGSHYWAREIAALGHEVRLIPPAYVKPFVKRGKTDAADAEAISEAVIRKTMRFVPVKTAEQQAAAMVLKTRGLLVRQRTQVINALRAHLSELGIIAGISSAKVAGLIDIVRDETDARLPKAARLALSAIADQIEALMRQIDDLEREIVREARRDGDMRRMATIPGVGAITAASIKALVPDPGGFKSGRHFAAWLGLTPRSHSSGGKERLGGISKMGNAELRSLLVLGATSVLRHMRGNDKTPKWLNGLLKRRPYKVVAVALANKMARIIWALLTKGGTYRGLEAANSAASA

SEQ ID NO: 10195 - protein, 344 aa, unidentified
  source 1..344: note = protein_locus163322
MQITTVGLDLAKNVFQVHGVDSTGQVVLRKSLRRSQMLPFFAKLPPCLVGIEACGTSHHWARELINLGHEVRLMPPAYVKPYVKRGKTDAADAEAVCEAVTRPTMRFVPVKSPEQQAALAMHRTRDLLVKQRTQLINMIRGLLAEFGVDIPKGLERALLMARQIADGRGPEVPIEAAKMVTTLSQQALDIHVRLREIDRDLAVCLRGNDVARRLMTIPGIGPVGATALAASVTDPHQFRSGRQFAAWLGLTPLQKSSGGKERLGRISKMGDKYLRKLLIIGMTSLVRRAKYNPGKIDPRLADLLARKPTRVATVAMANKTARVIWAIMARGETYRAGHRPALEA

SEQ ID NO: 10196 - protein, 281 aa, unidentified
  source 1..281: note = protein_locus136201
MKYLPVGVDIAKSLIQVHFIDEHTGEVVDKQLRSKDFLSFFSNREPCLIGMEACGGSQHWARELEKMVHSVRLMPGRFVKAFVMGNKNDVMDARAIWVAVQQPGKAIAVKTEEQQSILVLHRSRRQLVKFRTAQISALHGTLLEFGEIIHKGRAAMDKELPLALERMKAKLPPYLITVLEDQYNRLNELDMLIDGIEKQLNSVARQNETCKRLMEIPGVGPLIATAAVATMGEASAFKSGREFAAYVGLVPKQTGSGGKVRLLGISKRGDTCLCMVPGLRH

SEQ ID NO: 10197 - protein, 328 aa, unidentified
  source 1..328: note = protein_locus153600
MENEIHFIGIDVAKAKLDVDMLRPDGRHRSKKFANTPGGHDELVSWLQGHQVIHAHICMEATGTYMEDVASHLSDAGYQVSVINPMLSKAFVQSQGIRSKTDTVDARQLAYFCREKRPAIWEAPHPVERALRALVLRHQALTEMHVQEQNRRESARDVQLPSIDMHLLWLDTELKRLEKQIKDLTDDDPDMKHRRKLLDSIPGIGPKTSAVLLAYVGLKERFREARQFAAYAGLTPRQHESGSSIRRVSRMSKMGHVSLRRALYMPAMVTLYKTEWGREFRERLEKNGKNAKLIIGAMMRKLAQVAYGVLKSGRPFDATLHTKNACMA

SEQ ID NO: 10198 - protein, 347 aa, unidentified
  source 1..347: note = protein_locus200162
MNQISTIGLDLAKHVFQVHGADEDGSPLFSRRLRRGEVLHFFSKQSRCLVGIEACGSAHYWAREIAKFGHDVRLIPPTYVKPFVKRSKTDAADAEAISEAVTRKTMRFVPVKTAEQQAEAMVLKSRSLLVKQRTQVVNALRSHLGELGIIDAAGMEKVDTLMAVVRDFTDVRLPAAARFALTAIADQINALAGQIDQLDRAIVAEAKTDGDMRRLTTIPGVGAITAATVKALVPDPGGFKSARHFAAWLGLTPRQFSSGGKERIGRISKMGNPELRCLLVLGATAVLRGARKNERAQPWLRALLARRPFKVAAVALANKMARIVWALLNKSGVYQRPEASETAAVAC

SEQ ID NO: 10199 - protein, 299 aa, unidentified
  source 1..299: note = protein_locus238387
MKKWNVILGVDVSKLTLDICCAERNLHIKIDNCTKGFAVLKKWCKEKEIDLHTTLIIMEFTGGYEYRFVQFCQSMSIDYRRVPGLEIKNSMGMVRGKSDQADAYRIGLYGEDKSRRLEPSNPLNDNVLILRQLLSFRKRLVREKAGLQSTLKEREHMYGVKKNDHITRIAKDKIKANDKHIRQIEEEIMGTIKNDEAMWWNYRIITSIKGIGKVNGWMTIVYTENFTSFTDPRKYAVFVGVIPFANDSGTSIKGKKRVSHLAHKEIKKELNQAAKTAMIHDAEIRAYAERKLQNKAYPL

SEQ ID NO: 10200 - protein, 343 aa, unidentified
  source 1..343: note = protein_locus36182
MQTVTTIGLDIAKSVFQVHGIDAAGQVIIRRQLRRRAVLAFFQKLPPCRIGIEACASSHHWSRELQALGHTVRLMPPAYVKPYVKRQKNDMADAEAICEAVSRANMRFVPTKTPEQQSGLMLHRTRHLLIRQQTAVINSIRAHFAEFGIVAPVGRKGVMELLHVVADPSDKRLPEVARACLSALGAQLLSLKQQIVEFDRMIMDWHRSNETSKRLHCIPGVGPMLATALVASVADPRTFRSGRNFSAWIGLVPKQHSSGGKDKLGSISKQGDRYLRSLFVAGALAVIRYARIHGTKHRPWLTALLARRPTKVAAIALANKMARMAWAMMAKGERYQQPLALAR

SEQ ID NO: 10201 - protein, 342 aa, unidentified
  source 1..342: note = protein_locus6338
MEITTVGIDLAKSIFQVHAVDAAGHVVVRKALRRAQVVPFFAKLPRCLVGIEACGTSHHWAWELTKLGHEVRLMPPAYVKPYVKRGKTDANDAAAICEAVTRPSMRFVPVKSTEQQAALALHRTRDLLVKQRTQLVNMIRGLLAEFGIEMARGLRHALELAARLSAGDAAEVPPLAQRVVTGLADQISALQIQLTRLEKELLAWHRENDLSQRLATIPGVGIVSATALAASVSEPERFLPGRQFAASLGLTPLQNCSGGKERLGRISRMGDRYLRRLLVVGMTSLVRRAKAAPTSVDSRLPALLQRKPVRVVTVAAANRTARVAWAIMTRGGTYRAPAATAA

SEQ ID NO: 10202 - protein, 375 aa, unidentified
  source 1..375: note = protein_locus229727
MNNNNTLYVGLDVHKESITVAYAINSEPVELMGKIGTSPTDIQNLCKRLRSKSSQVSIVYEAGPCGYGLYRRLVKSGFDCMVCAPSLIPKKPGERVKTDRRDAIRLVRSLRAGDLSAVYVPGIEDEAFRDLARAWASARDDLRHARQRLKSFLLVHGVHYVGRADWGPAHRRWLSKYSFESPWRQLAFDEHRRTIEDRQAQCERLESALKEAVTEWRLYPVVEALQAMRGIQFITAVGLISELGDLTRFEHPRQLMSWFGITPSEYSSGGSRHQGSITKAGNSYARKLLVEAAWSYRHPARISPAIQKRQENLPRPVIDRAWDAQLRLCKRYRKLQAKGKNVNITIVAVARELAGFIWDIGRIAMSVAQQPQCHK

SEQ ID NO: 10203 - protein, 349 aa, unidentified
  source 1..349: note = protein_locus189474
MTFTSVGIDLAKNVFAVHGVDQNGKTVLIKSRVTRTALPGLIAGLPPCVIGMEACSGAHYWARLFRQYGHEPRLMAAKFVSPYRVAGKSGKNDAADAQAICEAVCRPHMRFVPVKDECQQAMQCLHRTRQGFIEEKTATYNLLRGLISEFGVIAPQSTDALRHMVSAQKNSLPLQVQQCVDDLLEHVARIEANIAEYDRILSLMAKTDHRSQRLMELKGVGPTTACALVTSIGNAHDFKNGRQLAAWLGLTPSQYSSGGKSKLGRITKAGDSYLRTLLVQWTRSVLIWAEKRLIHSVAGSAHWSNAEDTGALLLPSLPRMQDCAGHHCITVMISGCTQPAKARSSSIII

SEQ ID NO: 10204 - protein, 339 aa, unidentified
  source 1..339: note = protein_locus40696
MKYIPVGVDIAKHLMQVHFVDEHTGEIIDKQVKREKFLEYFSNREPCLIGMEACGGSHHWARELQKLGHKVRLLKGRFVKAFVMGNKNDVMDARAIWLAVQQPVQSVAVKSEEQQATLGLHRMRQQLVKFRTAQINALHSLLLEFGETTHKGRAALAKEVPEALERLKERLPLYLINMLDEQYQRITELDEHLDHIEKQLQAIARQNETCQRLLNILGVGPLIATAAVATMGDASAFKSGREFAAFIGLVPRQTGSGGKIRLLGISKRGDKYLRTLFIHGARAAALLTKEPGPWITELKKRRPASVAIVAMANKLARTVWAIAAHGRKYDKNHVSIRPD

SEQ ID NO: 10205 - protein, 334 aa, unidentified
  source 1..334: note = protein_locus196678
MENIALIGIDLGKNSFHIHCQDHRGKAVYRKKFTRPKLIEFLATCPATTIAMEACGGSHFMARKLAELGHFPKLISPQFVRPFVKSNKNDFVDAEAICEAASRPSMRFVQPRTESQQAMRALHRVRESLVQDKVKTTNQMHAFLLEFGISVPRGAAVISRLSTLLEDSSLPLYLSQLLLKLQQHYHYLVEQIKDLESQLKRKLDEDEVGQRLLSIPCVGTLTASTISTEIGDGKQYASSRDFAAATGLVPRQYSTGGRTTLLGISKRGNKKIRTLLVQCARVFIQKLEHQSGKLADWVRELLCRKSNFVVTCALANKLARIAWALTARQQTYEA

SEQ ID NO: 10206 - protein, 346 aa, unidentified
  source 1..346: note = protein_locus137473
MEQIIRIGMDTSKSVFQLHGVNAKEQPVLRRKLSRREMVKFFEKLPPIEIAIEACGASHYWGRVLSCLGHTVKLIAPQLVKPYVKRGKNDAADAEALCEAMSRPTMRFVPLKSEEEQAALMLIGMRARLIRNRTQLANTIRGYAAEFGITAPKGMCRIEALLDRIAADESLPTLTRELFALHAKEYAELQGEIEQLEGKVMAWHRANECSQRLAKIPGVGPIGAALLMMKTPDPHLFKSGRAFAAWIGLTPRDHSTGGKTRLGRITRAGDEVLRSTLVVGATAVVSHARRTNGKNASSWLRELLERKKPKLAAVALANKIARIAWKLMVSGEHYKRLLQQPGAAAV

SEQ ID NO: 10207 - protein, 396 aa, unidentified
  source 1..396: note = protein_locus101259
MAAIWAGIDAGKTHHHCVSIDDSGRRLLSRRVANDEPELLELLAHVLALGDQVTWGIDLADGGAALVIAILLNHDQPLHYISGRAIHRASESYRGEGKTDAKDAAVIADQVRVRRDLHPLRAADDTITDLKILTGRRMDLVADRTRTVNRLRAQLTGIFPGLERALDVTNSGPLTLLVGYQTPAAIRRIGAKRLEIWLRNRHVVRADRLAEIAVQAAERQHTRLPGEKLAAQLVHTLAREVMGLNQQIAELDKDIEARFRDHHTFDVIISMPGLGVILGAEFLAATGGGMTVFGTADRLAGFGGVAPVPRDSGKISGNLRRPQRYDRRLQRVFYISALFSIRHCEESRQFYDRKRAEGKRRSQAVLALARRRVNVLWALIRDGRCYELTPPSALAA

SEQ ID NO: 10208 - protein, 353 aa, unidentified
  source 1..353: note = protein_locus78905
MIVIGIDPHKSSHTATAVDPATNTDLGSIRIDATRTGYKTLIDWAKTWPTRKWAVENAEGLGHHLAQWLLVLGELVLDVPTTSTARIRQLSRGGRRKNDRIDAAAAACVAVLQGDARPVDPEGPTDILALLDEHRTNMSNSRTRLVNQLHALLRQLFAGGAPTSLTAASATTLLRGFRARSGVDRTRVGLCRDLIADIRRLDDQLAANEKQMAHTLDEHGTRLREVDGIGAVTAARLIGRTGRASRFPTAAAYANYNGSAPVQIASADTDRHRLSRYGDRQLNSALHTVAMVQTRMPASAGRTYYDKKIDEGKPPAAARRALKRHLSDHVWRIMLADEKRRYRRNEADTASAA

SEQ ID NO: 10209 - protein, 340 aa, unidentified
  source 1..340: note = protein_locus71993
MDVTTIGIDLAKSVFQLHGVDEEGNAVVKKKLRRGAVLDFLRNLPPCLIGMEACASAHYWAREIGALGHTVRLMPPAYVKPYVKRQKNDAADAEAICEAVTRPSMRFVPVKSAERQGVLVLHRARDLLMRQRTMLLNAIRAHMAEFGVIAAQGPRKVMDLIAQLRSDEEIGLPDIARPALLALAAQLEAMGCEIRSLERQLMAWHRTDETSQRLKTIPGVGIITATALAASVPDPSVFRSGRQFAAFLGLVPRQNSSGGKDRLGRISKMGDGYLRKLLVVGATSVIRRAGTNNTATGVWIRSLLERKPARVATVAMANKTARIAWVVLVRGEVYRAPAAA

SEQ ID NO: 10210 - protein, 336 aa, unidentified
  source 1..336: note = protein_locus95399
MFQLGIDVSKKTLDLCLLREGVKGRVKTRKLQNDINAVSAVIAWLSKQHCKPEDVHIIMEATGVYHESLAYGLHKAGGRISLANPHRAREFARGMGMLTKNDRVDAYMLACYGVLKAPEPWLPPPEEVRHLSALLRRRDALVADSTREKNRLEKYLATDTPSVIAESVEAMIGQLNAEIKRLDRLIRSHLNQHPELKKDFDLLTSIKSVGYQLGLNMLVILRSHDFATAEQAAAFLGVVPVEKYSGTSVRGCPKLSKIGPPEIRAKLYLASLCGLRFNPLMKAMYERLCLRGKAKMCAIGALMRKLVHWCYGVLKTQKPFDVGYLPSYARSACKAA

SEQ ID NO: 10211 - protein, 334 aa, unidentified
  source 1..334: note = protein_locus79791
MQNITLIGIDLGKHSFHIHCQDKSGKALLRKKFTRTKLMQFLATCPPSVVVMEACAGAHFMARCISDFGHETKLISPQFVRPFVKSNKNDFVDAEAICEAASRPSMRFVQPRTETQQAMRALHRVRESLIRDKVKTTNQIHGFLLEFGISLPIGDAVIKRLSLVLAEHEIPEYLSRLLVRLHTHYFYLVEQIAELESELSQSINADDTAQRIMTIPGVGPITASLLSSQLGDGKQFSCSRDFAASTGLVPRQYSTGGKSTLLGISKRGDKNLRRLLVQCARSFIMRLERKHGKLAEWVREQLNKKHSNVVTCALANKLARIAWAITTQKKEYQA

SEQ ID NO: 10212 - protein, 343 aa, unidentified
  source 1..343: note = protein_locus108084
MSEMKITGIDLAKTSFYLFSINAYGKPAGKIKLSRSNLLNWLVQQPPMTLAMEACGASHHWAREIQKLGHKAILLPAQHVRAYQRRQKNDYNDAQAIAEACQHGTIRPVPIKTLDQQDLQTFLKMRQMVSMERTQLINHVRGLLAEYGIVLNKGATELRRTLPALLEDAENELTDTMRTLLHRQYTRLAMLDDELEWYNSEQKKYVHQDPVCKRLLAIPGFGPLVSQAIKSWMGDGKQFKRGRDASAALGLVPRQFSTGGKQVLLNISKCGNRYVRSMLVHGARAVLFRAGEKTDPLSVWINRIREKRGFNRAVIALANKLLRISWVIIARNELYLPVAMKNQ

SEQ ID NO: 10213 - protein, 349 aa, unidentified
  source 1..349: note = protein_locus241619
MNTLKQVLGVDVAQKELVVTLGRLLADLSIELYAYKVFSNTEKGFSSLLTWVQKLTNPDTEVRFVMEATGVYHQKFAYFLDDHGYCLSIVLPNKISNYIRTLDVKTVTDKSCSEAITRFGLERKLDNWKRPKKTYKSLQQLTRERDQVVLERSMVKNQLHAESQEAEPHERSLERLKERIKFLSSQEREIKEDIEQVVNRDAELKKEVEIISSIPGVGELTAAIILGETNGFELIRNKKQLTSYAGFDVKEKQSGTSVKGKPRISKKGNRSLRKAMYLPSMSAVKWDDNFKNMYVRIVSKQGIKMKALIAVQRKLLELAYTLFKTKASYDKSYESKKVEQKNSMSAPKA

SEQ ID NO: 10214 - protein, 347 aa, unidentified
  source 1..347: note = protein_locus38909
MANGSKTEVQVFVGIDVSARELSVAVRCGTEDREAVTTFGNNAGGHKALLAYLLRGNGRARVCLEASGNYSLDLALTLHAQRQVEVSVVNPRRARRFAESLGERSKTDPVDAGVLCEYAMRMRWVPWVPPNLVALRLRALTRAIEDLGVMQTQEKNRQHALTISRALPALLIRELQKHQRYLQLRITRLRQEALRLIARDPELDRRFRVMLTTPGIGETSALQILGELAVLPDTLDARQWVAFAGLDPCRFTSGTSVEKKPRISRGGSRHLRRALYMPALVAMRREPYLRAFYQRLLARGKAPLQAVVAVMRKLLHAFFAMFHSDQPYDGSKLCPVKFAPDTVALCA

SEQ ID NO: 10215 - protein, 343 aa, unidentified
  source 1..343: note = protein_locus107523
MRKIITVGLDLAKSVFQVHGIAAEGDVLVRRALRRSQVLDFFRTLEPCLVGMEACGSAHYWAREIQALGHTVRMMPPAYVKAYVKRNKTDAADAEAICEAVTRPTMRYVPTKTQDEQAAGMVLKARDLLIRQRTQAINALRAHLAELGIIRATGLVGIISLAAIVRDDSDLRLPDIARMALEELVEQIETVTTRIERLDRKILEAVRKDDSARRLTAIPGVGPIIAATVRAVVPDPAGFRTGRDFAAWIGLTPRAHSSGGKERIGSISKRGNQQLRTLLVAGATSILKLARRGLQPSAWIADMMLRRPFKVVAVALANKIARVIWALLVRGDSYRGAKTIAQA

SEQ ID NO: 10216 - protein, 369 aa, unidentified
  source 1..369: note = protein_locus31809
MKEVTTIGLDLAKAVFQVHGVDAVGAVTLRRTVRRRQVLAFFAKLPPCLVGMEACATAHYWAREIGKLGHDVRLIPPAYAKAYVRRNKNDPADAEAICEAVSRPSMRFVAIKTEGQQAAAGIHKVREMLIKQRTMLINTLRGLMAEFGVVVAEGPQHVGELVAILADPANRRIPTPLHEGLLAIVETLRGLERRIEIVDKQIVGWGRGNATCRHLITIPGYGPILSSAMTAFAVDPAAFASGRHFSASLGLVPRQDGTGGKVKLGPISKRGNGYLRRLLVNGAMAVLCSKQAKADPWLVKLLETKERKVAACALANKMARIGWAVMVRQEDFRSRRHDQPCADLNQLGAVLTAVKTASRAPSAVAFGQS

SEQ ID NO: 10217 - protein, 398 aa, unidentified
  source 1..398: note = protein_locus144529
MSRIWAGIDSGKGHHHGLALDADGRTLLSRRVANDEPELLQLIGDVLAVAGGRQVTWAIDMTGGEPALLLSLLVAHGQEVLYIPGRLVNRASDGYRGEGKTDARDAFVIADQARMRRDLQPIRPGDEAVVELKLLTGRRADLVEDRTRAVNRLRGTLLGMFPALERALELTNTGPLILLTGYQTPAAIRRVGTARLAKWLANRKVRNARPLAEAAVEAAERQYTSVPGEKAIAKLVHTLAEGVMALNEQIAEMDKLIEGRFREHELAEIVQSVPGIGTVLGAEFLAGIGGSLDSFDSPDALASFAGVAPAPRDSGKVSGNLHRPVVYHRRLQRVFYTSALVSIRCDPNSRKFYDRKRAEGKRHVQAVMALARRRVNVLWALIRDRRCYQVTPPVTATA

SEQ ID NO: 10218 - protein, 319 aa, unidentified
  source 1..319: note = protein_locus65581
MRRTPVGVDIAKHKFDVAVLLDNQKYKTKKFANTPSGCREFAAWLSRFGDCHVCMEATGSYSTELATYLADNNYHVSLMNPACIHSFGNTELARNKTDKSDAAMIARYCALHQPEPWFPAPLSERQLTALVRHLKNLEEMRQMEENRLEVAEAVIVPSLNEHIATLDELIRETKKKISQHIDDNPDLKRDSELLKSIPGVGEMLSSSLLAFAGNLRRFTSSKALVAYAGLNPQRCESGMFKGKSRLSKVGHGELRSALYMPAVVASQYNVVVKDLTERLKLRGKSGKERVCAAMRKLLQLAYGVVKSGKTFNAEIPLAG

SEQ ID NO: 10219 - protein, 312 aa, unidentified
  source 1..312: note = protein_locus206026
MPASRPEIGIDAAKDNLVIHHQDLNQTLTIDNTPQAIRQWLATLPKGCDIAIEATSTYHMDITERAHAKGHRVYVVDGYRLSNYRKGVGGRAKTDLADAQLLARYLRREKDELRPWSPPPKAYRVLQSLLRRRAALVKARTALRQSLSGEPELKAPLQTLIAEMDRIDTLIQKRLKSAVSAAGLQTQVQRCDAIDGVGEITATALVMAFLRGDFTNSDAFVAFLGLDVRVRDSGKLTGKRKLTKQGDTEVRRLLHCAAMSASRHPVWRAFYQRYRDRGLHTTQALVILARKIARTAFALMKQQQEYCPAKLF

SEQ ID NO: 10220 - protein, 356 aa, unidentified
  source 1..356: note = protein_locus9882
MPNVVVLKRHKEEGPLHEEDYHSRARSGQIRFSGSWHSRRRRRDHTRALRRSQVLDFFRTLRPCLVGMEACGSAHFWAREIQALGHTVRMMPPAYVKAYVKRNKTDAAAICEAVTRPTMRYVPAKTQDEQAAGMVLKARDLLIRQRTQAINALRAHLAELGIVGSTGLVGIISLAAIVRDDSDLRLPGAARMALEELVEQIETVTGRIERLDRKILEAVRKDDCARRLTAIPGVGPIIAATVRAVVPDPAGFRTGRDFAAWIGLTPRARSSGGKERIGSISKRGNQQLRTLLVAGATSVLKVARRGLQLSPWIAAMMLRRPFNVIAVALANKIARIIWALLVRGDSYRETKMIAQA

SEQ ID NO: 10221 - protein, 358 aa, unidentified
  source 1..358: note = protein_locus146556
MVDKVTEAAVVGGVDTHKDLHVAAVVDQNNKVLGTQYFSTTRQGYRQMLAWMTSFGTLKRIGVECTGTYGSGLLRYFQNAGLEVLEVTAPDRMERRKRGKSDTIDAECAAHAAFSGIRTVTPKTRDGMIESLRVLKTCRKTAISARRVALQIIHSNIISAPDELREQLRNMTRMQLIRTLGSWRPDASEYRNVTNVYRISLKSLARRYLELHDEIADLDVMIAAIVDELAPELIKRNAIGYESASQLLITAGDNPQRLRSESGFAALCGVSPVPVSSGKTNRYRLNRGGDRAANSALHIIAIGRLRTDAKTKEYVARRVAEGHTKMEAIRCLKRYISREVYTLLRNQNRRINSIPITA

SEQ ID NO: 10222 - protein, 337 aa, unidentified
  source 1..337: note = protein_locus222797
MEITTIGIDIAKSVFQFHGVDAAGQTVLQKKLRRSAVLDTLAKLPPCLIGMEACATSHHWAREITALGHDVRLIPPAYVKPYVKRQKNDAADAEAIYEAVTRPNMHFVAIKSVDQQAAMMLHRVRDLLVRQRTMLINALRAHMAELGIIAPQRPQNVLGLIQQLEEDSNGGITEVARSALLSLAGQLTSLTQEISALDRKILAWHRSSETSQRLSTIPGVGVLTATAMAASVTDPSLFRSGRQFAAFLGLVPRQNSSGGKERLGRITKMGDGYLRKLLVVGATAILRRVADTQTRTANWLRSLLERKASRLISVAMANKTARIIWALLARGGTYRAS

SEQ ID NO: 10223 - protein, 400 aa, unidentified
  source 1..400: note = protein_locus11380
MISVGIDVSKEKSTVCILKPYGEIVSKPFEVYHVEQELSELATMLLRLNDEVRIIMEATGIYHLPVLSYFKEKGFFVAVINPFEMKEYRCQGLRRVKTDKQDAITISHYGIDHWYRLKEYKAQENIYTELKLLGRQYCHYMRMRVESVLELTHLLDYTMPGIKTLLQGWNEKNGKDKLGDFAEEYWHYDNITKKSEKQFIDSYLKWAKKKGYHQNQDKAIKIYALAKEGIPTVSSNTPSTKMLVQEAVRVLREVDHTLMTILTQMRSLAKSLPEYPIVRAMGGVGDVLAPKLIAEIGDVRRFHSGKALIAYAGIDAPPYQSGRLVGTERKISKRGSSNLRKIGYEVMRSLKTHKAPEDAAVYEFILKKEREGKSKRAAKIAGLNKFLRIYYARVMEVYRK

SEQ ID NO: 10224 - protein, 304 aa, unidentified
  source 1..304: note = protein_locus102412
MTITTVGIDLAKNVFAVHCVDQHGKTVLVKPKVPRAALPELIASLPPCVIGMEACSGAHYWARLFRQYGHEPRLMAAKFVSPYRMAGKSGKNDAADAQAICEAVRRPHMRFVPVKDESQQAMQCLHRTRQGFIEEKTATYNRLRGLISEFGVIAPQSTDALRHMVSEQKKSLPLQVQQCVDDLLEHIDRIENNVTEYDRILSRMAKADHRSQRLMELKGIGPTTACALVASIGNAHDFKNGRQLAAWLGLTPSQYSSGGKSKLGRITKAGDSYLRIAVGPGRSFSSDWRREKDRLIQSLGLLAS

SEQ ID NO: 10225 - protein, 343 aa, unidentified
  source 1..343: note = protein_locus67572
MRHYAGLDVSVKETSVCIVDESGKVCRETKVPSHPEDLARALHDRAWCLERVGLEAGPLSQWLFSGLAATGLPVVCIETRHTKAFLQAQVNKSDRNDARGIAQMMRVNLFRPVHVKTLTSQKRRALLTARKLLQEKALAVDNDIRGLLRNFGLKVGPIGASRFETRTRELVDGMPELAEIIDPLLEARRKLRELFAVLHRKLLVIVRDDTVCRRLMTVPGVGPVVSMAFTATIDVPARFKSSKAVGAALGLTPILNQSGESKRLGRVSLCGDGMTRTLLYEAAQVMLTRTTKWSWLKAWAMKVAARRGIQKAIVALARRLAVILHRIWVSGTDFRWTREVQST

SEQ ID NO: 10226 - protein, 388 aa, unidentified
  source 1..388: note = protein_locus153144
MRFAGVDIASETHVVAVVHANGDVAVKATSFTEDAAGYQKLLALLGDPADLMVAMEATGHYWKNLFTVLAAAGFSVALLNPLRTHRFAEEDLQRTKTDAIDALGIACFAAQKRPPATRLPDAATEELREMVRLRERLLQDFGDRVRQLHRMVDLGFPEFTRYVRGLDSELASAILSDYPTAAAFRGVSVKRLAALRYDGRHQVGLDLARTLIDAAKRSVGQHHSAPYRMQVRYACQDLDVLRRRLRELEHDIDGKLREHELGRLLTTIDGIGPQTAARVIATVGDPAHFESAATLAAYIGAIPGLKQSGKRRPTRAGSTPIGNARLRAALWMPTLTAVRRNPWLKAHYQRLRARGKLPKVALLACMHKLLLAIYSVAKHRRPFVTPCT

SEQ ID NO: 10227 - protein, 315 aa, unidentified
  source 1..315: note = protein_locus20607
MSKVHYFAADVSKRELVIAAYPAVGDGVRVNNTAAAITAWLDTLPANSVLAMEATGTYHRRLAALAYERGLVVYVLNPRDVYYYARAMGARGKTDASDAKLLARYVAHEQAHLHCYLPPTPRSEQLTTLLERRAVLVRTRQTLKQSLAELPALDAEKQAALAALDDLLKAIDRELARLNDSDPPTAQLVTRLKTISGVGPLVATLLAALFQRFAFRHADALIAYVGLDPRPDQSGQHQGRRRLSKRGHPEWRRLLVAAAMSAARSHAWRDYVAHQRTKALPATAIHVILARKILRVALALYKNGQQFIAPQTQTA

SEQ ID NO: 10228 - protein, 330 aa, unidentified
  source 1..330: note = protein_locus22609
MKNWNVILGVDVSKLTLDICWAEGNLYLKIDNCTKGFNTFRKWCKIHEIDLKETLIVMEYTGGYEYRFIQFCQSLSIPFCRVPGLEIKQSMGMVRGKSDQVDSFRISQYGQEKSKRLVPAKPLNDTILALRQLLSFRKRLVRENAGWISTVKERKHMYPLKKVDTITHTAMAKIKANNKYISQAEQEITEIIKSDDTWLLSYRIISSIKGIGKVNAWMTLAFTENFTSFTDPRKYAVYVGVIPFEHTSGTSVKGRKRVSHLAHKELKQELNQAAKTAMVHDPEIRAYADRKLKDKSYSLVLNNIKFKLILRMFALIKRGESYVENYQRAA

SEQ ID NO: 10229 - protein, 411 aa, unidentified
  source 1..411: note = protein_locus111069
MNPVVGLDVAKGESQIQAFLDRKTPFKKSFKISHTVEGFKQLHQFLQSIEEKANSKPVLIMESTGHYHSPVMQFLDSLNYIYIVINPLISYRAKSSSLRKVKTDVIDAYHLCELYYKEELEPHKKRGAQLLNLRNLTRQHDHLTGISSQTKLHFLAILDQVFPEYRGVFGDLYSNVSLLTLLEFPSSEAVLQAGEDQLAKRIASLCTSRSKQWANERAKLLITAAEKNPFQVNLYRSLIISLEMHIKMVLQYKEHLSNLKAEIDVLVKEIEEYTIIQSIPGIGKKIAATIISEIGEIDRFDNPKKLVAFTGVDPSVFESGKFTASRNRITKRGSSRLRHALFMAVRCAIRDNRKSKTTDEIIPRNKRMRQFYDKKREEGKPFRVTVIACVNKLLHWIYALLKSKTTFQDLA

SEQ ID NO: 10230 - protein, 350 aa, unidentified
  source 1..350: note = protein_locus123581
MKKFIIGIDFSKETVDASIVQKEQPETLIAYKKFRNNLKGVDGLIAWAKSKVAQDGEIIFCGENTGTYSTLFSDELTDRGFIIWIEHGMNIVRGMGDVRGKDDKTDSLRIASYAARFYDKMKPYVRPKDETRVLKTLLAKRDRLKSFLKAEITNTKENPLMLQDSNIASSINEFFKRLEESLRKELKELERMILDVVMSSSEYAKNFNILTSMKGIGLINAVALIVYTDNFTKFNFNHRKIATYWGVVPFKNESGTSVRRGTHVSPKCNSWLKALLTEATLCAIRYNSRIKAYHDRLMARGKAIGIVFNNCKNKMLKILVAMVRDSKIYSDMDVSKDPHTTTTTSSIVVC

SEQ ID NO: 10231 - protein, 341 aa, unidentified
  source 1..341: note = protein_locus39063
MNVKTIGIDLAKNVFQIHGVDEHGKRLFNKQLRRAQMASFFANIPPCLIGMEACASAHFWANKLISMGHNVKLMAPQFVKPYVKTNKHDAADAEAICEAVTRPNMRFVPVKTAEQQAVLALHRSRQSFIKQRTAQANQIRGLLAEFGIVVPRGIQQLQRRLPELVEDADNPLPVLFRTQLSLLQHHMAYLFDVIATLDKQIEQCYRQNALCQRIGKIPGIGPVTASALIATIGKANNFENGRQLAAWLGLVPRQHSSGGKQVLLGISKRGDTYLRTLLIHGARAVLQSAKHKQDAVSSWANQLMARRNNNIASVALANKNARTVWALLAKEREYCAPIISA

SEQ ID NO: 10232 - protein, 326 aa, unidentified
  source 1..326: note = protein_locus165043
MEHELHYIGIDTAKEKLDVDVLRPDGRHRTKKFANTTKGHDELVSWLKGHKIDHAHICIEATGTYMEPVAECLYDAGYIVSVINPALGKAFAQSEGLRNKTDTVDARMLAEFCRQKRPAAWEAPHPLERALRALVVRHQALTDMHTQELNCTETAREVQKPSIDAHLLWLEAELKRLEKQIKDLTDDDPDMKHRRKLLESIPGIGEKTSAVLLAYIGLKDRFAHARQFAAFAGLIARRYESGSSVRGASRLSKAGHVSLRRALYMPAMVATSKTEWGRAFRERLTANGKKGKVILGAMMRKLAQVAYGVLKSGVPFDASRHNPVAA

SEQ ID NO: 10233 - protein, 340 aa, unidentified
  source 1..340: note = protein_locus187447
MTITTVGIDLAKNVFAVHGVDQNGKTVLVKPKVSRAALPELIAGLPPCVIGMEACSGAHYWARLFRQYGHEPRLMAAKFVSPYRMAGKSGKNDAADAQAICEAVRRPHMRFVPVKDESQQSMQCLHRTRQGFIEEKTATYNRLRGLVSEFGVIAPQSTDALRYIVSEQKSSLPLQVQQCVDDLLKHIDHIEDSIAGYDRILSRAAKTDHRSQRLMELKGIGPTTACALVASIGNAHDFKNGRQLAAWLGLTPSQYSSGGKSKLGRITKAGDSYLRTLLVQGARSVLIGADKKTDSFSRWVCTLVERRGYWRAVVAIAAKNARLCWASLHYGDDFRLYSAG

SEQ ID NO: 10234 - protein, 341 aa, unidentified
  source 1..341: note = protein_locus82201
MKVSTLGIDLAKNVFQLHGVDHEGHTILRKKLTRAKFVQFVIQLEPCLIGMEACSSSHYFARLFTRYGHEVKLIPPQYVKPYVKTNKTDAADAEAICEAVTRPNMRFVQIKTEEQQAVLALHTERGILIRERIACANSLRATLAEFGITIAAGQNHLTRELPAILEDGENGLSPFVRTSIYRQSKHIRELEEQVKQVEEALASWYRTQEACQRMAKIPGVGMLTATYVVAAVGNARQFSTAKQFASWLGLTLKEHSSGGKQQLGGISKRGDGYFRYLLVHGARALTAWVNRNGAVEENSWLQGLLERKHYNVAVVAMAAKTARIMWSMLSHNTEYQPRQLA

SEQ ID NO: 10235 - protein, 429 aa, unidentified
  source 1..429: note = protein_locus21613
MRSVAGYGCVGGVFHGTAGSTRSTDGDTHDGSSGQGMDRHRCRQDASLGVRRRHRRPDHVVGQTRQRRNRHRRVLAADGNAGEQLVWAVDIIGSPSALLLGLLARAGHSVRYASGRMVAAMSAAYTGEGKTDAKDAYVIAETARLRRDLAVIDAETDLVRNLAVLTGHRADLIADRVRMINRLRDLLTSVFPSLERAFDYSAHKGALVLLTRYASPDRIRRLGRARLAQWLRHQKVRGADEVAARALAAAEAQSIVPPGQELTASIVSELAAAILALDARVKALDEKIDHEFRQHPQAEIIVSMPGFGPFLGAALLVGAGDLRAFPTAGHLAAAAGLVPVPNDSGRRTGNLHRPLRYSRPLRHVFYLSAQTSMMRAGPNRDYYLKKRARGATHTQAVIALARRRIDVLWALLRENRTWTATPPPTAQAA

SEQ ID NO: 10236 - protein, 340 aa, unidentified
  source 1..340: note = protein_locus66768
MTITTIGIDLAKNVFAVHGVDQNGKTVLVKSRVTHAALPGLIASLPSCVIGMEACSGAHYWARLFLQYGHEPRLMAAKFVSPYRMAGKSGKNDAADAQAICEAVRRPHMRFVPVKDESQQAMQCLHRTRQGFIEEKTATYNRLRGLISEFGVIAPQSTDALRHMVSAQKSSLPLQVQQCVDDLLEHVDRIEANITEYDRILSRIAKTDHRSQRLMKLKGVGPTTACALVACIGNAHDFKNGRQLAAWLGLTPSQYSSGGKSKLGRITKAGDSYLRTLLVQGARSVLIGAEKRTDSFSRWVCSLVERRGYWRAVVAIAAKNARLCWASLHYGDDFRLYSAS

SEQ ID NO: 10237 - protein, 319 aa, unidentified
  source 1..319: note = protein_locus177259
MENIALIGIDLGKNSFHIHCQDHRGKAVYRKKFTRPKLIEFLATCPATTIAMEACGGSHFMARKLEELGHFPKLISPQFVRPFVKSNKNDFVDAEAICEAASRPSMRFVQPRTESQQAMRALHRVRESLVQDKVKTTNQMHAFLLEFGISVPRGAAVISRLSTLLEDSSLPLYLSQLLLKLQQHYHYLVEQIKDLESQLKRKLDEDEVGQRLLSIPCVGTLTASTISTEIGDGKQYASSRDFAAATGLVPRQYSTGGRTTLLGISKRGNKRSELCWFSVRVFIQNWNTSLASWPTGSGSCCVGKATLSSPVLWQTSWPE

SEQ ID NO: 10238 - protein, 336 aa, unidentified
  source 1..336: note = protein_locus47056
MPMYQLGIDVSKNTLDLCLLREGIKGRIKTRKLKNTADAAKVVAEWLKKQSCELGEVHIIMEATGVYHEPLAYGLHFAGARISLANPHRTREFARGMNILTKNDKVDAWMLACYGSLKEPEAWTPPPESVRYLRALLRRRDALVADSTREKNRLEKSVFTDSPDAVRASIENMLQELSNEIEHLDVLIQEHIKTHPELNQDFRLLTSIKSVGYLLGLNMLAILKSHSFESAEQAAAFLGVVPVERRSGTSVKGKPKLSKIGPPEIRTKLYLAALCGLRFNPVMKQMYTKLCQRGKSKMCAIGALMRKLVHWCYGVLKTQLPFDAEYNQQSYYKTIF

SEQ ID NO: 10239 - protein, 334 aa, unidentified
  source 1..334: note = protein_locus31940
MGVDVGKDTHHAVARSEGVLVGYLPGLAMRRIADLHADEAKTDARDAAIIAEAARTLPRALRTLKLADEQIAELSMLCGFDDDLAAQTTQASNRIRGLLTQIHPALERVLGPRLAHPAVLDLLQRYPSPEKLASLGEKKLAAQLCKLAPRLGKRLAADIAQALAEQTVVVPGTNAAAVVLPRLALQLITLRKQRDEVALEVEQRVLAHPLYPVLTSMPGVGVRTAARLLTEVACRAFASAAHLAAYAGLAPVTRRSGSSIRGEHPSRRGNKALKRALFLSAFAALRDPISRAYYTRKMSQGKRHNQALIALARRRCDVLFAMMRDGTFYTPQAS

SEQ ID NO: 10240 - protein, 402 aa, unidentified
  source 1..402: note = protein_locus65800
MNAVGIDVSKSKSVVAIMRPFGEIVSTPFEIKHTASDIHSLIELINSVEGESRIVMEHTGRYYEVLAHQLLEANLFVSAINPKLIKDFDNDSLRKVKSDKADAVKIARYALDKWQNLKQYNVMDELRNQLKTMNRQFGFYMKHKTAMKNNLIGILDQTYPGVNTYFDSPARSDGSQKWVDFASTYWHVDCVRKMSLNAFIDHYQNWCKRKKYNFSQSKAEEIYGKAKELVPVLPKDAITKLIIKQAVDQLNSASTTVESLRTLMNETASKLPEYPVVMAMKGVGTSLGPQLMAEIGNVSRFTHKSAITAFAGVDPGVNESGSYEQKSVPTSKRGSADLRKTLFQVMDVLIKTHPQDDPVYQFLDKKRAQGKPYYVYMTAGANKFLRIYYGRVKEYLASLPES

SEQ ID NO: 10241 - protein, 341 aa, unidentified
  source 1..341: note = protein_locus181296
MPVVTVGIDLAKNVFAIHGVDESGKVVLVRPRVMRDQLILLIAQLPPCLIGMEACSGAHHWARLFQQYGHTVKLMAPKLVAPYRMSGKRSKNDAADAAAICEAVTRPSMRFVPLKDEHQQATLCLHRTRQGFVDERTAIYNRIRGLLSEFGVVLPQSPERLRREITVHLDSLPSWANRCISDLLEHAGNIEARLAEYDRAIRQIARDDERSRRLMQLRGIGPTTASALLASLGAGHDFKNGRQVGAWLGLTPGQHSSGGKQRLGSITKAGDAYLRCLLVNGARAVIANLGEKQDRFSRWVRSLVERRGYWRAAVAIAAKNARMAWAVLKYGDDFKHEPAAA

SEQ ID NO: 10242 - protein, 400 aa, unidentified
  source 1..400: note = protein_ISSam1
MISIDGVGVFLGLDVGKQTHHGHGLTPAGKKVFDKQLPNSEPKLRAVFDKLTAKFGTVLVIVDQPASIGALPLTVARDAGCQVAYLPGLAMRRIADLYPGEAKTDAKDAAVIADAARTMPHTLRTLDLTDEVTAELTMLVGFDQDLAGEANRTSNRIRGLLTQFHPSLERVLGPRLDHPAVTWLLERYGSPQALRKAGRRKLVEVVRPRAPRMAERLVDDTFTALDEQTVVVPGTGTLDVIVPSLAKSLAAVHEQRRALETRIEALLEAHPLSQVLTSMPGIGVRTAAVLLATVGDGSSFPTAAHLASYAGLAPVTRQSGTSIHGEHAPRGGNRQLKRAMFLSAFAALHDPASRTYYDRCRARGKTHTQALLRLARHRISVLFALLRDGTFYEPRSPRLA

SEQ ID NO: 10243 - protein, 408 aa, unidentified
  source 1..408: note = protein_ISMlu12
MTAQQHPAVFIGLDVGKAEHHAVALTAAGKKVYDKALPNDETRLRGILDELARAHGPALLVVDQPATIGALPVAVAQACDGVEVAYLPGLAMRRIADLHPGSAKTDAKDAAIIAEAARTMPHTLRSIRVDEEQIAELAMLAGFDDDLAAQITATSNRLRGLLTQIHPALERVLGPRITHPAVADLLGRYPTPAQLRTAGPGHVRARLRKHAPRLAASLTEQIFQALDEQSVVVAGTQAAATVVPILAEQLAGLTRQRAGLASQVEAAVEAHPLHPVLISMPGVGIRTAARILTEVVGKDFVDAGHLASYAGIAPVTRRSGTSIRGEHVARGGNKRLKRALFLSAFASLSHPPSRAYYDRKRAQGKRHNQALIALARRRTDVLYAMLRDGTLYQDPTAPPAPSSVALAA

SEQ ID NO: 10244 - protein, 340 aa, unidentified
  source 1..340: note = protein_ISPfl1
MDTLNLLGLDIGKSTFHLVGHDVKGKEVLRKKFNRNRLLEFAARLKPCTIAMESCGGSHWLARKLLSFGHQVKLIAPQHVKPYVTGNKNDYIDAEAICEAASRPKTRYVAIKTVEQQVLSTQHRLREALVGHRTQTINRIHGFLLEFGIELPATKAAMNQVHQILDDPAAELPQQLKSFIEHLLEEMKRLNDEIKAIDRSIKEQVDTDDAGTRLMSIPGIGPIIASALLADVGDASNFHSSRDFAASLGLVPRQYSTGDQTVLLNISKRGDKYLRKLMIQGSRAVLVHIDKRTDALGTWCRDLLIRKHPNKVACALANKLARIVWAVLARGGSYNAQSMA

SEQ ID NO: 10245 - protein, 341 aa, unidentified
  source 1..341: note = protein_ISPath1
MQNVTLVGIDLGKHSFHLHGQDRHGKAVFRKKVSRKQLVEFFATFHACTLVMEACAGAHHMARQLAGFGHQVKLISPQFVRPFVKSNKNDFVDAEAICEAASRPSMRFVTPKTESQQTLSALHRVRESLVRDRTKTINQIHGFLLEFGISLPVGNAVITRLPAVLAEHRLPPRLIAILERLHAHFKYLSEQIGEIDKEMARQLADDELGCRLLSIPGVGPITASVLASEMGDGQQYGSSRDFAASIGLVPRQYSTGGRANLLGISKRGDKNLRRLLVQCARSYMQRLDRHSGRLADWVRAMLRRRHSNVVACALANKLARTAWALATRRTTFDAGASAMPA

SEQ ID NO: 10246 - protein, 341 aa, unidentified
  source 1..341: note = protein_ISBcen2
MDTVSLIGVDLGKHCFHLHGQDASGRMVFRKKLTRSQMFTLLGNFPSCTVVMEACAGAHWIARRLQTLGHEAKLISPQFVKPFRQGNKNDFADAQAICEAASRPSMRFASPHNEAQQIVSALHRVREGLVRQRTCTINQIHAFLLEFGISLPRGMAVIRRLPAVLEAESLPPRLVSVLERLHAHFKYLDEQIHQLEHELLSQLHEDERSERLLEIPGIGPMTASVLMSELGDARQYGSARQFAASVGLVPRQYSTGGKPTLLGISKRGDKELRRLLVQCARTIMQRIEHRTDALGVWIRSLLARRHSNVVACALANKLARIASAILAKGTHYRSIEAVPAV

SEQ ID NO: 10247 - protein, 341 aa, unidentified
  source 1..341: note = protein_ISMahy7
MNVTTIGIDLAKTVFSIHGTNQHGKVVVRKRLNRPKLLAFFAQLPPCLIGMEACSGAHYWARELTKLGHDARIIAPRFVAPYRKSSKNDDNDAEAICEAVSRPNMRFVPIKTDDQQAVLCLHRIRRGLTKERTAQINQIRGLLAEFGLIIPQGRYHARHRIPEILEDAENGLPMLARRLLNNINQRILQLDEEILAYDREIEAMARRDEQAKRLMAIPGIGPQTATAILASAPDPRQFKSGRHFAAWLGLVPRQYSTGGKPRLGRITKRGDKYLRMLLIHGTRAVIAKLADKHDQLSQWAKGLVERRGYKRAAVALAAKNARIIWALLMNQTEFKTQPAEG

SEQ ID NO: 10248 - protein, 338 aa, unidentified
  source 1..338: note = protein_ISSpi6
MSTIKVIGIDLGKSSFHLVAHDYSGRELFRKHLSRAKLIEFLSQTPATVIAMESCGGSHWLARKCQSLGHEVKLIPPQYVKPYVKTNKNDYIDADAIAEASTRPSMRFVGVKTESSQVISVIQRIRSSYVKERTACMSRIGAILLEFGMSFPKGHAKMKVLFQWLADKKEPIPPMLMQELIEHHEYYSQLNKRIAGQDKKLKQLVEQSEEAQQLKSIPGIGDLTASQCLADISDANNFKNGRQLAAWIGLVPHQYSTGGKTTLLGISKRGNKALRTLFIHGARSILSRPEVAVAVFGEWILELRARKPFNVAVVALANKLVRIAWSVLSTKQAFEVRV

SEQ ID NO: 10249 - protein, 407 aa, unidentified
  source 1..407: note = protein_ISMpa1
MIFVGDDWAEDHHDVHLMDESGARLASRRLPEGLAGIGEFHQLLARHAEEPDQVVIGIETDRGLWVEALTAADYQVYAINPMAAARYRDRHHVSGAKSDAGDAKLLADLVRTDRHNHRRVAGDSADTEAVKVLARAHQNLIWTRNRHTNALRSALREYYPGALEAFDDLHDRDALAILGRAPTPMQAANLSLSKIRSALKAAGRQRNLDTVAQDIQTALRAEQLAAPAAVTAAFGATTRATVGIIAELNRQITDLEAELATHFETHPDADIYRSLPGLGVILGARVLGEFGDDPNRYTTAKCRKNYAGTSPLTVASGRKRAVLARHVRNRRLYDAIDQWAFCALNTSPGARLFYDRRRAAGDLHHQALRALGNRLVGILHGCLRHRTHYDEHKAWAHRQTNPDSQAA

SEQ ID NO: 10250 - protein, 341 aa, unidentified
  source 1..341: note = protein_ISHar3
MDIDILGIDLAKRVFQLHGADRSGCAKYGAKVMRAELLTTVRKLSPRIVAMEACSSAHYWGRRFKEIGIEVRLISPQYVSPFVKTNKNDANDAAAIVEAASRPTMRFVPVKSIEQQDMKAVHRVRELLVHQRTALINQVRGLLGERGVIIAQTPAAFKRAIPTVLAQCEGDMTPTFQAILIELLEQMRILEERIARTNQWIAAFMKNSVLCQKIQAIDGVGPITATAMVAAVGDAKEFKNGRHLSAWLGLVPRQYSSGGKSRLQGISKRGDTYLRTLLIHGARVVLRYAIGKTDARSRWLQDLIARRGYNRAAVALANKNARVIQVLLSHPDGYHLSEGAV

SEQ ID NO: 10251 - protein, 406 aa, unidentified
  source 1..406: note = protein_IS900
MTVTEVVVAQPVWAGVDAGKADHYCMVINDDAQRLLSQRVANDEAALLELIAAVTTLADGGEVTWAIDLNAGGAALLIALLIAAGQRLLYIPGRTVHHAAGSYRGEGKTDAKDAAIIADQARMRHDLQPLRAGDDIAVELRILTSRRSDLVADRTRAINRMRAQLLEYFPALERAFDYNKSRAALILLTGYQTPDALRSAGGARVAAFLRKRKARNADTVAATALQAANAQHSIVPGQQLAATVVARLAKEVMALDTEIGDTDAMIEERFRRHRHAEIILSMPGFGVILGAEFLAATGGDMAAFASADRLAGVAGLAPVPRDSGRISGNLKRPRRYDRRLLRACYLSALVSIRTDPSSRTYYDRKRTEGKRHTQAVLALARRRLNVLWAMLRDHAVYHPATTTAAA

SEQ ID NO: 10252 - protein, 304 aa, unidentified
  source 1..304: note = protein_ISStma7
MNGIGIDVSKRRLDIGTTDGQTLQVSNSPSGYAELSTWLSTRPAIQIVLEATGGYEQTVLDFLHKAGHPVIRANALRARRLAQGLGKVAKTDRLDALVLAQMAALVELPSYQPLEPWQRKLREFVRARRQTMQALTVARQQQEMVTDRELRRQMQGNIIRLQTLVERLGKQISEQVAQQPQLAVLKSMKGVGPALQAVLASYLPELGQISGKAIASLVGVAPISHDSGAMRGRRSIHGGRAEIRQVLYMAAMSAMRHEPRLRDFYRSLRARGKEGKVAIVAVMRKMLVILNARVRDAENGLVPA

SEQ ID NO: 10253 - protein, 339 aa, unidentified
  source 1..339: note = protein_IS884
MNSMAVGVDIAKTVFQVHYIDQATGEIVNKQIKRAKFLEHFANRAPCLIGMEACGGAHHWARQLTKMGHQVRLMPAEFVKAFNIRNKNDAADARAIWLAVQQPSKAVAVKTEMQQAMLALHRMREQLVKFRTMQINALRGLLTEYGEVMGKGRTALDKAIPEVLARVAERLPAALVETLREQWSGLTKLDEQIAGIERRMRDWVKEDKAVKAISEIPGVGLLTATATVAMMGDAKTFRSGREFAAWAGLVPKQTGSGGKVNLHGISKRGDTYLRTLLIHGARSVVTRAKDPGPWVEQMTKRRPLNVVVVALANKMARMIWAILAHDRPYQKDYISVKPA

SEQ ID NO: 10254 - protein, 339 aa, unidentified
  source 1..339: note = protein_IS1111A
MKDIKILGVDIAKDVFQLCGIDEWGKVIYTRRVKRAQYVSTVASLKVGCVVMEACGGANHWYRTFMGMGIPTQLISPQHVKPYVKSNKNDRNDAQAIAEAASRASMRFVQGKTVEQQDVQALLKIRDRLVKSRTALINEIRGLLQEYGLTMARGAKRFYEELPLILASEAVGLTPRMKRVLNCLYTELLNRDEAIGDYEEELKAVAKANEDCQRVQSIPGVGYLTALSVYASVGDIHQFHRSRQLSAFIGLVPRQHSSGNKEVLLGISKRGNVMLRTLLIHGARALLRHVKNKTDKKSLWLKALIERRGMNRACVALANKNAPIIWALLTRQETYRCGA

SEQ ID NO: 10255 - protein, 316 aa, unidentified
  source 1..316: note = protein_ISC1190
MEAPVAGIDVSKDKLVVYFQGKYYEFQNNKQGFEGVKQVLPKGCKVAIESTGIYHINLAKYLGKEYDVRIINPLILKKFKDIRGKKSDKNDAKKLAELVISMGSEFTTSEAKELTSQWDFITRSIVRVKNRLRRDLILLGYKDSLSKKNLNEVLRGEDNIVLSEVRFLLDELERLEVRKREIEEELEDLVPKDSLIFTIPGIGRTLGCIILARVGDVKRFGDKKRFVAYCGLDPLVESSGKSVVSRGISRRGDAVLRRAFYLAALTAIKVNPIIKRFYEEHKGNLKGKKLITACARKLAVITWAVLYYNKPFDASE

SEQ ID NO: 10256 - protein, 343 aa, unidentified
  source 1..343: note = protein_ISBj19
MQSISTIGLDIAKSVFQVHGVDAAGQVVLRRQLKRRHVLAFFQKLPPCLVGIEACASSHHWSRELQALGHTVRLMPPAYVKPYVKRQKNDTTDAEAICEAVTRPSMRFVPTKTVEQQGCLMLHRARHLFIRQQTAVINSIRAYLAEFGIVAPVGRRGVEQLLEIVADRADNRLPEVARACLAALSSQLRALKAQILEFDRRIVAWHRSSVTSKRLDAIPGVGPALATALVASIADPKAFRSGRDFSAWVGLVPKQNSSGGKDKLGSISKQGDRYLRSLFTAGALAVIRYAKIHGAGHRPWLTGLLTRRPTKVAAIALANKIARMAWAMMAKGERYREPVALAA

SEQ ID NO: 10257 - protein, 312 aa, unidentified
  source 1..312: note = protein_ISPye59
MAKDTIGIDVSKDRLDAFWHSRTEACCLPNTPEGFGQLCAWLGKEEDVLIVFEATGAYHRGLERHLGLAGLPFIKVNPKQARRFAQAIGRLAKTDSVDARMLARMGVVLDLTPQVVEGEDVHDLRELLTARRALIKDQVTAKTRLATALNPLVREQLGRRIEDIGADIQALDEVIAQIARQRGTLEERIRRLMTIPGIGRLTATTMLIDMPELGHLEGKKITALAGLAPMTQQSGKWQGKERITGGRSSIRRAIYMPALVAIRFNRDLHDKYQQLLKAGKAKKVAITAIMRRIIILANTLLRERRDWLPDRP

SEQ ID NO: 10258 - protein, 341 aa, unidentified
  source 1..341: note = protein_ISBcen1
MHDVTLVGIDLGKHSFHLHGQDRHGKAVFRKKVNRKQLIEFFAKFHPCTVVMEACAGAHYMARQLAGWGHQVKLISPQFVRPFVKSNKNDFVDAEAICEAASRPSMRFVTPKTESQQILSALHRVRDSLVRDRVKTANQLHGFLLEFGISLPVGQAVIKRLPAVLAEHALPPRLVAILERLHGHFKYLSEQISEIDAEMARQLADDELGQCLLSIPCVGPITASVLAAEMGDGKQYGCSRDFAASVGLVPRQYSTGGKSNLLGISKRGDKNIRRLLVQCARVYMQQLERQSGRLADWVRTMLARRHSNVVACALANKLARTAWALVTSRTTFDARSAGMPA

SEQ ID NO: 10259 - protein, 320 aa, unidentified
  source 1..320: note = protein_ISRfsp2
MASRESLFIGIDVSKQTLDVAFGADPHAPRETIPSTDEGVQLLVTRLQRLQPTLIVLEATGGLERMVFAQLLQAGLPTARVQPRRVRALAHAEGRQAKTDRLDARLLARFAERVRPPHHQATDEQRASLRDLLVRREQVIQMRTAEINRLTAAAPNLRPGIQQHIDWLDQEIRALEQERDNEAERTDEVRRKRELLESVPGIGAITALNLLLRLPELGTINRKEAAAFVGVAPYANQSGAQHKPRHISGGRRDVRSVLYMATLAATRRRLVRRAFDQRLCQAGKPRKVAIVAAMRKLLTILGAILRQQKPWDPAVHTSAP

SEQ ID NO: 10260 - protein, 340 aa, unidentified
  source 1..340: note = protein_ISMno14
MGEYIGLDVSLKETALSVRRDGKRVWRGRCASDPAVIARVLRKHAPEAQRIVFETGPLSVWFYHALRAEGLPAICIDARHAKAALDMAANKTDANDADGLAHLAEVGFFREVRVKGYDSLLVRTLVAARSKLVQVTTELSNQIRGLMKTFGLIVPGAKGGSFEAEVRRLLSGDHGLARVILPLLEAWNAVRRRAAELGRQLLAGARQSQACQRLMAIPGIGAITATAFVTAIEDPANFRSSRSVAAWFGLTTRRYQSGEVDYDGHISRRGDAHMRGLLYEAATVLLTRSQVDSDLRAWGLKLRERLGFKRAAVAVARKLAVVMHAMLKSGHSYRAKAAMA

SEQ ID NO: 10261 - protein, 304 aa, unidentified
  source 1..304: note = protein_ISStma6
MFGIGIDVSKATLDVAVHGEQFRQFSNDKRGFVRLIRWLKTWPIKQVVLEASGGYERAALDVLHAAGLPMVRINPARARRFAQGTGRAAKTDRLDATVLAQMAHLLPLTRYVPPAPWQQRLAEFAQCRRQLVQMRVSEMQRLRRLVDPDLIAMKQRHIAQLSDDLKQLDKAIAEQLEGQPGWKNIGALKGVGPILISTLACELPELGSLGSKAIASLVGLAPMNRESGTWQGQRRISGGRAVVREALYMAALTAIRYEPRLRAFYAGLKAKGKASKVALVAVMRKMLVILNARKRDAEVALGCP

SEQ ID NO: 10262 - protein, 391 aa, unidentified
  source 1..391: note = protein_ISRhosp8
MDSNYAVYCGIDVGKGEHHAVGLTAAGKKIYDKALPNDEAKLRASHGSVLVVVDQPNTIGALPVTVARACSHEVGYLPGLAMRRIADLYPGQAKTDARDAFIIADTARTMPHTLRRVDTGDEALAELEVLIGFDDDLAGEATRVSNRIRGLLTGIHPALERVLGPRIAHPAVLEILSRCGGPAGIRKAGKRKLTAIAVKHAPRMGTRLVGEILAALEEQTVIVPGSTAAETILPKLADTLKETLQQRKSVAEDVEGALDDHPLSRVLTSMPGIGFRTAARILIEVGDGSAFASAAHLAAYAGIAPVTRKSGSSIRGEHPARSGNKKLKRALFLSAFSALHDPTSRAYYDKKRAEKKKHNAALICLARRRCDVLYAMLKNKELYRAPLPSAA

SEQ ID NO: 10263 - protein, 339 aa, unidentified
  source 1..339: note = protein_ISPfa2
MNCTAVGVDIAKSVFQVHYVDQETGEIVNKPIKRAKFLEHFANRAPCLIGMEACGGAHHWARQLAKLGHEVKLMPGEFVKAFNIRNKSDAADAKAIWLAVQQPGKPVAVKTEMQQAMLGLHRMRQQLIKFRTMQINALRGLLTEYGEVMGKSRAKLDKEIPAVLERIAERLPAVLIDTFRAQWNGLEKLDEQIAEIERRMREWKKEDKAVKAISEIPGVGLLTATAAVAMMGDAKAFSSGREFAAWVGIVPKQTGSGGKVNLHGISKRGDTYLRTLLIHGARSVLTHAKEPGEWVEQIQKRRPKNVVIVALANKMARTIWAVLAHDRQYQKGYVSVKPV

SEQ ID NO: 10264 - protein, 338 aa, unidentified
  source 1..338: note = protein_ISPpr8
MNSLTIGLDTAKSVFHAVEKNSRGRVLSKAKLTRAKLFTYFANKPPCTVALEACGASHYWCRVISAYGHKAVMIAPQYVASHRKGNKNDFNDANAIADVAQRDDIRTVPYKSIEQQDIQLLHRVRERLVRQRTALGNQTRGLLSEYGIVLRQGLAHLRKELPFILEESNNELTELARRQFFLLHEELLVLDEKVKQADNEIQRVALSHPISQRLMTMSGVGPIISTILLVALGKGEHFRNGRHFSAWCGLVPKQHSTGDKARLLGISKRGNTYIRTQLINGARSALRNASNKNDQVSRWAASLAERIGFNKACVALANKMARFAWAMVHNGQDYQLKP

SEQ ID NO: 10265 - protein, 321 aa, unidentified
  source 1..321: note = protein_ISBmu9
MSAPSLVTVGIDVAKDHVDVSVLGAHLDTQRFDNDAEGHSALAVALQPLDVALVVMEATGGYEAEMACALQSAGLPVAVVNPRQARDFARSMGRLAKTDRIDARMLAQLASVLVRREDLSRLLRPVPDERQQWLAALLTRRRQLLTMLLSERQRLQITPVGLHPSLLAIIAAVQAQLDDIDAQMVGHVREHFSELDRLLQSTHGIGPVSSACLIAELPELGKLSRRQIAALVGVAPIACDSGSRNGRRRVQGGRFEIRRVLYMATLTATRHNPAIKTFYQRLKAAGKLPKVALVACMRKLLTILNAMVRSNTPWDDSLHKA

SEQ ID NO: 10266 - protein, 400 aa, unidentified
  source 1..400: note = protein_IS2112
MRETHTHAWVGIDAGKGHHWAAVVDEAGLIVWSHKIINDETAILHALSEILALADELHWAVDISGTSSALLLALLAAHDQSAVYVPGRTVNRMSGAYRGEAKTDARDAYVIAETARHRHDLSVLIPPAQLAAELALLTSHRTDLVADRVRLINRLRDTLTGVFPALERAFDFGRHKGALVLLTGFQTPRAIRRRGRTRLSLWLGKRGVRGADGVAEIAWEAASAQNVVLPGEAVAAQLVADIADRVLAVDVQLARIDAQIGETFRRHPQAAVIESMPGIGPILGAEFVVAAGDMSAYSDAGHLASAAGLVPVPRDSGRRTGNMHRPKRYSRRLRRVFYLSAQTSIIKDGPNREFYLKKRSEGMRHVQAVIALARRRVNVIWALLRDDRLFIVDAPALRTA

SEQ ID NO: 10267 - protein, 339 aa, unidentified
  source 1..339: note = protein_ISPfa1
MKHTTVGVDIAKNVMQLHYIDAETGEIVNKPVRRGAFLEHFANLAPCLVGMEACGGSQHWARKLTTMGHEVKLMPGKFVKAFVMGNKNDAADAKAIWLAVQHAGKSVAVKTETQQAVLGLHRMREQLVKFRTMQINGLRGLLAEYGEVTGKGRAALDKAIPGVLERLVDRLPAILIDTLREQWNGLAELDKQIASIERRLQTWMREDKASKAIAAIPGVGLLTATAAVATIGDAKTFKSGREFAAWIGLVPRQTGTGGKVHLHGISKRGDIYLRKLLIHGARSVLCLAKEPGPWAEGIKKRRPLNVAIVAQANRIARTIWAILAHDRQYERGYLSVKPV

SEQ ID NO: 10268 - protein, 397 aa, unidentified
  source 1..397: note = protein_ISBth13
MFYLGIDIAKHKHYASIIDQTGKPITKPFPFQNHKEGGQALLNWMYQYIESPTEILIGMEATGHYWLAVYSFLLDHGFSVVVLNPIQTNAWRKGTEIRKRKTDAIDATMIADIIRFGRFVETPLVDEKMFALKQMSRFRNALVSNMSDLKRKALVVLDQTFPEYQSIFSDVFGKTSSQILLEYASPSDYEQISIDDLTQIIEQTSRNRLGKKTANKLMELASNSFGVTFCKDAFSFQLKMLMEQIRFIEDQIKECEEEMSQLLIDLDTPIMTIPGVGPILGATILSEIGDIHRFDKPSKLVAYAGIDASVSQSGQFEASGTSISKRGSSHLRRALFQAAITAHKHDPVLKAFYEKKRKQGKHYYVCIGAVARKLCYIIYAILKSNKPYEVPPHTTET

SEQ ID NO: 10269 - protein, 341 aa, unidentified
  source 1..341: note = protein_IS1383
MKHSVIGMDIAKKVFQLHTVDQCTGRIERIKLRRDEVLAFFANYPTSLVAIEACGSAHWWARQLQQQGHEVRLLAPRSVRPFVLRNKTDAADAQAIWTAVQQPGACLVAIKQADQQAILSLHRIRSQLLKFRIMQSNGLRGLLYEFGIVLPEGYTQLSKAVPEAFADAEHRVPSMLLDSLRDQWTRIIQLDEEIRKIELRLKQCLRESSDCQKIAEIPGIGLLTATAAVASLGDATTFHSGRQFAAWLGLVPRQTGTGGRVRQLGLSKRGDTYLRTLLMHGARSILNRGHRSEWVERLLTRRPYNVAVAAVANKLARTLWAVLAKGSTYRAELFTACPTGH

SEQ ID NO: 10270 - protein, 338 aa, unidentified
  source 1..338: note = protein_ISSpu22
MKITTIGLDIAKSVFHLVGVDKAGKLIKKKMLRRKDLLPFVAKIEPCLIVMEACGGASYWAREFEQFGHIVKLIAPQYVVPFRQGNKNDYNDALAIAEAAQRPNMRFVKPKSVEQQDVQLLHRMRERLTKQSTALINQVRGMLAEYGIVMTKSKSAFKAQLPDILIDEANTLTTKGRAIFYQLYDEVIDIEKRLKSCDTQVLNETQNNVICQRLQTIPGVGPVTATAIYAAVGDGKDFSNGRHFSAWCGLVPKQHSSGGKDNLLGISKRGNAYLRTLFIHGARAVLRHSGSKSDKLSCWAIQLAERRGFNRACVAVANKLARMSWVIAAREEEFRLAM

SEQ ID NO: 10271 - protein, 338 aa, unidentified
  source 1..338: note = protein_ISAzvi2
MKLKRIGVDLAKQVFQIHGVDSHEQAVCRKQLKRSQMLDFFRQLEPCTVAMEACGSSHYWARELRVLGHEVRLIAPQFVKPYVKSGKNDANDAEAICEAASRPNMRYVEVKSAEQQAGQALHRIRSRLIRARTALVNEIRGLLGEFGLVESRHGVAATRRLAQAALADAENGLPGQMRGLLVELQGELVEHEARLSRLDETIQRQAREDERVERLMLVEGIGPITATALVSAVGDARQFRSARQFAAWLGLVPRQHSSGGKEQLGPINKRGDTYLRTLLVHGARAVLRHCQDKADRRSQWLQRLLCRRNPNIATVALANKNARIVWAILSRGDCYQPG

SEQ ID NO: 10272 - protein, 354 aa, unidentified
  source 1..354: note = protein_ISBj4
MSQTPSTAIAVIGIDIGKNSFHVVGHDTRGTVVLRQKWSRGQVEARLANMPPCLIGMEACVGAHHLSRKLASLGHDARLMPAKYVRPYSKGPKNDFNDAEAIAEAVQRPTMKFVATKTAEQLDLQALHRVRERLVSQRTGIINQIRAFMLERGIAVRQGIGFLRTELPTILATRTDALSPRMLCVIEELAGDWRRLDQRIDRLSGEIEALARQDQACSRLMTVPGIGPIISSAMVAAIGTGDVFSKGRDFGAWLGLVPKQISTGDRTILGKISRRGNRYLRVLFVQAAWVVLVRIKNWERYGLRSWIEAAKKRLHHNVLAIALANKLARIAWAVLAKGRAFELTRTNDAGVRPA

SEQ ID NO: 10273 - protein, 337 aa, unidentified
  source 1..337: note = protein_ISSlo1
MKVTLIGIDLAKNVLQVCGVNQVGKTLFNRTVKRTQLLKTLVQYPDAVIAMEACSGSNYWGRELLSRGFEVKLIPPQHVKPFVKGNKNDRNDAFAICEAAMRPNIIFVKPRTLAQVDIIISHRIRERRIRVRTALTNQIRGLLSEYGIVIPKGRDPLNLALPELLEDADNSLTTTARRYIRELLDELYAINASIKALEKEIRLQARNHEDTKRLTAIRGVAEIIATASVSFAGDGSGYQNGRHFSANLGLVPKEFSSGGKQKLGAITKRGNSYLRRQLIQGAWSVIRYAKNNDDRLSVWARKVIERRGKQKAAVAVANKLARIIWAMLYYKTEYRPS

SEQ ID NO: 10274 - protein, 332 aa, unidentified
  source 1..332: note = protein_ISMtsp7
MQMLAIDLAKQSFHVHGVDADGQVISRRVGRTKLPALVASLAPKVIAMEACATAHHWARAFLAAGHEVRLINPRFVKPFVRGSKNDAVDAEAIFDAASRPTMRFVPVKSTEQQDLQSLHRVRDRLVSQRTNLINHTRGLLAEYGLIYPKGAARFPARVRAELSEAGLSPMARATFAALLDELETLETRLERLDDQLRAICREDVVCRRLMTLPGVGPVVATALKASVGDARQFRSGRELAAWIGLVPRQYSTGGKPHLGGVGRRANHYLRRQLVHGARAVALRLATKTDPRSRWFQAVIDRRGFNKGIVAMANKTARIAWAMLRREEDYARA

SEQ ID NO: 10275 - protein, 326 aa, unidentified
  source 1..326: note = protein_ISAzs4
MFFQVHGIDGDGKILVRRQLRRGEVLKLFQGLPACLVGMEACGTAHHWAREIAALGHTVKLMPPAYVKPYVKRGKTDAADAEAICEAVTRPTMRFVAVKTIDQQAALMLHKTRDLLVRQRTMLINVLRGHLAEFGIIAAKGPSGTKAAIEALHEAQDRLPELARRALHGLVDQLRLLGEEIDRLEARILEWHRVSDVSRRLATIPGIGPITASAIAAAVPDGSLFRSGRQFVAWLGLTPKAHSSGGKECQVGISKQGDGDLRRLLVVGATAVMRLARRDNAARCWAAKLLERKPAKLAAVALANKTARIAWAVLTRGGTYAAPTTA

SEQ ID NO: 10276 - protein, 341 aa, unidentified
  source 1..341: note = protein_ISPa49
MSLSQTIVGIDIAKSVFQIHEVDKETGEVTSRQIKRARLLQHFINREPCFIGMEACGGAQHWARQFVAMGHTVKLLPAQSVRPFAGGNKNDVADARAIWIAVQQPGIKAVAIKTEAQQAVLALHRMRQQLVKFRTAQINALRGLLAEYGEVMPLGRDAVAKALPSVFARLVDRLPGVLIESLREQYTRIAQLDKEVSNIERRLREWHRDDESCRRITAIPGVGLLTATATVAAMGDPGAFSSGREFAAWLGLVPRQTGTGGRVKLLGISKRGDRYLRTLLIHGARSVLMTSKTPPAWAANLATRRPLNVAVVALANKMARTLWALLAHQRVFQPEYVSRPA

SEQ ID NO: 10277 - protein, 402 aa, unidentified
  source 1..402: note = protein_ISEnfa110
MNCVGIDVSKGKSMIAVMRPFGEVVVSPFEVRHTANELSELAGLLKSLDGETRVVMESTGNYHAPVAWLLHDAGLYVSVVNAMLVHDYGNNSLRRAKTDKKDAVKLANYGLDHWLTLPRYIPEEDTRLMLKICYRQYQQYSKVQTMLKNNLISLLDTTFPDANRLFTSPPRADGSEKWVDFVATFWHCECVCGRSEKAFTTQYQKWCRKHGYNFSEDKALDIYASACRHFGVIPKTDTAKLLVEQAISQLQTTSSALAALKQEMQSLAASLPEYPVVMGMFGVGPTLGPQLLAEIGDVRRFHSKKALVAFAGIDAPPYQSGQIDVRSRSISKRGSASLRRTLFLVMSVILQCAPIDEPVYQFMDKKRSEGKPYRVYMMASANKFLRIYYASVKAYLESLEHD

SEQ ID NO: 10278 - protein, 339 aa, unidentified
  source 1..339: note = protein_ISBcen5
MNSMAVGVDVAKQVFQVHYVDRETGGIVNKAIKRAKFLEFFANRAACLIGMEACGGAHHWARQLTQMGHEVRLMPAEFVKAFNIRNKNDAADARAIWLAVQQPGKPVAVKTEMQQAMVALHRMREQLVKFRTMQVNGLRGLLTEYGEVMSKGRAKLDKEIPVVLGRIAERLPAALIDTLREQWNGLAKLDEQIAEIERRMREWKKEDKAVKAISEIPGVGLLTATAAVAMMGDPKAFSSGREFAAWAGLVPKQTGSGGKVNLHGISKRGDMYLRTLLIHGARSVLTHAKEPGEWIEQMKKRRPPNVVIVALANKMARTIWAVLAHDRPYQKGYVSVKPA

SEQ ID NO: 10279 - protein, 326 aa, unidentified; identical to SEQ ID NO: 10181
  source 1..326: note = protein_ISCro4

SEQ ID NO: 10280 - protein, 406 aa, unidentified
  source 1..406: note = protein_ISCth7
MFYGGIDVAKYRHEICIVDESGNVILQIFVDNTRNGLDKLIHNLKRLEIEVSNVEFCLEATGHYWLSLYYHLTELGYKIHVINPIQSDALRNFYVRKTKTDRKDAHLLADIVRFGHISETKLASETVLKLQNLSRLRFEFVRQVGGLKNRVLGILDRIFPEYPQCFSNVFINTSRELLKSFTAPEDLAEADLSELTDFLNKHSRGRLGVDRAKQIQALAKGTFGINIALDAFTLELRLLVEQIEFIEEQISVIEEAIDQVMEEMRPSKDTAYRHVLETIPGIGPVLAASIIGEIGDINRFPNAKALVAYAGLDATVRSSGQFEGTRNRISKRGSPVLRHSIWLAAVSARRFNPEMKEFFEKKRSEGKHTLVATGAVARRMVHLIYSLWKDNRPFDPNYQWSPTNSR

SEQ ID NO: 10281 - protein, 321 aa, unidentified
  source 1..321: note = protein_ISBcen8
MSAPSAVTVGIDVAKAHVDVSVLGANLDIRRFNNDAEGHSALAVALQPLNVQLVVMEATGGYETELACALQGAGLPVAVVNPRQARDFARSMGRLAKTDAIDARMLAELASVLLRRDDLSRLLRPVPDERQQWLAALVTRRRQLLTMLLSERQRLQITPVGLHSSLLAIIAAIQAQLDDIDAQMVAHVRQHFGELDRLLQSTHGIGPVSSACLIAELPELGRLNRRQIAALVGVAPIACDSGLRNGRRRVQGGRFAIRRVLYMATLTATRYNPAIRAFYQRLKAAGKLSKVALVACMRKLLTMLNAMVKTNTPWDDSLHRA

SEQ ID NO: 10282 - protein, 343 aa, unidentified
  source 1..343: note = protein_ISRhru3
MDYYAGIDVSLELSSVCIVNQDGKIFREVKVASDPEALIGLFGGLGVALSRIGLEAGPLSQWLHAGLTAGGYDVVLLETRHVKAGLSAMTVKTDRKDARGIAHLLRMGWFRPVHCKTNSAQEIRVLLVGRKLLQSKMGDLEQGIRGLLRGFGLKVGVISKGRFAARIRELVAGQAMLETVAEPMLRARDALRAEFTLLHRQILAIVRKDDLCRRLMTVPGVGPLVALTFKSGIDDPSRFTSSKTVGAHFGLTPKKYQSGETDITGGITRTGDAMVRMALYEAAQVLLTRSQRFSSLKRWALEVAKRRGMKRAKVALARKLATVLHRMWIDGSDFRWGKEITSA

SEQ ID NO: 10283 - protein, 312 aa, unidentified
  source 1..312: note = protein_ISHne5
MTLITIGVDVSKDTLDVHLHPDGLHRQFTNDAAGYRTVLGWVAGRPVARLVFEASGAYHRAFERAMGEAGLALCKVNPARARRFAEAIGQSAKTDRIDAAMLARMGAVLEPAARAAPSKTASDLKELHMMRAALVKDRTAAKNRAGTLTLPLLKRQLRQRLAAIDRQITQIEQAMQALIEADPELARKRDILISIPGIAERSAFALLTGMPELGDLGNPAASALSGTAPRTRQSGKWTGKAFVQGGRAHVRRSLYMPALAAARFNPDLNHTYRHLTGRGKPPKLALTAIMRKLIILANTLIRENRKWTPKPN

SEQ ID NO: 10284 - protein, 329 aa, unidentified
  source 1..329: note = protein_ISEch1
MYYVGIDISKRVVDVCLLADGIKGKRKTKTLPNGPNAVQALAEWLTRQKCEPSQAHIIMEATGVYHEHLAYGLHHSGIAVSVINPHRLREFARGMGILTKTDKVDACVLACYGCLRQPEGWTPPSPEIRKLRALLQHRDSLLGDKQRLENRLSTLNATLTTEEVVTSLESMVQHVKGELERIERLIEDHIDRHPGLKNDLKLLKSIDGVGDQIGWNMLATIRGSNFRSAEQVAAYLGVIPVERRSGTSVRGRARLSKIGPPAIRAKLYMGAIAAISHNRHVKAQYERLLLKGKAKMLAIGAAMRKLVHLCYGVLHTQQRYDRDYGVVAS

SEQ ID NO: 10285 - protein, 340 aa, unidentified
  source 1..340: note = protein_IS5708
MTITTVGIDLAKNVFAVHCIDQNGKAVLVKPKVSRAALSELIAGLPPCVIGMEACSGAHYWARLFRQYGHDVRLMAPKFVSPYRMAGKTGKNDAADAIAICEAVQRPHMRFVPVKDESQQAMQCLHRTRQGFIQERTATYNRLRGLISEFGVIAPQSTDALRHVVSDQKETLPVQVRLCIDDLLTHVTNIEEKIAEYDRVLSRVAKTDHRSQQLMELKGVGPTTASALVASIGNAHDFKNGRQLAAWLGLTPSQYSSGGKSKLGRITKAGDAYLRTLLVQGARSVMVGAENRTDPFSRWVCSLIGRRGYWRAVVAIAAKNARLCWASLHYGDDFRLYSTT

SEQ ID NO: 10286 - protein, 431 aa, unidentified
  source 1..431: note = protein_ISHaha5
MILLGGLGVTGKMNLRRRYRMNPVVGLDVSKGESEVQAFLDKGKPYGKSFSIKHDLDGLGSLLEFMEGVKDATGIQPSVVLEATGHYHAPVVQFLEQHNYLLIIVNPLISHRAKSSSLRKVKTDAIDAYRLCELYYKEDLEPYKRRGTQLLNLRNLTRQHENITGIYVQTKLQFQAVLDQIFPEYKGVFGDLYSVVSLLVLKEFPSSEDILAVSQDALADKIKEFCKSRSKRWAAEKAQELKKAAARNPFKKTLYQSHLLSLGMYINMLLQYKEHLSRLDSEIDALAKEVEEYKIIQSIPGIGEKIAATIISEIGEIDRFNHPKKLVAFAGVDPEVHESGKFKATLVRITKRGSSRLRHALYMAVRSGIRDCRKQKTTAEIIPRNRKLRAFYDKKRKEGKLYKVAVIACVNKLLHWIYALLKNKTTFQDIA

SEQ ID NO: 10287 - protein, 343 aa, unidentified
  source 1..343: note = protein_ISBdi11
MEEYIGLDVSMKETAVSIRRAGERIWRGKCASDPSVIAALIRKRAPAVKRVVFETGPLSVWFYHSLRTEGLPAICVDARHDKAALDMAANKTDANDADGLAQLAEVGFFREVRVKGFNSMLTRTLVAARTRLVRITTELSNQIRGVMKTFGLLVPAGKGSTFENVRNLLADQDGLASIVLPMLEAWRGIRIRAAELGRQLVRDARESQACRILMSIPGIGAITATSFATAIEEPDNFRKSRSVGAWIGLTTRRYQSGEVDYDGHISRRGDRHLRGLLYEAAAVILTRSSTDSALRTWGRHLRERIGFKRAAVAVARKLAVISIRCLRPASCSIRMPELPHKLG

SEQ ID NO: 10288 - protein, 339 aa, unidentified
  source 1..339: note = protein_ISEc11
MKYTPVGVDIAKHVIQIHFINEHTGEVVDKQLRRQDFLTFFGNREPCLIGMEACGGSQHWARELTKLGHKVRLLQARFVKAFVMGNKNDVMDARAIWMAVQQPGKEIAVKTEEQQSVLVLHRTRMQLVKFRTAQINALHGTLLEFGETIHKGRAAMEREFPEALERMKERLPPYLIMVLENQYNRLNELDSLIEDIEKQLTSVARQNETCKRLLDIPGVGPLIATAAVATMGEASAFKSGREFAAYVGLVPKQTGSGGKVRLLGISKRGDTYLRTLFIHGARAVALVAKEPGPWITELKKRRPASVAIVAMANKLARTVWAITAHDRKYDRNHVSIRPY

SEQ ID NO: 10289 - protein, 347 aa, unidentified
  source 1..347: note = protein_ISMlo1
MEQIIRIGMDTSKHVFQLHGVNAAEEVVLRKKMRRKEMVAFFERAAPTVVALEACGGSHHWARLLEALGHDVKLIPPQYVKPYVKRGKNDAADAEALCEAVSRPTMRFVRVKTTDNQAALMLVGMRDRLVRNRTQLANAIRGYAAEFGLIAATGTSKVRSLLERIATDETLPELARELFGLHGREYDRLEDEIEKVEARLMAWHRTNECSRRLTRIPGVGPIGALMMVMKTPAPETFRSGRHFAAWLGLTPKDHSTAGRVRLGVITRAGDENLRSVLVAGATAVLRHVREDRGKNASPWLLDMLNRKPPKLVAVALANKIARVAWKLMVTGERYNPNAALSAYGQAA

SEQ ID NO: 10290 - protein, 341 aa, unidentified
  source 1..341: note = protein_ISAs24
MATIALFGLDIGKHSFHLVGQDANGKPVFKRQFTRSSLIHYLAQHPACRIVMEACCGAHWLARQLAGFGHQVQLIAPQYVRPFVTGNKNDFLDAHAICEAASRPSMRYVGVKTPEQQASSALHRLREARIADRVQTANQIHALLLEFGIVLPLGARGIKQVPDIVMNASTDLPHAARRILSAQYEHYRYLAELIAGLDSQIGAQAKADALTSRLMTIPGIGPITASQLAADAGNAQSYGSARHFAASLGLVPRQHSTGGKSKLLGISKRGDKSLRRLLVQCARVVMQNAAKWQSAVAQWTQQLMTRRHSNVVACALANKLARIVWAVLVKGEEYRPNPNAA

SEQ ID NO: 10291 - protein, 344 aa, unidentified
  source 1..344: note = protein_ISWen2
MELYMINNFLGIDVSKERFDVSLSFISKKGKRETRKRKFKNDDTGFQGLLNFLQKHNVEEVKACMESTGCYSEALAEFLHNAGYFVSVVNPACIRFYAKSKLTRQKNDQTDAEIIADYCQRQEPSRWTPPSPEKKKLKHLYRCSNALKDELTLANNHLEKKERLPKEVANAWEDLAMNIEQKIETIKNSIRELLKQHKELLEDFQLLLTIPGIGEETAIAILAEIPGIKAFINARQLAAYAGTIPQNITSGSSVHAKPRLSKTGSRTLRKAMYFPAIAAKKHNPIIMASCERLKEKGKHAMAIVGAAMRKLLHIVFGVLSSKKAFDPDHIKNYRAKRLTEGLVL

SEQ ID NO: 10292 - protein, 322 aa, unidentified
  source 1..322: note = protein_ISKpn42
MSQPNPLCVGIDVSKATLDIAASSDVAQFTVSNDSDGFNAIITGLRRHSVALVLMEATGGLEVAVACSLQAEGFEVAVVNPRQARDFARAMGYLAKTDRIDARVLTQMAEVINRHPERKRFIRALPDAERQALAAMVVRRRQLIAMLVAERNRLHPFHPQNKKSINTIIKALEDELVRLEKEMDSHIRNHFKEIAERLSSIKGVGTMTVSAMLAEIPELGTLSRREISALIGVAPVNRDSGTMRGRRTIFGGRAGVRSALYMAALVATRFNPVIKTFYVRLLAAGKAKKVALVACMRKLLTILNAMLRKNEEWDESYHHVAP

SEQ ID NO: 10293 - protein, 340 aa, unidentified
  source 1..340: note = protein_ISPsy7
MKNGLKLLGIDIGKNSFHLIGHDAGGHQVLRKCFNRNRLLQFAAQIEPCTIAMESCGGSHWLARKLASLGHRVKLIAPQHVKPYVTGNKNDFIDAEAICEAASRPRTHYVAVKTVEQQVLSVQHRLRESLVCHRTEAINRVHGFLLEFGIALPATKAAIAKVPELIDDSRSDLPLQFKRVMEHLLEDIHRLDTEIKACDAQIKQQLAQDDAGTRLMTIPGIGPITASAFVADLGDASNFRASRDLSAFLGLVPRQFSTGGRPVLLGISKRGDRHLRTLLVQGSRALMIRIERRDDALGQWVRDLLARKHPNKVACALANKLARIVWAVLRRGSTYNASMI

SEQ ID NO: 10294 - protein, 334 aa, unidentified
  source 1..334: note = protein_ISAtu1
MTYELLAIDLGKLSFHLHSIAADGAILSRKVSRSKLAEAVKSISPKTIAMEACASAHHWGRQFREAGREVLLINPRFVKPFVRGSKNDAVDAAAIYEAATRPTMRFVPVKSTAQQDLQSLHRIRERLIVQRTSLINHARGLLAEYGIVLPQGPWRFASQAPSAVEDAALSDLGRELFLELLDQLTDVNDRVARLDRKISEICRDREDCRRLSELPGVGPIIATALVASVEDGRHFKSGRELAAWIGLVPRQYSTGGKPRLGGIGRRANHYLRRQMIHGARAVISRLASHDDRRSQWLKELVARRGFNKAIVALANKTARVAWALLTRQERYAAQ

SEQ ID NO: 10295 - protein, 317 aa, unidentified
  source 1..317: note = protein_IS1000B
MTFAGIDVSKTHLDLALVSNSPKPTRLRFPNSPEGRQALLAALAHHNPAWVALEPTSAYHLPLLKLLAENRLQVALVNPYHLAAFRKAKGERQKTDRQDALLLARYAQVYHEDLRAYTLPPETLRELKALVGYREDLAGRERTILNQMEAAEWAGSKEVLALLQKELACVKGLLGEVEARIQALLATLPEAEVLMALPGVGPQVAAAVLALLPPELWGRAKRAASYAGLIPEREESGKSVERSRLSKKGPPLLRRKLYMGALVAVRHDPEMRAFYHRLLSRGKRKKQALVAVAHKLLRRMMGRLREYYATQLDQGVA

SEQ ID NO: 10296 - protein, 338 aa, unidentified
  source 1..338: note = protein_ISPpu31
MKLKRIGVDLAKQVFQVHGVDSHEQVKCRKQLKRHQMLDFFRQLEPCVVAMEACGSAHYWARELGKLGHEVRLIAPQFVKPYVKGGKNDANDAQAICEAASRPTMRYVEVKTVEQQASQSVHRIRGRLIKARTALVNEVRGLLAEFGLIESRKGVAATRELLCRAIDDSDSSMPGSMRELLRGLSEELQGYDERLKKLEQLIQREAREDERVRRLMKIEGLGPISATAIVSAVGDARQFASGRQFAAWLGLVPSQYSTGGKERLGGISKRGDKYLRTLLIHGSRSVLKHCQSKTDKRSDWLSQLMCRRNKNIATVALANKNARIIWAILSKGEQYQPC

SEQ ID NO: 10297 - protein, 339 aa, unidentified
  source 1..339: note = protein_ISXne4
MKFTPVGVDIAKHLMQIHFVDEYTGELIDKQLKRNDFLTFFSNREPCLIGMEACGGAHYWARELRKLGHEVRLLKARFVRAFRMGNKNDVQDARAIWLAVQQPGKSVAIKNEEQQAILSLHRMRYQLVKFRTAQINSLHGLLLEFGETVHKGRTLLDKAMPEVLERLKEKLAPFLLNLLEKQYHRLNEIDEQIEQVEKQLTTWAKQNADCQRIMKIPGVGVLIATAAIATMGDPRAFRSGREFSAYLGLVPKQTGTGGRVKLLGISKRGDTYLRTLFIHGARAATLLTKTPLPWVTELKKRRPVCVVIVGMANKLARTVWALVAHQQEYQKDYVSVRPY

SEQ ID NO: 10298 - protein, 334 aa, unidentified
  source 1..334: note = protein_ISEch4
MQNVTLIGIDLGKHSFHVHAQDKNGNALLRKKFSRNQLTAFLSTCTASTVVMESCAGAHFMARHISQFGHQVKLISPQFVRPFVKSNKNDFIDAEAICEAASRPSMRFVTPRTEDQQAMSAFHRVRDTLVRERVKTTNQMHAFLLEFGISMPRGIAIIRRLAVVLEEHELPPYLARLLMRLHQHYACLTEQIKELEQELKIHIAGDDTAQRLLTIPGVGLITASLLATKLGDGKSYASSRDFAASTGLVPRQYSTGGKSTLMGISKRGDKNLRRLLVQCARAFMQRLEHNQGRLADWVKTQLSRHHSNVVACGLANKLARIAWSVTTHRTAFIQ

SEQ ID NO: 10299 - protein, 334 aa, unidentified
  source 1..334: note = protein_IS1328
MQNVTLIGIDLGKNSFHIHCQEKHGNTLLRKRFSRIQLTQFLATCPPCIVAMESCAGAHFMARHISQLGHQVKLISPQFVRPFVKSNKNDFIDAEAICEATSRPSMHFVTPRTEDQQAMSALHRVRDALVRERVKATNQMHAFLLEFGISMPRGIAVIKRLATVPEEHELPPYLVRLLTRLHQHYGYLCEQIEEIERELKNHLADDETAQRLLTIPGIGTITASLLATKLGDGKNYLSSRDFAASTGLVPRQYSTGGKSTLMGISKRGDKNLRRLLVQCARVYMQRLEYQSGRLAEWVNGQLTRHHSNVVACALANKLARIAWVVTTQGTVFSK

SEQ ID NO: 10300 - protein, 321 aa, unidentified
  source 1..321: note = protein_ISPpu10
MAMSAIPIEAGVDTSKDELVIQAAPNTKSFAIPNTPKAIKAWLKTLPKGSALAIEATSTYHMEMAEQAHAAGFAVYVIDGLRLSKYRESVAIRAKTDAHDAALLARFLSNERGSLKAWTPPPAGHREIQVLLRRRAKLVAVRGMLRMSLSGDKLFASELKRVEEVLERIELSLEKQLRAVIKKAGLSDQMRRVQRLPGVGFLTAAGLVMSFMRGEFKNSDAFVAYLGMDVTVSQSGKWAGRGKLSKRGDSEVRRLLYNASMSGSRTATWKQYYAHHQARGKKTTQALVILARRLARLAFGLMRHQADWKPEIYTGGAKPAS

SEQ ID NO: 10301 - protein, 338 aa, unidentified
  source 1..338: note = protein_ISPa11
MNLSRIGLDLAKQVFQVHGVDRHEHVVCRRQLKRAQVRDFFRQLPPCLVAMEACGSAHYWARELRELGHTVRLIAPQFVKPYVKGDKHDAHDAEAICEAASRPSMRYVPVKSAEQQAVQSMHRVRSRLVRARTALCNEVRGLLGEFGLIATRRGRAATMALLETVMATEPAPLPAPMGELLRELKDELQTLEARIARLERQIQAHVRGDARIQRLLAVEGIGPISASAVAASAGDARQFRTGRQFAAWLGLVPRQHSTGGQQRLGNISKRGDTYLRTLLIHGARAVVRCCANKTDARSRWLQGLLQRRPANVVAVALANKNARILWALLSRETCYRPG

SEQ ID NO: 10302 - protein, 401 aa, unidentified
  source 1..401: note = protein_IS902
MAEPDRVWVGIDVGKSTHHACAIDDTGKVVWSKKIPNEQAAIEDLIAQGGRIANHVVWAIDLTSPPAALLIAVLLSAKAEVVYVPGRTVNTMSHAFRGEGKTDAKDARVIAETARHRRDLSPVVPGEDLVAELRSLTAYRSDLMADWVRGVNRLRSMLTAIFPALEAAFDYSTRAPLILVSAMCTPGEIRSAKRAGVIKHLRKNRAWPNNIDTIADKALAAAAGQIITLPGEAGTAALIKQLAARLLDLDRQIKDIDKQITNKFREHPSAAIIESMPGMGPHLGAEFLVITGGNMAAFTNPGRLASFAGLVPVPRDSGRITGNLHRPKRYNRRLRRVFYLAALSSLKIEGPSRAFYDRKRSENHIHTQALLALARRHVDVLWALLRDNRTWQPQQPTVAAA

SEQ ID NO: 10303 - protein, 342 aa, unidentified
  source 1..342: note = protein_ISAfe1
MQVTTYGLDLAKRVMQLHWVNLETGEIHRKQLKRRALLEFFANRQPGIVAMEACGSAHYWGRELRKLGHEVRLIAAQFVRPFVKTNKNDAADAAAIWEAVQRPDMRFVAVKSEEQQSVLSLHRMREQLIKMRTMQVNQIRGLLYEFGADLPQGRQRGLKEVPDALADLEKSISPMLRDTVRQQLKRLEEMDKDIADIEKRLTLWKKGQEAVTRLMAIPGVGLLTATAIIATVGDMKSFRSGREFAAFLGLVPRQSGTGGKVRLLGISKRGDTYLRTLLTHGARAVVNFQIKNRNPWIDKLLSRRPHNVVVVAQSNKMARTIWALLVKNTEYVANHARNAAAL

SEQ ID NO: 10304 - protein, 338 aa, unidentified
  source 1..338: note = protein_ISMno26
MAQVSTIGLDLAKTVFQVHGIDAQGEVIVRRPLRRAEVLPFFAKLSPGLVGMEACGPAHDWARQLIKLGHIVRLMPPASVKPYVKRGKSDAADAEAIAEAVRRPTMRCVAVKTVDQQAVLMLHKGRDLLVRQRTLLINALRGHLAEFGIVAAQGPAGVKSAIAQFRTDQASLPELARSAIRRLIGQSEEVAEQLRSAETEIVAWCRSDAASRRLLTIPGIGPITASAIAAAVPDPTLFRSGRQFAAWLGLTPRPQSSGGKDRLGGISKQGDGTIRRLLVGGATAVIRVARQDNPGRAWAKRLLERKPARVVSVALANKTARIAWAVMTRGDVYRAPAV

SEQ ID NO: 10305 - protein, 323 aa, unidentified
  source 1..323: note = protein_ISGpa2
MNAPIYCGIDVAKRNFVIGFSHQKKTKTETNNAKGIQHTLDYLSQFNVALITLEATGGLEIPVAKALARAGYRVFIANPLKASEFAKSQTRAKTDAKDAVNLAFYGLTCELKGEVEHQLYVPLSEQEEQLEALVVRRRQLVDMRVAELNRLQQSHETQLDNIQQHIEMLDKLIAELDKDIDDQSKHFSDKADLISDIKGVGKNCVAVMMSSLPELGKLSSKRIASLVGVIPHPQESGQWKGKSFCYGGRAIVRNALYMAALSAIRFEPVFKAFYTRLVAKGKAKKVAIMACMRKLLTIMNALVRRNEKWDATRYLSTESVGQN

SEQ ID NO: 10306 - protein, 338 aa, unidentified
  source 1..338: note = protein_ISSod19
MKITTIGLDIAKSVFHAVGVDKAGKLIKKKMLRRKDLLPFLAQIEPCLIVMEACGGANYWAREFELLGHSVKLIAPQFVVPFRQGNKNDYNDALAIAEAAQRPNMRFVKPKSVEQQDVQLLHRMRERLTKQSTALINQVRGMLAEYGIVMTKSKSAFKVQFPDILADEANTLTTKGRAIFYQLYEEFSDIEKRLKSCDAQVLTETKNNVICQRLETIPGIGPVTATAFYAAAGDGKDFSNGRHFSAWCGLVPKQHSSGGKDNLLGISKRGNAYLRTLFIHGARAVLQHSQNKQDKFSCWAIQLAERRGFNRACVAVANKLARMAWVIAAHDEEYRLPV

SEQ ID NO: 10307 - protein, 338 aa, unidentified
  source 1..338: note = protein_ISKpn2
MNIVFLGIDLAKNVFQLCGLNQAGKPVYTKRTGRKELLQTLANIPACLIGIEASTGAFYWQREFEKLRHKVKVISPQYVKPFVRGQKNDGNDAQAIAVALMQPTMQFVPPKSPEQQDIQALHRARQRIVNRRTATVCQIRGLLLDRGSPIGSAVSRARRAIPLILEDAENGLSSRMRRTIAELYELFNDLGRRIHFFDKEIETVFRQSEACQRIARVKGIGPKTATAIVAAIGKGTEFKNGRHFAAWLGLVPRQHSSGDRQALMNMMKKGDKHLRTLFIHGARAVVRVATNNNDGHMNQWVNQLKERRGFNKTTVAVANKNARIIWSMLRNETEYQVV

SEQ ID NO: 10308 - protein, 315 aa, unidentified
  source 1..315: note = protein_ISFop3
MYHNFIGIDISKNDFVVAIHGKKKTFKYLNNLTGFDELLSDHPILKDKSFVVVETTGGYEKALLEYLITKNIVVHRANTRIVKHFIRSTGQLGKSDNIDAFGLAKYGYERHRDLEFYQPNDDKMQKLIKYILRKQDIKKQLTAEKNRYQAPDQKYTKDSHQRMIEFYKQEIMIIESLINELVDDCQYLAKARDLLVKEVTGLGNATATSLLALMPELGNLNRKQVASLAGVAPYPYESGKKVGYRKTYGGRADLKPILFMSALTAARSKGKLGIFYRDLVEKGKKKMVALVAVMRKIIVIANAKIRDLKRDLKIL

SEQ ID NO: 10309 - protein, 343 aa, unidentified
  source 1..343: note = protein_ISSph14
MSIVILGVDLGKNACSVVGVDAAGAVIVRKSMRRQTLIDYVTKLPACVIAMEACCGAHHLGRLFAAQGHEIRLMSPEYVRPYVKAQKNDDRDAEGIAEAASRPTMRFVELKTQEQLDIQTLHRVRSRLVAERTNLINQLRAILLERGTIFPAGRRKLELGIDAMLAAEDTTLSPRLKQLVGELRAEWHELDTKVEALNGEFVELARNDAAARRLTSIPGIGTLNATALIAAVGDASSFAKARDLGAWLGLVPRQHTTGGKPRLLGISKRGNTYLRTLLIHGARAALPSLARSETPLGRWLTGMIERGVHRNAIVVALANKLARIAWAALRKEVSFERGYPAAA

SEQ ID NO: 10310 - protein, 338 aa, unidentified
  source 1..338: note = protein_ISSpe2
MNITTIGLDIAKSVFHFVGVNKAGKLVKKKIIKRKELVLFLAQIEPCLVVMEACGGANYWAREFEKVGHQVKLIAPQYVVPYRQGNKNDYNDALAIAEAAQRPNMRFVEPKPVEQQDIQMLHRMRERLNKQSTALINQVRGMLAEYGIVITKGKASFRTKLPDILENADNELTVKGRSVFYQLYEEFNDIEKRLKNCDAQVQQEVKSNQVCQRLESVPGIGPVTATAFYAAVGQGKDFTNGRHFSAWCGLVPKQHSSGGKNNLLGISKRGNAYLRTLFIHGARTVLQHSSNKTDRFSCWASALAERRGFNRACVAVANKLARIAWVIAAREDEYRITV

SEQ ID NO: 10311 - protein, 325 aa, unidentified
  source 1..325: note = protein_ISCARN26
MKTMSGSSVMVGIDVASAHVDVACLGAVLPSELAHVSNDAEGHSALADALVKLQPGLVLMEATGGYEAALACALQAVGLRVAVINPRMARDFARAMQRLAKTDRIDAATLAEFAAVLAQRPDCERFVRPLSEPEQQDLAALVTRRRQLVAMQLSERQRLRLARPVTRPSIDALLEAIARQLDDVDAEMVRHVEQHHAVMAKLLQSVAGIGRIAAATLIAELPELGRLNRRQICALVGVAPYAKDSGSSRGRRRITGGRFEVRRALYMATLTATRFNPAIRAFYKRLVAAGKLKKVALIACMRKLITHLNAITRDHLNAQNQPFTA

SEQ ID NO: 10312 - protein, 326 aa, unidentified
  source 1..326: note = protein_ISCaa14
MQSSINYVGVDISKPFFDVALPNGQAYTYYKFDNRQDGFEALLKVLPQNSVVVMEASGPPYYMKLAAYLTQQGIGVSVINPLVIRRFCQMRMSRAKTDKKDAKMIAEYGQMEKPALWQPPQKYVVALQQMQALLDNLHKEHTALSNQHEGFSSSGMLGTKLEQIIEQELKHKQELIDKLTKQMEELARKHYGSMLADLETIPGLGRKTSILLIVLIGGFNRFSNYRKLGSYIELSPRIFESGTSVKGKARITKMGMSRIRAMLYVCAWSAKRYNKACRELYQRLLAKGKAKKQALIAVVNKLLKQAFAIVTNQTVYDENYVSKPCF

SEQ ID NO: 10313 - protein, 344 aa, unidentified
  source 1..344: note = protein_ISBcen3
MKVTTVGIDLAKNVFQIHGVDAHGKAVLKKQIRRDQLMLFFTNLPACLIGMEACASAHYWARRVQECGHTVRLMAPQFVKPYVKTNKNDAADAEAICEAVARPNMRFVPIKTESQQAVLAIHRARQSFVKARTAQANQIRGLLAEFGLVIPQGIAHIAQRVPELLDSDTCALPGPFRLLVLRLMEHLKLLDQHVRELETQIQTWHRDNPASRKLAEIPGVGPITASALVASIGDAKNFENGRQLAAWLGLVPRQHSSGGKSTLLGMSKRGDSYLRTLLIHGARSAILAAQRKPDTDSWLSRLLGRRHPNIAAVALASKNARVIWALLAHNQQFRPGYATAAAVA

SEQ ID NO: 10314 - protein, 341 aa, unidentified
  source 1..341: note = protein_ISBcen4
MEPTVVGVDIAKRVFQLHWIAADTGEVFDRQLRRSDFLEHFANREPCLIGMEACGGSQHWARRLTELGHQVKLMPGKLVKAFVTGNKNDVADARAIWAAARHPGVKAVPVKTEAQQAVLALHRIRQQLVIFRRSQSNCLRGLLGEYGEVMGVGRAAMNRAMPDLLLRLELRLPRVLIDSLREQWQRLVDIDKQITLIEQRLRAWLHENPACRTIAEIPGVGFLTATAAVAAMGDPKAFRSGREFAAWLGLVPAQFGTGGKVRLLGISKRGDRYLRTLMIHGARSVMKHAKDPGSWAVQLSMRRPLNVVVVALANKIARTIWALLAHGRSYCESYPPPVTAA

SEQ ID NO: 10315 - protein, 341 aa, unidentified
  source 1..341: note = protein_ISHar6
MEDVTLIGIDLGKYNFHLHGQDRHGKALLRKKFSRRQLIDFLANFPACTIVMEACAGAHWMARELAGFGHEAKLISPQFVRPFVKSNKNDFIDAEAICEAACRPAMRFVTPKTEAQQCLSALHRIRESLVHDRVKARNQIHAFLLEFGISLPTGHPSIRRLPALLAEQALPPRLVSVLKKLHLHFKYLEEQIADIEKELGRQLQEDDLGQRLMTIPGIGPITASVLSAEMGDGKQYGCGRDFAASIGLVPRQYSTGGKVKLLGISKRGDKTLRRLLVQGARSYMQRLDRHTDRLAQWVRAMLMRRHANVVACALANKLARTAWAIAAKHTEFEKQEAVTHL

SEQ ID NO: 10316 - protein, 322 aa, unidentified
  source 1..322: note = protein_ISSm3
MSVSNQRCAGMDVSKGTLDIAISNIASQFTVPNGTDGFTQIIGELKKNETRLILMEATGGLESGVACYLQSEGFDVVVINPRQARDFARAMGYLAKTNRIDARILLQMSEVISQHPEREKYIRPLPDAQRQILAAMVVRCRQLTVMLTAERNRLHPSHPQSYESIRSIISVLKSDLTRIQGEMSIHIKSHFSELSDLLSAVKGIGAATVAVLLAEVHELGSLSRREISALIGGARVNRDSGTMRGRRTVFGGRASVRTALYMSALVGTRHNQVIKEFYTCLVAAGKSKKVALTACIRKLLTILNAMLKKNEAWDPMYHQPAS

SEQ ID NO: 10317 - protein, 315 aa, unidentified
  source 1..315: note = protein_ISWpi12
MITSYQNFIGIDIGKFKNVVAVHEQKNTVGFDNNTSGWQQLFQKFSDILPNSLVTLENTGKYELGLLHFLVDKNIATHRANTRKVKSFILSHGTLAKSDKSDARALAQYGFERHSTISLFVPTFENQSTLVALCQRRDDITQMRAQEKCRLAAPENDHIKESCQKTIEFFNIQIDELNNTIQKIIDESRELQQRQKILKTVPGIGPKLSQDFLCLMPELGYLSRREVASLAGVAPYPKESGKTIGYRRITGGRSNVRAKLFTSAMAAAKSKSVLGAFYSKLVESGKKKMVAITALMRKIIVIANARLKEAINLNI

SEQ ID NO: 10318 - protein, 339 aa, unidentified
  source 1..339: note = protein_ISAs16
MKITTIGIDLAKNVLQVHGVDERGKVLLKKQLKRDQMITFFANLPACLIGMEACGSAHFWANKLQGLGHTVKLMAPQFVKPYVKTNKNDAPDAEAIYEAVTRPTMRFVPIKSSEQLAVLALHRARQGFVKARTAQANQIRGLLAEYGLIIPQGITHIGQRVPEFLEDSENCLPGTFRLLLMRLHEHLKELNKQVNELEEASVRWHRDSVASQTLAQLPGIGPITTSALVASIGNPRNFQNGRQLAAWLGLVPRQHSSGGKQTLLGISKRGDSYLRTLLIHGARAVLRVAEHKESFAGSWLAGVMARRNPNVAAVAQTARIIWALLAHDRKYDAHNGMAA

SEQ ID NO: 10319 - protein, 442 aa, unidentified
  source 1..442: note = protein_ISPpu9
MARKPSKQRFTVVHPDCAAIDVGGREHFVAVDPRHENPVQSFTSFTDDLLKMANWLESLGIKVVAMESTGVYWIPIYEILSERGFDVYLVNARATRQITGRKSDVLDCQWIWQLMTHGLLRGAFRPDDLTCCVRSLVRQRASKVKDQAQTLNRMQKAMSQMNIQLANVISDISGVTGMKILRAICAGERDPVQLAELTDRRIKAGKEAVARSLHGNWRREHLHALTQELAAYDFLEQQIADCDDAIKAALEQLPVLQNKPEPSKKPLRSPHRNGAQQTVLHQTLWKVLGVDLTAIPTIGVDTALVLAGEIGTDLSRFPSSQHFCSWLGLAPPTRISGGHRLAGGGPKIVNRAAQALKQAASNARNDKGFIGASHRARLTRMDTSCAIKATAHQLARLVYNLLTKKQAYVEQGLEEFETRSQDRQVRALLRKARKLGYQLVAA

SEQ ID NO: 10320 - protein, 336 aa, unidentified
  source 1..336: note = protein_ISCro5
MNIKRIGLDLAKLVFQLHGVDHHERVVLRKTLRRSQMLVFFARLEPCLIGIEACGSSHYWARELTRLGHSVRIIPPRFVKPYLKGNKNDANDAEAICEAVSRPGMRYVAVKSEAQQSMQAEHRVRARLLRDRTALSNEIRGMLGEFGLVLPVGLAALRRALPEILSQQEQWDNRFIRLLCELAEELQILDDRLARYDRRLKQLAQDDDRIRRLQEISGIGPVTASALVAAVGNARQFKNGREMAAWLGLVPGQHSSGGKNRLGHISKRGDSYLRTLLIHGARAVLNACGNKEDRRSQWLQSVAERRNRNVATVAMANKNARIAWAVLSREEEYRVM

SEQ ID NO: 10321 - protein, 341 aa, unidentified
  source 1..341: note = protein_ISBfun1
MPIVTIGIDLAKNIFAVHGVDEAGKAMLIKPRVPRDQLATLIAQLPACLIGMEACSGAHHWARLFQQHGHTVKLMAPNLVAPYRMSGKRGKNDAADAAAICEAVARPSMRFVPLKDEHQQATLCLHRTRQGFVEERTATYNRLRGLLPEFGVVLPQSPEKLRRYVTEHLDALPGWAKRSIGDLLEHAGHIEDRLLEYDRAIAEIAREDARSKRLMQLRGVGPTTASALLASIGAGRDFRNGRQVAAWIGLTPGQYSSGGKARLGSITKAGDAYLRGLLVNGARAVIANLGEKQDRFSRWVRTLIERRGYWRAAVAIAAKNARLAWASLKYGEDFKLEPAAD

SEQ ID NO: 10322 - protein, 320 aa, unidentified
  source 1..320: note = protein_ISOt5
MNSIIVGIDVSKETFDAAVLINNKVQTRKFNNNSEGFNKLVTWLKSRGTGHVCMEATGIYWKNLAKYLYDYGYKVSVVNPARIKGFAMSKLSRTKTDKADSVLIADFCKAMKPEAWYPQPLYIQELQQLVNRLNVLIKHKTQETNRLEGASKAIANNIQMHIEFLETQIKEIEQLINDHIKNNKDLHNKAMLLESIPGIGAKTQAVVLAFLADIEKFSSAKQVVAFVGLNPKHRQSGSSVRGASRISRTGNSDLRKSFYMPAMSALRHNCIIKQFSQRLSDTGKPKMLILIAAMRKLLHIIYGVLKHNSPFNPNVLINQK

SEQ ID NO: 10323 - protein, 391 aa, unidentified
  source 1..391: note = protein_ISFnu4
MFLLGIDIAKLNHVASCIDSSTNEIVFSNFKFKNDFKGFSTLLDKIKTFDTKNLIIGLESTSHYGENLINFLFKQHFKVALINPLQTSHLRKANIRDAKNDNLDSLNIAKSLIFAKLNFISEKNINCFSLKKLTRFRSSLIKQRSKAKIQLTSLLDLLFPELQYLFKSKIHSKAIYSLLKKYPSTEEIAALKDDEISNLLYASSKGHFKKEKSIELKSLAKTTVGIKDTSISLHVIQLIELIELYDKQIKDIVTKIADTVDKLDTKLLSVPGISIIACAIILGETNNFNNFSDSTKLLAFAGLDPKIRQSGNFNASSCRMSKKGSPYLRYALIFTAWNIVRHSEKFNKYYCLKRSQGKSHYNSLGHVAHKLVRVIFTLIKKNIVYQEENLE

SEQ ID NO: 10324 - protein, 359 aa, unidentified
  source 1..359: note = protein_ISMch6
MSAQEVRERHVVGGVDTHKDLHVAAVVDDRDRVLASASFDATRQGYRQMLAWMRSFGSLQRVGVESTGSYGAGLLRFLQQAGIEVLEVTAPDAQDRRRRGKNDDFDAQSAAHAAFAGTRTVTPRTRDGMVESLRILSACRKTAVAARRIALQMIHNTIVCAPDALRETLRRMTRMQLVRTLAAWRPDLSAYRDVEAAYRIGLKSLARRYLELHDEIADLDAMIGTIVDELAPELVARNSIGRNGAAQLLLTAGDNPERLRSEAGFAALCGVSPVPASSGKTVRHRLNRGGDRAANSALHIIAIGRLRTDARTKAYMARRIAEGHSKLEAIRCLKRYIAREVFTLITRRQKAIRQTRIAA

SEQ ID NO: 10325 - protein, 338 aa, unidentified
  source 1..338: note = protein_ISVpa1
MSAIKVIGIDLGKSTFHLVGHDYSGREQYRHKLSRSKLLQFISVHEPTLIAMEACCGAHWLARKCQEYGHQVKLIPPQYVKPYVKAHKNDFIDAAAIAEASTRPNMRFVSPKSEQAQVGVVIRRVRTGYIRERTATMNRIGSMLIEFGISFPRGHANMKKLFQWLADNKEPIPPLLVRELQNQLDYYNQLNERIKEQDRKIEKLSSEDELYTLLQTIPGVGPMTASCCLSCVGKPSDFSNGRNFAAWIGLVPFQYSTGGKQRMLGISKRGNKKLRELFVHAARAVMWREETAERYFGSWLLDLKRRKPFNVALVALANKLARIAWSVMTSHKPFELRV

SEQ ID NO: 10326 - protein, 347 aa, unidentified
  source 1..347: note = protein_ISShsp1
MEQITRIGMDTSKNVFQLHGVDAAEKAVLRKKLTRREMVRFFEKLPPTVVAIEACGSSHHWARLLGSLGHDVRLIAPQLAKPYVKRGKNDAADAEALCEAVSRPTMRFVPVKTAEQQAALMLVGVRERLIQKRTQLVNAIRGYGAEFGITAATGACRVVPLLERIAADETIPELARELFALQGKEYAQLQCEIERIDAKLMEWHRNDECSQRLAKIPGVGPIGATLLMMKTPDPHLFKSGRDFAAWMGLTPKDHSTAGKTRHGVITRAGDELLRSTLVVGATAVVQHARNGRGRNLTPWLIGLIGRKSPKLVAVAVANKAARVAWKLMVSGERYQCVAPPALTAVAA

SEQ ID NO: 10327 - protein, 399 aa, unidentified
  source 1..399: note = protein_ISArsp5
MIGNHESIDVFIGLDVGKGEHHAVAVDRAGKKLFDKALPNDEARLREILGSLNRHGSILLVVDQPATIGALPVAVARAAGVTVGYLPGLAMRRIADLHPGEAKTDARDAFIIAEAARTMPHTLRSIQIADEQLAELTMLCGFDDDLAKQATATSNRIRGLLTQIHPALERVLGPRLDHPALLDLLRTWPTPDALRHAGRRRIASRLTKLAPRMGERLADEIINALDQQTVTVVGTNAATIVLPQLARMLADIRQARDTVFIQVEALVEAHPLHPVLTSLPAVGVRTAARILTEIVGKDFASARHLASYAGLAPVTWRSGTSIRGDHPSRKGNKILKRALFLSAFAALKDPPSRAYYDRKRAEGKRHNQALIALARRRCDTLYAMLRDGTFYEPRLPSAA

SEQ ID NO: 10328 - protein, 338 aa, unidentified
  source 1..338: note = protein_ISRel7
MEKITTIGLDIAKHVFQVHGINGAGATVNRRKLRRDDVVGFFKALPPCLIGIEACATGHHWARVLMALGHEVRLMPASYVKPYVKRQKNDATDAEAICEAVTRPTMRFVPVKSEEQQGVLMRHRVRELLIRQRTMLVNALRGHLAEFGIVTRQGIAGVGMLIALVDDDDHDLIPPLARSALLPLIGQLREVHEKVRELDRQIHAWHRSNELSRRLETIPGIGPITASAIAATVTDASFFKSGRQLAAWIGLVPRQNSSGGKDRLGRISKQGDPYLRRLLVVGAHAVLRFSGKAKVAPTRWAAELLPHNFVAVALANKMVRIVWALMTTGRRFEATAAL

SEQ ID NO: 10329 - protein, 316 aa, unidentified
  source 1..316: note = protein_ISAli16
MALLLMFVGIDVSKDALDVHLLPGNASWRTDNTEQGWKQLMTWLERHGEPAQITVALEASGGFEKGCARKFAEAGYAVSILDPVRVRRFAEAAGQFAKTDAIDARVIARFAQTFTTTTAVFDQATERLAETVRWRRQLIEQKTALDNQLRGLTSTSLRRATRGLLTRLETLIERISDEIAKQIQANPAWAALIEPIRSIKGVGPVTVATLLAELPELGRLDRRKIAALVGVCPYTRQSGKSDAKRLIRGGRLGLRNALYMAALTAMRYDPTLKAFYERLRAAGKPGKVAVVAVIHKMLTILNARVRDALATTPSNP

SEQ ID NO: 10330 - protein, 337 aa, unidentified
  source 1..337: note = protein_ISAeca3
MENVALIGIDLGKHSFHIHCQDRFGKALLRKKFNRTKLIESLATFPVCTIVMEACAGAHYMARRLAEFGHESKLISPQFVRPFVKSNKNDFIDAEAICEAACRPSMRFVTPKTESQQTLGALHRVRESFVRDRVKASNQIHGFLLEFGISLPVGHAAIKRLPSVMAEHELPARLITMLERLHAHFKYLEQQIAEIDKELASQLGDDDLGQRLMTIPGVGPITASVLAAELGDGKHYRCSRDFAASVGLVPRQYSTGGRANLKGISKRGDKNLRRLLVQCARAYMQRLERQTGRLADWVRSMLTRRHSNVVACALANKLARTAWALAARHTEFRAMPT

SEQ ID NO: 10331 - protein, 406 aa, unidentified
  source 1..406: note = protein_ISKrh6
MENRFAVIIGLDVGKTAHHGCALDATGHKLFDKPLPQDETQLRELFTSLQERGEVLMVVDQPNTIGALPIAVARDTGCAVAYLPGLAMRKAADLYPGRSKTDARDAFIIADTARTMPHTLRQVDHDNEVLSALKVLAGFDEDLAHETTRALNRIRSLLTQIHPALERVFPGGTLSTDLVLELLEKFGGPTGFTSAGRGRVLRFARSHSRRDPSALVEKIFTALSEQTVTVPATAAVELVIPRVAGQVKELKAQRATVAHEVEAMLEDFPLASVLMSMPGIGIKTAAQILLAIGDGTGFETAGHLAAYAGIAPITRRSGTSIRGEFPARSGNKRLKNALFYSAWIASNRDPISKAYYDRKRAEGKRHNAAVICLARRRCNVIFAMLRNGTYYQPPTAPTPEPTALAA

SEQ ID NO: 10332 - protein, 337 aa, unidentified
  source 1..337: note = protein_ISShes7
MKVTLIGIDLAKNIFQVCGVNQAGKSVFNRSIKRAQLLTFLRTYPDATIAMEACSGSNYWGRELLSLGHDVKLIPPQHVKPFVKGNKNDRNDAFAICEAAQRPNLIFVQPRTLAQVDIIITHRIRERRIRIRTALTNQIRGLLSEYGIALPKGRNPLNLLLPELLEDASNQLTTIARQYMRELMEELRAINVAIGSLEKDIKLQARTHPDAKRLMGIRGVAEIIATAAVSFAGDGSGYHGARHFSANLGLVPKEFSSGGKQKLSGITKRGNSYLRRQLIQGAWSIIRYASKSNDRISVWALKVIERRGKQKAAVAIANKLARIIWALLFHRSEYRSC

SEQ ID NO: 10333 - protein, 385 aa, unidentified
  source 1..385: note = protein_ISMysp1
MTTGQVWAGVDVGKEHHWVCAVDDSGKVVLSRRLVNDEQPIRELVAEIDELAERVSWTVDLTTVYAALVLTVLADAGKTVRYLAGRAVWQASATYRGGEAKTDAKDARVIADQARMRGQDLPVLHPDDDLISELRMLTGHRADLVADRTRTINRLRQQLVAVCPALERAAQPSQDRGWVILLARYQRPKAIRQSGVSRLTKVLTDAGVRNAASIAAAAVAAVKTQTMRLPGEEVAAGLIADLAREVIALDDRIKTTDADIEGRFRRHPLAEVITSMPGIGFRLGAEFLAAVGDPALIGSADQLAAWAGLAPVSRDSGKRTGRLPHPQALQSPTAPSHVHVGVDRDPLRPRFQGLLPAQTRRRKAADPRHHLPGATAHQRSLRPHP

SEQ ID NO: 10334 - protein, 344 aa, unidentified
  source 1..344: note = protein_ISCARN36
MKVTTIGLDLAKSVLVVHGVDAQGKTVLKKQLRRDQVTAYFANLPACLVGMEACGSAHHWARQLRALGHEVRLMAPQFVKPYVKTNKNDAADAQAIGEAVARPSMRFVPVKTPEQQAILALHRARQGFVEERTAHANRIRGLLAEYGLVLPQGIAHIRQRVPLLVDEARQKLPGMFIELIGRLLEHFKVVDAQVHDLEAQIERWAQEQDDCRRLQAIPGIGPITASALVASIGDARAFSSGRQLAAWLGLVPRQHSSGGKNVLLGMSKRGDSYLRTLLIHGARSVIFARQRKAPVGSWLQKLLARCHANVAAVALANKNARTIWALLAHKRSYQAGFVPTPQQG

SEQ ID NO: 10335 - protein, 346 aa, unidentified
  source 1..346: note = protein_ISMlo2
MEQIIRIGIDTSKHVFQLHGVNAAEEPVLRKKLRRKEVVALFEKLSPTVVAIEACGGSHHWARLLQSFGHEVKLIPPQYVKPYVKRGKNDTADAEALCEAMSRPTMRFVPVKTAKQQAALMLVGLRDRLIRNRTQLANAIRGYAAEYGLIAARGMCKIEPLLERIAADKMLPDLARELFALHAKEYAQLQTQLKDVDAKLMAWHRAEACSQRLAQIPGVGPIGASLLVMKTPAPETFRSARHFAAWLGLTPKDHSTAGRVRLGVITRAGDEALRSVLVAGATAVIRHVRRGRGAVSPWLVDLLKRKPPKLAAVALANKIARIAWKLMVSGEIYGAKPMPPASARAA

SEQ ID NO: 10336 - protein, 344 aa, unidentified
  source 1..344: note = protein_ISSod14
MNYKLISIDLAKTVFQVAAFNPDNTIAFNRKINRPALLDMLRQCEPTLVVMEACYSANYWGRTIEKLGHTVKLIPARMVKAMLVGNKNDANDAVAIGETAGRPKVSLLRPKTVEQQDIQSLLRIRERLVENRTANCNQLRGFLAEYGLIVAKTRRQLMLAIPLILEDADNELSTVARGFIQRLYEFQLYLNEQIDQVAQDILALAQAMPQYPLLLTIPGVGPIVASTLLASINEVNDFKNGRQLAAWLGLTPSQYSSGTTNRLGKITKRGNQTLRRLLIHGARTVVNWCDKKDDSLSLWLQRLKQRQHVCKVTVALANKMARMVFVVMSRGQAFDMNKACKLAT

SEQ ID NO: 10337 - protein, 321 aa, unidentified
  source 1..321: note = protein_ISStma4
MQFIGIDAAKATFDIALPLSHGKYRTKAKLPNTPKGFDELLAWRAKHAPNAAVGMEATGIYHEALAQALVEAGVVVHVANPARVKAFGQAEGMRTKTDRSDAKLIARFFEAQRSEKLYPYVPPTPSEVKLRALVRRRDDLQEMLQMEHNRLDVADISVQQGIKDVIRTLEEQIKQVQKAIEDHIDNDPDLRRRHQLLTSIPGVGNTSSAQLLAMLGDLSKYSDVRQVVAHAGLNPAQRQSGNYEGKCRISRVGDANFRKKLYMPALTGKTHNPTLKSFADRLSAKGKPFKVVMCAVMRKLIHLIWGVLRSGRPFEPDVALA

SEQ ID NO: 10338 - protein, 348 aa, unidentified
  source 1..348: note = protein_ISSphsp16
MEQLIRIGMDTSKSVFQLHGVNAAEEVVLRRKLRRKDMVTFFEKLPPTVVAIEACGASHHWARLLTSFGHEVKLIAAQLVKPYVKRGKNDAADAEALCEAMSRPTMRFVPVKTADQQAVLMLMGVRDRLIRNQTQLSNAIRGFAAEFGLTAARGIDHLGRLLDQLQADNSLPSLARELFAAHAEEYKQLQAKIAEVDAKLAAWQKTEPHCNRLAKIPGIAAIGAALLVMKTPAPERFASGRQFAAWIGLTPKDHSTAGKVRHGGITRAGDEGLRSVLVAGATAVVRHVAAGTSKNAFAPWVEQLLKRKAPKLVAVALANKMARIAWKLMVTGQSYAGKTAPVEIAVAA

SEQ ID NO: 10339 - protein, 344 aa, unidentified
  source 1..344: note = protein_ISRsp4
MEQIIRIGMDTSKSVFQLHGVNAVEQPILRKKLSRREMVKFFEKTPPTIIALEACGGSHHWARLLSSFGHEVKLIAPQLAKPYVKRGKNDAADAEALCEAMSRPTMRFVPMKTADQQAALMLVGMRERLIRNRTQLANAIRGFAMEFGIVAAKGMCRIEALLERIAADPSLPELAQDLFALHGQEYRELACQIKTLDEKLMKLHRADECSKRLAEIPGVGPIGASLLLMKTPDPRMFKSGRDFAAWIGLTPKDHSTAGKVRLGVITRAGDEMLRSILVVGATSLLQQVRTGRSRHASAWLMGLLQRKRPKLVAVALANKLARIAWKLMTSGESYRQAEGQAQTS

SEQ ID NO: 10340 - protein, 343 aa, unidentified
  source 1..343: note = protein_ISPye47
MKEVITIGLDIAKHVFHAHGADVDGRMVFSRKIRRAKLLEFFASQQPCVVALEACGGAHHWARQITQQGHEVRLIPPIYVKPFVKRQKNDAADAEAICEAAQRPSMRFVAVKTEQQQASAMIFRTRDLLVRQRTQLVNALRGHLTEYGWVAPQGRGYVTMLADLLEGEMGQSLPEAALAMFKVMLTTLGHLDQQIDALDHEIKKRAREDEVARRLMTIPGIGPIAATAIAALAPPPEHFKRARDFAAWLGLTPRQMSTGGKQKLGSISKMGERTLRRLLIIGSSAVVLHANCRGAAPGSWLGRMLARKARMLVIVAQANKTARIVWAVLMKKEDYRTPVAAAA

SEQ ID NO: 10341 - protein, 346 aa, unidentified
  source 1..346: note = protein_ISAzvi4
METITMSDVALIGIDLGKHSFHLHGQDKIGREVFRRKSSRQQMMRFFGNLPACTVVMEACAGSHFIARELMALGHQAKLISPQFVRPFVKSNKNDFVDAEAICEAASRSSMRFVTPRTEAQQTLSVLHRMRESLVRDRTKTANQMHGFLLEFGVSLPKGLAVMRRLPGVLSERPLPVRLSLLLQRLHAHFDYLDKQIRELDKEVAGQLASDDLGSRLLTIPCIGPITASLLAAEIGDGRQYGCSRDFAASVGLVPRQYSTGGKARLLGISKRGDKRLRQLLVQCARVYLQRLEHQRGALADWVRALRSRRHSNVVACALANKLARIAWSIAANHTQFEAGPDASAA

SEQ ID NO: 10342 - protein, 350 aa, unidentified
  source 1..350: note = protein_ISPye16
MRTKPDPQTAAFGIDIGKKVFHVVALNAAGSVIQRAKFSRDTLLAFFDAAPNALIGMEACPGSQWLARRLVAMGHDARIIPARFVKPYVKSNKTDTVDAAAIAEAVTRPTMRFVEVRTPEQIDLQALHRIRDRLVGQRTALINQARAFCLEYGLAMRVGAGGFHADIRRHLGNVENDLTPAMRVLLEELLDDLAYIEGRIRAVTGKVEAYASQHDAVSRLVTIPGIGALGATAIVAAAGDGRQFRKARDLAAWLGLVPAEHSTGGKQTLLGISKRGNRYVRRLIIHGARSCLLHLNRANHALGGWLSALEARTHRNKAVVALANKLTRIVWAILTRPGAIYLPSRGAALS

SEQ ID NO: 10343 - protein, 401 aa, unidentified
  source 1..401: note = protein_ISBma3
MQDTQQHDAVDVFVGVDVGKGQHHAVALDRNGKRLYNKALPNDEVKLRALIAELKTHGRLLFVVDQPSTIGALPVAVARAEGVLVAYLPGLAMRRIADLHAGEAKTDARDAAIIAEAARSMPHTLRSLRLADEQLAELTMLCGFDDDLAAQVTQTSNRIRGLLTQIHPALERVLGPRLDHPAVLDLLERYPSPAALASTTEKTLANRLTKLAPRMGKGLAAEIVQALSEQAVTVPGTQAATIVMPRLAQQLAALRKQRDEVAAEVERLVLAHPLWPVLTSMPGVGVRTAARLLTEVAHKAFASAAHLAAYAGLAPVTRRSGSSIRGEHPSRRGNKVLKRALFLSAFAALRDPVSRAYYSRKIQQGKRHNQALIALARRRCDVLFAMLRDGTIYQPKSAPNA

SEQ ID NO: 10344 - protein, 314 aa, unidentified
  source 1..314: note = protein_ISSto5
MEAPVAGIDISKDKLVVYFQGKLYEFPNNKQGFEGVKQILPKGCKIGIESTGVYHINLVKYLGNEYDVRIINPLVLKRFKDFRGKKSDKNDAKKLAELVVNMGSVTNEARELTSQWDFVTRSIVRVKNRLRRDLILLGYRDSLSKENLNEVLRGEDNVVLSEVRFLLGELERLEGRKREIEEELENFVPKDSLIFTIPGIGRTLGCIILARVGDVRRFSDKRRFVAYCGLDPVVESSGKGVVSRGISKKGDAVLRRAFYLAALTAIRVNPVIKRFYEEHKGRLRGNKLIIACARKLAVITWAVLYYNKPFDAGE

SEQ ID NO: 10345 - protein, 347 aa, unidentified
  source 1..347: note = protein_ISPa62
MKRIAVDLAKSVYQVAESVRFGQVVQRKRLNREAFRRYIQEQSEPVEWVMEACGTAHYWGRLAQSLGHQVKLLHPRYVRPYRRRNKTDRNDCDAMLEAARCTDIHPVPVKSHDQQQLQQLHGLRETWKKSRTQRINLLRGMLREAGIEAPTSTAAFIRAASELVDQPELASLSRLLHIVLAEINLYEQCMAECEQQLKRWHADDDIVRKLDEVSGIGLLTASALTAAVGKPERFANGRQLSAWLGMTPREFSSGNSRKLGHISRQGNVYVRTLLIHGSRAALLAAQRCQARTPEKLTQLQRWAVQTAARIGHNKAAVALANKLVRICWAVWCHERRFSGNWQSVRPA

SEQ ID NO: 10346 - protein, 346 aa, unidentified
  source 1..346: note = protein_ISAve1
MNITTIGIDLAKSCIQVHCVDVHGKRILNKKLKREQVVPFFSNRPACLIGMEACGSAHFWANKLQALGHTVKLMAPQFVKPYVKTNKNDAADAEAICEAVSRPNMRFVPIKNSEQLAVLAMHRARQGFVKARTAQANQLRGLLAEHGIIIPKGIRHINQHLPDILEAGDNGLPGRFRQLLDRLSAHFKELDKQVRELDVQLQSWHQDSPASQKLAKIPGIGPLTASALVATIGDAKQFQNGRQLAAWLGLVPRQHSSGGKPTLLGISKRGDTYLRTLLIHGARAVLRVVKSKAQHAGSWLEGVMARRNHNVAAVAQANKTARIVWALLANDREFDAQYSTGTILAA

SEQ ID NO: 10347 - protein, 304 aa, unidentified
  source 1..304: note = protein_ISStma8
MNGIGIDVSKRQLDIGTTDGETLQVSNNRSGFSELDVWLKKRPTSQIVLEATGGYEQPVLDLLHKVGHPVARANALRARKLAQGLGQIAKTDRLDAYALAQMAALVKLPPYQPLQPWQQKMREFVRARRQAMDALTIARQQQEMVLDRELRRLLQGNITRLQTMVERLGKQIAEQVGQQPQLKTLKSMKGVGPALQAVLASYLPELGRITGKRIASLVGVAPMSHDSGTMRGKRSIHGGRAEIRQVLYMAAMSAMRHEPRLRDFYQSLRARGKEGKVAIVAVMRKMLVILNARVRDAESGLVPA

SEQ ID NO: 10348 - protein, 398 aa, unidentified
  source 1..398: note = protein_ISAar2
MITTDIEIFLGLDVGKTDHWACAVTQDGTKIWNKTLPNDEAKLTAVYQKLLALGHVLVVVDQPATIGALAVAVAQHLGIPVAYLPGLSMRRIADMYPGTAKTDEKDAFIIADAARTMPHTLRSIQVSDEDEATLGMLTGFDLDLARQITQTSNRIRGLFTQIHPPLERVIGPWLEHDAVLEVLATWPTPAQLKHAGKARIDAKLKKQGARRHTAWAGAIMDALDEQTVVVVGTDAAGLVLPHLARQMISLHAQRVDVATHLEAMVEAHPLYPVLTSMPGVAVRTAAIIIAETSGKTFASAASLSSYAGLAPNTRQSGTSIKSERVSHSGNKRLKRALFLSAFASIRFDPTSRAYYDRKRAQGKRHNQALIALAHRRLTVLFAMIRDGSLYDVPELKIA

SEQ ID NO: 10349 - protein, 344 aa, unidentified
  source 1..344: note = protein_IS1492
MSVITVGIDLAKTVFAVHGVNEAGKAILVKPKVARDQLVPLIAQLPPCLIGMEACSGAHHWARVFVQHGHTVRLMAPKLVAPYRMSGKRGKNDAADAAAICEAVTRPSMRFVPVKDEHQQATLCLHRTRQGFIEERTATYNRLRGLLSEFGVVLPQSPERLRREIGPYLDSLPGWAKRCMSELLEHTSHIEDRLVELDRAISQIAREDDRSRRLLQLRGVGSTTASALVASIGDGHDFRNGRQVAAWLGLTPGQYSSGGKQRLGSITKAGDAYLRSLLVLGARSVMANLGDKQDTFSRWIRNLIERRGYWRAAVAIAAKNARMAWAVLHYGDTFKLEQVEPTGA

SEQ ID NO: 10350 - protein, 345 aa, unidentified
  source 1..345: note = protein_ISSpe4
MKGTIVGVDLAKNVIQVCVFTNNKVHSNTEMTPNEFIDWLANFATVTIVFEACGMSNYWKQKAMTFGHEAKLISAKLVSAVRQNQKTDKNDALAIVQAALLPEVNFITGKSVEQQQLQSIMRLRELAIKQKTAMTNQLTSLLAEFNLMTSTKHGGLRGVIESTLEDAENDFSSEFRNALAAAWQQYLAVVTSIATYDQCLEKSLNTHPEAKKLLKIEGVGTLNAINLYIALGCADIGVVSTGKDASACIGLTPIQYSSGGKAKLGSIGKHVKNSILRSQLITGALSAVSQMVKREPKTTKERWVQALVERRGKKCAAVALANKTVRTAYAMLTQGTEYKAELISA

SEQ ID NO: 10351 - protein, 347 aa, unidentified
  source 1..347: note = protein_ISBj18
MKQVITIGLDLAKHVFQVHGADAEGSPVFNRKLRRSEVLRFFEKLPACLVGMEACGSAHYWAREIAALGHEVRLIPPAYVKPFVKRGKTDAADAEAISEAVTRKTMRFVPIKTAEQQAAAMVLKTRALLVRQRTQSVNALRAHLAELGIIATAGLAKVEALVAIIRDETDARLPAAARFALMAIADEIEASADQIERLERAIVAEAKHDEDMRRLTTIPGVGAITAATIKALVPDPGGFKSARHFAAWLGLTPRPHSSGGKERLGRISKMGNPELRSLLVVGATAVLRLVRNDVRARPWLKALLARRPFKVAAVAQANKTARIIWALLNKGGIYRRPDPLAIAAVTQ

SEQ ID NO: 10352 - protein, 399 aa, unidentified
  source 1..399: note = protein_IS116
MSTRHDRIWVGIDAGKGHHWAVAVDADGETLFSTKVINDEAQVLTLIETAREREEVRWAVDISGRASTLLLALLVAHGQNVVYVPGRTVNRMSGAYKGEGKTDAKDARVIADQARMRRDFAPLDRPPELVTTLRLLTNHRADLIADRVRLINRLRDLLTGICPALERAFDYSAAKGPVVMLTEYQTPAALRRTGVKRLTTWLGRRKVRDADTVAAKAIEAARTQQVVLPGEKRATKLVCDLAHQLLALDERIKDNDREIRETFRTDDRAEIIESMPGMGPVLGAEFVAIVGDLSGYKDAGRLASHAGLAPVPRDSGRRTGNYHRPQRYNRRLRWLFYMSAQTAMMRPGPSRDYYLKKRGEGLLHTQALLSLARRRVDVLWAMLRDKRLFTPAPPVTQTA

SEQ ID NO: 10353 - protein, 309 aa, unidentified
  source 1..309: note = protein_IS1663
MLTAEADKCKTKVVVNTAAGVQALLAWCAKHGAQPAQLHAILEPTGLYHEQAATALPQVRVSLVNPAQARDFAKALALRSKNDALDSYVLARYGQTLSPALWHPAPLHARQLRALLTRREALSKDLLRELNRKEKSQFSPSAPLVDGSIDKAIAFLREQIKQIERAIDQHIDNHPDLKQDCELLNSIPAIGPQAGNAILAVMHNRHIDSAQSLAAYLGVVPVQRQSGSSLNSCARLSKAGPSQVRATLYMAALVGTRHNPHIRALYQRLLKAGKSKKAALGAAMRKLVHLCFGVLKNRIPYQPNYAMNG

SEQ ID NO: 10354 - protein, 318 aa, unidentified
  source 1..318: note = protein_IS492
MNPKTNQSVNVGVDTGKFQLDIYIRPHDIYFTVSNDEKGIKEAIKKIQQHSPGRIVIEATGRLEMPFIIACANANLPFVVANPIHIKRFAGAIGQRAKTDKLDAQLIAHYGEAIQPKLSQLKPDTMQAMSDLVARRNQLLVMQTMEKNRLQILPKELAMTIKPILTAFKNQITKIENKIVALIESCPDYQAKNCILQSMKGIGKIASASIISNLPELGYMTNKQASALVGVAPMNRESGRYKGLRKIQGGRHQVRTVLYMAMMSAIQSNPVFKETYQRLVAAGKPKKVAIIACIRKMVVILNSMLRDGVMWEAPKTTN

SEQ ID NO: 10355 - protein, 427 aa, unidentified
  source 1..427: note = protein_IS650
MNYTQNQKVSQITPSTLIIGIDIAKDKHVARAQDDRGLDFGKRLIFENRIFAFEALIEWVKQHQAKHKKNHVIFGVEPTGHYWKSLAYYLTAKGYDFVVVNPMHVKKSKELDDNSPTKNDTKDAKVIAQLIKDGRYSVPNLLDGIYAELRECVKIRDQLTEQLMITEGRIQNVIQRYFPEFFDVFGDWEGKAALCTLKMFPFPSDVQKLTPKIVLEKWKPFVKRGVGIKRATKLVETAKKSIGVKVGLSFAKLELTYLIGQYELYKKQLEELDGELEAIVETLPGATQMMNISGLGAVTVGLFFAEVGDISKYSHPQQLVNLAGLSLREHSSGKFKGQTRITKRGRKRLRRALYLAIRPLVAHNSTFKALHHYYTKRPERPLKKQQSLIALCCKLLRVLFVIGQKQCEFDGSRLIKDIPQMDGLQAV

SEQ ID NO: 10356 - protein, 427 aa, unidentified
  source 1..427: note = protein_IS653
MNYTQNQKISQITPSTLVIGIDVAKDKHVARAQDDRGLEFGKRLIFENRIHGFELLLEWALRHAKENSKDHIIFGVEPTGHYWLNLAYYLTAKDFDFVLVNPMHVKKSKELDDNSPTKNDTKDAKVISQLIKDGRYSVPNLLDGIYAELREGVKLRDQLIQQLLITEGRIQNIIDRYFPEFFDVFGDWEGKAAFCTLKLFPFPSQIVKMTPEEVLRQWKPFVQRGVGIKRATKLVETAHKSIGITIGSHFAQREMSSLLDQWELFKKQLEELDQELEGVVRTIPGANEMIDITGLGVATVTTVLSEIGDLKKYKHPQQLVNLAGLSLRENSSGKFKGQTTITKRGRSKLRRALYLAIRPLVAHNPTFKALHHYYTKRPDKPLKKQQSLIALCCKLLRVLFVIGQKQCPFDGSKLLQGIPQEKTLQAA

SEQ ID NO: 10357 - protein, 359 aa, unidentified
  source 1..359: note = protein_ISAar16
MTILPQTVAKTYSYIIGVDTHARKHVYSIITYTGEHVETRDFPATSSSIKRAIAWVGRRTGADASTLWIIEGTASYGAVVTGAVTDAGYTVAEAPSGYQKAGRGVGKTDPLDAQRMAAAALPIEVQKLRVPRLNDGARAALRVLVTARDMLAVERTKYVNALTALLRVTSLGIDARKPLSSTQFLEVAGWRSREETIESQVARAEAVRLARRVGELDTHIKENTTQMTELVKLSEGKELLELTGIGPVVAAVCVAAWSHQGRLRSEAAFASLAGVNPIPASSGNTVRHRLNRRGDRRLNKALHTAAMVRMTHDEETRAYVVKRTAEGKTLKEIRRCIKRFLARRIYKILESAEVLPLTA

SEQ ID NO: 10358 - protein, 353 aa, unidentified
  source 1..353: note = protein_ISAcp5
MNRVIGIDLGDKKSHYCVLGEGGVVVEEGTVVSTPAAFNEHFGVLTSSLIAMEVGVHSRWASRVLRELGHEVVVANPVRLRLIHKSSKKSDRVDACALARLVRVDPELLGPVEHRSDEDQSMLAVLRVRDLLVRTRTRLINCARGLVKPTGTRLPSCSPVSFANRARPAVPSDLLLALDPLLDQIQSLTNLIKRYDRKIARIAETSYPATQHLEQIRGVGPLTALGFVLTIGRSSRMVHSRNAGAYFGLRPRCYQSGESNPQLGISKEGDGFMRRMLVQSAQYILGPFGPDTDLRRWGERLIARGGRGARSRAVVAVARKLAVLLHHLWVTGEVYDPLYNSRIKQRALEPVSA

SEQ ID NO: 10359 - protein, 408 aa, unidentified
  source 1..408: note = protein_ISAfe3
MELQSLFHRVIGLDVHQAQVTACAILTDPDGNVTIERRQFGAFQKDRKALALWCASHRPDTVVMESTGIYWKSPYAALEKVGIQAQVVNARHVKQVPGRKTDVGDAEWLATLARAGLLRGSFVPPAQLRELRLIARQRQNLVGMLSSEKNRLHKVLTDGGIRLGVVVSDIHGQSARAMIQALIQGSPPEAVLRLASRRLKASQEEILDALQGELSASHRFVLDETLRHIESLEAQIARFDVQLLEGLKPQKNALELLQTLPGIDTVGAALLLVEIGDDMSVFGSADRLASWTGLCPGNNESAGKRKSGRTRKGNPYVRRILCECAHAASRTHCALRSKFQSLVVRRGHKRSIIALAHKMLRIIYFMLSHGKYYRDADTDYEALSVQRNASRWIKKLIKFGFLPQHQPA

SEQ ID NO: 10360 - protein, 408 aa, unidentified
  source 1..408: note = protein_ISAisp4
MDLTPMHKRVIALDVHQAKITACAVVEHDDGRVEVTKRDFGAFKRDRRALAQWALEMAPEVVVMESTGVYWKSPFAALEAVGLIAWVVNARHVKAVPGRKTDMADAQWLATLARAGLLRASFIPPVQMRQLRLVARQRQKLVGMCSAEKNRLHKVLVDAGIRINVLVADIHGQSARAMVKALIEGQPMHEVLNHKGRLRASRQELCEALSTEQFSAVHRFVAQEIVQHIEQIEQRIARMDQYLLQGLQPWQPQLRLLQTLPGIDEQGAAMLLVEIGADMSVFGSAERLASWVGICPGNNESAGKRKTGRIRKGNAWVRRLLCEFAQAAARTRCALKAKFDALTIRKGHKKSVVALAHKMLRTIYAMLSNASHYQDKEVDYEALNVQRNAPRWIKMLRKHGFIATPAAA

SEQ ID NO: 10361 - protein, 347 aa, unidentified
  source 1..347: note = protein_ISAli8
MPLRPQPWVSHGTAAFVTHDRTVARSSIARARQVTVAHLICGVDVSSETLDARIGDSGPMKRFDRTSEGIAALAAFCRDNDVTLVAMEATGGYERLPFGLLWGHGLPVAVLNPRSVRQFAEAMGFLEKTDRIDAGLIARFAEVKRITPQPPASQSQQRLQALVTRLRQLTQTRTVQTNQRRLVTEPTVLGSIDELVSLLNRQIRAFETEVAAMIGKDPLWQRLDEAFRTIKGVADRTVARLMADLPEIGTLTGKAVAKLVGVAPLARDSGKATGKRRVRGGRDSVRSILFVVAEVVRRHDPDFAAFHKKLSDAGKPKKAIRVALARKLLVRLNAKAREVRAGLTVEA

SEQ ID NO: 10362 - protein, 414 aa, unidentified
  source 1..414: note = protein_ISArsp3
MEVIHPRCAGVDISKKDAKVCVRIQGRGGRSTTSTITTWGSMTGQILGLKEHLLDEHVDLVVMEATGDYWRPFYYLLEDDGLNIILVNAHDARNVPGRKTDVSDAAWLADLGAHGLVRASFVPPPPIRELRDLTRARTIITQERTREIQRLEKLLEDACIKLSSVASNITGVSGRLILQALIDGQTDPAALAEMAQRRLRSKIPELTQALNGRFTEHHRYMTGLYLHRIDAHTADINDLSARIEAAMEPFRFARELLVSIPGFSTTIAEIFIAETGADMSAFATAGQLASWAGTSPGSNESAGRVKSTKTRPGNRYLKGALGIAALSCAKSKNTYLGARYRRIASRRGPAKALVAVEHSILTAAWHMLTTGELYNDPGADYFTRQTPVKTMARAVRQLESLGYQVILEPLQQTG

SEQ ID NO: 10363 - protein, 400 aa, unidentified
  source 1..400: note = protein_ISAtu7
MRSIGMDVHRSFAQVAVLDRGKVTEEFRVELDYDAVVAFGQKLREDDEVILEATGNTSAIVRLLTPFVAKVVIANPLQVKAIAHARVKTDKVDARILAQLHAAGFLPEVWAADDDTLNLRRLVSERAALVRSVRRVKSRVQAVLHANLVPKYSGHLFGKGGRDWLSTAPLPRAERDLLARHLDELDWLKGKLEKLDGTMARIALDDTRTRKLMTIAGINSVVATAVIAAIGDISRFPTPDRLASYFGLTPRVRQSGDRGAIHGRISKQGNAIARTMLIEAAWSAASVPGPLRAFFLRIKDRKGLNVAAVATARKIANLIWELLTKEAPYRWARPAFVAMKMRKLELRAGAAKAHGPAGPARDYWIKEIRHREMELVAQAEAAYAAMVEAWRDRPPKPQKG

SEQ ID NO: 10364 - protein, 459 aa, unidentified
  source 1..459: note = protein_ISAzo22
MAQRVGPTRRGVDGTPVEPLSIKHPNAAGIDIGGASHYVAVPPDRVGKGEPAVREFGPHTEDLVAVANWLCACRIDTVALESTGVYWIALYELLQARGFEVWLVDAKSVRHVKARKSDVLDCQWLQQLHSFGLLSQAHRPDEQVCALREMSRLRDITIDERARHTQRMQKALTQMNVQLTNVITDITGETGMNIIRAIVAGERDRMALAQLRNYRVHASTEQIAKALEGRWSREHLFSLAHELKAYDFASEQIARLDAEIEGRLEAMRVFDKRPEANANKGRRKNTLAFDGRRALMNWCGVDLTEVPGIDVGTALKILSELGSSLTRFATAKHFCSWLGLCPGTRISGNKKLSGASKRIPNRVARALKLAALGLSRSRCAMGAYYRKLALRMGSPKAITAVAHKLARIVHAMLSGQASYVKEDQARHEARYRERAIKALQKRAQELGLTLSPQAVPAQP

SEQ ID NO: 10365 - protein, 407 aa, unidentified
  source 1..407: note = protein_ISAzo28
MEVIYPRCAGLDVHKQTVVACARIAGDGPPLQQVRTFVTTTSGLLALADWLESFGVEQVAMEATGVYWKPVWHVLEGHFEQVLANAAHVKNVPGRKTDVNDATWLADLLAHGLIRASFVPPVAVQELRSLTRTRKQFVRERSAHIQRIEKVLEDANLKLGVVLSDILGQSGRAVLQAIIAGQDDPLRLLACVSTRVKATRTELLEALRGHVSPHHRFMLKLHLTHIDALDHAIAAIEKEVGQGLEPFRQAAALLSTMPGLSAVSAHVVVAEIGIDMSRFATPGHLLSWACLCPRNDESAGKRRSTRLRRGANWLKTTLVQAAWAAIKVKGSYLQAQFHRLRARRGAKKAIIGVAASMLTAAWHMLRDGTEWQDLGATHFDRADAHKTANRLIRRLQQIGYAVSVVPV

SEQ ID NO: 10366 - protein, 343 aa, unidentified
  source 1..343: note = protein_ISAzs32
MEYYAGLDVSLEETAVCIIDAQGAVVKEAKVASEPKALIGFFEGVGLSMGRIGLEACSLTAWLHDRMAAAGLPVVCMETRQAKAAMGAMPIKTDRNDARGLAQIVRTGWFRPVHVKSAQCRSWRALLSARRLVLNKLRDIENGVRALLREVGIKLGTPGRKQFAARVRELAASDAVLAALAEPLLTIIETMLGELARLTRQVLTIVRGETVCRRLMTVPGVGPLTALAFRATVDRPERFRHSRDVGAHLGLTPRRYQSGETDIQGRISRCGDELARTALYEAAHALLVRSRKWSSLRAWGMKVAKARGMARARVAVARKLAVILHRMWQDGSEFRWGKEPVAA

SEQ ID NO: 10367 - protein, 383 aa, unidentified
  source 1..383: note = protein_ISAzs35
MSSTSNSTAIRVDLGAIFVSLELSQSKWLVTSLTPGGGEKMSKHLVKAGDIGDLLLRFAELRRKALVRTGQIFPIVVIQEAGLDGFWIHRVLLQEGIESHVVDPASVAISRRRRRAKTDRIDGEALVRTLLAYKRGEPRVCAMVRPPTPEEEDRRRIARERKVLVNERVAHVNRIKGLLYSHGVGAYEPLRRDRRERLDELRTGDGRPLPPHLQAQISRELDRLELVLAQIKDIERASTDMLTAEALAFPGAALLLGLKGIGAAAAAVLWGEGLCRHFDNRRQVAAYAGLAPTPWQSGQVDHEQGVSKSGNPRLRTTLIQIAWLWNRHQPDSALTLWSKDQVARNGGRLKKTMIVAVARKLFVALWKYTRAGVVIEGAVLKAA

SEQ ID NO: 10368 - protein, 320 aa, unidentified
  source 1..320: note = protein_ISAzvi12
MPKQIAVDLAKSVYQVAESVHAGHVNQRRRLGREAFRRYIQEQAEPVEWLMEACGTAHYWGRFAQSLGHRVILLHPRYVKPYRRRNKTDRNDCDALLEAARCAGIHPVPVKSHEQQQLQQLHGLREAWKKSRTQRINLLRGIFREMGLEAPASIAAFLHAANELVEQPEVAARRGQLQIVLAEINLYEQCMVECEQQLARWHADDAIVRRLDEVSGIGLLSASALKTAVGQPERFASGRQLSAWLGMTPREYSSGNTRKLEHISRQGNVYVRTLLIHGAASKAAVALANKLVRICWAMWCHERRFSGDWQSSRFSRGCGE

SEQ ID NO: 10369 - protein, 341 aa, unidentified
  source 1..341: note = protein_ISAzvi3
MEHSVIGMDIAKKVFQLHTVDQNTGKIERIKLRRDEVLAFFARRQPCLVAIEACGSAHWWARQLRQQGHEVRLLAPRSVRPFVLRNKTDAADAQAIWTAVQQPGACLVAIKQADQQAILSLHRIRAQLLKFRIMQSNGLRGLFYEFGIVLPEGYAPLSKAMPEAFAEAENQVPPVLLESLREQWARVLRLEEEIQVIELRLKRCLRENPDCQKIAEIPGIGLLTATAAVASLGDATTFRSGRQFAAWLGLVPRQTGTGGRVRQLGLSKRGDSYLRMLLMHGARSILARSQKSGWLERLLARRPHNVAVAAVANKLARTLWAVLAKGSPYRAERFTACPAGH

SEQ ID NO: 10370 - protein, 344 aa, unidentified
  source 1..344: note = protein_ISBdi10
MENYAGIDVSLELSSVCVVDAQGKILKEAKVASEPDALVEFFERLGFAAKRIGLEAGPLSQWLHAGLKGAGLEAVLLETRHVKAALSAMTVKTDRKDARGIAQLIRMGWFQPVHAKSVGAQEIRALLIARKQLLGRLIDVELSIRGILRGFGLKVGPVTRRSFEARIRELVAGQATLERIASAMLSARSALKAEYGRLHKAVLAIVRDDAVCRRLMTVPGVGPLVAVTYKSAIDAPHRIVKSKAAGALFGLTPKKYQSGEKDVTGGITLAGDETVRTVLYEAANVLLSRITRFSKLKRWGMDVAKRRGSKRAKVALARKLAVILHRIWIDGTTYRWTDAGPIAA

SEQ ID NO: 10371 - protein, 339 aa, unidentified
  source 1..339: note = protein_ISBdi12
MKQYVGLDVSQKETSVCVVDEVGQILFEGKAKSAPGALAALLRKRAPQAERIGFETGAMASWLWHELRRVDLPVVCIDARHAHAALSVRMNKSDQNDARGLAELVRVDWYREVKVKSEESQKIRAILVARSRLVSMRRDIENQVRSLIKEYGLLFPRAIGQQFRNLVSELLGDNHPLLSVISPLLLIHEHICQQQNKFDDEVRQLAKADETTRRLMTVPGVGVVTALTFRHTIDDPLSALTVGAYLGLTPRRNQSGETDINGKISRWGDRLLRTYLFEAATVLLYRTKKWSSLKAWGMKLAKRIGMRKAKVAVARKIAVILHCIWVDGTSFDWGQPQPV

SEQ ID NO: 10372 - protein, 332 aa, unidentified
  source 1..332: note = protein_ISBfun2
MNRTAVGVDIAKSVFQVHYVDPETGEIVNKPIKRAKFLEFFANRARCLIGMEACGGAQHWARQLMKMGHEIRLMPAEFVKAFNIRNKNDAADARAIWLAVQQPGKPVAVKTEMQQAMLALHRMRRQLVTFRTMQINGLRGLPTEYGEVMGRGRAALDKAIPEVLRRVAERLPAVVIDTLREQWNGLTKLDEQVACIERRMREWKKQDKAVQAISEIPGVGLLTATAAVAMMGDAKAFSSGREFAAWAGLVPKQTGSGGKVNLHGISRRGDTYLRTLLIHGARSVLTHAKDPGPWVEQMKKRRPLNVVVVALANKIARTIWAGTFLRYSYNFP

SEQ ID NO: 10373 - protein, 355 aa, unidentified
  source 1..355: note = protein_ISBli24
MTIISHLYAFVVGVDTHAKNHVYSVLTKSGEHVDTATFPTTKAGIKRALTWAGRRTGGDLETLWVIEGIGTYGAILADHVAEAGYTVAEAASMNARDRHATGKDDRIDARRIAGAVLSMDESRLRFPRQADGPRQGLRILVKARESMTREKTRTINALTALLRGQDLGVDARRKLSMVTIQTVAKWRIRDESVALTEARREAIRLAKRVVELDAEIKDYAARIEALVKASPGAVLLAEPGIGPITAAVFYLAWSHHGRVRSEAAFAKLAGVCPIPASSGNVVRFRLNRSGDRRLNSALYMVAVTRLSHHKKSQAYMARRLSEGKTKKETIRCMKRALARSVYRILEATNPIGQAA

SEQ ID NO: 10374 - protein, 358 aa, unidentified
  source 1..358: note = protein_ISBli31
MSIVAHLYSFFIGVDTHARNHVYSIVTNTGILVETRSFPTTSAGIKRALTWAGRRTSGDLDTLWVVEGAASYGAVLTGHIAAAGYPVVEAGRMDAKARHGVGKSDELDSRRIAASVLPLDADQLRWPRHGEGVRQALRVLLAARDAMSTERTRAINSLTALVRTIDLGIDARKSLTSDQVDEIAKWRTRNEDVDLSTAREEAIRLAKRVLALNDDLQTNHDRLTELVEASPAAPLLDEPGIGPFSAAVCFTAWSHPGRVRNEAAFAALAGVNPIPASSGNTRRHRLNRGGDRQLNRALHTVIMNRMVHDERTRNYVARHYGEEPTKKSKREIKRNLKRYLARRVYKILNALDTVPQPA

SEQ ID NO: 10375 - protein, 355 aa, unidentified
  source 1..355: note = protein_ISBli6
MMNDKQVKVYGGIDTHADTHHLAVIDQAGRRLADAQIPTTATGYQAALRFLGSWPGLVSVGIECTGSYGAAVTRVVREAGITVFEVNRPNRFDRRLHGKSDPFDAYSAAEAVLGGRASAAPKGGDGLVESLRVLRTSRSSALQARTATINQIKGMLITAPEDLRTRYKGLSTPKLIAALAASRPTATPVTAAEATAYSLRLLARRWQALTGQIEDLAGHLQRLLDDHAPDLMRVFGCGRDTVAQLLITAGDNPDRLRSEAAFAALAGVCPIPASSGKTKRHRLNRAGDRQANSALYHIVMVRLRYNQETRDYVARRTAEGKTKMEIIRCLKRYLVRQLYPLIVETLHPRKEVAAA

SEQ ID NO: 10376 - protein, 453 aa, unidentified
  source 1..453: note = protein_ISBmu4
MASISNAPVRHRTVGIDLAISAVQVAQIFDDGRAIGKPIRFRLTSTDLRRFVSAIKSGVGADTPITAVMEPTGMAWFPVANWLQRAGIKVIRVKGQRVKALRKYLSEHAKTDAADAHVLGAIPGFGGRGLDPVHVPGPEQHSLQRLTKQRHRYQELVCSARRRVLDLIRWACPALEPVLPDTVTQLTLAILGELLDPRKVVAMRRDVLARFLSQHASGNHPKSGPFIDSLVEKLKAAAEETIELHGDSVDFTALQFEVAQEVEHLRLWDRHVRAIEREVEQIYQRVHPSDALRSIPGIGATLAPLLIGVLGYAKRFRNEDHIRGFCGMFPTRSSSGGIEKPGQRLTKSGSDRVKRALYIAADVARKIDPDLAAVYWRLMVNKGHHHKQAICAVATRLINRIYRVLKTGEPYVLRDQEGNSISVQEGKRIVAAQFKVPLEVRQSRRNQPMPEPA

SEQ ID NO: 10377 - protein, 409 aa, unidentified
  source 1..409: note = protein_ISBth166
MRLFVGLDVSSFDIKACILNGEGKKLDSFSVNNDLPGATALKKRVLKCIANQEIETFKIGLESTSVYSFHPSMFLHYDEDLQRFGAKVFLMNPKQIANFKKSYSDMDKTDAIDAFVIADYLRFGRNQMSIVKESQYVALQQLTRSRYQLVRMLTKEKQHFLQHLSYKCNTFSQEVDSSIFGNAMMELFLEKFSLEELADMPLEELAEFLQTKGKNRFGDPKCVASTIQRAVRSSYRLDKVVEDSIDVLLGTSIAVIRTYQQQIKEIEKSIKRIMAGLTQTLESIPGIGPVFAAGIIAEIGQIERFDDETKVAKYAGLYWRTHQSGRFTAENTSLSRNGNHYLRYYLVEAANSVRRHVSDYQEYYVKKYNEVPKHQHKRALVLTARKLVRLVDALLRSHQLFTPERCVKV

SEQ ID NO: 10378 - protein, 354 aa, unidentified
  source 1..354: note = protein_ISC1228
MGIEAKSSGEGVTSPYSRTEHCENIHEYRCDTRVGVIGIDVSKEHLVTSKGRVRKFTNNEKGYEEILTMKPNIIVIEPTGVYSTRPCQYFKERGVKVLLVSPTLLWKEKDVRGKKTDFYDAEKLENMVNKAREYVNNPLKELVSLYLFMKDVQTKQENRLRRALFLVSDEEKLSEERLEKFSKGDFSDVKLYQLEYTGTVLREIQVLARTLLQTREELKEVRKMIEGNVPQDHVLLTIPGIGKLAAGIIIGIVGDIKRFPRPESFVAYCGLDPVVERSGRIEVRKGISKRGNKYLRSLFYFLAETQYSRNPTLLKFYETHKDKLKGRKLYTALAGKLARIVWSVWYNNKPYEVK

SEQ ID NO: 10379 - protein, 357 aa, unidentified
  source 1..357: note = protein_ISC1229
MVETLSEAKSSATGVTNPYRRTEHCDKIHEYRCDKGVGVIGIDVSKDYLITSRGRVRKYENNKEGYEEILEMKPCTIVLEPMGVYAIRPSQYFKEKGIKVLQVSPNMLSREKEFRGKKTDFYDAEKIENMVDKAKEYEYNPLRELVTLYLFLKDIEVKYKNRLERTLFLVSDNNKISKERLEKLAKGDFTQEELYQLEYTPIVVEEIKVLAKTLLETQEKLKEVRRMIEEQVPDNHVLLTIPGIGRLAAGIIIGIVGDIRRFPKPESFVAYCGLDPVVERSGKAVVSKGISKRGNKYLRSLLYFLAGRNYSRNPNLLKFYETHKDRLHGRKLYAALARKLARVVWSVWYNNKPYEPK

SEQ ID NO: 10380 - protein, 365 aa, unidentified
  source 1..365: note = protein_ISCARN18
MNRKTGMSAGQIIGTIDGLQVVGLDIAKQVFQMHTVDIATGEIVNVQIKRGKVLEHFANRAPCVIGMEACGGAHHWARELRGLGHEVRLLHAQAVRPFVSGNKTDAADARAIWLAVQQPGTKFVGVKSLAQQATLTLHRQRELLMKMRTMQTHALRGLLYEFGAVFAKGTRVMLGEVEAALQSLCNKLPQMVAESLREQVQRIKALGEDIAAIEKRLALQLRQDEAMRRIAEIPGVGVLTATAAIATMGDAHAFGSAREFCAWLGLVPRQWGTGGKVRLQGISKRGDAYVRTLLIHGARSVLMHAKEPGPWLEQIRARRPANVVIVAQAAKMARTIWAVSRLGNSHTRRAIAACGRKRPERKGSH

SEQ ID NO: 10381 - protein, 441 aa, unidentified
  source 1..441: note = protein_ISCARN20
MAMRKRDDDLVFPNAAGIDVGGSSHWVAVPRQACDEPVREFGAMTDDLHAMADWLLACGVDTVALESTGVYWIPVFEVLEQRGLTVFLVDARQMKYVPGRKSDVQDCQWLQKLMSLGFLRAAFRPTDEVCVVRAVARQRDVLLAEQASWVQRMQKALVQMNIQLTEVLTDVMGLTGQAIIRAIVAGERDPKTLARYRNARVKASETEIAKALTGNWRDEHLFVLRQALAMYDDIARHLGECDAKLQGLLSQLGAAKVDLGKTPRAGSKLRAQFDARQILANWAGVDLTRINGLGLAAVMKILSEVGPNLSRFANVKHFCSWLGLCPGTKISGGKVLSAKTRRSANRVRQALKMAAMSLSHSDSALGAFYRRLSGRMDKPRANTATAHKLARMVYFMLTRGEAFVDQGQQRYEDQQRERSIVALKRRAAALGFQIHPNPVPA

SEQ ID NO: 10382 - protein, 371 aa, unidentified
  source 1..371: note = protein_ISCARN28
MDESIKFFVGLDAHKDSIAVAVCEAGREPSRFVGTLGPDVQGVLKTLCKYGPARQVSVVYEAGPTGYGLHRELTRRGYRCEIIAPSLIPRRAGERIKTDRRDCARLAELSRAGELKAIWVPDEAHEAMRNLWRAREDAVNLRLKVRQQLKAFLLRQDRRYAGKTSWTKMHQRWIADQHFAHPADQIALTEYQLAVQATEERVQRLTAALQQIVQGWRFEPVVAALRALRGIDTVSAIGLVCEVGDISRFGTARQLMGYLGLVPSEHSSGNSVRRGSITKTGNAHARRLLTEAAWNYRFPARISNELRDRSKALSPGIRTHAWKAQVRLCSRFAQLSSRGVQANKVCVAVARELAGFVWAIAQQAAPTPEAR

SEQ ID NO: 10383 - protein, 338 aa, unidentified
  source 1..338: note = protein_ISCARN32
MVILTVGIDLAKNVFAVHGVNEAGKAELLRPAVPRDKLHELIAALPPCVIGMEACSGAHHWARLFQTSGHTVRLIAPKFVTPYRMSGKRGKNDAADAAAICEAVRRPHMRFVPIKTLEQQSRLMVHRARQGFVEQRTATLNRIRGCLSEFGIMLPLKAATVRRRACDCLEDLPGYANIVIGDLLSEVTRLDERITQYDQHIKAMAKEDARAKRLMQLSGVGETTATCMLAMIGNGNDFDCGRQFAAWLGLAPGQYSSGGKTRLGRITKAGDSDLRMLLILGARAMLVAAKNKTDATSRWAVALEARRGYWKAVVAIAAKNARMAWAVLRKGEDFALPS

SEQ ID NO: 10384 - protein, 336 aa, unidentified
  source 1..336: note = protein_ISCARN5
MKEITTLGIDLAKNIFQLHGVDRHGKPVLRRTVTRGKLLETLANLPPCLVGLEACGGAHHWARKISDLGHAVRLIAPQFVVPYRKSGKNDANDAEAICEAVARPNMRFVAIKTPEQQAALTLHRVREAIKVDRTALINRIRGLLQEFGIVLPQGAAKFSRRLLEAITDADMPMEAIGLFAALRGDLIRLDERLSECDQKVIRLAQEEAAQRLAAIPGVGPVTATAVVASVGDAKLFRNGRELAAWVGLVPRQSSSGGKSRLGRITKHGDSYLRTLFVQGAMAVIRHLGEKQDPRSQWIRDLVDRRGVQKAAVAFAAKMVRTTWVLMARGDSYQMAA

SEQ ID NO: 10385 - protein, 398 aa, unidentified
  source 1..398: note = protein_ISCARN52
MNKHSKNAAKRKMRGALRVADCNLLADAVAIGIDLGDSSSNICVIDAAGEIESESRIRTTEAGVRAYFEHLAPARVAMETGTHSGWVSRLIAEYGHHVIVANARELRKIHQSNHKNDRADAEALARMLRADPRLLAPVTLRSAAMQNDMALLRARDVLVRTRARCTTAARGLVKASGKRLPGCSTESFPRKVRAYIPAELQGALEPLLAVLEALDVQIRSCDEQIATMAQERYPASAVLEQIAGIGTLTAVAFMLTLGDCDRFEHSRDVGPYLGLVPRQADSGACSPQLGITKAGNSSMRRLLVGSAQYILGRFGPDTDLRRFGLRIAARGGKNAKKRAVIAVARKLAVLLHRLWVTAECYEPLRNERLAQTASPTATTATASTAASSTATTAVETAA

SEQ ID NO: 10386 - protein, 315 aa, unidentified
  source 1..315: note = protein_ISCARN67
MYIGIDIGKADFHCALLLEEKVATKSFPNNGKGFNQLAAWLRNRRVEHGHACMEATGGWSEELATFLHDRGYVVSIVNPSAVKAFGRSELSRTKTDKADAALLSRFCAAHRPNPWIPPSPQERRLRQLVRRRSDLVASRTAESNRLEAPGTDAVRSSIETSLAFLNEQITEIEEQIKHDIDDDPKLQNNRKLLESIPGIGTTSASSIIAEVQDMQQFQSARKIAAHAGLSPQVRQSGTSIHSSSLSPIGNRALRQIFYMPALSAMRRNPTIIAFAERLRARGKRPIQIVVAVMHKLLVIAYGVLKSQRPFDPKMA

SEQ ID NO: 10387 - protein, 346 aa, unidentified
  source 1..346: note = protein_ISCARN80
MKITTVGIDLAKEVFQIHGVDEHGKVALCKQVKRKDMAKYFANLEPCLIGMEACGSAHHWSRKLGGYGHTVRLMAPQFVKPYVKTNKNDKADAEAICEAVSRPNMRFVPEKTVEQQAILSVHKARQGFVKARTAQGNQIRGLLSEFGIVIPKGIDVIAKRMPEILEDAENGLPGTMRQLLDRLTANLKEMDRQVDELEVQIQRWHNENAASRKLAEIPGIGPITASAIVASVGDAREFKNGRQMAAWMGLVPRQHSSGGKQTLFGISKRGDVYLRTLLIHGARSVIRFAESRAKPESWLRQLMERRNKNVAAVALANKNARIVWALLAKDRMFRPDYTPTTVVAGV

SEQ ID NO: 10388 - protein, 346 aa, unidentified
  source 1..346: note = protein_ISCARN91
MKITTIGIDLAKDVFQVHGVDSHGKAVLRKQIRRGEMTKFFVNLPPCLIGMEACGSAHHWARKLSEYGHTTKLMAPQFVKPYVKSNKNDMADAEAICEAVARPNMRFVPVKNIEQQAILSIHRGRQSFVKARTAQANQMRGLLGEYGIAIPKGIHSISERMPFILEDAGNGLPGMMRNLLARLNDHFKVLDQQVDELEAQIRHWHKESELSRKLEAIPGIGPITASAIVATVGKATEFKNGRQMAAWMGLVPKQHSSGGKQNLLGISKRGDVYLRTLLIHGARSVIRYAGDKAAPDGWLRKLMARRNNNVAAVALANKNARVIWALLAKGAIFHPNHAEAAYAATA

SEQ ID NO: 10389 - protein, 407 aa, unidentified
  source 1..407: note = protein_ISCARN97
MELATIYQRVIGLDIHQAQITACAIIQQSDGTMHIEQRQFGAFKRDRRELAEWATSLKPEQVVMESTGIYWKSPYAALEAVGIYGMVVNARHVKNVPGRKTDVGDAQWLATLARAGLLRNSFVPPAKLRELRLISRQRQKLVGQISAEKNRLHKLLTDCGIRLGVVVSDIHGQSARAMVKAIIAGQSIQEVLNFASRRLRASREELFDALQGELTDNHRFVLDEIMCHIEEIEARIARFDARLLEELKGEHNKLVLLQTMPGVDLIGAAMLLVEIGTDMSAFGSADRLASWVGICPGNNESAGKRKSGRVRKGNLYARRLLCEFAHAASRTRSVFQSKFQSLLVRRGYKRSIVALAHKLLRTIYFMLSRGEHYRDSATDYEALSAQRNAPRWIKTLIRFGYLPQQSA

SEQ ID NO: 10390 - protein, 343 aa, unidentified
  source 1..343: note = protein_ISCaa7
MLNHLILVNYMQYTHILGIDISKKTIDVALSQNKANDSIVSHKFTNNLKGYQALIAWLKKHKAPIEQILVCLENTGIYHRSLVSFLQSHQAFIWVENATSIKWSNGVQRGKSDQIDAQRICFYAFRNQDKARQFSTKDESLQQIDDLSALRERLIQARVALLAPIKELRETGLKKNATMLEESSKQTLASLEKEIRAIEDKIKQIIQQQKELENKYQIIRSVPGVGFVTAIHLMIYTHNFKRFDNAKQLACYAGVAPFEYSSGSSIRGRTKVHPMANKTLKTSLHMCALSSIRNNVEMKEYYEKKVKQGKNKMSVINAIRNKILLKVFACVRDGKMHEYKQVA

SEQ ID NO: 10391 - protein, 300 aa, unidentified
  source 1..300: note = protein_ISCc2
MKTLDGWISGSGLELSVSRSPEGIAKLARFCAEHDVELVVMEATGGYEKLPFGLLWAAGVPCAIANARSVRRFAEAMGVLEKTDRIDARIIADYAATKGLTSQAPESQIQERLRALVARLRQLTQLKVAQSNQRRLVDEPQVVASFDEMLALIARQSRALEIQIADLLGADPLWRALDAALREIKGVAGRTVARLMAEMPEIGTVSNKAVAKLAGLAPIARDSGLRKGKRPIRGGRANVRSILVVVASVVARHDPDLAAFHQRLTQAGKPKMAVRVAVARKLLVRLNAKARDARATLAAA

SEQ ID NO: 10392 - protein, 340 aa, unidentified
  source 1..340: note = protein_ISCc4
MMTTTIGLDLAKSVFQVHGVSSEGQVTVRRKLRRGELVSFFRDLPPCLIGMEACATAHYWARELSALGHEVRLMPPSYVKAYLRRQKNDAADAEAICEAVTRPTMRFVPVKSAERQAILTLHRTRELLVRQKTTLIRAIRGHCAEFGLVVPQGARRVFDLLNLMREASSSSLPETAMVTMEMLGAQMEALALQIRTLERRLLAWHRENQTSQRLATIPGVGIITSTALAASISDPRLFRSGREFAAFLGLVPRQNSSGGKDRLGRITKKGDGYLRKLLVVGATSVIRRARTGVTPSAGWVQSLLERRPSRVVTVAMANKTARIAWAVMTRGESYRAMATV

SEQ ID NO: 10393 - protein, 411 aa, unidentified
  source 1..411: note = protein_ISChy1
MARVVFAGIDVSALKCDLVCLDEQGQQLAPVKSFPNSLEGASAMVEVLDGLAHKFNIQQLHIGLEATSIYSVHLRQFLLDSPKLKPYSTKVYEINPVMVASFKKAFGTKRPKTDALDAYVIAERVRFGHLTPCSRETIVTEPLRQLTRLRLHLVEMVTAEQNRALNLLFLKFSNYHQDKPFSQTFGKASLAVLQEFTPDELIEMPLEELAEFIQSHGNNKLASPENMAKALKQAARRAYRLNPKMLAACEVALSLTLQNIDHLKRQLKQLDKVICRELEAIPQTLTSVKGLGPISAAGIIAEIGDIKRFKDQAALAQYAGLTWTRYQSGDFDAEERRLTKSGNRYLRYYLVQAANSLRVHNEEYKAYYQSKYHEVTKHQHKRALVLTARKLVRLVFALLSKGQIYKGTVMK

SEQ ID NO: 10394 - protein, 427 aa, unidentified
  source 1..427: note = protein_ISChy2
MNKIEKLLLVHGSDIIFVGIDVAKKNHYARIINHIGLEPVKPFKFNNSKDGYFRIVSKILEAKEKTKAERVIIGLEPSGHYWKPLTWFLKQQGYRVVLVNPFHVKKRKEEEDNSPTKNDRKDALIIAKLVKEGKFLNCLLPEGIYADLRNLSVARKQLISKLNSAKNKLVSIIDEYFPEFEEVFKNLLGKAALWVLRHCPFPSMILNYTKEELAENLKRAANKRVGIKRAEKLIEAAQKSVGVKEGLKGAYIRLHSYLDEIEFLKGQLETIEKTMEELLKKIDIAEYLLSIPGIGVITVAGFLADVGDLANYTHFKQIQKLAGLNIAENQSGKHKGKAKISKRGRPELRNLLYKASLTLVAKNKEFKALYNYFLKRPKNPLKAKQALIAISVKLVRVMFALAKKRENYDPQKVLGEYRIMQINQLAA

SEQ ID NO: 10395 - protein, 342 aa, unidentified
  source 1..342: note = protein_ISCps1
MNKVNTIGVDLAKNVIQVSVLSPLNKELTNKELPRTKFAEFLAKQPISLVAFEACSTAHHWARLARSYGHRVKILPAKVVSSFRQGHKTDKNDALAVAEAANRPNVKEAPLKELEQQGMQSIQRSRELLVQNKTCLSNHIRGLLMEFGVFIPKGFASLFKNIPDILEDGENDIPDMFRATLNLMYQRLLDLRDDVGLLDEQVKQLVKNNEACSNLTKMEGVGPISAILLFSTLGTGDAFKNGREFSAYIGLTPKQHSSGGKASLMGISKFVANKRLRSVLIQGARSYVHRMKSVTTKKDEWLVKLIERAGYGKAAVALANKNVRTAWALLTQGTEYRKELIA

SEQ ID NO: 10396 - protein, 414 aa, unidentified
  source 1..414: note = protein_ISCps4
MTKFSVYIGIDWANDKHDVCVQVANSSARKFEVIKHSPKSINEWITSLHKQYKGQIAVAIELSKGPIVYALQKFDFITIHPVNTSMLAQYRKAFSPSGAKDDPTDAELALDLMLRYPNKIKALKMDSESVRKLTYLVEQRRKLVDDKRRFSNRLIITLKEYYPHLLDWFSHRGSGIFCDFITRWPNLQKLKRARADTLKKFFGSYPGRTAAYSVKRIQSISEAEPLTLDNAVIESHQLLAVALANQLLVAVKVIKVFDREISELFNALPDAELYKSLPGTGPCLAPRLLVAIGENRSRFNSASEIQMYAGIAPVTVRSGQKSWIHWRYQCSKFTRQSFIEWATKSIRQSYWAEIYYQQQREKGNTHQAAVRSLAFKWIRIIYRCWKTKEPYNEAKYLKALSDRNSPLLFKEKAC

SEQ ID NO: 10397 - protein, 418 aa, unidentified
  source 1..418: note = protein_ISCps5
MAKLNGNYSVYVGIDWANDKHDLCIQQANSDRRKFKVIKHSANTINDWIISLHKQYKGQIAVAVELSKGPIVYALQKYKFVTIHPVNPSMLAQYRKAFSPSGAKDDPTDAELALDLMLNYPKKIKALKMESEPVRKLTYLVEQRRRLVEDRRRFSNRLINTLKQYYPHLLDWFSHRGSGMFCDFITRWPNLQKLKRARTDTLRKFFHAYPGRTASCTEQRLVLINKAEPLTLDNAVIESHQLLAVALANQMLVVVEAIKIFDKEISVLFETLPDAELYKSLPGTGPCLAPRLLVAMGENRSRFTSASEIQMSAGIAPVTERSGQKCWVHWRYQCSKFVRQSFIEWAAKSVHQSYWAGIYYQQQRSKGNTHQSSVRSLAFKWIRILYRCWKTKEAYDESKYLKALRDRNSPLLFKEKAC

SEQ ID NO: 10398 - protein, 317 aa, unidentified
  source 1..317: note = protein_ISCps7
MNTQINQNEINVGVDTGKTQLDIYIRPLGIYFTVTNDEDGIKTAMTEIKKHKVTRVVIEATGRLEQAFIMACAKAKIPFVIANPVNIKRFAGAINQKAKTDKLDAQLIAHYAEAIKPTLSQLKPEQIRLMSDLLSRRRQLMDMQTMEKNRLQIMPKEITSSIKPVLTVLKNQLEKIDNKIHKLIESCDEYKIKNDIIQSAPGVGKVVAFNLISEMPELGYINNKEAASLVGVAPFNRESGSYKGKRMIRGGRSQIRTAMYMAMMSAIQCNPTFKTLYQRLVAVGKPKKVAIIACIRKLVITLNSMVRDGVYWDPKMN

SEQ ID NO: 10399 - protein, 394 aa, unidentified
  source 1..394: note = protein_ISCps8
MCQQYKAEASMIKHNILFIGLDTHKTFTEVAYIEGQRGAKSIHLGKILSNKAAFKKLARQLQSKYPDATLHFVYEAGPCGYWIYRLLTSLHHCCYVIAPSLIPKKTGERIKTDKRDALKLAKLLKSEDLTTIYVPEPEDEAVRDLSRSRETGMKDLKDAKYQLKALLLRNNINSKVKDNWSLQHLRWLAELVLPHPCQQIVLQEAVSTITERLKRLKRLDNELTHQVKSWRYYPVVKAIQAMRGVRLLVATGVIAELGDLSRFDHPRKLMSYLGLVPSEHSSGGKRRLGAITKCGNSRARRLLVEGAHSYKHNANISKEMQLRQEGLSKEIIDMAWQAQLRLCRRYSRLMHKGKHRNVVVTAIAREMIAYIWAISREIVLPVVDVKLRMARMPA

SEQ ID NO: 10400 - protein, 415 aa, unidentified
  source 1..415: note = protein_ISCsa3
MQDLLEICCGLDVHKETVVACLLKGSVNDDKPQKTIRTFSTLLSGLEELKAWLESENCRYVAMESTGVYWQPVYNILESALEGTMVVIVANARHMKNVPGKKTDMKDAKWIATLLRAGLLNGSFIPPQTARELRDLTRYRKSIIEELSSQKNRIEKYLQSCGFKLSNFLTDIFGVSGRAIINHIAEHGSITAEEVESYVKTRARNKLQEIKLSVNGRMNRHQREFLRLLLKHLDETYEHLGEIEKNINSELEKFKRQIEQLDSIPGIDKTAAAAIIAEIGIDMSKFKTAEHICSWAGLSPGNNESAGKKKSTRVTKGNTYIKRILCEVAWSLTRVRDSYLATWYWKVKQRRGTKKAIVALARKLLVIIYNMLKNGTDYDEKVFYEVRKKQETIRVKRLINEAKKLGLEVIVPQSV

SEQ ID NO: 10401 - protein, 428 aa, unidentified
  source 1..428: note = protein_ISCsa4
MKYTQNEKILQVTERTLVVGVDIAKERHVGRAFDFRGVELGKRIEFENRKEGMEKFLDWANKIMKANGKDNMIVGIEPTGHYWLCFEQYLRENGIKVVLVNPFHVKRSKELDDNTQTKSDIKDPKTIAMLVKDGRYTEPNIPEGIYAEMRVAMNIYERLQKQLNVLKNQIINWLDMYFPEFLEVFSDWEGKVALLTLKEMPLPCDVVENEVEGIIEYWRDKVDRRAVSRRRAMDLVEAAKRSIGKKEGRKLARQEIKYLLSQYELLKKQIEEIEAEMAELLREVPNGEELLKIKGVGVKTAVGFISEVGDIKRYEDARQIQKLAGLNIVENSSGKYKGQTCISKRGRGRLRSSLFKAMITIVAKNEEFKQLHRYYTTRENNPLKKKQSLIALCCKLIRVFYAILKKGVKYDGNKMLSDIKREALARTA

SEQ ID NO: 10402 - protein, 396 aa, unidentified
  source 1..396: note = protein_ISCth14
MHKEKHCAVVIDCWMEKIGEVNFENKPSKFPAFVEEIRKICGTKDFVFGLEDTRGFGRNLASYLTGRKFEVKHVNPVYTSAIRLSNPIIYKDDSYDAYCVARVLRDMVDTLQDAKHEDIYWAIRQLVKRREIIVKYNVMNKNQLHSQLSYGYPSYKKFFSQIDGKSALCFWENYPSPEHIWCTTPEQIYETIKAVHQAFKIERVHAIIDMIKKDGNTQKGYQEERDTIVRNIVKDIKNNQELLKDIEKQLRKLLPQTGYKLQTMPGIDLITEAKIVSEIGDINRFPNSDKLARFMGLAPVHFSSAGKGKEERCRNGNRELNAIFHFLAIQMVAVSPSGKPRHPVFREYFEQKVKEGKNKPQALICISRTLVRLIYGMMKTKTEYRPYEKKEEEGNN

SEQ ID NO: 10403 - protein, 414 aa, unidentified
  source 1..414: note = protein_ISCth6
MEKERIDIYHKRNTCFVGIDMHKDAHCAVVIDCWMNKLGEVNFENRPSRFPAFVEDVRKICGIKEIVFGLEDTRGFGRNLAAYLVGRKFEVKHVNPAYTSAVRLANPIIYKDDSYDAYCVARVLRDMVDTLQDAKHEDIFWTIRQMVKRRDLIVKSNVMNKNQLHSQLAYSYPSYRKFFAMIDSKSALCFWENYPSPEYIWKTTPEEIYQTIKPVHQALKIQRIHEIISMIERDGDTRKDYQPERDFIVRNIVKDIRHNKELIAEIDDELRKLIPLTGYKLHTMPGIDLVTEAQIISEIGDINRFPDSDKLARFMGLAPVQFSSAGKGKDQRCRNGNRALNAIFHFLAIQMVAVSASGKPRHPVFREYFEQKVKEGKNKPQALVCVARRLVRIIYGMMKTKTEYRPYEKTDDKN

SEQ ID NO: 10404 - protein, 429 aa, unidentified
  source 1..429: note = protein_ISCth8
MNFRPIAGIDVGKFFSEMAILSPSNEVIARMKIRHDSSTDVERAVELLKKTEKDFDSRPFVVMESTGHYHKILFHSLYKAGFEVSVINPIQTDSIKNIGIRKVKNDKVDARKIALLYRFQELKTTNIPDEDIECLRSLCRQYYKLSDELTAYKNRLMGIVDQLMLNFKDVFPNIFSKAALAVLEKYPAPAHILKANRNKLIALIQKNSRRSLKWATAKYELLNSKAKEFAPLSISNSSNVAMLGVYISMIKTLEENLEKVLKAIRSLIIEDMAKDMPMLALTLELLQSIPGIGLISAVTILAEIGDFSAFSKPGKLVAYFGIDPSVMQSGEFTGTQNKMSKRGSRLLRRVLFTIALANIRTKRDKTACNPVLMEYYKNKCQSKPKKVALGAVMRKLVNYIFAVLRDRKPYELRSPQEHAQMLAAKHTAA

SEQ ID NO: 10405 - protein, 341 aa, unidentified
  source 1..341: note = protein_ISDar1
MNIVTVGIDLAKNVFALHAVDQYGKAIFIKPKVARGQLLEMVAQLPPCLIGMEACSGAHHWAREFSRVGHTVKLMAPKFVAPYRMSGKRGKNDAADAAAICEAVTRPNMRFVPVKDVDQQAILCLHRTRQGFVEERTALYNRLRGLISEFGIVLPQKVERLRREIGAHLEALPGWANRCVGDLLAHADRLNEHIDEYDKAIALAAKQDQRSRQLMQLPGIGPTTASALVASLGGGHDFKNGRQLAAWVGLVPGQYSSGGKARLGRITKAGDAYLRSLLVMGGRSVLAGLGDKQDRFSRWARNLVERRGYWKAAVAIAAKNLRLAWAVMHYGEEFRRIEDLA

SEQ ID NO: 10406 - protein, 433 aa, unidentified
  source 1..433: note = protein_ISDha10
MSQFLHDFVVGIDVSSEFSVVAMLAPSGELIRKPFRIDHNPAGFHKLLDILKKEEERLQRKPIYFVESTGIFHLPLFFFLRSNNLKGFVLNPLSVHSTKNFDLRKVKNDSKDAEAIARLAKYQDVKVSLVPEPQILALRMMTREYYALSDTLTEMKNRLSTDLYLLFPGFLDVFSGAFGKTALAILKDFPSPRAILAADTDSLTSLISKTSRKGTAWATKKVNQLKDCAQLASSMPHEFSWLDAKIKVHIDGIESMQASLDGVVTQIQAMIDSELFPADAKRHIELLDGIPGIGFLTAATLIAEIGDFRLFNSAKALTAFFGLDPSVNQSGKFQGDRNKISKRGTRIGRRILFTIAMASIRTTRKGDEINPVLREFYAAKCVNKKKKVALVAVMHKLLHYIFAVLRDQKPFEIRQPEDHQSWRNTKLRQAPAA

SEQ ID NO: 10407 - protein, 415 aa, unidentified
  source 1..415: note = protein_ISDha12
MSLFVGIDVSSSDFKVRILDERGNEPVKRLRALNDQPGCEQVARYLFDACAQVNVDRLVIGLEATSVYSWPLQMFLAEDHSLAPLQPQIYSFNPKVVANFKKAYVDLPKNDWIDAWVIAERLRFGRLPEGSQVDFRYLPLQRLTRFRCHLIEMISREKNYFLTNLFLKFSTLAQGAVFSNTFGATSESLTLEFFSPEEVAARPLDELIDFLMEKGKRHFEDPETKARELKEAARKAHRLRGSLLQPINLILATSIETIHTLEKQVKKIDKAIEAEIRHFPNTLITIPGIGPVLSAGIIAEIGDIRRFPNEGALAKFIGLTWRTHQSGDFTADDTPLTRTGNTYLRSYIIQAANLVRQKEPEYKVFYQRKFSESKTHHHRRALVLTARKLVRMVDALLRSNQIYRPHGNRGNANQA

SEQ ID NO: 10408 - protein, 323 aa, unidentified
  source 1..323: note = protein_ISEc32
MSQPNLQCMGIDVAKLSLDIATTDTIEPFTVGNDEDGFAVITDKLKHTKINLILMEATGGLEAAIACKLQSEGYDVVVINPRQARDFARSMGYLAKTDKLDAAMLAQLALVIDRHPDRSRYIRHLPDEARAVLAAMVVRRRQLNHMLVAERNRLYPSHPQSRKSIDNIIDALQNELDRINEQMKQHMTAFFQEQARLIGSVKGVGDITVASLIAELPEQGKLNRREISALTGVAPLNRDSGKMRGKRTTFGGRAGVRATLNMAALVATQFNPAIKLFYQRLLAAGKPKKLALVACMRKLITILNTMLRKGEEWNASFQSQVIS

SEQ ID NO: 10409 - protein, 377 aa, unidentified
  source 1..377: note = protein_ISEc45
MHSENIAAYVGLDVHKETLAVAIAAPERLGEVRYYGTINNEAQAVRRLFQKLQGLYGNILSCYEAGPCGFGLYHQLTAMNIKCQVIAPSRIPKSPTDRIKNDHRDAISLARLLRAGELTPVWIPDLTHEAMRDLIRARAAAKRDSRVARQRILSMLLRTDKHYAGKHWTGKHRTWLANQSFSQPSQQIAFQHYCQSLEQIEDRILQLDQEISRLLPEWSLCNLVCQLQALKGVGQLIAITLVAELGDFSRFSNPKQLMAFLGLVPGEYSSGNSIRPRGITKVGNSELRRLLYEAAWSYRTPAKVGAWLIYYRPDSVTQYSKDIAWKAQQRLCSRYRSLTAKGKKSQVAITAVARELTGFMWDIALAAQSSFSQQKQN

SEQ ID NO: 10410 - protein, 412 aa, unidentified
  source 1..412: note = protein_ISEch13
MAAIDQFAAHVGLDWADKKHDVCVQFKNGERIFHVIEHTPEALDIWLNELHQKVKGRIAIALELKKGPVVYALQKYPFVTVFPVHALSLARYRQTFWPSGAKDDPQDAELALELMLRYPQKIKAIEPDNADIRLLQQLVEQRRLLVEDKRRFVNRLINTLKQYFPQPLEWFSHRDSSLFCELIIRWPSLQQLKRARSDTVRHFMNAKGGPAVAYTEQRVASIASAIPLTTDKTVIEANALMATALASQIKLVGDLIRTYDERIESLFDTLPDAELFKSLPGMGPCMGPRMLAALGDNRNRFNSAEEIQNYAGIAPVTERSGQKSWVHWRWQCAKFVRQTFVEWTAKTVNASYWAKLYYQGQREKGKSHQSAIRALAFKWIRIIYRCWKTKTRYDEAKYLLALEERKSSLLMP

SEQ ID NO: 10411 - protein, 339 aa, unidentified
  source 1..339: note = protein_ISEch3
MQVSTLGIDLAKNVFQLHGVDNSGKTVLRKRLTRNAFLPFLAQLPPCLIGMEACASAHHFARRLMQYGHQVRLMPPSYVKPYVKRDKTDARDAEAICEAVARPNMRFVAVKSETQQAILALHTERDLLIRERVASTNSLRAMLAEFGVVMETGLSALYKTLPVILEDGENALTALTRRSAARQLTHLRELEHQIAEVERELSAWFHSQEACRRLEKVPGVGMLTATYMVAAVGDGSQFTSSKQFAAWVGLTPKEHSSGGKQWLGPISKRGDRYFRYLLIHGARALAAVIERHRDKQTWFYSLLKRKPFNVAVVAQAGRTARILWSMLRGGSEYREIAPV

SEQ ID NO: 10412 - protein, 422 aa, unidentified
  source 1..422: note = protein_ISEfa16
MKGGPSMKLFIGLDVSSQKLDTCFLTDSKEILFEGSLSNDLIGASEIKQRILEYQETFGFYQIVIGMESTSVYSFHPAMFFYLDEDLKLLPVEVTVENPYRIKQYSRMFDQDKTDKIDAQIIADYLRVDLHTLSPIKEEVYVGLQRLTRSRYQLVTQMVEAKQHFLENLTYKCNTLSKELANEDNKTSIFGASIMNLLTEGITLDEFSEMPLEAAVELLQKLGKGRFKNPEQLVKSIQKAVRSSYRLGKVTKNSIDLVLGIIANEIKFLKKQIKEIEKAITALLETIPEAQCLLSVPGLGAVYTAGLIAEIGQIERFDDQSKLAKYAGLTWTKNQSGNSQSENTPLNRSGNRYFRYYLIEATNRVRSTLPEFKEYYQKKRNEVPKHKHKRALVLTGRKFVRLIDALLRNGQFYQPAKVVIEK

SEQ ID NO: 10413 - protein, 412 aa, unidentified
  source 1..412: note = protein_ISEsa2
MTVTNQFAAHVGLDWADKKHDVCVQFKNGERVFDVIEHTAEALDAWLTELHQKVKGRIAIALELKKGPVVYALQKYPFITVFPVHALSLARYRQAFSPSGAKDDPQDAELALELMLRYPQKIKAIEPDNADIRLLQQLVEQRRQLVEDKRRFVNRIINTLKQYYPQPLEWFSHRGSLLLCELIIRWPSLQQLKRARRDTIRNFLNAKGGRAMALTEQRVASIDNAIPLTTDPSVIEANALMAAALATQIKVVSEIIKTYDERIETLFDTLPDAGLFKSLPGMGPCMGPRMLAALGDNRDRFNSAEEIQNYAGIAPVTERSGQKSWVHWRWQCAKFVRQTFVEWAAKTVNSSYWAKLYYQGLREKGKSHQSAIRALAFKWIRIIYRCWKARTCYDEAKYLLALEARHSPLLKP

SEQ ID NO: 10414 - protein, 401 aa, unidentified
  source 1..401: note = protein_ISFac9
MLSVGIDTHERMHYAEIQDEKENKLWHGKIRNIKEDFEFLIDKISKIEKSNNDKVEFIFMNPTGNYHVPLKYFLENNNFTVYMVDARKTLNLRKMINLNTIKSDSEDAHILAATPWHDPKYREYTGHNRSSLSSISRERSIVVKSITAIKNYIHSDLAAVFPEFTDLYSINSAAGMAILYEYATPYSILNAGIDNIIKSIKKASKGHYRIEDINRLMETAENSIGIPDKDDAYKFKIRMNISRLRDEMNNLKNIEKEIISRSSNNGDVNNLTNLRGLGIINSAIIVSEVGNIEQFESALKLESYAGKCPDIGGSGGKTHSKGITHVRNKFLSNAVYESAISLVMNKNKEFYDIFNREIGKKKSNVQAYIAVAKRLLFHIYSIMKNHKPYKEKMVGNYKRYA

SEQ ID NO: 10415 - protein, 362 aa, unidentified
  source 1..362: note = protein_ISGdi15
MEFFCGLDVSIDETAVCVVDEQGTVHLETTVATDPAALRDAVKPFLPRLRRMGHEAGSLSPWLHPEMLALGLPAVCLETKHVRAAMSAQRNKTDKADALGIAHIVRTGWFRTAHIKSEASYRLRLILTQRSTLKRKFMDLENTIRHSLKAFGIRLGTVSRARFDTAVREAVAQDALTRDLMEAMLRAKAVLWEEYTRLHKLVVRIVAGDEVCRRFMAIPGVGPVTALGVMTAIDDPSRFRRSRDVAAYFGLTSRRWQSGTSIDVQGRISKAGDPEVRRSLYEAASVLLTRFKGRDKLRTWGLELAKRSCHRKAAVAVARKMAVIMHAMWLDGTVYDGGPAVDPEERARHIACKNRKLPRALA

SEQ ID NO: 10416 - protein, 379 aa, unidentified
  source 1..379: note = protein_ISGdi7
MSSENAIHIAIELSVSSWLVAVKTISGATKSRLHRLEGGDASGLLKLIAELQTRASTQPGDVAEVSCCFEAGRDGFWLYRLLTAHGIAAYVLEPTSILVNRRARRAKTDRLDAEGMLRVLAAWLNGDRQICSMVRVPTPDEEDAKRTHREREHLVQERLRIENRIEALLFTQGIRGRPSLRSWERDVAALRTGDGRELPPFLRAELDRLRRRLLLALELIRELETERAKTLDAAAMDDRVTQKIVSLKQIRGIGENFAAVLVREVFYRRFDNRRQLASYVGITPMPYQSGSMDRDRSISRAGNPRARTAMIQLAWLWLRYQPASGLASWFRERVGTLKGRTRRIAIVAMARKLLIALWRYVETGSIPDGLAFGTGTTAE

SEQ ID NO: 10417 - protein, 318 aa, unidentified
  source 1..318: note = protein_ISGme8
MEPNDAVVGVDVSKEHLDVYLMPTGDQKRVTNDDAGCAELTTWLITNAPCRIVLEATGGLEMLAVSTLSAAGLPVVVVNPRQVRNFAKACGLLAKTDILDAKIIARFAQAIKPEIRPLKDETSQNLAALLARRRQLVEMLVAEKNRVISAAPTVRKGIMTHIAWLTQQIDDVDKDISTLIQSSESWKAKEEILTSVKGIGPVTAATILAALPELGTISRQQLGALVGVCPYNRDSGKFRGKRAISGGRATVRSVLYMATLCAARFNPVIKAFYQRLTSAGKLHKVAITACMRKLLTILNAMVKNNQKWDHSKFTPLLH

SEQ ID NO: 10418 - protein, 348 aa, unidentified
  source 1..348: note = protein_ISGsu4
MRFYTKTHKYYCGIDLHARKKYVCILDSEGTVLVHREINCNPESFLRLVAPYREDLVVGVECMFAWYWLADLCRNEKIEFVLGHALYMKAVHGGKAKSDKIDAHKIAVLLRGGMFPLAYVYPPEMRATRDLLRRRNFFVRKRAELMAHIQNTVTQYNLAPLGIDLGVEENRHEVAQLFHDPEVRKIIEIDVAMIDAFDDVINVLEPDIEKTARQHNLHALKLLRSINGVGKVLGLVMLYEIHDINRFPTVQDFSSYCRLVKCAHESAGKKKGVGGSKIGNVHLKWAFSEAAVFFVRHNPQAKILMEKLVKIHGKGKAISILAHKLARAIFYMLKNNVPFDREKFLATA

SEQ ID NO: 10419 - protein, 260 aa, unidentified
  source 1..260: note = protein_ISGsu5
MRFYTKTHKHYCGIDLHAKKMFLCILDAQGEVLLHRNISSSPEAFLKAVAPFRDGLVVGVECMFAWYWLADLCRKEGIEFVLGHALYMKAVHGGKAKNDKIDSHKIAVLLRGGSFPVAYVYPPEMRATRDLLRRRTHIHGVGQILALVMLYEIHDINRFESVQDFASYCRLVKCSHESAGKKKGSGGAKIGNAHLKWAFSEAAMLFIRYNPPAKKLVENLAKVHGKGKAIGIIAHKLARAIYYMLKNNVPFNLEKFMATA

SEQ ID NO: 10420 - protein, 366 aa, unidentified
  source 1..366: note = protein_ISHne3
MSSFARPAIFPRSAADESTPPLRDTKPVGERVASSALVINPDSRLGRRKRSPHAQGRDMSERFVGIDVSKETLDVHVLPEGRAFAVARTDSLLAALSELGADLVVLEATGGLERVVTAALAGAQIPVVAVNPRQIRDFARATGQLAKTDAIDAAVIARFGQAIRPAPRALPDAAAQQLAELVTRRRQVIDMAVAERNRRRLVTARPALRSIDRVLKVLEAQLADIDREIGDRIHASPAWREAEDLLKSVPGVGDQTARTLIAALPELGTLSRRQIAALAGLAPFNRDSGQWRGRRSITGGRADVRSVLYMAALAGIRFNPALKACYQRLRTAGKPAKVALVAVMRKLLTILNAILRDKSPWQTQNA

SEQ ID NO: 10421 - protein, 308 aa, unidentified
  source 1..308: note = protein_ISHne4
MPQNVIGVDIAKDWIDTHCLDSGRSGRLEMTPRALKAFARRCGGALVVFEASGGYERPLAEALGAAGVAHARINPRQAREFARATGRLAKTDRVDAQVLARMGRALELSPTPPPDPARTRLAALMARRDDLTGEAAREACRLRQARDAFVRADITSLIGILKRRIARLEAEITALIKAHAPLAEAEARLRSAPGIGPITAASLIARLPELGHVSRGAIANLAGLAPHACNSGQMRGQRRIWGGRKDVRTSLYQAAFIASRYDPALKALRQRLQDAGKPFKVAIIAVARVLLTQLNAILREQRNYRPGI

SEQ ID NO: 10422 - protein, 332 aa, unidentified
  source 1..332: note = protein_ISHvo9
MYLGIDLHKRYAQVAVMDLEGEIVEEVRVKNANLDDLAQRYAGSRAVIEATSNYYHVYDTLAEYLDVTVAHPGKLTLIARSDKKTDRVDAKELARLLRLNSVPQSYVPTDEIREARALVRGRQTLVEDRTKFANKIHGLLADNGITQTVKPLSVEGREFLRELSLPSPWDSLLDSYLDVVETLTEQMTQLEAAIEERAGSLKETQLLMTIPGVSYYSALLVYAELGEIDRFDGHKEVVSYMGLNPTIRESGDSRIEGGISKRGSGRVRWILVQSAYSAVYTCKDAYLSTFFHRLNRRMNSKKAIVATARKLLVSMYYMLVREEVYDPPGVSA

SEQ ID NO: 10423 - protein, 322 aa, unidentified
  source 1..322: note = protein_ISIMl1
MSKTYIGIDIAKNTFDACFITHNTWQNCTFTNNQQGFIELTLWIQAHHYNTSTLHLIIEATGAYWEKLAHWAISHHHKVSIVNPLYIHAYAKSLGIRTKTDKQDAILLARYGAKENPPLWQPKSDNEIKLTALLKQREHHKRQLIKERTRQEALSIYVKSYTDDNIRHWSDSITQLDHQIWQLINCTPELNYRASLLATIPGIGKKTLPHLLVVIGDGSSFQSAKHLASYAGLAPRHHQSGISIHKQSSIGFSGQKELRSALFMPAVIVSFGRYPAFQKFVKRMEQKGKTKKQIIIAIMRKLLTISYAVIRQNRPFDKRIHE

SEQ ID NO: 10424 - protein, 430 aa, unidentified
  source 1..430: note = protein_ISKol6
MDIVGIDWSWNFHTCYSIEQDKVFKIKDGIAGYEKLLKTVSKDAVFVIEESFNRLGDFLLSRGKEVYLLPPKRSKEARGYHSNGVKTDSTDARCIALTYKEHPEYCIKATHDELGMLFRELLRHYRYYTDMSSRLKNKLQNELHNYFPEYARVMGNSWTDCDGRIFLLTICPDVTELRKTSDKEINRHFKANHLRYTSSLKRKVKELREKAIDWGMSKYTRDMIANVATQLLEAKREKKKITKEMEKELRKSKYNIILTLPGVGVATGMALVTAFLTHEFKNYRDFQKYCGTMPIVSQSGNFRMCRMRKNCDKKLRGILHMMAINAKKCGAWMKGYYDKKTNKEGKKPSLALRALANILVKIAFAMLRNLKAYDEELFLSSRGNKSPRLNYTTRNSIPGTKKMKKEKLSLPVSVAQTNCHLGTVSGSLSP

SEQ ID NO: 10425 - protein, 331 aa, unidentified
  source 1..331: note = protein_ISKqu3
MFPVGIDVSKNTLDLCMLYDGIKGRIKTRNIQNNRHSVENILRWLRLQHCSPEDVHVVMEATGVYHEQLATELHDAGFRVSLANPHRSWEFARGMGIMTKTDKVDAYMLACYAFLKKPHRWEPPAPEIRYLGALLRRRDVLLGDALREENRLEKYLSTDTPADIISSCRRMAQLLREEISNIERQIKAHIKASPALRRDYTLLTSIKSVGPQLGMHMLIVLRSHNFVSAEQAAAFLGVVPIEKRSGTSVRRRPRMSKIGPPQLRAKLYMSALCGKIYNKRMRNIYDEMCLRGKPKMVAIGALMRKLVHWCYGVLKTGTVFNDEDLKPVLST

SEQ ID NO: 10426 - protein, 407 aa, unidentified
  source 1..407: note = protein_ISL4
MDLLKTVFGIDVSSRKSNVCIMVNGKKVNDYAISNDMVGFNRLIGDLKQVTKPQIIFEATGVYSRRLQAFLDMHELRYVMTNPLEAKRKTKDDLHQNKTDKLDALHLAKLQSEHPQRLAYVQNKEYQELMANNRIYEQASHDLITNKNRLHKAVQLTFPEIEHLLANPRGKNYWSIALRFPHPDIVLETKEADIIDFLKGLSGIGKKRANDITQNLIRLAKVACPAVKKNSAHIRGLKMAINNILSAEEECQTALQEMAKLAPKRDLEILTSIPGIGENTALRIISELGDIRRFNNPSQLNAFVGVDPQVYESGNLTAHLSISKRGTAIGRKVLYLAINQIQSAKKVGNPCHIADYYEKRKRPSETASHKKAAIASIHKLLRTIFALIKNDQLYSYDVAKHNQRLLS

SEQ ID NO: 10427 - protein, 409 aa, unidentified
  source 1..409: note = protein_ISLhe4
MMKQNIIFGIDVSSKSSTVCVVIDRIKQGETFKITNDSFGYQDLLDRLNQYLITPLVVFEATGVYSLSLQAFLEDYHIKYLKLNPLKAKKLMDNNLRHNKTDKVDAYRLALIQFNAPQKLRAPQPKEYHELQNASRYYEELAQALIINKNQLHRNLQSAFPQIESILSTSSGRVYWTIVSLFPHAQYVLNHNENQVFQSLLAISGIGRQRAHYLTTRLYALARQAYPYDNESSITIRAIQRNIANLLSLSAERDNVINYMEKLAMQANARSLNIYESIPGIAKTTAVRLVAELGDLRRFDTSAQIDAFVGIDPGRYQSGEKDSHLGITKHGNHLARKILYRTITQMETVKATQPCHITDYYDKKKRSSNSRGYKKIAIASVHKLIRTMFALIKHDQLYDYNVATHNQRL

SEQ ID NO: 10428 - protein, 357 aa, unidentified
  source 1..357: note = protein_ISLin1
MESQEVKYVGVDCGKKSIEVVRINSENSLERRQFSTTESGINNLLQWLTLNDIVGLEAGSQSFRIAKSILNKGVQVIVLNPGNLATIYQSLKKTDKEDSLKIARLIQRFPIEELPTVPIPNDEEEDNRRLCTEQENWTKQLTQGKNRLHSLFTQAGLTQITKKHLRTKANREISVALLPSRYQKEAERILKVLDLVEQNLKLIEKEIQEALKKNKAYVQTIMSMPGIGMITSLAIMSYMGDCKRFSSAKQAAYYAGLVPRVDISGDTVRYGRIINRGCHSIRRVIVQAAWSLVRCQHGGKVKEFYQRLYLKKGAKKSIIATSRKMIEVLYVMIRTGKLFDSMPENILNRKLTQYGLM

SEQ ID NO: 10429 - protein, 369 aa, unidentified
  source 1..369: note = protein_ISLxx2
MTIIPDTGKQPQSRTSVFAGVDTHKEIHVAAVVDETGTILGTHSFSTTRAGYRALLAWVRSQGALVRIGIEGTGSYGAGLARHLAKNEVTILEVDRPDRSDRRRKGKDDDLDAINAARAALHERRTTIPKSKDGAVEALRILRVARAQAVRERRNTLQLLRMSIVAAPDEVRDQVRNLTRMQLIRHLAAWRPDTSNATDPVVAYRVALKSFGRRYIELTDEIVDLDDLINPIVESLAPQLLERVGIGIEVAGQMLVTAGDNPESMKSEAAFAMLCGVSPLPASSGMTQRHRLNRGGDRQANRALHLAVISRLRIDPRTKAYAAKKTAEGHSKMEIIRCLKRYLAREVYFLLNPGIKHIAPNTKPRKIAA

SEQ ID NO: 10430 - protein, 414 aa, unidentified
  source 1..414: note = protein_ISMac14
MVEVINKACGLDIHKLFFIATILSRSGEKQQQHFYRTPDEILAFKNWVISENCDVVACESTSDFWVPIYDALIKHLPVIVGNARDMKAFTHKKTDKIDSEFIAQLALNNMVQPSRVFPKNHRTFRSCIRLRHNLVQKRTDIKNEAHAILAPEMFSLKNVLTDIFGKSGRAILSGICSGKSVDQIIANLSPNVRKKSKQIREILDREISQDTAFRLQICLDIIKHLDNEIKILEKEIFNYAYKNHKQEMEILMSVPGIGELGAATLTAEIGDFKDFSSGDKLASWLGLVPKVYQSADKYHNGRITKRGSKEARWILTQIAQAAARTKNSRLKEFFNRKKKSIGHSKAIIALARKIATIIWHLITKEEMYEDETGYKKGEIQKRKIVETEMFSVDERIKIMSEIYVIARNDEKEST

SEQ ID NO: 10431 - protein, 311 aa, unidentified
  source 1..311: note = protein_ISMae40
MTEEKTWVGIDVSKEVLDIYVLPQGLTLQQPNSEVGVQSLIEQLHPLSPSLVVVESTGGLERALVSGLQAATIPVAIANPRKVKGFATALGKAKTDKLDAQVIAQFARAVQPQPQPVVAPQAQQLSDLVRRRQQLVEMQVAEKNRLSRASETVQLDIKAHIEEIQQRIESLNEQIQSLAQQQADWQRKNEILQSVKGIGKVSSALCLAELPEMGTLSEKQIARLVGVAPINHDSGQHKGKRMISGGRTSVRCGLYMATLVAIRHNPVIRKFYERLLTNGKLKKVALVACMRKLLVILNAMIRDNKCWQAPA

SEQ ID NO: 10432 - protein, 347 aa, unidentified
  source 1..347: note = protein_ISMahy12
MNFYHSTHRHYCGIDLHARSLYVCIIDQQGEVLLHKEIKARPEPLLALLEPFRDDLVIGVECMHCWYWISDLCEEHSIHFILGHALYMKAIHGGKTKNDRIDSFKIAMLMKGGNFPLAYVYPKEMRATRDLLRRRTRIVQHGAMLKAHVVNTTSQYNLPPNKANLKNIGAREQVRATFANRDVQHNIDLDLAIIECYHRELSKLEDHLEQQAKQHDPTSLSVLKTIPGVGRILALTILYEIGDIQRFESVQKFASYARLIKCKAESAGKVYGTQGNKIGNAHLKWAFSEAAVLYLRGNDKAQRYLQKLQKRMNKPKALSALAHKLGRAAYFMLKHQRVFDEQQFLKG

SEQ ID NO: 10433 - protein, 341 aa, unidentified
  source 1..341: note = protein_ISMass1
MQDVALIGIDLGKHGFHVHGQDRHGKAVLRRKFDRKHLITFLANFQPCTIVMEACAGAHWMARQLSALGHEAKLISPQFVRPFVKGNKNDFIDAEAICEAASRPSMRFVTPKTEAQQCLSALHRTRESLMRDRVKAINQIHAFLLEFGIGLPKGPAIIRRLPSVLAEHALPVRLVSLIERLRAHIKYLDEQLDELEKELGRQLQEDDLGQRLMAIPGVGPITASALSAEMGDGKQYGCGRDFAASLGLVPQQHSTGGRANLLGISKRGDKNIRRLLVQCARSYMRGLDRHTDRLAQWARSMLERRHSNVVACALAYKLARTAWAMAAHHTEYKMQEAVTSL

SEQ ID NO: 10434 - protein, 414 aa, unidentified
  source 1..414: note = protein_ISMba20
MIEVINKACGLDIHKLFFIATILSLSGEKQQQRFNRDDEGILALKKWVISEKCNVVACESTSDFWVPIHDSLINYLPVIVGNARDMKVFTHKKTDKIDSEVIAQLALNNMIQPSRVFPKDQRDFRSYVRLRLTLVQKRTDIKNKAHSILASEMLNLKNALTDIFGKNGRMILSGISSGKSVDQIIASLSPNVRKKAAQIREILDREISQSAAFRLQICLKLIKSLDDEIEALEKEIFNYAYQKHKREMEILMSVPGIGELGAATLLAEIGNFKDFSSGNKLASWLGLVPNVYQSADKYHNGRITKRGSKTARWILTQISQAAARTKNSKLKEFFNRKKKSIGHSKAIIALARKIATIIWHLIVNDEMYEDETGYKKGETQKRKIVETEIFSVDERIKIMSEIFAITEKQNEEST

SEQ ID NO: 10435 - protein, 414 aa, unidentified
  source 1..414: note = protein_ISMba7
MEGEINKACGIDIHKIFVIATILSRSGEKQLQRFERDDEGILSLKNWVTSEKCDVVACESTSDFWVPIYESLIDHLPVIVGNARDMKAFTHKKTDKIDSEFIAQLALNNMIQPSRVFPKRHREFRSYVRLRLTLVRKRTDIKNEAHAILSSEMLRLGDVLTDIFGKNGRAILSGIASGKNVDQIIESLSPNVRKKTAQIREILDREISQSAAIRLQICLNLIKHLDDEIETLEREIFNYAYQKHKREMEILMSVPGIGELGAATLIAEIGNFSDFPSGDKLASWLGIVPNVYQSADKYHNGRITKRGSKVVRWILTQIAQAAARKKNSRLKEFFNRKKKSIGYAKAIIALAKKIATIIWHLIINDEMYEDETGYEKGEVKKRKIVETEIFSVDERIKIMSEIFAITEKQNEEST

SEQ ID NO: 10436 - protein, 378 aa, unidentified
  source 1..378: note = protein_ISMch4
MTRDHLTAFAKTLTHDDHVVVEATGNASAVAEVIRPHVGRVVIANPRQVRLIAEARIKTDVIDATVLARLYASGFLPEVWIPDEATLALRRQVTRRTQIVRQRTRLKTMVQSILHAHLVPPCPHADLFGPRGRTWLLAQPLPGDESDAVARHLREYDRLSEDLKVVERELAREARADANVTRLMTIPGIDLVVAVGLIAAIGPVARFAGPDRLVAYLGLNPSVHQSGSGKPRHGRITKQGRSHAPTMLVEAAWQAARGPGPLRAFFQRVSARRGPHVAAVAVARKLAVIIWHLLTRGEDYAWVRPALHAKKLRELELRSGEPARRGQRGTAYAYNLTRVRQEERRRVEQAEVAYRHLTEGWSRRGRRVPTGAAKEERL

SEQ ID NO: 10437 - protein, 345 aa, unidentified
  source 1..345: note = protein_ISMdi10
MAHYAAFDVSDKETAIHVLDEHGKLVWKGKRPSEPEALAEALRRHAPELVRVGLETGRLAPWLYHSLKELRVPVICLDARHARAATALQRNKTDARDAETLAQLVRVGWYREARVKGWAAHAVRHLIGARAQLVGMATDLSNQLRSLLRTFGRRVTGRAGGAFEARVREQIKDKPEMDAVAEPLLTAWRAIRDQIAVLDRRLIEAARDDATCRLLMSCPGVGVVVAASFAAAVEVPEHFRRSRSVGAYLGLTPRRRQSGESDHSTGVSKRGDKLLRSYLFEAAASLLIRVQRPSALKTWGVGLVQRLGFKRAAVAVARKLGVVLHAMWRANRPFEAWPSAVAAAA

SEQ ID NO: 10438 - protein, 341 aa, unidentified
  source 1..341: note = protein_ISMdi12
MDPIAIVGLDLAKRVFQVHGARADGSIVLRKKLSRPQVLTFFAHLPACVVAMEACASAHEWGRAIRELGHEARLIPPVYVKPLIKRQKNDAADAEAIAEAALRPTMRFVAVKSESQQARAMIFRTRDLLVRQRTQLIDALRGHLAEHGVVASQGVTNVQQLAAAVDDVATSLDPLVVDLSRLYHDQIRDLDGRISELEKRVLQEAKRTGVTARLMTMPGIGPVTAMAIETFAPPMETFKRGRDFAAWLGLVPRQFSSGGKPVLGRVSKMGQRDIRRLLIIGAIMVVRRSTRKGAPAGSWLARMLARKPRLVVAIALANKMARAAWAMLTKNEDFKVPVPTA

SEQ ID NO: 10439 - protein, 337 aa, unidentified
  source 1..337: note = protein_ISMdi14B
MEYFAGLDVSMEETHVCVVDRDGVVAHQAKVASTPADIAQELAKAPACRRVVFETGRMAPMLFHGLADHGVPVVCAESRQAYQALKSLTTHKTDRNDARGLAHLARTGFFKPVHVKSLPAHAVRSLIIARKKLVGQRVTLENQIRGLAVVFGVRLPRALSPAFIEQALRSSEGIAGLSAAMRGLIGARAAVLAAVAAIDADIKRMVRASDACRRLMTIPGVGQLTALAFTAAVDDPERFRRSRDVGPYLGLVPRRYQSGEVDYTGSISKCGDRRVRTLLYEAANVMLTRCRQPLKLKAWALAIAKRSTMRKARIALARRLAIIMHAMLRQGTEFRPA

SEQ ID NO: 10440 - protein, 343 aa, unidentified
  source 1..343: note = protein_ISMdi9
MDYYVGIDVTLELSSLCVLDAAGQIVCEAKVASEPEALIGYLTRLALPLTRIGLEAGPLSQWLHAALVEAGFAAVLLETRHVKAALSAMIVKTDRRDARGIAQLLRMGWFRSVHCKSPPAQEVRALLVARKQLQAKMRDVELSLRGLLRGFGLKVGEISKGQFAARVRMLVTGHSMLERVAEAMLQAREALRAEFSKLHRAMLAIVRTDEVCRRLMTVPGVGALIAVTFTSGVDDPARFRHSKDVGAHFGLTLRKYQSGETDITGAVSRVGDVMVRTALYEGAHILLTRAGRFSALKRWALEVAKRRGMKRAKVALARKLAVVLHRIWVDGTSFRWGSESLPA

SEQ ID NO: 10441 - protein, 425 aa, unidentified
  source 1..425: note = protein_ISMex12
MIRPQLTPPAGVLVAIDVGKARNEVLIEVPGSGRRRRLSVLNTRAEHDRLIALLSNLGQPVTCGFEATGNYHRPIAWRLLQAGFTVRLISSVGLARTREALHNGWDKNDPKDAQVMLHMIRIGASQVYHDPLAAGFNDVQELSKTHDAVSRAKTEVLHRILTHYLPLYFPEVDRFRHNSRSDWFFAFLDRFPTPASITALSKEAFIAAAWDVVGRKVAKAQLLGDIYETARSSIGLPVPPDAPAVSMFRLVIGEVRGLIQQRDAIEATADALLRDSSDYKLLRRIPGIGPINALTILAEAGDLRRFGHHRQFLKFCGLDLATQQSGTFRGQTKLSKYGNARLRRTLWLAGQVAIRQRENGFRDKFERYIARDRHDADLRRKALTAITAKMARVVHAVIKTGADYRPFVEGPVPGGRTPLSRAVRA

SEQ ID NO: 10442 - protein, 309 aa, unidentified
  source 1..309: note = protein_ISMex17
MDAPVVGIDVARDRLDIHVHPSGANFAVDRTTEGVEQLCERLRPLKPKLVVLEATGGLEAMVARALTTWRLPAVIVNPAQVRAFAHALGQRAKTDRIDATVIARFAAATNPPVRARADAETQALADLVTRRRQIVGLIASERQRASQAPPCIRDSVRRVIEALEQEQSVIDRSIDAEVDRSLEWRRKETLLTSVPGVGPTIARTLIAELPELGSLNRKQVAALVGLAPWTRQSGQWRGRSFIAGGRAPVRTALFMGAMVASRHNAALKTFRDRLIAAGKPKLVALIATARKLITILNAILRDGTPWQPA

SEQ ID NO: 10443 - protein, 336 aa, unidentified
  source 1..336: note = protein_ISMex29
MSELATVGIDLAKSVFQIHGVDENGRVLVRRQLRRGQLLAFFEKLPRCLIGMEACGGAHDWARKLQELGHDVRLMPPSYVKPYVKRGKTDAADAAAICEAVTRPSMRFVAVKSEACSSVLVVHRTRDLLVRQRTQICNAIRAHMTEFGVIAAKGAQNVDRLRTQLHQMPEAARLPVSLLFEQLVDTDTRIERLTREIEAAHAQSETSQRLVTIPGVGKLSATIIAATTPDVGNFDCARDYAAWLGLTPKPHSTGGKQRIGRISKMGNRYIRRLLYLGAMSQIMVRHRCGPRQDWLSDMLARKKTKVAAIALAHRMARTIFAVLRDGSRYQPLATAA

SEQ ID NO: 10444 - protein, 307 aa, unidentified
  source 1..307: note = protein_ISMex31
MLGIDLGKNSCSLVGFDPAGTVVLRRRARRDTIVGLTAKLPACVVAMEACCGAHHLGRLLAAQGHTIRLMSPEYAKAKKNDDRDAEAIAEAATRPTMRFVPLKAPDQLDMQSLHRVRSRLVSMRTMLMNQLRAILLERGLVFPQGRRKFETAVGILVTDPQAQIGARIQALVAEIREEWASLDGRIEALDREFVAHARADEAARRLVSISGVGPMTATALRAAVDDGSAFASARDLPAWLGLVPRQHTTGGKPKLLGISKRGNAYLRGLFIHGARAALASLSKVEDATGRWLRSLLECTPVGPKIAV

SEQ ID NO: 10445 - protein, 347 aa, unidentified
  source 1..347: note = protein_ISMex9
MDQQHHVGLDVSVKETAICIVDPHGKVVHRATVESHPEVIGRHLIDLGHAYARVGLEAGPLSPWLYAGLVEVGLPAICVETRHMHAALSARINKTDRNDALGIAQMMRVGLFKPVHVKTPASQQRRLLLTSRKLLQRKAYDIESDLRGQLRNFGLKVGVVGAVGFEQRVRDLVLDLPFVAAVVLPLLEARAALRTQLAKLHKMLLEQVRTDPVCRRLMTAPGVGPVVALTYRTCVDNPARFGRSQCVGAHYGLTPRLYQSGETMRVGRISKCGDRMMRAALYEAALVLLTGSRGRWSGLKVWGLAVAKRRGMQKALVAVARKLAIVLHRMWRDGTDFRWSAAATTAA

SEQ ID NO: 10446 - protein, 342 aa, unidentified
  source 1..342: note = protein_ISMlo3
MQITTIGLDLAKSVFQFYAVDAEGHVVVRKALRRAQILSFFAKLPCCLVGMEACGTSHHWARELTKLGHEVRLMPPAYVKPYVKRGKTDAGDAEAICEAVTRPTMRFVPVKSADQQAALALHRTRDLLVRQRTQLVNMLRGLLAEFGIEIARGLHHALRLAGRLSNGEAPEVPPLARLVVKVLADQIGTIQLQLARLEKELLAWHRSNELSQRLATIPGIGVISATALAASVIEPERFRSGRQFAASLGLTPLQNCSGGRERMGRISRMGDRYLRRLLVVGMTSLVRRARIQPASVDPRLSAMLARKPARLVTVAAANRTARVAWAIMTRGGTFRAPISAAA

SEQ ID NO: 10447 - protein, 414 aa, unidentified
  source 1..414: note = protein_ISMma5
MDGEINKSCGLDIHKRFVIATILSRSGEKQQHRFARDDDGILDLKNLVTSEKCDVVACESTSDFWVPIYEALIDHLPVIVGNARDMKAFTHKKTDKIDSEVIAKLALNKMVQPSRVFPKKHREFRSYVRLRLTLVRKRTDIKNEAHAILSSEMLHLGDVLTDIFGKNGRAILAGISSGKNIDQIIESLSPNVRKKSVQIREILDREISQSAAIRLQICLNLIKHLDEEIEVLEREIFNYAYQKHKREMEILMSVPGIGELGAATLIAEIGDFRDFPTGDKLASWLGIVPNVYQSADKYHNGRITKRGSKVARWILTQIAQAAARKKNSRLKEFFNRKKKTIGYAKAIIALARKIATIIWHLITNDEMYEDETGYQKGEVKKRKIVEADIFSVDERITIISGIIAIMGKKEGEST

SEQ ID NO: 10448 - protein, 342 aa, unidentified
  source 1..342: note = protein_ISMmg1
MTIAVLGIDLGKNSCSLVGLDGTGRVVLRRRMRRETVIAFSAKLPGCVVAMEACCGAHHMGRALVEQGHTVRLMSPEYVRPYVKAQKNDDRDAEAIAEAATRPTMRFVALKSEAQLDVQTLHRVRDQLVGERTALMNQVRAILLERGYVVAQGRAKLAACLTELLDTEAGSSLTARMRTLVAEVRERWQSLDRRIAALDAEFAEQARTDENARRLTTIPGIGALNATALVAAIGDVATFARGRDLAAWLGLVPRQVTTGGKPKLVGITKRGSKYLRKTLIQGARAAMPTLRQGDTRLGQWLRGLLARAHTNTAVVALAAKMARIVWALLRHGRVYEATAVAA

SEQ ID NO: 10449 - protein, 350 aa, unidentified
  source 1..350: note = protein_ISMno16
MSEIIRIGLDTSKSVFQLHGVDAAERPVLKLKLSRSKMLAFFAQQPPCLVALEACGASHHWARTLAGLGHTVRLIAPQHVKPYVPGSKTDAADAAGLCEAVSRPQMRFVPVKTAEQQAALMLTGLREQWLKRRTQVSNSLRGYAAEFGLAAPQGLARLAELVARLAEDPRVPALARPLFAALWAEYQEIEARVQEADRQLKVWQRGNASCRRLSAVPGIGPVGAALLVLKTPAPQAFRSGRDFAAWLGLTPKDHATAGKPRLGGITRAGDEQLRSVLVAGAMAVLRQLKPESAGLAGWLTRLVARKARRLVAVALANKLARIAWRLLVSGASYDPARAGPPMGGAEPARA

SEQ ID NO: 10450 - protein, 326 aa, unidentified
  source 1..326: note = protein_ISMno20
MQCKAQARTGQLARIVVIQEAGLDGFWIHRALVSEGIESYVVDSASIAVSRRHRRAKTDRIDGEALVRTLLAYKRGEPRVCAMVRVPTPEEEDQRRLCRELKTLVGERIRHVNRLKGVLFSQGITDYEPRRPDRRERLDELRTGDGRPLPHHLKALVLRELEIVELLDRQIEVVKAERDALLASAQPEEVPSKAVQMLLGLKGIGSGFAGALWSEGLFRHFDNRRQVAAYAGLAPTPWKSGKIDHEQGVSKAGNPRLRAIAVEMAWLWLRHQPGSALSLWYQDRVRCLGGRMKKVITVALARKLLVALWKYVTHGVVIEGAALKVA

SEQ ID NO: 10451 - protein, 348 aa, unidentified
  source 1..348: note = protein_ISMno22
MKYYAGLDVSLEETAICVVDDTGRIVREARAASEPGALVQALNQIGLPLERIGLEACSLTAWLHDGLREAGLPAICIETRQANAAMKTMPNKTDRNDARALAQIMRTGWFRQVHVKSRQCRLWRSLLVARRTVLNEMRSIENVVRGILREAGLKLGTPGRAAFAGRVRELAEGVPLMTQLVEPLLEVLASMLTALAGLTKQVMDLVKKEAVCQRLMSVPGVGPITALAFRATIDRPDRFRRSRDVGAHLGLTPARYQSGETDIQGKISRCGDELARTALYEAAHTLLVRSQKWSSLRAWGMKIARRRGMARARVAVARKLAVILHRMWSDGTAFRWGKEPAEGATLAG

SEQ ID NO: 10452 - protein, 386 aa, unidentified
  source 1..386: note = protein_ISMno25
MTQMPSSSSPTPDYERTLVLAIELSNVSWVLAAQIPGLPRLKAKRSVAPAPEALLAAIEGYRERARAAGRDVERVIAIYEAGWSGFWLARWLGMRGIETHVVQPASVPVDRRARRAKSDGIDAELLLRTLLAWLRGEPRVCSMVPVPSEADEDARRCVRERTELVTERVALVNRIGAVLATLGVRDYNPLLRNRRERLDALRTALGTPLPAHARAKIGRLLDRLDLVCAQITALERERDAVLDQEAPDRAGAMIQQLSTLRGIGVQSATILVREAFVRVFANAKALGAYAGLAATPYSSGGTVREQGIGKAGNRRLRTVMVELAWLWQRYQPGSAPVNWFRTRVSGAGARGRKVMVVALARRLLIALWRFATQGVLPEGAVLKPAS

SEQ ID NO: 10453 - protein, 326 aa, unidentified
  source 1..326: note = protein_ISMno29
MQGKEVSKQETAGKSSVGIDVSKSWLDVHVLPSGQAQRFANTEVGIRQLKRWLGRFALGLVVVEATGKWHRQTRRSLHASGLPVAVVDPFRVRMFAKAQGIWAKTDRLDARVLAQFAAVMAPPQRPPASDALEALQELVAARDSAVAEQTALKNQLAAAASPFLIRQLQDRLARIAADIEALAGEIRRLIAADPGLARRHAILVSIPSIGDTIAATLVASLAELGTCSSRQIGLLAGLAPVADDSGARQGVRVIWGGRPPVRRVLYLAALSAARHNAGLKAFHERLIANGKKPKCAIIAVARKLAVLANSLIAQDRLWTPNQPQQA

SEQ ID NO: 10454 - protein, 357 aa, unidentified
  source 1..357: note = protein_ISMno7
MRVSPRSPWACKPATEHGAALTFTVPNPDSRSGPSPHLQGRVMDEHRTIFVGIDVSKDRLDVHLRPSDEALHVPRDAKGLDTLARRLGRLPVALVVLEATGGFEASVAAALAAVGLPLCIVNPRQIRDFARAMGRLAKTDTLDAEVIALFAERIRPPARPLPEPERSHFAELVSRRRQIIGMIGMETNRRDQAVDKQLIRRVDRHIAFLERELVELDRDIDRAIKASPVWCETEALLKSVPGIGDVTARTLLAQLPELGTIGRHQLAALVGIAPINRDSGLMRGRRSIAGGRTSVRGVLYMAALTAIRRGSPFRPFYERLTQRGRPRKVALVAVMRKLLVTLNAIVRERTPWRPLAA

SEQ ID NO: 10455 - protein, 348 aa, unidentified
  source 1..348: note = protein_ISMpo4
MRYYAGLDVSLAETSVCVVDEEGKILREAKVASEPEALATWLGALGLPLTRVGLETGALAGWLCEEMTELGVPNVVCMDARHARAAMVAMTHKTDRNDARGLAQMLRTGWFRQVHVKARRTMELRTLLTSRKTLVLKIGDVENQIRGSLCLFGIKLGTAKRRTFSERVRELTADLPRVAAILDVLLQAHSAMLLSLDRLNRMVLEIAREHAVCRRLMTVPGVGAVVGLTFIAAIEDPARFAKSRSVGAILGLVPRKHQSGEVDRNGRITKTGDTEARAALFEAAHVMLHRVKKWSGLKAWATKVAQRQGNKRATVALARKMAVVMHRMWVDGTTFRFSAVEAPAAATA

SEQ ID NO: 10456 - protein, 340 aa, unidentified
  source 1..340: note = protein_ISMtsp17
MGEVSTVGIDLAKSVFQVHGSDPSGTVVFRKKLRRAQVLAFFSTLPRCVVAMEACASAHYWAREIALAGHDTRLIPPAYVKPFVKRQKNDMADAEAICEAAQRPTMRFVQGKTAQAQACAVVFRTRDLLVRQRTQLINALRGHLTEFGYVVRQGVGHVGQLVAVIRDQTSDVPAQARPVLAVIADTLQALQAQIALLDREIAQRAKDDAVAKRLMTIPGVGPVIAAALVALAPAASTFRRGRNFAAWLGLVPRQHSSGGKERLGRTTKMGERSLRRLLILGASSATKVAARDPDKAGAWLAGMLLRKPRMLVTVALANKMARIVWALMAHGGCYRAPATA

SEQ ID NO: 10457 - protein, 369 aa, unidentified
  source 1..369: note = protein_ISMtsp6
MGHATEVFVGIDVSKMRNAVAVADGERGGEVRYLGEVDASPESMRRLVRRLAGQHERLHFCYEAGPTGYGLHRLITELGHSCSVVAPSLIPRKPGDRVKTNRRDAVALAKLLRAGELTAVWVPDEGHEAMRDLVRARAAAVESLRVHRQQVSAFMLKHGRVYPRKKGWTMRYLCWLQEQRFDHPAHQIALQELVEAVRIAKERVARIEAAIAEFVPTWSLGPVVRALQTLRGIDLIVAVTFATEVGDISRFESPRQLMGYLGLVPSERSTGDTVRRGGITKAGNGRVRHMLVESAWTYRHPPKVGAKKLYRMEAATPRVREIAWKAQTRLTARYRALIGRGKKATVVCTAIARELVGFMWSVAREARVA

SEQ ID NO: 10458 - protein, 337 aa, unidentified
  source 1..337: note = protein_ISMtsp9
MLSPGLVAGIDAGKHFLDLGFHPAGKPMRCDNNPAGIKRLIAALRQRGVIRVALEAIGPYAQPLVHALVAAGFTVALIDPRRVKAFRTAEGLIAKTDRLDAALIARFAHRMSESLRPVPTADQVTLKALSTRRRQLTELIAMEKTRLAQALDPMIVDSHRAVLEALTRTCAEVEAELDRRIAADPALARKRIILTSIPGIGRRIAGVLITDMPELGRLDRKAAASLAGMAPHPSQSGAHPGRHAIAGGRPCLRTAFYMAGMVAARACPAFRKPYRAMRDAGKPAKLAIVATGRRVVTLANALLRANKTFDQSDLVTCQATSGTAPLATTGQHQHALA

SEQ ID NO: 10459 - protein, 320 aa, unidentified
  source 1..320: note = protein_ISNgo2
MRNTVGLDISKLTFDATAMVGKTEHSAKFDNDSKGLDQFSDRLKSLGYQNLHICMEATGSYYEEVADYFAQYYSVYVVNPLKISKYAESRFKRTKTDKQDAKLIAQYCRSAQESELVKRQKPTDEQYRLSRMTAAYAQIKSECAAMKNRHHAAKDEEAAKAYAEIIKAMNEQLEVLKEKIKEQTEKPNCKEGVKRLETIPAIGRMTAAVLFHHLTSSKFETSNKFAAFAGLSPQQKESGTSVRGKGKLTKFGNRKLRAVLFMPAMVAYRIRAFPDFIKRLEEKKKPKKVIIAALMRKLAVIAYHVHKKGGDYDPSRYKSA

SEQ ID NO: 10460 - protein, 318 aa, unidentified
  source 1..318: note = protein_ISNgo3
MNIIGPDISKDTIDATLHKTNGSIHYIKFKNNDDGLKQFRLWIKGNRIRKVYIGMEATGIYYEKAADMLSSYYTVYVINPLKIKDYGKSRFNRTKTDKADSNLIADYIKRHQDTLIPYQIPKNKALQKLINLKNQLQQQQKQIKNRLHSTEEDFIRNIHQDLIDTIQDKMEQVKIAISEQIKKQTDNNHYRNLQTIPSIGKDTASVLYAQLTEKHFKTANQFVSYAGLSPAIIQSGTSVRGRGRLSRYGNRRLKSTLYMPALCAYRFNAFPKLINNLKKAGKPKMVIIVAIMRKLAKPAYYIVKTGQPYDAERHRLNQ

SEQ ID NO: 10461 - protein, 318 aa, unidentified
  source 1..318: note = protein_ISNme5
MLIRYIDIAKRNFVIAVSSLSKTKTETNNPKGIAHTIEYLKKHKVALVVTESTGGLEIPAAKAIRRAGIAVIIANPRQTHQFAQSQPLTKTDAKDAKMPAFFAQMTAQKEDSQTMPYQPPTEAEEVLEALVNRRNQPADMRTAEKNRLHQVHETQVGSVKQLIAHFDRLIDELDKQIDDHTHTHFDGKAQVAEQIKGIGSITTATLMVMLPELGRLSHKRIAGLAGIAPHPRESGETKFKSRCFGGRSAVRKALYMATVAATRFEPLIRDFYQRLLSEGKPYKVAVTACMRKLLTISNARMRDYFAENDTAENGIRTA

SEQ ID NO: 10462 - protein, 364 aa, unidentified
  source 1..364: note = protein_ISPa111
MNATTKSIRTESSAVMLAIDLAKDVFELAFADATGRIVERKRLKRKPFAQCLQNRAPLRIVMEACGSAHAWARRFQRLGHAVELLPAQHVRPYVRRNKTDRADAAGLLEAARCGDIRPVPVKTPEQQGTQGLHRIREHHKAERTAAINTVRGLLREFGFAIPAGADKVRPAVLATLEDGDNDIPMELRHALAGLLDRIADCQEAMGAIEKHLADIAKRDTRSQRLMAASGVGLITATAMSAGIGDFARFPSGRHFASALGLTPREYSSGGSRKLGRITKRGDVYLRTLLIHGARSALVAAHTARKRGQPLDRTQQWALALAERKGHNKAAVALANKTARRLWAAEHHGTPFDPEHVSRPEAHAA

SEQ ID NO: 10463 - protein, 347 aa, unidentified
  source 1..347: note = protein_ISPa21
MKRIAIDLAKSVYQVAESIHVGRVDRRRRLDPEAFWRYVQEQPAPVEWLMEACGTAHHWGRLMQAAGHRVVLLHPRYVRAYRRRNKTDRNDCDAILEAARCEGIRPVPVKSVQQQQVQQLHKMREAWKKTRVQRINLLRGILREMGVAAPNGTQAFLRQACELIERPEVCALRGALQVLLAEISLYEQSMRECEDQLARWHADDDIVHKLDEVSGIGLLTASALKTAVGKPERFASGRHLSAWLGMTPNEYSSGERRKLGRISCKGNTYVRTLLIHGARAALLAAKRCQARTPQRLTQLQRWALQTAERIGHNKAAVALANKLVRICWAVWCHERRFSGDWQSARPA

SEQ ID NO: 10464 - protein, 352 aa, unidentified
  source 1..352: note = protein_ISPa25
MHATTVAVDLAKDVFELAFADGQGRVIERKRLTRRAFARAFEQRPPLRIVMEACGSAHHWARRFVRQGHAVRLLPASDVRPYVRGNKTDRNDASGILEADRCGGIASVPVKTPEQQAIQAQHRLREHLKRERTATINLLRGVLREFGIVIAQGAARVSAQVRDALEDGDNDLPMPLRHSLGEQLQRLLHIQADMRAIEQRLDEYAQRDVAVQRYQRVPGVGLLTATALRAGAGDLARFRSGRQLSAWLGLTPREHSSGQQRRLGRMTKRGDAYLRTLFIHGARAVLQGARLKHKRGQPLDPLQAWALGVQDKRGHNKAACALANKLARRLWAMEHHGKPFDAHHVSRQPLAA

SEQ ID NO: 10465 - protein, 342 aa, unidentified
  source 1..342: note = protein_ISPa29
MTIVTVGIDLAKNVFAVHGVDAAGKPALVRPSVARSNLLELIATLPPCLIGMEACSGAHHWAREFEKLGHTVRLMAPKFVAPYRLSGKRGKNDAADAAAICEAVTRPQMRFVPHKSIEQQGQLMVHRTRQGFVEQRTATLNRIRGLLSELGIVLPLKAATVRREALARLEELPGWANTVIGDLLSEVTRLDERITEYDRHIALMARHSTQAQQLMQLGGIGQTTAMALISTVGNGHDFACGRSFSAWLGLVPGQYSSGGKQRLGRITKAGDAYLRSLLVMGARAVLAAAMNTRTPKQDPISRWARSLAERRGYWRAVVAIAAKNARMCWAVLQRGDAFKMPA

SEQ ID NO: 10466 - protein, 352 aa, unidentified
  source 1..352: note = protein_ISPa34
MQSITAGVDLAKQVFAICLMDDAGHVTGRRELRRDGFHQWLAEQPEGMIVAMEACSSAHYWGRECQRHGLQPRLMAAQFVKPFRKRALIKNDRQDAEAIATAARQGNMRFVAVKDEPQQVRLSWHRVREGYKKDALAVRNRLRGLLAEFGVVIPESVTALKRTLADLDRHELPTGLLRLIRLQQEHLKIIEAGMAECDARIAEQATADERCQRLRALTGIGPVTADAVVASVGNAAEFRNGRQFAAWMGLTPTQFGSGGKVSLGHISCRGDRYLRTLLIQGARSSLQRAKLIPTDTATPEQQWIVQLAARMSYGKVLVAIANKHARQVWAMLARSEAYDPEAWLKHPMVQRT

SEQ ID NO: 10467 - protein, 365 aa, unidentified
  source 1..365: note = protein_ISPa55
MDTVTKIVGVDLAKNVFSICELDDGGRVRQRRDLQRAAFTAWLAQLSAGTVVAMEACSGAHHWARRCLSHGLVPKLMAAQFVKPFRKSQANKNDRNDAEAIATAARQGNMRFVSVKTVEQQARLSWHRVREGYKTEALSIGNRLRGLLAEFGVVVAQSDTALRQALGDAALRSGLPAMLGELLDALAGHWRQVHERLAECDARIAAHAKADVRSVRAQQILGVGSLTADAVVASVGDGQDFRNGRQLSAWLGLTPVQRSSGGKDRLGSISCRGDSYLRTLLIQGARSSVQRAKAVVPEKATPEQIWIKDLCSRMPFGKLLVAIANKHARQLWAMLARQEEYDAEAWLRHPMVQRPASRKGAVMPA

SEQ ID NO: 10468 - protein, 352 aa, unidentified
  source 1..352: note = protein_ISPa71
MHASTVAIDLAKEVFELAFADAQGRIIERKRLSRRAFIRSLETRPPLRVLMEACGGAHCWARRFQRQGHAVRLLPARDVRPYVRGNKTDRNDVAGILEADRCAGIAPVPVKTPEQQGIQALHRLREHLKAERTATLNLLRGVLREFGVAVPLGSTKVPAAVRDALEDGDNDLPMALRHSLAEQIDRLSQLARDMLAIEQRLEEFASRDVAVQRYRTVPGVGLLTATALRASAGDLSRFRSGRQFSAWLGLTPREHSSGQQRRLGGLTKRGDVYVRTLLIHGARAVLQAARMKQRRGQDLDPLQAWALKVQDTRGHNKAACALANKLARRLWAMDHHGTPFDPRHVSERPRAA

SEQ ID NO: 10469 - protein, 342 aa, unidentified
  source 1..342: note = protein_ISPko7
MSEIITVGLDLAKNVFQVHGADAAGRAVLRKKLRRDQVLAFFGQLPACVVAMEACGGAHFWGREIGKIGHEVRLIPPAYVKPFVKRQKNDMADAEAICEAAQRPTMRFVPVKSEETQGAAMVFRIRELLIRQRTQAINALRGHLGEFGKIVPQGAANVSKLIAIVEDPEGGLPADAIPTLKVLVATLAHLEAEISKLDTEIARCAQDNEVARRLMTVPGIGPLIATAIAVLAPPPETFRKARDFAAWLGLTPRQHSTGGKQRLGATTRMGERSLRRLLIIGANSVIIKRHVHAAARPGTWLGGMLTRKPPMLVRVALANKMARIVWALMARGGVYKAPATAA

SEQ ID NO: 10470 - protein, 334 aa, unidentified
  source 1..334: note = protein_ISPlge4
MNNVSLIGIDLGKNSFHVHCQDATGKALSRKKFTRAKLFEFLANCPSATVVMEACAGAHYIARKISDMGHKPKLISPQFVRPFVKSNKNDFVDAEAICEAASRPSMRFVAPRTESQQEILALHRIRESLVRDKVKTTNQMHAFLLEFGISMPKGLAVIRRLSVVLTENELPPYLAKLLVKLQSHYLYLVEQIRDIENELKLAANQDDTTQRLMSIPSVGPITASVLMANLGNGQQYKQSRDFAAATGLVPRQYSTGGRPTLLGISKRGNKNLRRLLVQCARVYILHLEHQSGYLAEWVRHQLSKKHSCVVACGLANKLARIAWAITTKQSVYMA

SEQ ID NO: 10471 - protein, 334 aa, unidentified
  source 1..334: note = protein_ISPlu13
MNTIALIGIDLGKHSFHVHCQEPSGKALLRKKFTRTKLMEFLADCSPATVVMEACAGAHFMARRIADLGHEAKLISPQFVRPFVKSNKNDFIDAEAICEAASRPSMRFVQPRTEAQQAMRALHRVRESLVRDKVKTTNQMQAFLLEFGISMPKGIAVIKRLSTVLAEHPLPPYLAQILLRLQAHYHYLVGQITEIETALSQEIIQDDTGQRLMTIPGIGPITASVLSSQLGDGKQYSRSRDFAASTGLVPRQYSTGGRTTLLGISKRGNKTLRQLLVLCARSFMQQIEHRQGKLADWVKQQLERKHSNIVACALANKLARIAWAITTQHTVFVA

SEQ ID NO: 10472 - protein, 392 aa, unidentified
  source 1..392: note = protein_ISPpu11
MDSPPPRHHSATVVFEEANGSEGETMKKHSSKHDSLSSTDVELCTTICVDLAKQVFQLAGEDATGRVIYEDRIKSRQAFHDFLLRLPTTVAVLMECGPGAQAWARLLQAKGNPVRILPAQRVAEHRSGAKNDRNDCYAILRAGRDTSIASIPIKSTTALAIQALHRIRRGNIKRHTALGNQIRGLLLEHGVSMPQGDAAINKHVPQALEDASLPLPDLLRELLDELLMDWLSLGERITALSRRLEATAQEDKVAQRLITIRGVGPIIATAIVAKQTDPSRFASGRMYSAFFGIVPDQHSSGNKIRLGKMSKRGDGYIRSLMIQGAHSVLSQLRPDSDQPDDRRLLRWLSRLGRKEAAIRLANRNLRIIWALLQSDQVYQRKPNEKPEAAMSL

SEQ ID NO: 10473 - protein, 347 aa, unidentified
  source 1..347: note = protein_ISPst6
MKRIAIDLAKSVYQVAESVQVGRVDRRKRLDAGAFTRYVQEQIEPVEWVMEACGTAHHWGRLMQEKGHRVVLLHPRYVRPYRRRNKTDRNDCDAILEAARCQDIRPVPVKSVQQQQVQQLHKLREGWKKSRVQRINLLRGILREAGVEAPNGIKPFLRQACELIERPEVRALRGALQVVLAEINLYEQSMRECEEQLARWHADDEIVHKLDEVSGIGLLTASALKTAVGKPERFASGRHLSAWLGMTPSEYSSGERRRLGRISCKGNVYVRTLLIHGARAALLAAKRCKARTPERLTQLQSWALQTAERIGHNKAAVALANKLVRICWAVWCHERRFSGNWHSTKPA

SEQ ID NO: 10474 - protein, 443 aa, unidentified
  source 1..443: note = protein_ISPsy35
MARNQSRQRFELVHPHCAGIDIGSREHWVAVDRDHEQPVRSFSTFTDDLIKLADWLETLKIEVVAMEATGVYWIPLFELLDARGFKVYLVNSRATRQISGRKSDVLDCQWIWQLMSHGLLRGAFRPDDAICSMRALIRQRASKVRNQAQTLNRMQKALSQMNIQLANVISDISGVTGMKILRAIIAGERDPAVLAELTDRRIKASKETIARSLHGNWRLEHLHALGQEVECYDFFEQQIGACDKAITDALSQLPEREEAPQPSRKILRSPHRCAADQAALHQSLWRVMGVDLTAIPTIGVDTALIIAGEIGPDLSRFPTMEHFCSWLGVAPPTRISGGRQLSGKSQKTLNNAAQALKQAASNARNDKSFIGASHRARLARMDTSCAIKATAHQLARLIYAMLTKGQPYVEQGIEAFEERSKEKQYRALLRKARKLGLDLVKAS

SEQ ID NO: 10475 - protein, 316 aa, unidentified
  source 1..316: note = protein_ISPtu2
MKTNTNQNINVGVDTGKFQLDIYIRPLDIYFTVKNDEKGIAEAIKKIKIHSPNRIIIEATGRLEMPFIIACAKANLPFVIANPIHIKRFAGAIGQRAKTDKLDAQLIAHYGEAIKPTLSTLKPDIMQTMSDLVARRNQLLVMQTMEKNRLQILPKELISTIKPILTAFKNQIKKIENKILKLIESCPEYSAKNTILQSMKGIGKIAAASIISNLPELGYMSNKEAGALVGVAPMNRESGRYKGLRKIQGGRHQVRTVLYMAMMSAIQSNPVFKSTYQRLVAAGKPKKVALIACVRKMIVILNSMLRDGVMWEAPKV

SEQ ID NO: 10476 - protein, 376 aa, unidentified
  source 1..376: note = protein_ISPye19
MESNTFIGLDVHKASISVAVARGERGGEVRHWGSVANRPDHIRKLVEKLAASGAQLRFCYEAGPCGYGLHRQLVEMGHDCIVVAPSLIPLKAGDRVKTDRRDALMLAKLHRAGELTAVWVPDAAHEAMRDLIRARAVAMRVTGKARQHLQGFLLRHGRIYPGKKGWTGPYRRWLALVRFTQPAQQIVLQDYIDAVADAEARVERLTGQIADLLPQWSLAPVVAAVQAMRGVGFIVAVTVVAEVGDFHRFDSPRQLMAYLGLTPSEHSTGASVRRGGITKAGSGLARRALIEGAWSYRMQARISVKLLARLEALPQVVRDIAWKGQLRMCQRYRHLVAAGKAKVVVVTAVAREMLGFVWAIARAVTAPPVSPVATAV

SEQ ID NO: 10477 - protein, 346 aa, unidentified
  source 1..346: note = protein_ISPye22
MDYYAGLDVSLKEISICVVDEGGRTVARGVCPADPEGVAGWFCTRLLSPRKIVHESGQLSIWLQRGLERLGLPALCIDARRAHKSLSARPNKSDAADAEGLAQLARTGWFTPVHVRSEESDRLRSLIGARAQLISLRKDLEGHVRGILKTFGIRLTGIGKGGQRQAFRDQLAAAGARDLVLRTIADGFIAAHATLCQAAAELDSAVKEKATKHPVVRRLMTIPGVGAIVALSFVALVDDPGRFQKSENVGAFLGLTPRRHQSGGVDWSGRISKCGDGAMRNLLFEAASALIGRVQRFSTLKSWAVRLAGRRGFAKAAVATARKLAVLMLTLWKNETEYKWKEEAVA

SEQ ID NO: 10478 - protein, 343 aa, unidentified
  source 1..343: note = protein_ISPye25
MKLFVGLDVSLEKTAICVISAHGKIVKEAQVASEPEALSCWICDQNGAIAAVGLEAGPLSQWLHRGLSDAGLPVVLMETRQVKGALKAMPIKTDRRDAEGIARLLHLGWFRPVHCKSVSAQEVRAVLSARKAVQQGFITLEMSLRGLLRNFGLKVGTISRGRFEQRIRELAAGNLMLEAATEPMLRARSALRRELAGLERNVRQLAQEDPVCRRLMSMPGIGAVVALTYRSAVDDPARFTSSKKVGPWVGLTPSRNQSGERDVSGGITKAGDVNLRRALCQAATVMMHRGRASWLRTWAAKLARRRGAKRAMVALARRIAVILHRMWKDNTDFRFDIPVLHAG

SEQ ID NO: 10479 - protein, 342 aa, unidentified
  source 1..342: note = protein_ISPye26
MSDITTVGLDLAKDVFQVHGADGAGRAVLRKKLRRTQVLEFFSQLRPCIVAMEACGGAHFWGREIGKLGHDVRLIPPAYVKPFVKRQKNDAADAEAICEAAMRPTMRFVPVKSEETQGAAMVFRVRELLIRQRTQAINALRGHLTEFGQIVPQGASNATRLIAIVEDPESDLPADAIPTLKVLVAALMHLEAEIAKLDAEIARRAKENDVAQRLMTVPGIGPLIATAIAVLAPPPETFRKARDFAAWLGLVPRQHSTGGKQRLGATTKMGERSLRRLLILGANSVIIKRQVHAAAQPGTWLAGMLSRKPPMLVRVALANKMARIVWALMAKGQDYRAPAATA

SEQ ID NO: 10480 - protein, 334 aa, unidentified
  source 1..334: note = protein_ISPye27
MKEITTVGLDLAKNLFQVHAVDENGAVLVRRQVRRAQVLLFFSRLHPCLIGIEACAGAHHWARELAKLGHDVRLIPPSYVKPFVKRGKTDAADAEAICEAVIRPNMRFVPLKTEKQQAVLMQHRARDFLVRQLTQLANAIRAHLGEFGIVVPKGVHNMGRLIAEAETAGLPPEARMPLDLLAGQFRDTKQRIDVMTAQIKADAEVDETARRLQTMPGIGPITASVLAATLPNVSSFRSARDLPAWLGLTPKPHSSGGKERPGSISKMGNRYIRRLLSLGAMGVISARRLSEPSTDWLGRLVATKPLKVAAIALANRMARAIWAMLKTGEAWRPA

SEQ ID NO: 10481 - protein, 399 aa, unidentified
  source 1..399: note = protein_ISPye32
MRSIGMDVHRSFAQVAILEGGKTTEIRIDLDHEAVVAFGQALRSDDEVVLEATGNTAAIVRLLTPFVARVVIANPLQVKAIAHARVKTDKVDAKILAQLHAAGFLPEVWAADDQTLNLRRLVSERAAAVRSIRRVKSRVQAVLHANLVAKYTGHLFGKGGRRWLASAPLPKAERDLLIRHLDELDWLGGKLAKLDQTLAGIALDDSRMRKLMSIAGINVAVATAVIAAIGDISRFSAPDRLASYFGLTPRIRQSGDRGAIHGRISKQGNTIGRTMLIEAAWSAASVPGPLRAFFLRIKDRKGHNVAAVATARKIAALIWQLLTKEAPYRWARPAFVAMKMRKLELRAGAPRAHGPAGPGHDYWIKEIRHREMELVAQAEAAYARMVEAWRDKPSKPNKT

SEQ ID NO: 10482 - protein, 342 aa, unidentified
  source 1..342: note = protein_ISPye46
MSEITTIGLDLAKHVFQLHGADASGRAVLRKKLRRDQVLAFFSQLPSCVVVMEACGGAHFWGREIGKLGHEVRLIPPAYVKPFVKRQKNDVGDAEAICEAALRPTMRFVPVKSEETQGAAMVFRVRELLIRQRTQAINALRGHLAEFGQIVPQGAANAARLIAIVENQDSDLPADAIATLKVLVAALIHLETEIARLDAEIARRAKEDEVARRLMTVPGIGPLIATALAVLAPPPGTFRKARDFAAWLGLTPRQHSTGGKQRLGATTKMGERSLRRLLILGANSVIIKRHVHAAARPGTWLGGMLTRKPPMLVRVALANKMARIVWALMAKGGVYQSPAAAA

SEQ ID NO: 10483 - protein, 344 aa, unidentified
  source 1..344: note = protein_ISPye48
MKLFVGLDVSLEKTAICVVSEHGKIEREAQAASEPEALTRWMGHLDGTIAAIGLEAGPLSQWLYRGLTEAGLDVVLMETRQVKGALKAMPIKTDRRDAEGIARLLHLGWFRPVHCKSVSAQEVRAVLGARKAVQQGMIALEMSLRGLLRNFGLKVGAISRGRFEARIRELATGNPMLVAATEPLLRARAALRQELAGLERRVRQLAQDDPVCHRLMSMPGIGAVVALTFRSAVDDPARFTSSKKVGPWVGLTPSRNQSGERDVSGGITKAGDVNLRRALCQAATVMMHRGRATWLRAWAAQVARRRGRRRAMVALARRIGVILHRMWRDGTVFWIEPSVTSHAA

SEQ ID NO: 10484 - protein, 419 aa, unidentified
  source 1..419: note = protein_ISRel25
MTDCDITAFTPVLAAIDVSKERHEVLIEAPDKKRRRRVIVLNNLDEFDRLIGLLRSYQRPVRVAFEATGNYHRALAYRLGLAGFEIKLISSIALARTREALHNSWDKNDPKDAQVILHMMTIGAEQFYHDPLMRGTNDIQELSKTHDMISRSKTELWHRILTHYLPLYFPEADRFHRSSRSDWFFAFLELFPSPHFIAAMNKDAFIKAAWEVVGRKVGKERLLADIYATSARSIGLPVAPDSDAICMFRMILAEGRSLIAQRNEIEARAVAMLKDNADYQLLCTIPGIGPINALTIMAEAGDLRRFQHHRQFLKFCGMDLATIQSGMFRGQTKLSKYGNARLRRTLWMAAQVAILQRANSFRDKFERYITKDRHNTHLRRKASTAIAAKMARTVHAVIKSGEPYRPFFEGTIHSGRTLL

SEQ ID NO: 10485 - protein, 388 aa, unidentified
  source 1..388: note = protein_ISRel9
MEPASIHPTAVRIDLGAIFVSLELSRSTWLITSLSPGSGEKMSKHVVAGGNVAELLDRFEQLQQKARLRTGKLFPIVTIQEAGLDGFWIHRVLETHGIESYVVDAASIATSRRRRRAKTDKIDGEALTRTLLAFKRGEPRVCAMVRAPDPKDEDRRRICRERKVLIAERVRHVNRVKGLLFAQGVSGYQPLRKDRRQRLEELQTGDGRELPKHLKAQINRELDRLELLLEQIAAVESERNSLLSMDEQPAVEATSPAAMLLSLKGVGAEFAAVLWTEALSRHFDNRRQIAAYAGLTPTPWMSGTIDHEQGVSKAGNPRLRTTMIQLSWLWLRNQPASALSRWFVDRVQSNGGRLKKAAIVALARKLLIALWKFVTAGVVIEGAVMKTA

SEQ ID NO: 10486 - protein, 349 aa, unidentified
  source 1..349: note = protein_ISRle1
MEEITTIGVDIAKNVFQLHGINAEGQVVLRKALRRGQMQPFFEALSPCLIGMEACATAHHWARTLIASGHDVRLIPPNYIKPYLRRQKNDAADAAAICEAVTRPSMRFVPVKTEDQQATLMLHSARELLISQRTALINALRGHFAELGIVAPQGARNVRQLIAILEDERYSPQAVRTALAPLATVLIEIEGQITKLDKALLAAHRNNDVSIRLATVPGIGPVIATCLSASVSEPKLFEGGREFAAWLGLVPRQHSTGGKPRLGSISKMGNRHLRKLLVVGAYAALYRMKKGTADTPLANWARGLLSKKPFKLVAVALANKIARIAWAIMARNVNFQSEHVSRCSDLIPA

SEQ ID NO: 10487 - protein, 341 aa, unidentified
  source 1..341: note = protein_ISRta3
MNTTTYGLDIAKTVFQLYWVEPSGKCCNRRFNRTKLIEFLAKREPGRVALEACASAHWWARQLQGLGHKPVLLHARYVRPFVQTNKTDAADAKAIWTAAQQPGMREVAPKSETQQCVLAVHAMRSLRIKMRTMLVNQLRGMLVEFGIHFRRGRQAGLDEIVQRLPEIESRVPPTLFEAVHQQLRSLESLDREIAEYDRQITAWGRQDRACQTISAIPGIGMLTATALVATIGEARTFKSGRQLAAFLGLVPKQTGTGGKVRLGGISKRGNPYLRTLLIHGARTVLSHLRRKNQGGWSQALAQKRPTNVVAVAMANKTVRTVWALLAHERTYDRDYVSVRPA

SEQ ID NO: 10488 - protein, 341 aa, unidentified
  source 1..341: note = protein_ISRta4
MNTTTYGLDIAKGVFQLYWVEPSGECFNRRFTRKALLNFLAKRAPGRVALEACGSAHWWARQLAALGHKPVLLHAAFVRPFVQTNKTDVADAKAIWTAVHQPGMRQVARKTETQQAILALHGFRALRVKMRTMLINQLRGVLFEFGIHFRRGRRAGLEEIKQHMAELEQQLPRVLFDSVAEQLQDIARLDEEIGQIEIRLNTWLKEDHDCQTVAAIPGIGPLTATALVATIGDVHAFRSGRQLAAFLGLVPRQRGTGGKVNLGGISKRGDTYLRTLLIHGARIVLSHLRRKGQSHWSTALVQRRPANVVGVAMANKMARTAWALLAHNRTYDRDYVSVKLA

SEQ ID NO: 10489 - protein, 342 aa, unidentified
  source 1..342: note = protein_ISSba8
MDIKVIGIDLAKNVFQVCVCLMDNSVMSNKKVNRNKLLDKIRQFPEGSLIAMEACGTAHYWGRQFQALGYQVQLIPAQHVKPFVANQKNDANDALAICEAAFRPNIHMVPVKTVEQQDIKALRCVRSRLVQNRTAMVNQIRSLASESGVIFSVGRLQLQASLSRILADNEHELSHTLHHLLKFLYEDLCVLNEKINQIERDIKALCQIQPRYNALLSIPGFGPLVTASFMSELGSGHQFKNGRQLSAWCGLVPSQSSSGGKVRLGSITKNGSSELRVLLIHGARAVGRFASKRDDRLGRWFNALALRQGRHKAVVALANKIVRIGWRILTSNDNFDVNKAFA

SEQ ID NO: 10490 - protein, 347 aa, unidentified
  source 1..347: note = protein_ISSde11
MKVSTISIDLAKNVFQLLGMDKHAKQVFSKRLNRTQLSEFMSQQPVCDVVFEACYSSHYWGRKFLAMGHNVKLIPAQHVTPFVRGSKNDKNDAMAIYEANFRPNIRFVPIKTEAQQEILMLHRVRERLVKQRTACTNQIRGVLVDFGICFPQGHSAFERAMWDIINDESQRPIIKLMANDFWDEYQTVSTRLDRINRLIKQLVEQDPNGKILLSIPGVGPIIASAFAAAIGAGQAFNSAKELAVWLGLTPQQFASGNKSINGSITKRGDGYLRKQLIHGARTVVSHASKKNDDLNQWITQLRNRKSICTTVVATAHRLARLMWILLHKQVPYAPQYGAYQGISHEAN

SEQ ID NO: 10491 - protein, 323 aa, unidentified
  source 1..323: note = protein_ISSde13
MKSHHMQNINVGVDIGKSQLDIFIRPLDIFFTVANDEKGIRDAINKIKIHKPQCIVVEATGRLEMPFILACSEAKLPFVIANPMHVKRFAGAIGRRAKNDRLDAELIAHYAEAIKPKLTELKPEKIRLMSDLVTRRNQLLTMQTMEKNRHQILSKTLLSTIKPILTALKNQITKIELKIQKLIEECTEYQSKNIILQSMPGIGKIAAASIISNVPELGYITNKQAASLIGVAPMTKESGDYKGKRVIQGGRAQVRTVLYMAMMSAMQCNPVFKAIYQRLLGLGKPKKVAIIACVRKMVVILNSMLRDGVMWDENTGENKLLTP

SEQ ID NO: 10492 - protein, 337 aa, unidentified
  source 1..337: note = protein_ISSde14
MKVTLIGIDLAKNVFQVCGINQAGKSVFNRALKRSQLMAFLFKYPDSIIAMEACSGSNYWGRELLTKGFEVRLIPPQHVKPFVKGNKNDRNDAFAICEAALRPNLTFVQPRTLEQTDMILAHRIRERNVENRTSLINQIRGLLNEYGVVIAQGKERLKLAIPELLENADSGLTEIARQHFQALLEEWKQVDRTIKNLEKNIKSQAKLNHQTNRLMGIKGVAEITATAAVAFAGNGAQYHNGRHFAANLGLVPREYSSGGKQKLGKITKRGNNYLRRLLVQGAWSIIRYVGNSTDRMSVWAKKLIERRGKHKAAVAVANKLARIIWSMLYNQTEYRAN

SEQ ID NO: 10493 - protein, 357 aa, unidentified
  source 1..357: note = protein_ISSep2
MNDLDHPQLIFESTGIYSRGMERFCCVNQINYIQMNPLEAKFKTSALRSWKTDQADAHKLACLGPTLKQTDSLPIHELIFFELRERVRFHLEIENEQNRLKFQILELLHQTFPGLERLFSSRYSIIALNIAEIFTHPDMVLDIDKEVLITHIFNSTDKGMSMDKATKYALQLRVIAQESYPNVDRHSFLVEKLRLLIQQLKQSIHHLKQLDDAMIQLAQQLDYFENIHSIPGIGKLSTAMIIGEIGDIKRFKSNKQLNAFVGIDIKRYQSGHTHCRDTINKRGNKKARKLLFWVIMNIIRGQHHYDNHVVDYYYKLRKQPNEKPHKTAIIACINRLLKTIHYLVMNHKLYDYQMSPH

SEQ ID NO: 10494 - protein, 397 aa, unidentified
  source 1..397: note = protein_ISSer1
MTSGYDVFCGLDVGKGAHHATGLAPDATRLHDAALPNTEAGLRKVFDRLARHGQVLVVVDQPASIGALPVAVARACGHDVAYLPGLAMRRIADLHPGNAKTDARDAYVIADAARTLPHALRRVDTGEETLAELEVLVGFDDDLAGEATRIGNRIRGLLTQIHPALERVLGPKIQHPAVLEILSRCGGPDGIRKAGQRQLTSIAATRAPRMGQALVEAIVSALDEQTVSVPGAKTAELVLPRLADSLKTVLQQRRTVADEVEGILDAHPLAGVLTSMPGIGVRTAARILLEVGDGSAFKTSGHLAAYAGLAPVTRRSGSSIRGEHPNRGGNKHLKRAFFLAAFAALADPTSRAYYQRKRDEGKKHNAALICLARRRCDVLHAMLRTKTKYQAPAPQAA

SEQ ID NO: 10495 - protein, 367 aa, unidentified
  source 1..367: note = protein_ISSfr2
MDETITYVGLDVHKETISVALADGGKRGDVRAFGQIVNTPTALARMLAKLSQSGRTLKFCYEAGPCGYGIQRQLSAAGHHCVVVAPSLIPRKPGDRIKTDRRDADNLARLHRAGELSAVWIPDPAHEAMRDLVRARLAAVRSLRQARQQLSGFLLRHGCHYGRPAWTQMHRRWLAGLRFTQPAHHIVLEDHIATIEAATDRRDRLTKQIEIMLSDWSLAPVVQALQSLRGMALVTAATMIAELGDISRFTNPRQLMAYLGLVPSEHSSGATRRQGGITKAGNGTARRMLIEAAWSYRFPARVSREQLLRQEQLPKTIRDTAWKAQERLCGRYRKLTKAGKPATTVTTAIARELSGFVWAIACQVSPR

SEQ ID NO: 10496 - protein, 425 aa, unidentified
  source 1..425: note = protein_ISSgr1
MREHDTQAEAGTVNIPGKGAMFEIEDVGVFLGLDVGKTAHHGHGLTPAGKKIFDKPLPNSEPKLRAVFDKLTEKFGTVLVIVDQPASIGALPLTVARDAGCRVAYLPGLAMRRIADLYPGEAKTDAKDAAVIADAARTMPHTLRCLELTDEITAELTVLTGFDQDLAAEATRTSNRIRGLLTQFHPSLERVLGPRLDHQAVTWLLERHGSPAALRKAGRRRLVELIRPKAPRMAQRLIDDVFDALDEQTVVVPGTGTLDTVVPSLAASLASVHTQRRAMEAQINTLLEAHPLSPVLTSMPGVGVRTAAVLLVTVGDGTSFPTAAHLASYAGLAPTTKSSGTSIHGEHAPRGGNRQLKRAMFLSAFACMNADPASRTYYDRQRARGKTHTQALLRLARQRISVLFAMLRDGTFYEPRTPKNVELAA

SEQ ID NO: 10497 - protein, 338 aa, unidentified
  source 1..338: note = protein_ISShdy1
MTVVTVGIDLAKNVFAVHGVNAAGKAVLVKPLVRRAKLLELIATLPACLIGIEACTGAHFWAREFQKMGHTVRIMAPQLVSPYRMGGRHGKNDAADAAAICEAVTRPNMRFVPIKSVEQQGQLFVHRAHQGYVSERTALINRIRGLLSELGIVLPQAFKAFLSGVAQVLEDLPGYCNQVIGDLLNELYHIEEKIKNSEKLIQQLARDNSAAQLLMQFRGIGPMTATAIVASIGNGHDFKNGRQFSAWLGLTPRQQSSGGKARLGRITKAGDSYLRTLLVLGARSVLLGAAKNDDPVSRWALQLKERRGYGRALVAIAAKNARMCWAMLHLRDEFRFPA

SEQ ID NO: 10498 - protein, 347 aa, unidentified
  source 1..347: note = protein_ISShfr3
MKVTTISIDLAKNVFQVLGMDCHAKQVFNKRLNRTQLTEFMLQQPNCDVVFEACYSSHYWGRKFLAMGHNVKLIPAQHVTPFVRGSKNDNNDTMAIYEASFRPNIRFVPVKTEEQQEILMLHRIRERLVKEKTACTNQIRGVLVDFGICFAQGYKAFEVAIWDIINDASQRPIIKLMANDFWGEYQSVNTRLDRINTLIKKLIERDPNGKILLSIPGVGPIIASAFVASIGRGQAFNTAKELGVWLGLTPKQFASGHRSVNGSITKRGNGYLRKQLIHGARAVVSHASKKQDDLNLWIMQLRSRKSICSTVVATAHRLARLIWILLQKQVPYVPQYAANQGVNHGTC

SEQ ID NO: 10499 - protein, 318 aa, unidentified
  source 1..318: note = protein_ISShwo3
MNSKTNQNISVGVDTGKFQLDIYIRPLDIFFTVKNDEKGIKDAVNSIKQYTPKRIVIEATGRLEMPFIMACAEANLPFVIANPIHIKRFAGAIGQRAKTDKLDAKLIAHYGEAIKPKLSTLKPSIMQAMSDLVSRRNQILAMQTMEKNRLQILPKDLAMTIKPILTAFKNQIEKIEAKIIKLIESCPDYQAKNIILQSMKGIGKIAAASIISNLPELGYINNKEASSLVGVAPMNKESGRFKGQRKIQGGRHQVRTVLYMAMMSAIQSNPVFKQTYQRLVAAGKPKKVAIIACIRKMVVTLNSMLRDGVMWEAPKAQI

SEQ ID NO: 10500 - protein, 347 aa, unidentified
  source 1..347: note = protein_ISShwo5
MRFYNNSHPYYCGIDLHARLLYVCIIDSKGKVAVHKKIDADKGDLLRILEPYIGNVIVGVECMHCWYWVSDWCAELGIDFVLGHALYMKAIHGGKTKNDKIDSFKIASLLRGGNFPIAYNYPNEMRAARDLLRRRMKIVRHGAMLKAHVVNTNSQYNLPATELNLKNISARQKLRQQYKDPIVQRNIDLDMALLDCYAKELAQVEWFIEKQAKNHNPVYLELLKTVPGIGKILSLTILYEIGDVTRFESVQKFASYSRLVKCKAESAGKTYGTNGNKIGNAHLKWAFSEAAVLYLRGNDKARNYLNRLQKRMSKAKALSALAHKLGRCVYFMLKNKTVFDEQRFLKG

SEQ ID NO: 10501 - protein, 365 aa, unidentified
  source 1..365: note = protein_ISSko1
MHATTKFAGNESSVAVTLAVDLAKDVFELAFADAAGRIVERRRLKRGPFAQCLVNRAPLSIVMEACGSAHAWARRFMRLGHTVKLLPAQHVRPYVRRNKTDRADAAGLLEAARCGDIRPVPVKTTGQQGTQGLHRIREHHKAERTAAINLVRGLLREFGTAIPAGADKIRPAVLAALEDGDNDLPMPLRHALAGLLQRIASCEEAMAAIEKQLADIARDDTRCQRLMAANGVGLITATAMSAGIGDFARFPSGRHFASALGLTPREYSSGGSRKLGRISKRGDVYLRTLLIHGARSALITACMARKRGQTLDRTQQWALALAERKGHNKAVVALANKTARRLWAAEHHGVGFDPDHLSQREQRAG

SEQ ID NO: 10502 - protein, 383 aa, unidentified
  source 1..383: note = protein_ISSph11
MENSSSDYCPKTSVIVSVELSKRNWLVASLSPGAAKPSLRTIPAGNSAALISHLRNLECKAADRIGEPAAIRLCFEIGYDGFWLARLLRSNDIDTYVLDPASFLVSRRGRRAKTDRIDAEAMIGILKAYLAGDKSVCRVVDVPSPEEEDARRVMRERGDLVHERTRIISRIRGLLALQGIRSVKAIKGGDWSKQLDDMRTGDGRPLPPNLRRQIERCFERLALLNDQIKDIERDRAEVVLHEESTFPCREKAVRLEQLKGIGPNSAAMLVAEVFCRKFESRRHVAAFLGLAPAPFASGDVSRDQGISKAGNRSTRVQMVELAWCWLKYQPSSELTVWYRNRFKGNGARAAKVGIVALARKLLIALWRFVETGLVPQGAELRAA

SEQ ID NO: 10503 - protein, 371 aa, unidentified
  source 1..371: note = protein_ISSph13
MAKRLKYIGLDVHKETIAVAVAEGERGGEVRFHGTIPNEDDAVRGMVKRLAGPGITLDFCYEAGPCGYGLQRLLTRQGQPCIVISPSMMPRRPGDQIKTDRRDAMTLARLLRAGELAPIWVPDEAHEAIRDLIRARRSAQEDTSAAKQSVRSFLLRHDRRFSGKSAWTKTYWRWLSEQRFDFAHQQLAFEEAKRRVLEAQARTARLEAALVEAVDGWRFAPLVRSLQALRGVRLIVAATLVAEVGDLTRFQNPKQLMAYLGLVPSEYSSGARVQRGRITRAGNAHARTMLVEAGWTYRLPAREERRYRDRVADLPEDIQAIGWKAQVRLCQRFRRLSATGKPQPKVNTAIARELVGFAWDIARRVQPVVAV

SEQ ID NO: 10504 - protein, 335 aa, unidentified
  source 1..335: note = protein_ISSph15
MKHYAGLDLSMESTQVCIVDDNGRKVVSEKLESSPEAIAMMLERYGQIERAVIETGRMSPAICLGLRELGVPVVCIDARQAHQSLKAMKANKTDPHDAAGLAQLARTGFYKEVHVKSPAAHGVRSVITARSHLVEARVRLDNTIRGLCATFGYRPGAGQGKAFLERIMKAAHIPGLGDAIASLLSVRAELVEQIKEMDRRLRIIASQSQACEILMTIPGVGVQTSAAFAAAVDEAGRFRQSRNAGAYFGLVPRRHQSGELDWTGRITKQGDSTVRKLLYEAANSILTRSRETFALKTWAMKIAKRRGLKEARVALARRLAVIMHAMLRDGTLFQA

SEQ ID NO: 10505 - protein, 344 aa, unidentified
  source 1..344: note = protein_ISSphsp17
MSVVTIGLDLAKTVFQVHGVDEAGLTVLRRKLSRADMAAFFKKQPPCLVGMEACSSAHHWARLLVEIGHTVKLIPPQYVKPYVKRNKTDAADAEAICEAVAKPNMRFVPIKTKQQQAVLALHRVRSLLVRQRTATINALRGLLGEYGLIAGKGVRQLAILSERLATSDKTVVPDEAREALRCLFRHIDTLTDKLGEMEKRIVAWHKSNPDSQRLATAPGVGPITATAIVAAVGDGSQFKSSRHFAAWLGLTPRIRASGGKEKIGRISKGGDRYLRTLLIHGARAVVGTTFRKDVTPRPWLKALVDRRPVNVASTAVAHKTARSIWAMLTRNEVYRRPSPLPMAA

SEQ ID NO: 10506 - protein, 343 aa, unidentified
  source 1..343: note = protein_ISSphsp18
MKQYIGFDVSLKDTAISIRQDGKRIWRGKCASDPQILAQIVRKHAPHAERVVFETGPLSTWFYHALTAAGVPAICIEARHAQKILNETLNKTDANDADGLAQLAEAGFYKAVRVKSFDAMLTRTLVGARNLLLTISTQLSNQIRGVMKTFGIVVPKGTGRVFDGNVRELLDGRDGLAQIILPLLEAWRDIRKRAAELDRQLLAAARQSQAIKLLMTIPGVGAVTAVSYAAAIEDPANFKTSRAVGAWLGLTTRRYQSGEVDYDGHISRRGDNHLRGLLYEAATVILTRTSASNQSGLKDWGLRLRERLGFKRAAVAVARKLAVIMHTMLKTGEAFNTSAGVTA

SEQ ID NO: 10507 - protein, 347 aa, unidentified
  source 1..347: note = protein_ISSphsp23
MEQIIRIGMDTSKHLFQLHGVNAAEQPILRKKLRRKEMIDFFQKLPSTVVAIEACGASHHWARLLGSFGHEVKLIAPQLAKPYVKRGKNDAADAEALCEAMSRPTMRFVPVKTAEQQAALMLVGMRDRLVRSRTQLANAIRGYAAEFGLTTAKGIYKIEPLLERTATDETVPTLARELFALHASEYQQLERQLEDVEAKLLAWHRKNECSRRLAQIPGVGPIGASLLMMKTPAPELFASGRQFAAWLGLTPKDHSTAGKARQGVITRAGDEALRSILVVGATSLLRRVRDGSGKNATPWLLSMLKRKPPKLVAVALANKIARIAWKMMATGETYRKSVVLSELKCTA

SEQ ID NO: 10508 - protein, 342 aa, unidentified
  source 1..342: note = protein_ISSpi2
MSLIKAIGIDLAKLVFSIHGVDEYGKTKLKQTVKRNKLLEKIANIPPCIIGMEACSGAHYWAREFTKYGHDVRIMASKFVIPYRQSEKNDANDAEAICEAVTRPKTRFVCIKSEEQQAVLCLHRIRQGQIKDRTAMINRLRGLLSEFGIIMPKGRYPAQKHIVEILEDAENGLPDLARELLHDLWLSIKQQNQDILKSDRKLYALANQMKDAKRLMTIPGIGEVTATAVVATVSDAKHFSTSRQFAAWIGLVPKQYSTGGKPTLGRISKRGEKHIRTSLIHGARAVIANCANKIDRTSLWIKALIERRGFKRAVIALAAKNARLIWSLLQSGQEYQVNYVKT

SEQ ID NO: 10509 - protein, 316 aa, unidentified
  source 1..316: note = protein_ISSpi5
MKSKTNQNINVGVDTGKYQLDIYIRPLDIYFTVSNDEKGIKEAVRLIKKYHPERIVIEATGRLEMPFIMACANANLPFVIANPVHIKRFAGAIGQRAKTDKLDAQLIAHYSEAIKPRLSTLKPDVMQAMSDLVGRRSQLLVMQTMEKNRLQILPQELAMTIKPILTVFKNQITKIEDKIVKLIESNADYQAKNLILQSMKGIGKIAAASIISNLPELGYINNKEASSLVGVAPMNKESGRFKGHRKIQGGRHQVRTVLYMAMMSAIQSNPVFKETYQRLVAAGKPKKVAIIACVRKMVVILNSMLRDGVLWEAPKA

SEQ ID NO: 10510 - protein, 417 aa, unidentified
  source 1..417: note = protein_ISSpn10
MKCFVGLDVSSTKLDVCIMLNDTSTPVTASLSNDLSGATEIKNHILDLNHTYHFERIVIGMEATSLYSFHPAMFFHEDSQLKELHVEIMVEQPNKIKKYRDAFEENKNDTIDAFYIADYFRIERFSPSFLKEEKYMALQHLTRTRLQIIEQLTRTKQHFIENIYYKCNTLAYQFKKEELSTNLWSSTMMTLITDEMTLDELANMPLQELADWLQQLGKGHFKDSEKLAQTIQAAIRGSYRLSKLQQDSVNVILGLLAREIRNLEKMIKEIDKAIEDMVETIPEYQCLTSIPGVGKVYAAGIIAEIGQIERFKDHPQVAKFAGLNWREKQSGNSNSQHTSLVNRGNRYLRYYLVEAANSVRRYDDEYKDFYKKKYHEVPKHQHKRAIVLTARKFVRLVVVLLRNHQLYTPPRRLMEDK

SEQ ID NO: 10511 - protein, 352 aa, unidentified
  source 1..352: note = protein_ISSpo1
MKSKSPEEIAVIGVDIGKETFHLVGFDHAGERVLRKNIKRLAIKPTFEKLPRCVVGMEACISAHFVSRMLRELGFEPRIIPAIYVKPFNKGQKNDYNDAEAIAEAAMRPNPRTVTEKSQDQLDLQAMHRVRSRLVARRTATINQIRAFLIEQGITVRAGRHRLQSSFAAILENRRDEISSRMRAILMGLYGDWLWVDERIKAISSEIEEISRSEENSANIMTIPGIGPLISTAIVSAIGKGEVFDRGRDFAAWVGLVPRQFSTGGRTILGRISKRGNSYLRMLLVQAANVILMRPHRWDALGLGPWLRGVVGRMPHNKAAVALANKLARTAWSVLRYGSKYQVERDEALAAI

SEQ ID NO: 10512 - protein, 388 aa, unidentified
  source 1..388: note = protein_ISSsu10
MDVLYQSCAGIDVHQANIVVCILHGPLTSTRPKREMATFDTTTKGLRACHDFLSQFHVEAVGMESTGVYWRPVWHALCDDFELILAQPAHMKAIPGQKTDKKDAHWIAKLTRIGLLPRSFVPDETIQELRELTRQRKHYVESRNRETNRIHKFLQSGGIKLTTYIEDIMGLSGRNLLQLLVDGTPITPRIVHQSVYTSLKKKVPQLLEALDGYFSDHHRFMLKQSLEIYDFYQKQIELLEERITVYLSQYENHVETLDSIPGIDVITASVIISEVGVDMSQFPTSGHLASWAGLCPGNNESAGKKRSTKIRHGNSYLKKMLMSSRFSPLGPRKEVPLADRFYQIQSRRGSQKATIALAHQLLKIAYILLKEQMTYPEFLAQKRLLGTS

SEQ ID NO: 10513 - protein, 373 aa, unidentified
  source 1..373: note = protein_ISSsu15
MFHFTTLFIGMDVHKESFSLCYYDMMANQFKHSTKVGPNVSYIVNYVNELRRLYGQDAEVLCGYEAGCLGFTLYHQLQAHGIPCIVMAPTTVMKEGSKRVKTDKKDAAQLAKALAFRSYRPVHIPTVEDEQVKEYIRMRTDHKVALKKIKQQILAFCLRHDFRYTEGSSNWTQKHVRWLRSLNPDGLYAEILTEYLLTYEKLVDQIERYDARIEQLGQSDSYQEKVSRLSCFIGIKTLTALSIVTEIGDFNRFATAQHFASYLGLTPSENSSGDKERKGAITKAGNSHVRRLLIEAAQSLAKGTIGYKSKELKRRQSGNRVEVIAYADKANERLRRRYRTLVLGKNKKQNVAKTAIARELSGFIWGMMTGRIA

SEQ ID NO: 10514 - protein, 400 aa, unidentified
  source 1..400: note = protein_ISSsu7
MRVVFGIDVSKVSSEVAILVNGEKVHNYTMSNDAIGFSRLLGDLKTVHKPEIIFEATGVYSRRLQSFLDEHGYAYTRLNPLEAKKQLDSLRVRKTDQIDAEKLAQSQFVLNRKTTYVQEEIYQNLRDLSRFYQNLTEDIVRAKNRLHKALQVTFPELENILSTPSGEQYWNLVIAFPCKDFVLDLSKDELSESIRQSTSKRISDKRVAYLAEKLIALANQSYCAVKKTSPMLEEVRYYAKELFRLSEQRQTILDEMVELAQPLPEYDILLSIPGIAETTATSIIGELGDIRRFQSANQINAFIGIDLRHYESGNFLAKEHITKRGNPYARKILFKCIHNIASASHTNPCHIADFYEKRKRQSQTTSTKPHTIASIHRLIRTMYYLIMHNKLYDYASTQNR

SEQ ID NO: 10515 - protein, 401 aa, unidentified
  source 1..401: note = protein_ISStac1
MNDNDAIGVFLGLDVGKSAHHGHGLTPAGKKVFDKQLPNTEPKLRDVFTKLTTKFVGMVLVIVDQPASIGALPLTVARETGCKVAYLPGLAMRRIADLYPGEAKTDAKDAAIIADAARTMPQTLRSLQLTDEITAELTVLVGFDQDLAAEATRTSNRIRGLLTQFHPSLERVLGPRLDHQAVTWLLERYGSPAALRKAGRRRLVEVIRPRAPRMANRLVDDIFEALNGQTVVVPGTSTLDIVIPSLARSLGAVHEQRRATEAQITTLLEDHPLSKVLTSLPGVGVRTAATLLVTVGDGTSFPTAAHLASCAGLAPTTKSSGTSIHGEHAPRGGNRQLKRAMFLSAFAALHDPASRTCYDKCRVRGKTHTQALLRLARQRINVLFAMLRDGTFYEPRTPRLA

SEQ ID NO: 10516 - protein, 386 aa, unidentified
  source 1..386: note = protein_ISSto4
MTKDFVSKAFAIDISQSKLTAAKGELVIKQEKPSVTVKEVKEFPYNNEGIEELIKFLEGYNEGILEATGVYFYYLHEKLTEKGFKVTVVNPAHLTEILGKKTDKLDAQRLLVAYMTGVIKGSYIPTGEIKELRELTRHRENLVNKITQVKNEIRKTLEIAGYKIEPFDKKGRQLLEKLAKGEELSKEEKEELKEKLGRNLNDAEKLTLKQLVELLKSLENMVKEVEDMIISKIPKPVIELSKIPGIGLITAATIYAEFGDISRFPNSKAARAYAGFAPRTKQSGNSESHSGMIRGNKRLRRGFYLAARSARWLEPFNEFYERLIARGKSVRQATCALAGKLACIVYHVLKDGVYKGIVKKRLRIPKGGEVNVKDFDVGDALDSLSP

SEQ ID NO: 10517 - protein, 357 aa, unidentified
  source 1..357: note = protein_ISSto6
MVDLLSEAKSSYEGVTNPYHRTEHCGKIHEYRCGKEVGVLGIDVSKDYLITSRGRERKYKNNLKGYEEILEMKPCLIVLEPTGVYAIRPSQYFKEKGVKVLQVSPNVLSREKEFRGKKTDFYDAEKLENMVDKAKEYEYNPLRELVTLYLFLKDIEVKYKNRLKRTLFLVSDNDKISKERLEKLANGDFAQEELYQLEYTPIVLEEIRVLAKTLLETQERLKEVKKMIEEQVPENHVLLTIPGIGRLAAGIIIGVVGDVKRFPKPESFVAYCGLDPVVERSGRSVISRGISKRGNKYLRSLFYFLAEMNYSRNPTLLKFYESHKDRLQGKKLYTALARKLARIVWSVWYNNKPYEPK

SEQ ID NO: 10518 - protein, 384 aa, unidentified
  source 1..384: note = protein_ISVisp2
MNKDSIIFIGLDTHKSFIQVTVLQEHRGANPLHLGRIKSNKSALIKLAKQLQSKYPKATLHFVYEAGPCGYWTYRLMTSLGHCCYVVAPSLIPKKPGDRVKTDKRDAAKLAKLLKAEELTPIYVPEAKDEAIRDLSRARETAMKDLKDAKFQLKGFLLRNNIQATVNDNWSKKHLRWLTDLILPHHSQQIVLQEMIITINERIQRLQRLDNELLHQVKNWRYYPVVKAIQAMRGVRLLVALGTIAELGDLRRFDHPRKLMAYLGLVPTENSSGGKTRRGSLTKCGNSRARRLLVEGAHTYKHKANISVELQLRQEGLPKEIVDIAWQAQQRLCRRYQRLLQKGKHRNVVVVAIAREMIAYIWAIAREVVISDVDPKTRIARLPA

SEQ ID NO: 10519 - protein, 341 aa, unidentified
  source 1..341: note = protein_ISVisp6
MSDYSYFCGIDLAKNHFSLHAVDQNGKVILHKSVTRSKLLTTIANMPLMRIGVEACGGAHYWARTLNKLGHDARIMAVKYVIPYRTKGKNDLNDAVAICEAVQRPSTRFVPVKSPEQQAILSVHRMREHWVRERTALMNRMRALLSEFGLTIPVGRSSLMKQVPLMLEDAENELPHLARTVIADAYRHLGELNQRIADTEQVFDSFAKVSINVQRVMKVRGIGPQTATAILASIGNGSQFDKSRDFSAWLGLVPKQYSTGGKPRLGRITKHGDKYLRTLLVHGARTVIANLGDKQDKLSQWCRGVLERRGMNRAIVALAAKNARIIWSLLHNQTEYENYAA

SEQ ID NO: 10520 - protein, 444 aa, unidentified
  source 1..444: note = protein_ISWpi13
MTKAKSKLEIVNPNASGIDIGSAVHYVCVPEGRDKQRVQKFGCFTADLHNLARWLKKCKVTTVAMESTGVYWISLFQILESYEFEVKLVNARHVKNVPGRKSDVQDCQWLQQLHSYGLLRGSFRPDNQMCVLRSYVRQRKKLTESASTHVLRMQKALIQMNIQLHKVISNITGVTGMKIIEAIIEGERNPEKLAEFRSSNIKNDKATIAKALTGDYREEHLFVLKQELELYNIYQEKIAECDENIENYYKTFETKFCGNKQCSKIKNRSTKNRPNFSIHEELHRVTGMDFTKVPGLDALSIQTIISETGINHNKWPTEKHFSSWLGLSPANKITGEKVFSTRTCRVINRAANAFRMAAHCVSRSNSGIGAYCRRLKKRLGAPKAITATARKLACIFYSMLKHGQEYVEKGIDYYEKLYKERVLKNLSKKASELGYVLTKKHELI

SEQ ID NO: 10521 - protein, 342 aa, unidentified
  source 1..342: note = protein_ISXpo1
MNIIKVVGIDLAKNVFQVCVWLTDNSIAWNKKVSRQKLLDTLRAFPPNTLIAMEACQGAHYWGRTLQAMGYAVRLIPTQYVKALCKNQKNDANDALAICETSCRPGIHFVPVKTVEQQDIKALRSARQLVVEQRTTLVNQIRALLVEQGIVIPAGIQQLRHALPDILEEGNNALSFVLRRLLHSLQEDMQRFDVRIYDMDKEIQAVSSQQSGYAHLLTIPGVGPLIAAAFVSEVNAEQFQNGRQLSAWCGLVPRQYSSGGKNRLSGMTKQGNRHLRTLIIHGARAVMRCCQKREDVLGGWLRKLIARCGFMKATVALANKLVRIIWRILKDDVDFMMKKAVN

SEQ ID NO: 10522 - protein, 339 aa, unidentified
  source 1..339: note = protein_ISYen1
MKVSTLGIDLAKNVFQLHGVGCNGQTVLKKKLTRDKFLPFLMQLEPCLIGMEACASSHHFARVLRQYGHEVKLIPPQYVKPYVKTNKTDAADAEAICEAVARPNMRFVQIKTAEQQAILVLHTERNILIRERTACANSMRAILAEFGIIMPRTLSQLYKKIPEILEEYDNELSPFVRCSVARQLEHLQGVEDQITLIEQELSSWAKTQPACQRVLKVPGVGLMTATYLVASVGNGQQFHSAKQFAAWLGLVPREFSSGGKQRLGRISKRGDRYFRYLLVHGARAVAAVIERHKDNMPWLYRLLSKKAYNVAVVAQANKTARILWSMLVQHTEYRTLSVV

SEQ ID NO: 10523 - protein, 414 aa, unidentified
  source 1..414: note = protein_ISYps2
MNTLVSNIGVSGTLIALDIAKKHHDAKIRHPDGRTSYLRIENSLEGFNRLLALTASPHEDIIAAFEPTADYHRNIAWWLHKQGVQCHLVSSIRCARAREMLFKTWDKNDRKDASVIMYLLEQGLSSPFYDPLANGIIDIQEISNTYHQVTLALTRCLNSLVNHYLTLYFPEAEQFLHMSRAEWFCQFLLQFPTPSCITSLNRDVFVKQSWDVVGRKQYKQQFLEHLYDVAADSIALPLSEDSLAVTTFRLQLHRYVGLSAQRLQLEKQSEKYLQERSDYRHLRTIPGIGAVIALMIIAESGDLTRFAHYRQYLNFCGFNLSASQSGQKHSGYRLSKRGNARLRYAFWLAATVAVRTRENSFRYKYERYIRENGDKPDQKRKAMTAVATKVARVAHAIVKQDIDYKGYYEISHGT

SEQ ID NO: 10524 - protein, 339 aa, unidentified
  source 1..339: note = protein_b6d9218
  REGION 6..148: note = RuvC_domain
  SITE 9: note = RuvC_P1
  SITE 52: note = RuvC_P2
  SITE 87: note = RuvC_P3
  SITE 89: note = RuvC_P4
  SITE 92: note = RuvC_P5
  REGION 211..305: note = Tnp_domain
  SITE 219: note = Tnp_P1
  SITE 249: note = Tnp_P2
  SITE 257: note = Tnp_P3
  SITE 258: note = Tnp_P4
  SITE 270: note = Tnp_P5
MKVTTVGLDLAKNVFQVHGITDEGHVVFNKPLRRAQLLAFFERLAPCLIGMEACSASHYWARELSRLGHEVRLIPPIYVKPYVKRGKSDAVDAEAICEAVTRPTMRFVQVKSVEQQAMLSLHRTRELVVRQRTQLVNMLRGLLAEFGVVLPQGLDKATGFARGVLEGAVPDIPEIGQDVIRVLCRQLLSTDCLVRWHDLRLQVVARADPRMKLLRTIPGVGPVTASAIVATIGSGRQFRNGREFAAWLGLTPRNNSSGGKERLGSITKMGDQYLRKLLVAGMTSRAIQVKVRPDKGDPWLRQLLERKPFRLATIAMANKTARIIWAVLTRGETWTPRHA

SEQ ID NO: 10525 - protein, 342 aa, unidentified
  source 1..342: note = protein_dbab248
  REGION 6..148: note = RuvC_domain
  SITE 9: note = RuvC_P1
  SITE 52: note = RuvC_P2
  SITE 87: note = RuvC_P3
  SITE 89: note = RuvC_P4
  SITE 92: note = RuvC_P5
  REGION 211..300: note = Tnp_domain
  SITE 219: note = Tnp_P1
  SITE 249: note = Tnp_P2
  SITE 257: note = Tnp_P3
  SITE 258: note = Tnp_P4
  SITE 270: note = Tnp_P5
MEITTIGLDLAKSVFQVHAVDAEGKVIVRKALRRAQVLPFFKTAPPCLVGIEACGTSHHWARELRRLGHEVRLMPPAYVKPYVKRGKTDANDAEAICEAVTRPTMRFVAIKSEQQQAALALHRTRDLLVKQRTQLVNMIRGLLAEFGIEMARGLHHALDLAARVAQGAAPDVPELAARVITGLAGQIGDLQVRLTALEKELLTWHRTNELSQRLSTIPGVGLISATALAASVTDASRFRSGRQFAASLGLTPLQNSSGGKERMGRISRMGDRYLRRLLVVGMTSLVRRARTRPDSVDPRIAAMLARKPARVVTVAAANRTARVAWSIMARGGVYRAPQGVTA

SEQ ID NO: 10526 - protein, 352 aa, unidentified
  source 1..352: note = protein_69a69d6
  REGION 14..154: note = RuvC_domain
  SITE 17: note = RuvC_P1
  SITE 60: note = RuvC_P2
  SITE 95: note = RuvC_P3
  SITE 97: note = RuvC_P4
  SITE 100: note = RuvC_P5
  REGION 219..307: note = Tnp_domain
  SITE 227: note = Tnp_P1
  SITE 257: note = Tnp_P2
  SITE 265: note = Tnp_P3
  SITE 266: note = Tnp_P4
  SITE 278: note = Tnp_P5
MRTSQKTAGIIATIGIDIGKNTFHLVGLDQRGVIVLQQKVSRGQLERHLANIPRCLIGMEACSGSHHIGRQLAALGHDARLIPAQYVKPFLKGHKNDYRDAEAVAEAVQRPTMRFVTIKTPEQMDLLALHRVRSRLVGQRTGVINQIRGFLIERGITVRQGAAPLRRVLPDILSSNTGVLSPRMVGLIADLAQDWRRLDERIAAVSAEIEALARQDENCERLITVPGIGPIISSAVVAAIGNGAGFKQGRDFGAWLGLVPKQESTGDRTILGKISKRGNIYLRTLFVQAAHVVLGRRSSAAMRGLWPWIEQASKRLHRNLLAIALANKLARIAWAVLARGHAYQTRIVANAA

SEQ ID NO: 10527 - protein, 397 aa, unidentified
  source 1..397: note = protein_e581a9f
  REGION 19..167: note = RuvC_domain
  SITE 22: note = RuvC_P1
  SITE 68: note = RuvC_P2
  SITE 106: note = RuvC_P3
  SITE 108: note = RuvC_P4
  SITE 111: note = RuvC_P5
  REGION 234..320: note = Tnp_domain
  SITE 242: note = Tnp_P1
  SITE 272: note = Tnp_P2
  SITE 280: note = Tnp_P3
  SITE 281: note = Tnp_P4
  SITE 293: note = Tnp_P5
MPNTNLQNSIDFNGQKFYVGLDVHKRSWAVTIRSLGMQVAHFTQPPSTDALVTYLRKNFPGGLYLSAYEAGFCGTVIHDQLCKLGIRNILVNAADIPATDKQKKNKTDLHDSRAIASFLEQGALKGIHVLTREQQELRSLFRLRESKVKDVTIANNRLKGFLMFFSIDLPETVSRKEYLSLKALEWLSNLELACSAGTITLKQHIEELKYQRKTLYQITKVLREQIQETYTKTYECLLSVPGIGGVTAMGLIAEIADFSRFEDPHQYSSFLGLCPWENSSGETIKTKGMQPRCNRHLRPLLIEASWMAIRKSPALFAYYSKHAVRNPKQAIVKVARKLAMIAKGVATTKQPYQANYLEDKRLEQEEKKVQKIKRFSSGIADQHIKKQPDNVQITLPG

SEQ ID NO: 10528 - protein, 338 aa, unidentified
  source 1..338: note = protein_b7b2cab
  REGION 6..147: note = RuvC_domain
  SITE 9: note = RuvC_P1
  SITE 52: note = RuvC_P2
  SITE 87: note = RuvC_P3
  SITE 89: note = RuvC_P4
  SITE 92: note = RuvC_P5
  REGION 212..300: note = Tnp_domain
  SITE 220: note = Tnp_P1
  SITE 250: note = Tnp_P2
  SITE 258: note = Tnp_P3
  SITE 259: note = Tnp_P4
  SITE 271: note = Tnp_P5
MNISRVGLDLAKQVFQVHGVDSHERVVCRRQLKRAQMLDFFRQLAPCLVAMEACGSAHYWARELQGLGHEVRLIAPQFVKPYVKGDKHDAHDAEAICEAASRPSMRFVPVKSAQQQAGQSVHRIRSRLVRARTALCNEIRGLLGEFGLVASRRGRAATVELLETVTAAEPVPLPAPMGELLSGLKEELQALDARIERLERVIKRSAREDARIQRLLAVEGIGPLTASAVVAAVGDARQFRTARQFAAWLGLVPRQHSTGGQQRLGGITKRGDTYLRTLFTHGSRSVVRCCANKTDARSRWLQGLLQRCNANAVAVALANKNARIVWALLSRETTYQPA

SEQ ID NO: 10529 - protein, 391 aa, unidentified
  source 1..391: note = protein_233bd7f
  REGION 4..162: note = RuvC_domain
  SITE 7: note = RuvC_P1
  SITE 60: note = RuvC_P2
  SITE 101: note = RuvC_P3
  SITE 103: note = RuvC_P4
  SITE 106: note = RuvC_P5
  REGION 267..354: note = Tnp_domain
  SITE 275: note = Tnp_P1
  SITE 305: note = Tnp_P2
  SITE 313: note = Tnp_P3
  SITE 314: note = Tnp_P4
  SITE 327: note = Tnp_P5
MLYLGIDIGKNTHVATLLNETDKPLFKAFSFANTTDGGNSLIDKLHHHAKSVSEVEIGLEATGHYWLSVYSYLIERGYTVYVINPIQTDGWRKGAEIRNRKTDAIDSVLIADLIRYGRFVETTLADENIISLRNLSRFRNYLVSSIGDLKRKVICVLDQVFPEYQSVFSDVFGKTSKELLLHFQTADDFESITATQLENALKNVALKGFAKNKLSQISELAAKSFGLDFCRDSFALQLKLLIEQIKFIEAQVDDVETQINQILAKINSPITTIPGIGAVLAAVILGEIGDISRFSNPSKLAAYAGIDVNVNQSGESKSQNGKMSKRGSPYLRKALFQAAFVAAFNDPTFSAFYQKKRSEGKHHLTAVGAVARKLCNIIHAVIKNNSDYQVQ

SEQ ID NO: 10530 - protein, 401 aa, unidentified
  source 1..401: note = protein_e960af1
  REGION 5..164: note = RuvC_domain
  SITE 8: note = RuvC_P1
  SITE 61: note = RuvC_P2
  SITE 102: note = RuvC_P3
  SITE 104: note = RuvC_P4
  SITE 107: note = RuvC_P5
  REGION 271..356: note = Tnp_domain
  SITE 279: note = Tnp_P1
  SITE 309: note = Tnp_P2
  SITE 317: note = Tnp_P3
  SITE 318: note = Tnp_P4
  SITE 329: note = Tnp_P5
MRVVAGIDIAKEFHWVAVVVVETGKELISRRVDNDPEAIAEFLTELARIADEHGPVTVGIDVLGGIAGLITAMLLDAERRLVHVPGLAVNRARHATRGGEHKSDPRDARVIADQLRLRNDWRPVIGEDDLTVDLGLLVARRRDLVAEQTRRINRAHDMLAGIFPGLEAALDLTNLAELHLLARYATPAQIRRAGRARILTYLRRAGVRSDRAARIATAAVDAAQRQRAEVPGEARTAQFLREFAVDAITARGRISAVEAEISDVLDRHPDAALVLSLPGMGATLTAEFLAEAGDLARFPSADALAAASGLAPVLQQSGKMHYLRRASGGARTLKHIFYRSAFCAIQVDPVSKAYYSRKRAEGKRHQQALIALARRRVAVLHAILRTRKPYQAGHTRTAAAA

SEQ ID NO: 10531 - protein, 399 aa, unidentified
  source 1..399: note = protein_81c3bc0
  REGION 7..163: note = RuvC_domain
  SITE 10: note = RuvC_P1
  SITE 61: note = RuvC_P2
  SITE 101: note = RuvC_P3
  SITE 103: note = RuvC_P4
  SITE 106: note = RuvC_P5
  REGION 269..356: note = Tnp_domain
  SITE 277: note = Tnp_P1
  SITE 308: note = Tnp_P2
  SITE 316: note = Tnp_P3
  SITE 317: note = Tnp_P4
  SITE 329: note = Tnp_P5
MGQQLWAGVDAGKSDHYCVVIDAEGQRLLAQRVANDETALLELISTVSTVVDGAEITWAIDLNGGGAAVLIALLVGAGQRLLYIPGRTVYHASGGYRGDGKTDAKDAAIIADQARMRRDLQPLRPGDEIAVELRILTSRRADLVADRTRAINRLRAQLLEYFPALERAFDYSTSKAALILLTGYQTPDGLRRAGAAELAAWLRKRKARNADAVASKALAAANAQHTIVPGQHLAATVVARLAKEVMALDIEIDDTETMIEERFRRHRHAEIILSMPGFGVVLGAEFLAATGGDICGFDSVDRLAGVSGLAPVPRDSGRISGNLKRPRRYHRRLLRACYLSAQIAIRTDAASRTYYDRKRSEGKTHTQAVLALARRRLNVVWAMLRDGTAYQPAPTAAAA

SEQ ID NO: 10532 - protein, 411 aa, unidentified
  source 1..411: note = protein_3ae488c
  REGION 5..164: note = RuvC_domain
  SITE 8: note = RuvC_P1
  SITE 61: note = RuvC_P2
  SITE 101: note = RuvC_P3
  SITE 103: note = RuvC_P4
  SITE 106: note = RuvC_P5
  REGION 272..358: note = Tnp_domain
  SITE 280: note = Tnp_P1
  SITE 311: note = Tnp_P2
  SITE 319: note = Tnp_P3
  SITE 320: note = Tnp_P4
MRLFVGDDWAEDHHDVEVMDEAGKVLARRRLPEGVAGMAGLHELTGRFVPEDAGEAEVVIGIETDRGPWVTALIAAGYTVFPVNPLQASRYRQRHGVSGAKSDAGDAHMLADMVRTDSHQLRAAAGDSPEAEGIKVIARTHKTLIWERTRAVQRLRHQLREYFPAALAAFEDLDAPDALELLGKAPDPARAAKLTRAQVAAALKRARRHHIADKTTAILAALRGEHLGQPAALTAAYAATVRSLIAVTAVLNEQVKALEEQVREHFGRHPDAEIYQSQPGLAAILGARVLAEFGDDPHRYATAKNRKNYGATSPITRASGKKKVVAARFVHNDRLIDALMSWAFSSLGASPGARAFYDEQRANGLEHNDALRRLANRLVGILHGCLKTRTLYDEATAWGHRQNLPQSGFAA

SEQ ID NO: 10533 - protein, 411 aa, unidentified
  source 1..411: note = protein_625904b
  REGION 5..163: note = RuvC_domain
  SITE 8: note = RuvC_P1
  SITE 62: note = RuvC_P2
  SITE 102: note = RuvC_P3
  SITE 104: note = RuvC_P4
  SITE 107: note = RuvC_P5
  REGION 273..373: note = Tnp_domain
  SITE 281: note = Tnp_P1
  SITE 311: note = Tnp_P2
  SITE 319: note = Tnp_P3
  SITE 320: note = Tnp_P4
  SITE 333: note = Tnp_P5
MNPVIGLDVSKGESQVQAFLDKGKPYRKSFKVSHTIEGLDLLVEFLEVVKRETGKKPPIVLEATGHYHSSVVQYLEDRGYLLIIINPLISYKAKSSSLRKVKTDALDAYHLCELFYKEHLEPYKKRGVQLLNLRNLTRQHENITGVLIQTKLQFQAILDQVFPEYRGVFGDLYSVVSLLTLSEFPSSEDILEASVETIADKIAQLCKSRSYRWANEKAIQLKAAADRNPFEKTLYQSHILSLGMYIKIILQYKEHLSKLESEIDALAKEVEEYNIIKSIPGIGEKIAATIISEIGEIDRFNDPKKLVAFAGVDPSVFESGKFTATRNRITKRGSSRLRHALYMAVRCAIRDCRKSKTSDEIIPRNKKLREFYDKKREEGKPFKVAVIACVNKLLHWIFALLKSKTTFQDIA

SEQ ID NO: 10534 - protein, 407 aa, unidentified
  source 1..407: note = protein_3553076
  REGION 4..163: note = RuvC_domain
  SITE 7: note = RuvC_P1
  SITE 60: note = RuvC_P2
  SITE 100: note = RuvC_P3
  SITE 102: note = RuvC_P4
  SITE 105: note = RuvC_P5
  REGION 271..357: note = Tnp_domain
  SITE 279: note = Tnp_P1
  SITE 310: note = Tnp_P2
  SITE 318: note = Tnp_P3
  SITE 319: note = Tnp_P4
MLFVGDDWAEDHHDVEVQDDAGRRLTKARVPEGAAGIARLHAMVGQHLPEDADPGQVVVGIETDRGPWVSALVAAGYRVIAVNPLQAARYRERYSTSGAKSDAGDAHALADMVRTDRHQLRQVAGDSDLADAVKLVARAHQSLVWDRTRQVQRLRSALLESFPAALVAFDDLDAPDTLELLAKAPSAAEAARLTVAQISAVLKRARRRKIPERAAAIRAALRAEQLPVGPASTLAYAVVVRAQAGLLTALNAEVARLEEQVEAHFGEHPDAEVLLSQPGLGTVLAARVLAEFGDDPKRYTDAKARRDYAGTSPITRASGRKTVVMARYARNNRLADALHQQAFCALNASPGARAYYDAIRGRGKSHHAALRQLGNRLVGILHGCLKTRTPYDEATAWPRNVTLTPAA

SEQ ID NO: 10535 - protein, 405 aa, unidentified
  source 1..405: note = protein_ecaf935
  REGION 5..158: note = RuvC_domain
  SITE 8: note = RuvC_P1
  SITE 56: note = RuvC_P2
  SITE 97: note = RuvC_P3
  SITE 99: note = RuvC_P4
  SITE 102: note = RuvC_P5
  REGION 271..358: note = Tnp_domain
  SITE 277: note = Tnp_P1
  SITE 307: note = Tnp_P2
  SITE 315: note = Tnp_P3
  SITE 316: note = Tnp_P4
  SITE 328: note = Tnp_P5
MPYILALDVSMGHSYSVLYKDDTCLFEDEIEHTQRGFHALLEEIQHLPERPLIVFEATGIYSRPVEKFFQDHHFSYCLLNPLEAKKQMEENTLRSWKTDKSDAHRLAQTHLKNQRQPKEVQSNFYLEMRDLARFYQEIEKKITRLRMDLHNCLQLTFPELEQFFSNRLTPYALTLIRLFPHPDFVLASTRTKIKNKLINETRKKISANRAEQKADQIIHYAQCAYPAVEKDSIHCQKTIYYAELLQDLLEQKEALATQMIKKAEGSPCFLLYQTFPGIGALTAALLLGELGDITRFKTHKQLNAFVGIDIRRYHSGKYTGQDRINKRGNPKARKIIFFTIRNMIRQQRAAPNHIVDYYYKLKKQPIPKKDKVATVACMNKLLKCMHAMVRAHTEYDYAYAVSVDH

SEQ ID NO: 10536 - protein, 347 aa, unidentified
  source 1..347: note = protein_8361239
  REGION 5..153: note = RuvC_domain
  SITE 8: note = RuvC_P1
  SITE 55: note = RuvC_P2
  SITE 92: note = RuvC_P3
  SITE 94: note = RuvC_P4
  SITE 97: note = RuvC_P5
  REGION 212..298: note = Tnp_domain
  SITE 220: note = Tnp_P1
  SITE 250: note = Tnp_P2
  SITE 258: note = Tnp_P3
  SITE 259: note = Tnp_P4
  SITE 271: note = Tnp_P5
MDKYAGIDVSLEVSHVCVVDSQGKILKEAKVASEPDALIDWFAYYGAPMARIGLEAGPLSQWLYAGMQTAGLAVELLETRHVRDAFKSMPVKTDRKDARGIAQLMRLGWFRPVHCKSLPAQEVRSLLAARKVLQTKRIDIEMSIRGLLRGYGLKVGPTTPRTFEGRVQELAAGHDTLSLIASALLKARAVLEQEFKGMEKRILAHAREDARVRRLMTTPGVGAIVSVTVVAGIDDPSRFKSSRSVGAHFGLTQKKYQSGETDITGRISKCGDEEVRTALYEAANVILTHRVKASSLKTWGMAIAERAGMKKAKVAVARKLSVILHRMLADGTEFIAAGRPQPNAANA

SEQ ID NO: 10537 - protein, 344 aa, unidentified
  source 1..344: note = protein_5a27663
  REGION 7..150: note = RuvC_domain
  SITE 10: note = RuvC_P1
  SITE 54: note = RuvC_P2
  SITE 89: note = RuvC_P3
  SITE 91: note = RuvC_P4
  SITE 94: note = RuvC_P5
  REGION 213..299: note = Tnp_domain
  SITE 221: note = Tnp_P1
  SITE 250: note = Tnp_P2
  SITE 258: note = Tnp_P3
  SITE 259: note = Tnp_P4
  SITE 271: note = Tnp_P5
MNTIKVVGIDIAKSVFQVCVWMADGSVAWNRKISRQKLLHTLRQFPPQTLIAMEACSTSHFWGRALISMGYDVKLIPTQHVKAFARHQKNDANDALAICETACRPGIHFVSVKTTEQQDIKALRSARQLIVEQRTALANQLRALLAEYGVIIPAGLQRLQRQLPEVLEDGDNTITFTLRRLLSLLREDMQMLTERIDVLDKELAELSSQQVAYHHLLTIPGVGPLIAAAVVSEVDATQFSSGRELSAWCGLVPRQHSSGGKQRLSSMTKNGNRNLRTLIIHGARAVMRCVQKRDDSLGRWVKAIELRRGFLKATVALANKLTRIIWRVLTDSVDFSMNRAFAGS

SEQ ID NO: 10538 - protein, 290 aa, unidentified
  source 1..290: note = protein_e5a200d
  REGION 6..148: note = RuvC_domain
  SITE 9: note = RuvC_P1
  SITE 52: note = RuvC_P2
  SITE 87: note = RuvC_P3
  SITE 89: note = RuvC_P4
  SITE 92: note = RuvC_P5
  REGION 211..290: note = Tnp_domain
  SITE 219: note = Tnp_P1
  SITE 249: note = Tnp_P2
  SITE 257: note = Tnp_P3
  SITE 258: note = Tnp_P4
  SITE 270: note = Tnp_P5
MEITTIGLDLAKSVFQVHGVDATGQVVIRRSLRRAQMLPFFARLPSCLVGMEACGTSHYWARELIKLGHQVRLMPPAYVKPYVKRGKTDAADAEAVCEAVTRPTMRFVPVKSPEQQAALSMHRTRDLLVKQRTQLVNMMRGLLAEFGIDIPKGLERALLMARRIVDGEAPDVPTEAAKIVSTLSQQALDIHIRLREIDRDLLVWQRGNNVARRLMTIPGIGPIGATALAASITDPRQFRSGRQFAAWLGLTPLQKSSGGKERLGRISKMGDKYLRKLLIVGMTSLVRRAK

SEQ ID NO: 10539 - protein, 341 aa, unidentified
  source 1..341: note = protein_95b0838
  REGION 7..149: note = RuvC_domain
  SITE 10: note = RuvC_P1
  SITE 53: note = RuvC_P2
  SITE 88: note = RuvC_P3
  SITE 90: note = RuvC_P4
  SITE 93: note = RuvC_P5
  REGION 210..294: note = Tnp_domain
  SITE 218: note = Tnp_P1
  SITE 248: note = Tnp_P2
  SITE 256: note = Tnp_P3
  SITE 257: note = Tnp_P4
  SITE 269: note = Tnp_P5
MQKFIRIGVDLAKNYFQVHALVSEGGSAVTRKLTRSKMREFFAQIEPCRIGLEACGSAHYWARELQAMGHEAFLMPPAYTKPYVKRGKNDAVDAEAICEAVSRPGMRFVPIKSAEQQATLTLHKTRDLLVKQRTMTVNALRSHLSEFGIIVAKGIGHVSDLLQLAETDARLPSVANASVKALAQQIDAIDQSLDDLEKEIANAHSRSEMSQLLVEIPGVGKITATVISASMPDPNVFRSGRDFAAWLGLTPRQNSSGGKPSLGAITKQGNKYIRKLLVLAGTSLLNVVGKRKGVLRDWIVGLLAKKPARLVTVAIANKLARIIWAMMKTGESFRTEMFMKA

SEQ ID NO: 10540 - protein, 343 aa, unidentified
  source 1..343: note = protein_a730270
  REGION 7..149: note = RuvC_domain
  SITE 10: note = RuvC_P1
  SITE 53: note = RuvC_P2
  SITE 88: note = RuvC_P3
  SITE 90: note = RuvC_P4
  SITE 93: note = RuvC_P5
  REGION 212..303: note = Tnp_domain
  SITE 220: note = Tnp_P1
  SITE 250: note = Tnp_P2
  SITE 258: note = Tnp_P3
  SITE 259: note = Tnp_P4
  SITE 271: note = Tnp_P5
MAAITTIGLDIAKSVFQVHGVDANGHLVIRRQLKRRHVLAFFQKLPPCLIGIEACATSHYWSRQLQALGHTVRLMPPAYVKPYVKRQKNDAADAEAICEAVTRANMRFVETKTAEQQSCLTLHRTRHLFIRQQTSVINAIRAHLAEFGIVAPVGRNGIEELLHVVADPNDQRVPEITRACVAALGAQLHRLREQILAFDRMIMAWHRSSATSKRLDEIPGVGPALATALVASIADPKAFRSGRDFSAWIGLVPKQHSSGGKEKLGSISKQGDRYLRSLFTTGALAVIRYAKIYGTKHRPWLTALLARRPTKVAAIALANKIARMAWAMMTKGERYKEPIALAA

SEQ ID NO: 10541 - protein, 342 aa, unidentified
  source 1..342: note = protein_ddfd43e
  REGION 7..148: note = RuvC_domain
  SITE 10: note = RuvC_P1
  SITE 53: note = RuvC_P2
  SITE 88: note = RuvC_P3
  SITE 90: note = RuvC_P4
  SITE 93: note = RuvC_P5
  REGION 212..299: note = Tnp_domain
  SITE 220: note = Tnp_P1
  SITE 250: note = Tnp_P2
  SITE 258: note = Tnp_P3
  SITE 259: note = Tnp_P4
  SITE 271: note = Tnp_P5
MEEVVTVGLDIAKSVFQVHGVDAEGRVVVQRKLSRAKLLPFFEKLPPCLIGIEACATAHHWGRRLTELGHEVKLMPPSYVKPYLKRQKNDAADAEAICEAVTRPSMRFVEVKSPAQQSELVIHRTRMTLMRHRIELSNTIRAHMAEFGLAAPIGRMGLQGLIEIVRDEADERVPASARICLKLLADQLVLVNRQVLETDRLILASARATEVGRRLMAVPGVGPVLASAIVASVPDPHAFKTGRNLAAWIGLVPKQNSSGGKARLGGITKQGNRYLRQLLVIGALAVIRYAERHGTRRPWLVQLMARRTTKIAAVALANKTARMIWAIMTSGEVYREPVPHAA

SEQ ID NO: 10542 - protein, 314 aa, unidentified
  source 1..314: note = protein_494a5b0
  REGION 8..149: note = RuvC_domain
  SITE 11: note = RuvC_P1
  SITE 53: note = RuvC_P2
  SITE 93: note = RuvC_P3
  SITE 95: note = RuvC_P4
  SITE 98: note = RuvC_P5
  REGION 190..274: note = Tnp_domain
  SITE 198: note = Tnp_P1
  SITE 227: note = Tnp_P2
  SITE 235: note = Tnp_P3
  SITE 236: note = Tnp_P4
  SITE 247: note = Tnp_P5
MIIPLRYVGIDVSKKHLDIFDEADGVPRRIANATQAITQQVARWRCDTLVVFEATGTYDLKLREALGQAGVHFARINPARARDFARASGQLAKTDPIDARMLAAFGRVMQPAVEQAAANPARNALAGLAKRRDQLVLMRAQEKNRRSEADDRAMAGRISRLIEVLDGEIAEIEADIKALTKAEPEIADDARLMRSVPGVGPVACMQLIAKMPELGRVGAKQIAALAGLAPFNVDSGAFRGKRKIAGGRKRVRDALYMAALNAVRRADPFKAFYERLRLAGKPAKIALVAVARKLLTVINAIMRERKPYLTTTPT

SEQ ID NO: 10543 - protein, 338 aa, unidentified
  source 1..338: note = protein_a4dfa05
  REGION 7..149: note = RuvC_domain
  SITE 10: note = RuvC_P1
  SITE 53: note = RuvC_P2
  SITE 88: note = RuvC_P3
  SITE 90: note = RuvC_P4
  SITE 93: note = RuvC_P5
  REGION 212..300: note = Tnp_domain
  SITE 220: note = Tnp_P1
  SITE 250: note = Tnp_P2
  SITE 258: note = Tnp_P3
  SITE 259: note = Tnp_P4
  SITE 271: note = Tnp_P5
MSKITTIGLDLAKNVFHVVGCDAHGKLVRRKQLRRGQMLRYFANLPPSLVGMESCASASYWARELQAQGHAVKLIPPQYVKPYVRGNKNDYNDALAIAEALVRPQMRFAAIKTVAQQDIQALHRLRERRIAERTALCNQVRGLLGEYGIVLPKGVASLRRRLPELLEDAGNGLSELFRRLLAQCYQQFGELDAHIDGYTRELKRQSRQSAACQRLETIPGYGPIVASVFYSVVGDGSAYRRGRDVSAAVGLVPRQHSSGGKENLLGISKRGDRYLRSLLIHGARSVVRQAAGKDDRLSRWINRVKAARGYNKAVVALANKLARIGWAVLAHNTTYQAV

SEQ ID NO: 10544 - protein, 345 aa, unidentified
  source 1..345: note = protein_5460186
  REGION 12..154: note = RuvC_domain
  SITE 15: note = RuvC_P1
  SITE 58: note = RuvC_P2
  SITE 93: note = RuvC_P3
  SITE 95: note = RuvC_P4
  SITE 98: note = RuvC_P5
  REGION 216..301: note = Tnp_domain
  SITE 224: note = Tnp_P1
  SITE 254: note = Tnp_P2
  SITE 262: note = Tnp_P3
  SITE 263: note = Tnp_P4
  SITE 275: note = Tnp_P5
MGKVNAMRQLTFGIDLAKNVFQVHAVDAAGVIVVQQKLRRGQLLAFFQKVEPSLIGMEACSAAHHWARELMAIGHDVKLMVPAYVKPYVKRGKNDAVDAEAICEAVARPTMRFVPVKTSLQQSILMVHRSRALLVRQRTMLVNALRGHLAELGIVAPVGIERVADLVQRVFSERRDLPDLVYDIVASLVKQIGCLTDEVRILEVKIKQWHRDNPVSRRLATIPGVGVITATALAATISDASAFRSGRQFAAWLGLTPRSNSSGGKERLGRITKAGDRYLRTLLVVGATAVIRYARQKAGSPLMEWVRKLLQSKSPRLASVALANKMARMVWAVMAHNTVYRPTAA

SEQ ID NO: 10545 - protein, 343 aa, unidentified
  source 1..343: note = protein_603435d
  REGION 7..149: note = RuvC_domain
  SITE 10: note = RuvC_P1
  SITE 54: note = RuvC_P2
  SITE 89: note = RuvC_P3
  SITE 91: note = RuvC_P4
  SITE 94: note = RuvC_P5
  REGION 213..298: note = Tnp_domain
  SITE 221: note = Tnp_P1
  SITE 250: note = Tnp_P2
  SITE 258: note = Tnp_P3
  SITE 259: note = Tnp_P4
  SITE 271: note = Tnp_P5
MNTIKVVGIDLAKNVFQVCVWLTDNSVAWNKKVSRQKLLDTLSAFPPNTLIAMKACQSAHYWGRKLQAMGYKIRLIPTQHVKALCKNQKNDANDALAICETACRPEIHFVPVKTIEQQDIKALRSVRQLMVEQRTALVNQTRALLAEQGIVIPAGIQQLRQALPDILEEGNNALSFVLRRLLHSLQEDMQRFDARLHEMDKEIQAVSSRQSGYAHLLTIPGVGPLIAAAFVSEVNVEQFSHDRQLSAWCGLVPRQYSSGGKNRLAGITKQGNNRHLRTLIIHGARAVMRYSQRREDALGEWLRKLIARCGVMKATVALVNKLVRIIWRILKDDVDFMMKKAVN

SEQ ID NO: 10546 - protein, 322 aa, unidentified
  source 1..322: note = protein_b0517ed
  REGION 1..144: note = RuvC_domain
  SITE 43: note = RuvC_P2
  SITE 83: note = RuvC_P3
  SITE 85: note = RuvC_P4
  SITE 88: note = RuvC_P5
  REGION 253..320: note = Tnp_domain
  SITE 261: note = Tnp_P1
  SITE 291: note = Tnp_P2
  SITE 299: note = Tnp_P3
  SITE 300: note = Tnp_P4
  SITE 313: note = Tnp_P5
MDKKKTYKSSFKVSHTLEGLDILHQYLREIENLTGVKPPIVLEATGHYHTPVVQYFEDRDYLLIIINPLISYRAKSSSLRKVKTDKIDTYHLCELYYKEDLEPYKKRGIHLLNLRNLTRHHENLTEIFVQAKLQFQAVLDQVFPEYKGVFGDLYSVVSLLTLLEYPTSYDVLETCEETIATRIKENCNSRSHSWANTKAKELKASAARNPFQRTLYQSHILTQKMYINMLLEYQKHLSTFQAEIDALAELIEYKIIQSIPGIGEKIAATIISEIGEIDRFNLPKKLVAFAGIDPSIFESGRFKGTVNRITKRGSSRLRRSRI

SEQ ID NO: 10547 - protein, 411 aa, unidentified
  source 1..411: note = protein_6c45e88
  REGION 9..168: note = RuvC_domain
  SITE 12: note = RuvC_P1
  SITE 65: note = RuvC_P2
  SITE 105: note = RuvC_P3
  SITE 107: note = RuvC_P4
  SITE 110: note = RuvC_P5
  REGION 276..362: note = Tnp_domain
  SITE 284: note = Tnp_P1
  SITE 315: note = Tnp_P2
  SITE 323: note = Tnp_P3
  SITE 324: note = Tnp_P4
MGELLKLFVGDDWAEDHHDVEMMDDSGRRLAKVRLPEGVAGVARLHALIGGLADEDTDQVEVLVGIETDRGPWVGALVAAGYTVMAVNPLQAARFRDRLGVSGAKSDAADAHVLADMVRTHAHELRPVAGDSDRAEAIKVIARTHKTMIWERTRHTQRLRHALRDYFPAALDAFDDLDAADTLELLAKAPTPDRAARLTITQISAAMKRAHRKHIAAKAPIIQAALRAEHLGQPEVVNQAYAASVGSLLAVIAVLNTQIKALAEQVDTHFGHHPAAEIILTQPGLGTILGARVLAEFGDDPTRYATAKARKNYAGTSPITRASGKKKVTLARFVHNDRLVDALLTQAQSALLSSPGARDYYDKQRARGSGHNTALRQLANRLVGILHGCLKAGTPYDETTAWPEPKSKVAA

SEQ ID NO: 10548 - protein, 346 aa, unidentified
  source 1..346: note = protein_2de034a
  REGION 6..148: note = RuvC_domain
  SITE 9: note = RuvC_P1
  SITE 52: note = RuvC_P2
  SITE 87: note = RuvC_P3
  SITE 89: note = RuvC_P4
  SITE 92: note = RuvC_P5
  REGION 211..297: note = Tnp_domain
  SITE 219: note = Tnp_P1
  SITE 249: note = Tnp_P2
  SITE 257: note = Tnp_P3
  SITE 258: note = Tnp_P4
  SITE 270: note = Tnp_P5
MNITTIGVDLAKSVFQVHGVDGHGKAGLRKQLRRAQVLPFFANLPPCLVGMEACGGAHYWARELAKLGHTVRLMAPQFVKPYVKTNKNDAADAEAICEAAGRPSMRFVPVKNAGQQAVLSLHRAREGFVKARTAQANPIRGLLAEYGIVMPQGIGNIAKRLPEILEDGEGGLPGVLRQLLQRLGGHLKELDRQVDELDAQIQRWHRDNAASRRLAAIPGIGPVTASALVASVGDAKDFEDGRQLAAWLGLVPRQRSSGGKQTLLGISKRGDCYLRTLLIHGARAVVRVAERKAEKADGWLTRIMARRNKNVATVALANKNARVAWALLAHDREFQPGYAAAAAAGA

SEQ ID NO: 10549 - protein, 345 aa, unidentified
  source 1..345: note = protein_ae77a96
  REGION 6..149: note = RuvC_domain
  SITE 9: note = RuvC_P1
  SITE 54: note = RuvC_P2
  SITE 89: note = RuvC_P3
  SITE 91: note = RuvC_P4
  SITE 94: note = RuvC_P5
  REGION 213..299: note = Tnp_domain
  SITE 221: note = Tnp_P1
  SITE 251: note = Tnp_P2
  SITE 259: note = Tnp_P3
  SITE 260: note = Tnp_P4
  SITE 272: note = Tnp_P5
MSISRVGVDIAKSVFHVHGVDRHDQVEWLGKYKRDKWLDAIVKRVPTGAVIGMEACASAHHWARELQARGYHVKLIAAQFVKPYVKSNKNDRVDAEAICEAIGRPSMRFVAVKTVSQQDIQAAHRIRSELVHQRTAKANQIRGLIGEYGLVAPIGTGQLRTALPRWLEDAENGLTDDFRVLLSGLAEELRYLDERIATVTERIERHAQTDPVAKRLMTLRGVGTLIASALAGALGDAQAFKCGRDFAASLGLTPRQHSTGGRDRLLGISKRGDSYLRSLLVHGARAAFRWSEGRKDNLSHWVRQLAERKHVNVAVIALANKTARIAWAITRHDQAYDPDLASQAA

SEQ ID NO: 10550 - protein, 343 aa, unidentified
  source 1..343: note = protein_a7774d5
  REGION 6..148: note = RuvC_domain
  SITE 9: note = RuvC_P1
  SITE 52: note = RuvC_P2
  SITE 87: note = RuvC_P3
  SITE 89: note = RuvC_P4
  SITE 92: note = RuvC_P5
  REGION 211..300: note = Tnp_domain
  SITE 219: note = Tnp_P1
  SITE 249: note = Tnp_P2
  SITE 257: note = Tnp_P3
  SITE 258: note = Tnp_P4
  SITE 270: note = Tnp_P5
MQIVRIGLDLAKYVFEVHGVDAYGRIVVRKSLRRGAVATFFANLPPCLVGMQASNGAHYWARVLSELGHQVRLISPQFVTPYVKSNKNDRNDAEAICEAVGRPTMRFVPPKSSEQLAIQAVHRIGSRLVANRVKLANQIRGLLSEHGIVTARNIPRLRRALADIAGTNDDELNGLVRVLVREVQVELIELDRRIVSYDRRIGELYRNSELCQRLGRIEGIGPVTATALVAAVGDRTCFKNGRQFAAWLGLVPRQRSSGGRTQLFGISKRGDRYLRTLLIHGARAALCKAGGKQDARSRWLNNLRRRRHHNVAAVALANKNARIVWALLAGDKFYEPERSVQAA

SEQ ID NO: 10551 - protein, 324 aa, unidentified
  source 1..324: note = protein_af5a1c2
  REGION 1..76: note = RuvC_domain
  SITE 15: note = RuvC_P3
  SITE 17: note = RuvC_P4
  SITE 20: note = RuvC_P5
  REGION 186..286: note = Tnp_domain
  SITE 194: note = Tnp_P1
  SITE 224: note = Tnp_P2
  SITE 232: note = Tnp_P3
  SITE 233: note = Tnp_P4
  SITE 246: note = Tnp_P5
MISYKAKSSSLRKVKTDAADAYLLCELYYKEELEPYKKRGVQLLNLRNLTRQHENITGTLIQTKLQFQAILDQVFPEFRGVFGDLYSVVSLLTLKEFPSSEDILNASDEVLTEKIHGNCKSRSLSWASDKAAQIKAAAIRNPFEKAVYQSHILSLGMFINIILQYKEHLSMLESEIDALAQEVEEYEVIKSIPGIGEKIAATIISEIGEIDRFDHPKKLVAFAGVDPSVFESGKFTATKNRITKRGSSRLRHALYMAVRCAIRDCRKKKTSDEIIPRNKKLREFYDKKRDEGKPFKVAVIACVNKLLHWIYALLKSNTLFQDVV

SEQ ID NO: 10552 - protein, 319 aa, unidentified
  source 1..319: note = protein_de65188
  REGION 9..153: note = RuvC_domain
  SITE 12: note = RuvC_P1
  SITE 56: note = RuvC_P2
  SITE 96: note = RuvC_P3
  SITE 98: note = RuvC_P4
  SITE 101: note = RuvC_P5
  REGION 192..277: note = Tnp_domain
  SITE 200: note = Tnp_P1
  SITE 229: note = Tnp_P2
  SITE 237: note = Tnp_P3
  SITE 238: note = Tnp_P4
  SITE 249: note = Tnp_P5
MAQNAHVVVGIDVAKDKVDACIRALGLRQTLPSTTQGHRKLVAWLRKHQANKAVMEASGGYERAWAKVLRDAGIEVRIVDPKRVRSFALSAGRLAKNDTIDAEMIAWFAETFSDAPGQKHDAAQEELQALVKARLSLIDFRMRLVSQSEHAAPGLVQKAHARILKNLACEIAKLEAAICAKIKSMPDFAERAEIIESVPGFAETSSANLLAGMPELGQVSNKIAAALIGVAPYDDDSGKRRGERHIKGGRRWVRNAIYMPCVGAATLNNPVLKAYYQRLIAKGKEPKIAIIAGMRKLIIILNTMIARRQKWDPSRYALS

SEQ ID NO: 10553 - protein, 342 aa, unidentified
  source 1..342: note = protein_50dd54d
  REGION 7..150: note = RuvC_domain
  SITE 10: note = RuvC_P1
  SITE 54: note = RuvC_P2
  SITE 89: note = RuvC_P3
  SITE 91: note = RuvC_P4
  SITE 94: note = RuvC_P5
  REGION 211..295: note = Tnp_domain
  SITE 219: note = Tnp_P1
  SITE 249: note = Tnp_P2
  SITE 257: note = Tnp_P3
  SITE 258: note = Tnp_P4
  SITE 270: note = Tnp_P5
MQQFIRIGVDLAKNYFQIHALASEDGSSIVRRKLTRTKMREFFSRIEPCLVGMEACGSAHYWARELKAMGHEAVLMPPAYTKPYVKRGKNDAVDAEAICEALSRPGMRFVPVKSPQQQATLAVHRTRDLLVKQRTMSVNALRSHLAEFGIISAKGIGRVDDLVDKAEHDVTLPSAARVVVKTLAQQIREIDISVDRLEREIAEAHSSSDMSQLLAEIPGVGKLTATVIDASMPNADVFRSGRDFAAWLGLTPRQNSSGGKQSLGAITKQGNRYIRKLLVLAATSLLNVLGRRKGALRDWIVGLLAKKPARLVTVALANKLARIIWAVKKTGESFRSEKFAKA

SEQ ID NO: 10554 - protein, 338 aa, unidentified
  source 1..338: note = protein_1593422
  REGION 6..147: note = RuvC_domain
  SITE 9: note = RuvC_P1
  SITE 52: note = RuvC_P2
  SITE 87: note = RuvC_P3
  SITE 89: note = RuvC_P4
  SITE 92: note = RuvC_P5
  REGION 209..293: note = Tnp_domain
  SITE 217: note = Tnp_P1
  SITE 246: note = Tnp_P2
  SITE 254: note = Tnp_P3
  SITE 255: note = Tnp_P4
  SITE 267: note = Tnp_P5
MAYKRISIDTSKHVFTIHGVDEVERPVLRRDLRRSQVEAFFAKLEPTEVALEACAGAHHWGRRLGAMGHRVKLIPPQYVKPFVKRNKNDRNDAEAIGEAASRPSMPTVPVKSLDEQAATIIVKHRELLVGQRTAAINALRGHAAEFGVIAAKGTANIEALLAVLAEAPEIPATAKVAFAAMGEHIADLDAKLAVMDKQLLEQHKSNPVSQLLVTIPGIGPITAITLALSVNPANFESGRHFAAWLGVTPRENSTGGKHRLGKISKAGNERLRTLLVVGATSVIRVAKPGRSSSSAWLLGLLARKPKKLAAVALANKMARIIWAMMARGEAYRRQPSAA

SEQ ID NO: 10555 - protein, 346 aa, unidentified
  source 1..346: note = protein_9f089a5
  REGION 5..152: note = RuvC_domain
  SITE 8: note = RuvC_P1
  SITE 55: note = RuvC_P2
  SITE 92: note = RuvC_P3
  SITE 94: note = RuvC_P4
  SITE 97: note = RuvC_P5
  REGION 212..296: note = Tnp_domain
  SITE 220: note = Tnp_P1
  SITE 250: note = Tnp_P2
  SITE 258: note = Tnp_P3
  SITE 259: note = Tnp_P4
  SITE 271: note = Tnp_P5
MKQYAGIDVSLEASHVCVVDAEGKIIREGKVLSEPEALIAWFAEHGVAMERIGLEAGPLSQWLYAAMSEGGFAVELLETRHVRTAFKTMPVKTDKKDARGIAQLMRLGWFRPVHCKSVPAQEVRAVLTARKLLQGKLHDVEMSLRGILRGFGLKVGATTPKTYPARIRTLVEGHPALEVIATALLKARGVLAEEFRGFERRVRAMARQDERARRLMTTPGVGVLVALTFVAAVDDPERFCSSRAVGPHFGLTPKKYQSGETDYTGRISKIGDAGVRAALYEAANVILTRPVRGSDLKTWALGVAKRAGPRKAKVALARKLAVVLHRMLRDQTSFVTHRAAPSVAAA

SEQ ID NO: 10556 - protein, 341 aa, unidentified
  source 1..341: note = protein_4da92c6
  REGION 6..161: note = RuvC_domain
  SITE 9: note = RuvC_P1
  SITE 67: note = RuvC_P2
  SITE 105: note = RuvC_P3
  SITE 107: note = RuvC_P4
  SITE 110: note = RuvC_P5
  REGION 211..299: note = Tnp_domain
  SITE 219: note = Tnp_P1
  SITE 250: note = Tnp_P2
  SITE 258: note = Tnp_P3
  SITE 259: note = Tnp_P4
  SITE 272: note = Tnp_P5
MKNLFIGVDFSKEKVDVAILFADGLVETAARVFNEFKTTVSGYRQLVKWVEQNSCGIDSSLWLFCGENTGDYSKGLCNFLYGKGYDMWLENAKSIKDASGLRRLKSDRADASMIAEYAMRNYDKAVMYEPLSESLTQLRELFLYRQMIVRHRCSFQVRRGEKRLTMEKSPVKTMISQSGRHIVSELNKEIEKIDKRIADLIKSDEELTEVFTIVTSVPGIGTQNAVCLMVYTDNFRRFNYDSRKIACYYGLAPFGKDSGTSVHSDPHVHYMANRQIKAMLTQAALSAVNFNPIMARYYMRLVERGKKKQVALNNVKNKLVHLVTAMVRNRQTFTPEYKISA

SEQ ID NO: 10557 - protein, 321 aa, unidentified
  source 1..321: note = protein_f3eb5ff
  REGION 8..150: note = RuvC_domain
  SITE 11: note = RuvC_P1
  SITE 52: note = RuvC_P2
  SITE 92: note = RuvC_P3
  SITE 94: note = RuvC_P4
  SITE 97: note = RuvC_P5
  REGION 191..278: note = Tnp_domain
  SITE 199: note = Tnp_P1
  SITE 229: note = Tnp_P2
  SITE 237: note = Tnp_P3
  SITE 238: note = Tnp_P4
  SITE 251: note = Tnp_P5
MNKYKEIHGVDISKDVFDVVCPNGRHHQFSNAPKGFEQYLRLLGEEDLVVMEATGYYHYSLAQFLYTSRIKVSVVNPLSVKRFRQMKLAKVKTDKSDARAIRDYGRTNEVPLYDGKGALQAESLQLLALMDIYLKQRTQIKNKLHGEKILGIPSNVVYRSLKRTLKDLERELGSLNERLLCLVKETQQEQLTNLKSIPGLGDRTVALLIVLTEGFTKFENAGQLCNYAGITPTIRRSGSSVRGRGRISKVGNRKLRNLLFLCAFSACKHNKGCREIYERITAKGKSKKLALIAVSNKLLKQAFAIAKSGLPYDENYVSKLN

SEQ ID NO: 10558 - protein, 269 aa, unidentified
  source 1..269: note = protein_e369444
  REGION 6..147: note = RuvC_domain
  SITE 9: note = RuvC_P1
  SITE 52: note = RuvC_P2
  SITE 87: note = RuvC_P3
  SITE 89: note = RuvC_P4
  SITE 92: note = RuvC_P5
  REGION 211..269: note = Tnp_domain
  SITE 219: note = Tnp_P1
  SITE 249: note = Tnp_P2
  SITE 257: note = Tnp_P3
  SITE 258: note = Tnp_P4
MKVTTFGLDLAKSVFQLHWVDTATGEVCRRRLRREQVLPFFANREPAVVAMEACGSAHYWGRQVRALGHEVKLIAAQLVRPFVPTNKTDAADARAIWEAVQRPQMRFVALKDEGQQSVLALHRMREQLVKARTMQSNQLRGLLYEFGVVLPVGRERALLVLPDKLEQLASRLPAMLLTMLERQQARLAELTKDIVAIELQLKGWAKTNAPSRRLQDIPGVGLLTATAAVAMIGEAKHFRSGREFAACLGLVPRQSGTGGRAAAGDQQTR

SEQ ID NO: 10559 - protein, 349 aa, unidentified
  source 1..349: note = protein_1aaf2a5
  REGION 6..147: note = RuvC_domain
  SITE 9: note = RuvC_P1
  SITE 52: note = RuvC_P2
  SITE 87: note = RuvC_P3
  SITE 89: note = RuvC_P4
  SITE 92: note = RuvC_P5
  REGION 211..300: note = Tnp_domain
  SITE 219: note = Tnp_P1
  SITE 249: note = Tnp_P2
  SITE 257: note = Tnp_P3
  SITE 258: note = Tnp_P4
  SITE 270: note = Tnp_P5
MKVTTFGLDLAKSVFQLHWVDTATGEVCRRRLRREQVLPFFANREPAVVAMEACGSAHYWGRQVRALGHEVKLIAAQFVRPFVPTNKTDAADARAIWEAVQRPQMRFVALKDEGQQSVLALHRMREQLVKARTMQSNQLRGLLYEFGVVLPVGRERALLVLPDKLEQLASRLPAMLLTMLERQQARLAELTKDIVAIELQLKGWAKTNAPSRRLQDIPGVGLLTATAAVAMIGEAKHFRSGREFAACLGLVPRQSGTGGRVKLLGISKRGDVYLRTLLIHGARAVLNRRQEPEPWLQKLLARRPPNVVAVALANKMARRIWALLAHGRTYEPGYVSTRPVRGQPVPQGH

SEQ ID NO: 10560 - protein, 312 aa, unidentified
  source 1..312: note = protein_479a713
  REGION 4..122: note = RuvC_domain
  SITE 26: note = RuvC_P2
  SITE 61: note = RuvC_P3
  SITE 63: note = RuvC_P4
  SITE 66: note = RuvC_P5
  REGION 184..268: note = Tnp_domain
  SITE 192: note = Tnp_P1
  SITE 222: note = Tnp_P2
  SITE 230: note = Tnp_P3
  SITE 231: note = Tnp_P4
  SITE 243: note = Tnp_P5
MFRKKLRRAQVLAFFSQVPRCVVAMEACGGAHFWGREIGSLGHEVRLIPPAYVKPFVKRQKNDAADAEAICEAAQRPSMRFVPVKSEEIQGAASAFRVRELLIRQRTQAINALRGHLAEFGQVVPQGAANVSRLIAIVDDPDNGLPDQAVATLRVLAETLAGFDTQIAKLDAEIRHRAKQNAVARRLMTIPGIGPLIATALAVLAPPPETFRRGRDFAAWLGLVPRQHSTGGKQRLGATTKMGEQSLRRLLIIGANSVIIKQRAARPGTWLAGMLSRKPSMLVRVALANKMARVVWALMLKGEDYRAPAAAA

SEQ ID NO: 10561 - protein, 417 aa, unidentified
  source 1..417: note = protein_4f0e638
  REGION 18..170: note = RuvC_domain
  SITE 21: note = RuvC_P1
  SITE 69: note = RuvC_P2
  SITE 107: note = RuvC_P3
  SITE 109: note = RuvC_P4
  SITE 112: note = RuvC_P5
  REGION 277..363: note = Tnp_domain
  SITE 285: note = Tnp_P1
  SITE 316: note = Tnp_P2
  SITE 324: note = Tnp_P3
  SITE 325: note = Tnp_P4
  SITE 336: note = Tnp_P5
MKSARNTLPEEPLNAVTAGLDWARDDHAVSVVNARGQEVDRCTVEHTAAGLRDLIAVLGRNGVGEVAIERPDGPVVDALLQAGVTVVVISPNQVKNLRSRYGSAGNKDDRFDAYVLADTLRTDRARLAPLTPDSPETVVLRRACRTRKDLVAHRVAVANQLRAHLRNAFPGAVGLFAEIDSPISLQFLTRFDTQDRADWLSPKRLGAWLASVGYSGKKDPAALHTYLLAAPRGATGHDATLNAQITHALVALLTTLVDQIKTLTGQISDQLTTHTDQHIFTSLPRSGRVRAARLLAEIGDCRARFPTPEALACLAGAAPSTRQSGKLRTVSFRWACDKQLRDAVTDFAGDSRRANPWAADLYDRARSRGHDHPHAVRILARAWLFVIWHCWQNNTAYNPTKHNALQHILNPTQQEAG

SEQ ID NO: 10562 - protein, 340 aa, unidentified
  source 1..340: note = protein_fbdb9ad
  REGION 7..148: note = RuvC_domain
  SITE 10: note = RuvC_P1
  SITE 53: note = RuvC_P2
  SITE 88: note = RuvC_P3
  SITE 90: note = RuvC_P4
  SITE 93: note = RuvC_P5
  REGION 210..296: note = Tnp_domain
  SITE 218: note = Tnp_P1
  SITE 248: note = Tnp_P2
  SITE 256: note = Tnp_P3
  SITE 257: note = Tnp_P4
  SITE 269: note = Tnp_P5
MTEVTTIGLDIAKHVFQAHGVDATGRAVFRKKISRAKLLAFFAAQPRCLVALEACGGAHHWARELIKLGHDVRLIAPAYVKPFVKRQKNDAADAEAICEAVQRPAMRFVAVKTEAQQAAALVFRARDLLVRQRTQTINALRGHMTEYGWVAPQGPSHMAKLAELLEDPLAVPGPVQAICRVLLDSLAMLDRQIAVLDKEIARRAQEDEVARRLMTIPGIGPITATAITALAPPPETFTKGRDFAAWVGLTPRQHSSGGKQKLGAISKMGERTLRRLLIIGSSAVVLQASKRGAPKGSWLAHMLARKPRMLVTVALANKTARIVWALLVKQEDYQAPAMTA

SEQ ID NO: 10563 - protein, 274 aa, unidentified
  source 1..274: note = protein_6aa5cc0
  REGION 2..78: note = RuvC_domain
  SITE 17: note = RuvC_P3
  SITE 19: note = RuvC_P4
  SITE 22: note = RuvC_P5
  REGION 141..232: note = Tnp_domain
  SITE 149: note = Tnp_P1
  SITE 179: note = Tnp_P2
  SITE 187: note = Tnp_P3
  SITE 188: note = Tnp_P4
  SITE 200: note = Tnp_P5
MRLIPPAYVKPYVKRGKTDAADAEAICEAVTRKTMRFVPVKSADQQAAAMVLKTRELLVRQQTQAINALRAHLAELGIIAAAGTTKVASLIDIVRDETDARLPQAARFALSEIADQIEGLSRKIGKLEHAIVMEAKRDDDMRRLCTIPGVGAIIAASIKTTVPDPGGFTSGRHFAAWLGLTPKPHSSGGKERLGGISKMGNPMLRSLLVLGATSVLRHVKGNASAPPWLSALLARRPFKVVAVALANKMARIIWALLTKGGKYRTSGKTSEAHA

SEQ ID NO: 10564 - protein, 330 aa, unidentified
  source 1..330: note = protein_e444671
  REGION 5..151: note = RuvC_domain
  SITE 8: note = RuvC_P1
  SITE 54: note = RuvC_P2
  SITE 94: note = RuvC_P3
  SITE 96: note = RuvC_P4
  SITE 99: note = RuvC_P5
  REGION 195..282: note = Tnp_domain
  SITE 203: note = Tnp_P1
  SITE 233: note = Tnp_P2
  SITE 241: note = Tnp_P3
  SITE 242: note = Tnp_P4
  SITE 255: note = Tnp_P5
MSDYVGIDIGAKSVVVSVRRAGRTLVSQEFRQTPEGHQALIDKLGSQVVCVVLEATGVYYLDLAMALHRAGLPVAVINPRSFHHFANLKLNSSKTDAVDAALLAEYGECIKPTLWQAPDEALMGLRDIGRQINRLTAARTQAKNRLHALRSKSNTLALLIEDEADGIERLDLRIDRLSKAALELINQQPHIKQQLANITCAKGIGQTSAIAMLAELCVLPRELKSPQVSRYAGLDVRLCQSGSSVSKPGRLSKAGNAYLRSAFFMPALSAVRHDPNAKAFYESLQQRGKKKIQALCAVMRKYLTGVWACLKLGVPFDSSKLFSTEHLENA

SEQ ID NO: 10565 - protein, 397 aa, unidentified
  source 1..397: note = protein_636f38a
  REGION 9..163: note = RuvC_domain
  SITE 12: note = RuvC_P1
  SITE 60: note = RuvC_P2
  SITE 100: note = RuvC_P3
  SITE 102: note = RuvC_P4
  SITE 105: note = RuvC_P5
  REGION 270..355: note = Tnp_domain
  SITE 278: note = Tnp_P1
  SITE 308: note = Tnp_P2
  SITE 316: note = Tnp_P3
  SITE 317: note = Tnp_P4
  SITE 329: note = Tnp_P5
MDSNYAVYCGIDVGKGEHHAVGLTAAGKKIYDKALPNDEAKLRAVFDRLASHGSVLVVVDQPNTIGALPVTVARVGGHEVGYLPGLAMRRIADLYPGQAKTDARDAFIIADTARTMPHTLRRVDTGDEALAELEVLVGFDDDLAGEATRVSNRIRGLLTSIHPALERVLGPRITHPAVLEVLSRCGGPAGIRQAGKRKLTAIAVKHAPRMGARLATDILAALDEQAVVVPGTTAAETVLPKLADSLKETLLQRKAVAVDVERALDDHPLSPVLTSMPGIGVRTAARILIEVGDGSAFPSAGHLAAYAGIAPVTHRSGSSIRGEHPARSGNRKLKRALFLSAFAALGDPTSRGYYDRKRAEGKKHNAALICLARRRCDVLYAMLKNKTLYQPPATAAA

SEQ ID NO: 10566 - protein, 401 aa, unidentified
  source 1..401: note = protein_369a6dd
  REGION 12..157: note = RuvC_domain
  SITE 15: note = RuvC_P1
  SITE 63: note = RuvC_P2
  SITE 99: note = RuvC_P3
  SITE 101: note = RuvC_P4
  SITE 104: note = RuvC_P5
  REGION 227..312: note = Tnp_domain
  SITE 234: note = Tnp_P1
  SITE 265: note = Tnp_P2
  SITE 273: note = Tnp_P3
  SITE 274: note = Tnp_P4
  SITE 285: note = Tnp_P5
MTIIPEPHHHVAGIDSHTETIHIAVITATGLEVDDHEFTTTTGYRKAVAWLVEHGPIAAVGIEGTSSYGIGITAALRAAGITVIEVNRTRPAERRKHGKTDRLDAYRAARCVISGEAATHPKHDSIEPLRALLVTRRSANKALQACWRQIRSLLVNAPATLRDKYRQTSRDKLIRHLAASRPDQIHDAAQALTMRALRSLARRHQFLHDELVDLEAQLDELTTTKNPGLRAMHGVGPVTAAVLLVTAGDNPARLTTPAGFAALCGTSPIPVSSGKTQRHRLSRGGDRQANWALHQIVKVRMVHDQRTRDYRDKHLDAGWTLAAVYRALKRAVAREVFRALTGNCEIPNYTDLRPARQAKKLTLTHAAQHFNVWPAHISEIELGKRRDDTLAQNYREWLQAA

SEQ ID NO: 10567 - protein, 354 aa, unidentified
  source 1..354: note = protein_136a903
  REGION 4..158: note = RuvC_domain
  SITE 7: note = RuvC_P1
  SITE 59: note = RuvC_P2
  SITE 100: note = RuvC_P3
  SITE 102: note = RuvC_P4
  SITE 105: note = RuvC_P5
  REGION 224..309: note = Tnp_domain
  SITE 232: note = Tnp_P1
  SITE 262: note = Tnp_P2
  SITE 270: note = Tnp_P3
  SITE 271: note = Tnp_P4
  SITE 282: note = Tnp_P5
MVTVGIDPHKDMHQAVALAQDGTRLGRAKKVKTGPEALGQLLTWIRALAGNGPVLWAIEGGPGLGRALADALLGAGQEVVWVPPRAMAAHRRLSGPVGAKSDVIDAVAIARAALATPDLARHRIDPQVRKVRSLVGLRQNLTDQRVALTNRVLAAVHIELDHRLGKGALKTRAKVGRVRALVEGAELDEVARWVLLEQLEEIHTLFVRAAEVERRLKELVEPLAPNLLGIRGVGVVWAAVLLSQVGDVSRFATSAKMARWAGSAPIPVFSSGRDRHRLHRGGNRQVNRALHSIGVVQVRLGEPAREFVRSREEAKGTKGAYRALKRHLADVVYRAMVADQVVRGRAEVSLQPAT

SEQ ID NO: 10568 - protein, 313 aa, unidentified
  source 1..313: note = protein_6038e48
  REGION 8..148: note = RuvC_domain
  SITE 11: note = RuvC_P1
  SITE 53: note = RuvC_P2
  SITE 93: note = RuvC_P3
  SITE 95: note = RuvC_P4
  SITE 98: note = RuvC_P5
  REGION 189..273: note = Tnp_domain
  SITE 197: note = Tnp_P1
  SITE 226: note = Tnp_P2
  SITE 234: note = Tnp_P3
  SITE 235: note = Tnp_P4
  SITE 246: note = Tnp_P5
MIIRPRYVGIDVSKRYLDIFDESLGVPERIANAPQAITQIAARWRCDVLVVFEATGVYDLELREALSQAGIRFARINPARARDFARASGQLAKTDPIDARMLASFARAMQPAAEQAANPARNALAGLAKRRDQLVLMRAQEKNRRSEAEDRAMADRIGRLIEVLDNEIAAIEADISALIKTEPEVSDDAQLMRSLPGVGPVTCMQLIAQMPELGKVGPKQVAALAGLAPFNVDSGAYRGKRKIVGGRKRVRDALYMAALNAVRRADPFKAFYARLRQAGKPAKLALIAVARKLLTVLNAIIRDRKPYLYTRPT

SEQ ID NO: 10569 - protein, 354 aa, unidentified
  source 1..354: note = protein_515c997
  REGION 12..153: note = RuvC_domain
  SITE 15: note = RuvC_P1
  SITE 58: note = RuvC_P2
  SITE 93: note = RuvC_P3
  SITE 95: note = RuvC_P4
  SITE 98: note = RuvC_P5
  REGION 217..302: note = Tnp_domain
  SITE 225: note = Tnp_P1
  SITE 255: note = Tnp_P2
  SITE 263: note = Tnp_P3
  SITE 264: note = Tnp_P4
  SITE 276: note = Tnp_P5
MSQKLNAAIAVIGIDIGKNSFHIVGQDHRGAIVLRQKWSRGQVETRLANLPPCLIGMEACVGAHHLSRKLQVLGHDARLMPAKYVRPYSKGQKNDFRDAEAIAEAVQRPTMKFVATKTADQLDLQALHRVRDRLVGQRTGAINQIRAFLLERGIAVRQGPHSLRFELPGILATRTDVLSPRMLPIIEGLAEDWRRLDERIEGLSGEIETLARQDRACQRLMTVPGIGPIISSAMVAAIGTGDVFSKGRDFGAWLGLVPKQISTGDRTILGSISRRGNRYLRALFVQAAWVVLVKVKCWERYGLNSWIEAAKKRLHHNVLAIALANKLARIAWAVLNKGRAFACVKMEETVSRPA

SEQ ID NO: 10570 - protein, 344 aa, unidentified
  source 1..344: note = protein_e4811c2
  REGION 6..147: note = RuvC_domain
  SITE 9: note = RuvC_P1
  SITE 52: note = RuvC_P2
  SITE 87: note = RuvC_P3
  SITE 89: note = RuvC_P4
  SITE 92: note = RuvC_P5
  REGION 211..297: note = Tnp_domain
  SITE 219: note = Tnp_P1
  SITE 249: note = Tnp_P2
  SITE 257: note = Tnp_P3
  SITE 258: note = Tnp_P4
  SITE 270: note = Tnp_P5
MQTTTIGIDLAKQFFQVHGVDEFGKTVLKKQLRRQQMAEFFVNLPPCLIGMEACGSAHYWARKLKGMGHTVRLMAPQFVKPYVKTNKNDAADAEAICEAVARPNMRFVPIKDVAQQSVLALHRARQGFVKARTAQANQIRGLLGEFGLIIPQGIGHIAHRVPELIEDASNELPGMFRLLVQRLLDHLKVLDKQVDELEAQIVAWHRQNPQSKKLEKIPGIGPLTASALIASLGDARNFENGRQVAAWLGLVPKQHASGGKQNLLGISKRGDTYLRTLLIHGARVVIHHASQRADSCSWINKMVARRNKNIAAVALANKNARTVWALLAHEREYQPEHHSQGVAA

SEQ ID NO: 10571 - protein, 339 aa, unidentified
  source 1..339: note = protein_595af69
  REGION 6..147: note = RuvC_domain
  SITE 9: note = RuvC_P1
  SITE 52: note = RuvC_P2
  SITE 87: note = RuvC_P3
  SITE 89: note = RuvC_P4
  SITE 92: note = RuvC_P5
  REGION 210..294: note = Tnp_domain
  SITE 218: note = Tnp_P1
  SITE 248: note = Tnp_P2
  SITE 256: note = Tnp_P3
  SITE 257: note = Tnp_P4
  SITE 269: note = Tnp_P5
MKYTPVGVDIAKHLIQVHFINEHTGEVVDKQLRSKDFLTFFSNREPCLIGMEACGGSQHWARELAKLGHRVRLLQARFVKAFVMGNKNDVMDARAIWMAVQQPGKEIAVKTEAQQSVLVLHRSRMQLVKFRTAQINALHGTLLEFGETIHKGRAAMDREFPAALERMKARLPQYLITVLEDQYNRLNELDSLIDGLEKQLHSVARQNEACKRLMEIPGVGPLIATAAVATMGEASAFKSGREFAAYVGLVPKQTGSGGKVRLLGISKRGDTYLRTLFIHGARAAALVAKEPGSWITELKKRRPTSVAIVAMANKLARTVWAIAAHDRKYDKNHVSIRPY

SEQ ID NO: 10572 - protein, 339 aa, unidentified
  source 1..339: note = protein_632e1bf
  REGION 6..147: note = RuvC_domain
  SITE 9: note = RuvC_P1
  SITE 52: note = RuvC_P2
  SITE 87: note = RuvC_P3
  SITE 89: note = RuvC_P4
  SITE 92: note = RuvC_P5
  REGION 210..297: note = Tnp_domain
  SITE 218: note = Tnp_P1
  SITE 248: note = Tnp_P2
  SITE 256: note = Tnp_P3
  SITE 257: note = Tnp_P4
  SITE 269: note = Tnp_P5
MKHMTVGVDIAKNVMQLHYIDAATGEIVNKPVKRGAFLEHFVNLAPCLIGMEACGGSQHWARKLVAMGHQVRLMPGKFVKAFVMGNKSDMTDAKAIWLTVQHADRSVAVKTETQQAVLGLHRMREQLVKFRTMQINNLRGLLTEYGEVMGRGRTALDKAMPGVLERLVDRLPTILIDTLREQWSGLTNLDKQIASIERRLQTWMKEDKGCKAIAAIPGVGLLTATAVVATMGDAKTFQSGREFAAWIGLVPRQVGTGGKVQLLGISKRGDVYLRKLLIHGARSVLCLAKEPGPWVEEIKKRRPMNVAAVAQANRMARTIWAILAHDRQYEKGYVSVKPV

SEQ ID NO: 10573 - protein, 336 aa, unidentified
  source 1..336: note = protein_6c09553
  REGION 7..149: note = RuvC_domain
  SITE 10: note = RuvC_P1
  SITE 53: note = RuvC_P2
  SITE 88: note = RuvC_P3
  SITE 90: note = RuvC_P4
  SITE 93: note = RuvC_P5
  REGION 212..298: note = Tnp_domain
  SITE 220: note = Tnp_P1
  SITE 250: note = Tnp_P2
  SITE 258: note = Tnp_P3
  SITE 259: note = Tnp_P4
  SITE 271: note = Tnp_P5
MSEIYTIGIDLAKSVFQLCAFDRAGKKLINRSLRRNQVIKFLSNIEPCLVGMEACGSSHYWAREIEKLGHEVKLMPPQYVKPYVKTNKNDSADAEAICEAVRRPTMRFVSVKSEEQQALLLLHREREGVIRDRTALINRIRASLQEFGVSVPAGRFQLRKWFREGFGSVEEQLPKLLVNHIKSMQKRLTDLEQYVDDLDMQIDVVSQTSDECQKVMEIPGVGRLTSSALVASIGDAKAFSSGRQLATWLGLVPSQHSSGGKSLLLGISKRGDTYLRRMFIHGARAVIRHMKEGKPFYEWVTSLLKRMHKNKVIVALANKLVRIAWAVLVKEKSFSA

SEQ ID NO: 10574 - protein, 395 aa, unidentified
  source 1..395: note = protein_c115827
  REGION 4..164: note = RuvC_domain
  SITE 7: note = RuvC_P1
  SITE 59: note = RuvC_P2
  SITE 99: note = RuvC_P3
  SITE 101: note = RuvC_P4
  SITE 104: note = RuvC_P5
  REGION 268..355: note = Tnp_domain
  SITE 276: note = Tnp_P1
  SITE 306: note = Tnp_P2
  SITE 314: note = Tnp_P3
  SITE 315: note = Tnp_P4
  SITE 328: note = Tnp_P5
MKLVGIDIGKNKHFFCVMDKDTAELLVKPVSFPNNKEGFEFLINKLKPYSKNSILIGMEDTGHYHFALLKYLLDKQFTVALMNPKTTDFTRKMQGSITKNDKLDTLTICDVLDTPERKKQYRITKINSFDLYEQKQLTRHHHNLKEELNVYGNRLQKCIDIVFPEFNSLFKSKYGTVYMNLLRTFGGCAETIANTDIRTIRKCFEIKARGKRISLTPEQLKECAKSSIGISSMAEVIQIKHLINQIELINKQITEIDKKIEEFSVKNNSPILSIPGISHFSGTSILAELGDISNYEKPSQIIKFAGVAPIHYESSQFTAQHSAITKKGSKYLRKTLYQIILSVIHHNPIFKQYYELKISQGKGHRCAQGHCVRKLLRIIYHLLSTGQKFDPALLR

SEQ ID NO: 10575 - protein, 405 aa, unidentified
  source 1..405: note = protein_fafda8d
  REGION 19..172: note = RuvC_domain
  SITE 22: note = RuvC_P1
  SITE 70: note = RuvC_P2
  SITE 111: note = RuvC_P3
  SITE 113: note = RuvC_P4
  SITE 116: note = RuvC_P5
  REGION 236..321: note = Tnp_domain
  SITE 244: note = Tnp_P1
  SITE 274: note = Tnp_P2
  SITE 282: note = Tnp_P3
  SITE 283: note = Tnp_P4
  SITE 294: note = Tnp_P5
MWFCRDDGKVNGYMGQLIIGVDPHKRSATIEIINEREQVLARGRYGTDTGGYQQMLAAGRRHAGRVWAVEGCNGIGRHLAQRLVADGETVLDVPAKLAAKARNFDTGHGRKTDGHDAHHIAVTALRTPGLRRVHADGATVALRLLADRRDQLGVARTETINRLHQLLLELIPGGAKKNLTTDQARTLLERVSVPAGDIVTATRYQLAGDLADELTTLDTKIKAANRQLKTVLAATGTQLTSLNGIGPSGAARLLGDIGDISRFPTRGHFATWNGTAPIDVSSGDNHHHRLNRAGNRRINRVLHIMAITQLRFDTPGRAYYQRKRAEGKTAMEAMRALKRRLSDTVYRQMIKDDHTAQQTATGPGGHTGATLNSSAADPNPKIDTSEKSQPGPANHHPKTPLTPTP

SEQ ID NO: 10576 - protein, 402 aa, unidentified
  source 1..402: note = protein_d61b1df
  REGION 5..158: note = RuvC_domain
  SITE 8: note = RuvC_P1
  SITE 56: note = RuvC_P2
  SITE 97: note = RuvC_P3
  SITE 99: note = RuvC_P4
  SITE 102: note = RuvC_P5
  REGION 220..305: note = Tnp_domain
  SITE 228: note = Tnp_P1
  SITE 258: note = Tnp_P2
  SITE 266: note = Tnp_P3
  SITE 267: note = Tnp_P4
  SITE 278: note = Tnp_P5
MKVFIGVDPHKLSATIEVVDDRERVLATGRFGTDKSGYAAMRKHVSAWPERTWAVEGSNGAGRPLAQRLLADGERVVDVPAKLSARARLFDTGHNRKTDAHDAHAVAVVGVRTSGLRVLSYDVELEALRMLVARRQELTRTRIQTVNRLQRLLAELTPGKAKKDITSLQAKAILASVRPRDLAGKTRRRLAAEQLTELVAVDKKIKVLTKELKILVLARGSTLMNLPGVGPVVAARTLADVGHVARFADRNRFASWTGPAPIEASSGEIVRHRLSRGGNRRMNHMIHIAAATQIRLDIDGRAYYRRKLAAGKTRAESLRCLKRRISDAIYRQLLADAKALSAASVDAGPGGHRGASPKSSAAGSHPHTSTSDQPLPGPAPTTLPAPTPSRKTVAAKALQPAS

SEQ ID NO: 10577 - protein, 338 aa, unidentified
  source 1..338: note = protein_28e740f
  REGION 6..148: note = RuvC_domain
  SITE 9: note = RuvC_P1
  SITE 52: note = RuvC_P2
  SITE 87: note = RuvC_P3
  SITE 89: note = RuvC_P4
  SITE 92: note = RuvC_P5
  REGION 211..295: note = Tnp_domain
  SITE 219: note = Tnp_P1
  SITE 249: note = Tnp_P2
  SITE 257: note = Tnp_P3
  SITE 258: note = Tnp_P4
  SITE 270: note = Tnp_P5
MHHTVIGMDIAKQVFQLHRVDPQSRQAERIKRKRSEVLPYFAQHPPALVAIEGCGGAHYCVRELRKLGHAVRLLPAQAVRPFVLRNKTDAADARAIWVAAQQTDIKVVAIKTEHQQSVLALHRARSQLMKVRIMHTNAVRRLLMEFGQTLPEGYGALQKRLPNCLANLDGQLPDMLVQTLREQWARVEGLDREIAVIELRLKQALSKSVARKAIAEIPGIDLLSATAAVATMGDPGSSRAVGNLLPGLRLVPRQTGTGGRIRQLGISKRGDAYLRTLLIHGARAVVARRKQSPGITGLLARRPYGVVVAAVANKLARILWSVLATGRRYEPAALSAVG

SEQ ID NO: 10578 - protein, 347 aa, unidentified
  source 1..347: note = protein_7f8a692
  REGION 6..152: note = RuvC_domain
  SITE 9: note = RuvC_P1
  SITE 58: note = RuvC_P2
  SITE 94: note = RuvC_P3
  SITE 96: note = RuvC_P4
  SITE 99: note = RuvC_P5
  REGION 223..309: note = Tnp_domain
  SITE 231: note = Tnp_P1
  SITE 262: note = Tnp_P2
  SITE 270: note = Tnp_P3
  SITE 271: note = Tnp_P4
  SITE 282: note = Tnp_P5
MDQIIIGVDTHKSNHVGVAISRQGARLGTITIPTTRQGYRDLETWASELGTIKAFGIEGTGSYGAALSRDLLVKGHTVLDVMRPNRQLRYLHGKSDSLDAESAARSVLNGQTSALAKTQTGSSEMIRHIKIARDSAVKAKSQAMITIKTLIINAPAELRDTLDQIKGPISLIRHIAALRPGEITSSTASAKASMRAIARRWLSLREEIQAHEVELERMACEKAPELMKSHGISTQTVAEMLILVGDNPERIKSEAALAKLCGVCPIPASSGKTNRMRLNRGGNRQANAALYRVAIVRMRDDEETKTYAARRTAEGKTRREIVRCIKRYIVREIYRHLCVSPSASSSP

SEQ ID NO: 10579 - protein, 311 aa, unidentified
  source 1..311: note = protein_4dd9c9c
  REGION 9..156: note = RuvC_domain
  SITE 12: note = RuvC_P1
  SITE 56: note = RuvC_P2
  SITE 96: note = RuvC_P3
  SITE 98: note = RuvC_P4
  SITE 101: note = RuvC_P5
  REGION 191..275: note = Tnp_domain
  SITE 199: note = Tnp_P1
  SITE 228: note = Tnp_P2
  SITE 236: note = Tnp_P3
  SITE 237: note = Tnp_P4
  SITE 248: note = Tnp_P5
MKMAMLSFCGIDVSKDRLDVVVLPEGWFFSVSNDTAGWAELVVRLRPLTVSAIGLEPSGGYERGIIRALLAAGMSVRRINPNKLRQFARARGVLAKNDRLDARLIAEYVAIMPTRVVQRDAAVERLAEIVTMRRQLCDEHVAAENQAAHLEDAMLRRLSKRRQTRLEADIRLLDKRLAEMVAANVALAQRYELLTSMPGVGPVLAFTLIALLPELGKMTRKQIAALVGLAPYDFDSGKLKGHRSIYGGRMPVRNVLYMAALSASRYSPALKAFHNRLADADKKSKVIIKIQGHHRRRHAKNDHNPQRYASR

SEQ ID NO: 10580 - protein, 342 aa, unidentified
  source 1..342: note = protein_efd2955
  REGION 5..152: note = RuvC_domain
  SITE 8: note = RuvC_P1
  SITE 55: note = RuvC_P2
  SITE 92: note = RuvC_P3
  SITE 94: note = RuvC_P4
  SITE 97: note = RuvC_P5
  REGION 212..299: note = Tnp_domain
  SITE 220: note = Tnp_P1
  SITE 250: note = Tnp_P2
  SITE 258: note = Tnp_P3
  SITE 259: note = Tnp_P4
  SITE 271: note = Tnp_P5
MEHYAGIDVSLECSSVCVVDASGKILREAKVVSEPQALIAWFRSSGFELERIGLEAGPLSQWLFAAMKAGGFAVELLETRHVRKAFEAMPVKSDRNDARGIAHLMRLGWFRPVHCKSMSAQETRSLLTARKLVQSKLRDVENSLRGILRGFGLKVGKATEREFAARIEELVVSHPHLQVIANALLAVRAVLRKEFAAFEKQVRKLARSDARTRLLMSTPAVGPIVALTYASAIDDPTRFKSSKQAGAHFGLTPKKHQSGETDYTGRISKIGDASVRTALYEAAHIMLTKPLKGCSQLKSWAMRIARRAGMSKAKVALARRLAVIMHRMLADATPFNAAAAAA

SEQ ID NO: 10581 - protein, 344 aa, unidentified
  source 1..344: note = protein_6f7863a
  REGION 6..147: note = RuvC_domain
  SITE 9: note = RuvC_P1
  SITE 52: note = RuvC_P2
  SITE 87: note = RuvC_P3
  SITE 89: note = RuvC_P4
  SITE 92: note = RuvC_P5
  REGION 212..297: note = Tnp_domain
  SITE 220: note = Tnp_P1
  SITE 250: note = Tnp_P2
  SITE 258: note = Tnp_P3
  SITE 259: note = Tnp_P4
  SITE 271: note = Tnp_P5
MRIAVLGIDLGKNVCSLVGFDENGAVVMRRRARRDLLVDFVVKLPPCTIGMEACCGAHHLGRLFTATGHDVRLMSPEYVRPYVKAQKNDDRDAEGIAEAATRPTMRFVEIKTEAQLDMQTLHRSRERLVGERTALINQLRAVLLERGIVVPQGKRKLEQYLVDLMQEPEGRKLSARMRMLVTDLQAQWQELDRRIAAFETEFVAYAKESEDARRLITIPGVGVITATALIAAIGKAETFKHGRDLAAWLGLVPRQSTTGGKPRLMGISKRGNRYLRKLLIHGARAALPHVAERDTPLGKWVKELLTRVHPNVAVVALANKLARVSWAVLRTGQQFNAKARHLAA

SEQ ID NO: 10582 - protein, 340 aa, unidentified
  source 1..340: note = protein_3dad120
  REGION 6..147: note = RuvC_domain
  SITE 9: note = RuvC_P1
  SITE 52: note = RuvC_P2
  SITE 87: note = RuvC_P3
  SITE 89: note = RuvC_P4
  SITE 92: note = RuvC_P5
  REGION 211..296: note = Tnp_domain
  SITE 219: note = Tnp_P1
  SITE 249: note = Tnp_P2
  SITE 257: note = Tnp_P3
  SITE 258: note = Tnp_P4
  SITE 270: note = Tnp_P5
MKTITIGIDLAKSVFQVHGVDAVGAVTIRKKLRRAEVLKFFASLGPCLVGMEACATAHFWARELSRLGHEVRLMPPSYVKAYLRRQKNDAADAEAICEAVTRPSMRFVPVKSADQQSVLVLHRTRDLLVRQRTMLINAIRGHCAEFGMIAPQGARRAAELIEQIREAEASALPDLARSTLLMLAAQLDALAMQIHNLERQLMIWHRQDETSQRLATIPGVGIITATALAASVTDPSLFRSGREFAAFLGLVPRQNSSGGKDRLGRISKMGDGYLRKLLVVGATSVIRRAADNASGTGVWVRSLMERKPSRVVTVAMANKTARIAWAVLARGEVYRAPAVI

SEQ ID NO: 10583 - protein, 344 aa, unidentified
  source 1..344: note = protein_9cf9a85
  REGION 5..152: note = RuvC_domain
  SITE 8: note = RuvC_P1
  SITE 55: note = RuvC_P2
  SITE 92: note = RuvC_P3
  SITE 94: note = RuvC_P4
  SITE 97: note = RuvC_P5
  REGION 212..299: note = Tnp_domain
  SITE 220: note = Tnp_P1
  SITE 250: note = Tnp_P2
  SITE 258: note = Tnp_P3
  SITE 259: note = Tnp_P4
  SITE 271: note = Tnp_P5
MNHYAGIDVSLKSSAVCIVDGAGKIVREAAVESEPAVLIGWFKQFGIEVERIGLEAGPLSQWLYAAMQEAGQRVELLETRHVRDAFRAMSVKSDRNDARGIAQLMRLGWFRPVHCKSIEAQEMRAVLTARKLLQSKLHDVENCLRGVLRGFGLKVGKTTDRSFATRIEALVAGHSGLTLVVQALLEAHTVLLREFKKLDKQVQQLAKAHPQAKLLMTTPAVGPIVALTYMFAIDDPKRFRSSKATGAHFGLTPRRYQSGETDYSGRITKVGDASVREALYQAAHIMLTKPVKNCSQLKSWAMRVARRAGPRKAKVALPRKLAVILHRMLADNMPFNPAAKAAAT

SEQ ID NO: 10584 - protein, 341 aa, unidentified
  source 1..341: note = protein_91afd50
  REGION 7..147: note = RuvC_domain
  SITE 9: note = RuvC_P1
  SITE 52: note = RuvC_P2
  SITE 87: note = RuvC_P3
  SITE 89: note = RuvC_P4
  SITE 92: note = RuvC_P5
  REGION 211..299: note = Tnp_domain
  SITE 219: note = Tnp_P1
  SITE 249: note = Tnp_P2
  SITE 257: note = Tnp_P3
  SITE 258: note = Tnp_P4
  SITE 270: note = Tnp_P5
MNATTYAVDLAKNVFQVHWVEPASGEIHRKQLSRAKLTEFFAQRQPARIAMEACGSAHHWARTLTAMGHEPELLPAKQVRAFVRGNKDDAADARAIWVAASHDDIRRVPIKSCEQQSILSLHRIRSHWINTQTSTINMLRGLVYEFGVVLPQGRHAGLRALAERRAQINESLPELMVRLVDDLLRTLKEIGHNIEVAEGEIAAVQKSSQTAKALRQIPGIGVLGATALAAVLGDGKGWRNGREFAASLGLIPGHQGTGGKVRMGGITKRGDPYLRTLLISGAHAVAISKSRTEWFAKILERRPANVAAVAWANKAARMAWALVRHGRAYDASWKSSAPAAA

SEQ ID NO: 10585 - protein, 345 aa, unidentified
  source 1..345: note = protein_52c23ef
  REGION 6..147: note = RuvC_domain
  SITE 9: note = RuvC_P1
  SITE 52: note = RuvC_P2
  SITE 87: note = RuvC_P3
  SITE 89: note = RuvC_P4
  SITE 92: note = RuvC_P5
  REGION 211..297: note = Tnp_domain
  SITE 219: note = Tnp_P1
  SITE 249: note = Tnp_P2
  SITE 257: note = Tnp_P3
  SITE 258: note = Tnp_P4
  SITE 270: note = Tnp_P5
MNVTTIGIDLAKNIFQVHGVNEHGKTVLKKQLKRHQMVAFFANLPPCVIGMEACASAHFWARKLQALGHTVRLMAPQFVKPYVKTNKNDVADAEAICEAVSRPNMRFVPIKNADQQAVLALHRARQGFVRARTAQANQIRGLLGEFGLVIPQGISSITQMVHELIEDADHELPGSFRLLIQRLTDHLKELDRQVEELETQIKAWHHANDASRRLAAIPGIGPITASALVASIGDARSFSNARQLAAWLGLVPRQHSSGGKPTLLGITKRGDTYLRTLMVHGARAVVRYCVNKDDAFSGWLQRLLTRRHKNVAVVAVANRNARIAWALLTQGTAFRSDYAPSTNAE

SEQ ID NO: 10586 - protein, 346 aa, unidentified
  source 1..346: note = protein_76a468b
  REGION 14..156: note = RuvC_domain
  SITE 17: note = RuvC_P1
  SITE 60: note = RuvC_P2
  SITE 95: note = RuvC_P3
  SITE 97: note = RuvC_P4
  SITE 100: note = RuvC_P5
  REGION 218..304: note = Tnp_domain
  SITE 226: note = Tnp_P1
  SITE 256: note = Tnp_P2
  SITE 264: note = Tnp_P3
  SITE 265: note = Tnp_P4
  SITE 277: note = Tnp_P5
MEKTDIELNAVVTVGLDLAKHVFQVHAVDAAGRVVMSRALRRKDVLAFFERLPSCLIGMEACGSAHHWARELARFGHDVRLMPPAYVKAYVRRQKNDASDAAAICEAVTRPSMRFVPVRSVENQAALMHHKVRELLVAQRTQLLNALRSHLAEIGIIAAQGPNNARALAVLIMESNDMIPAIVRPALLPVVRRLNELDHEIGQSDQAILALARADDTARRLMSVPGIGPVTASALAASIQDISAFSGPREFAAFLGLTPRQSSSGGKERLGRVSKMGNRYLRKLLVVGAHAVLFHRKRCSDALRSWADRLMETKPFKLVAVATANKLARIAFALMRDDARYAATPA

SEQ ID NO: 10587 - protein, 346 aa, unidentified
  source 1..346: note = protein_86eb8c6
  REGION 8..162: note = RuvC_domain
  SITE 11: note = RuvC_P1
  SITE 67: note = RuvC_P2
  SITE 107: note = RuvC_P3
  SITE 109: note = RuvC_P4
  SITE 112: note = RuvC_P5
  REGION 208..296: note = Tnp_domain
  SITE 216: note = Tnp_P1
  SITE 246: note = Tnp_P2
  SITE 254: note = Tnp_P3
  SITE 255: note = Tnp_P4
  SITE 268: note = Tnp_P5
MKTLKQVVGIDVGSKELVVCFGKIFSNLDKKLCQYGNFRNSDKGLIKLYEWVQTHTCEDSPLHFVMEATGVYHEKLAYFLESKGCNISIVLPNKISNYFRTLEIKTITDSTCSEAITLFGLERNLELWRKPDPTYKRLKQLTRERDQLVQERTAVKNQLHAEQAEAEPNENSIGRIKERIAVLQRQEKEIMTELKLIVKESSLLKKQTDNLTTIPGIGLLTAVTVLAETNGFEMIRNKKQLVSYAGLDIKEKQSGTSIQSKPTISKRGNRYLRKSLHLPALAAIRHDEHYSNTFTRLVSRNGIKMKAAVAVQRKLLELMFIIYKNEQRYDPQYHLQKYQNEKVDTN

SEQ ID NO: 10588 - protein, 341 aa, unidentified
  source 1..341: note = protein_6838d3e
  REGION 7..148: note = RuvC_domain
  SITE 10: note = RuvC_P1
  SITE 53: note = RuvC_P2
  SITE 88: note = RuvC_P3
  SITE 90: note = RuvC_P4
  SITE 93: note = RuvC_P5
  REGION 211..295: note = Tnp_domain
  SITE 219: note = Tnp_P1
  SITE 249: note = Tnp_P2
  SITE 257: note = Tnp_P3
  SITE 258: note = Tnp_P4
  SITE 270: note = Tnp_P5
MEKVTTIGLDIAKHVFHAHGADPAGHMVFSRKLSRAKLISFFAAQPRCVVALEACAGAHHWGRELQRLGHDVRLIPPAYVKPFVKRQKNDAADAEAICEAAQRPSMRFVAVKSEEQQASALVFRARDLVVRQRTQLANACRSHMAELGWVAPQGLAHIKRLAELVDDPASDVPDAARPVLRMMLDMLAGLDGRIAQLDREIVRRAREDEAARRLMGVPGIGPVTATALLALAPAPEVFNRGRDFAAWLGLVPRQNSSGGKERLGAITRMGERSLRRLLILGASAVVRHASHKGAPDGSWLAGMLARKPRMLVTVALANKTARVVWAVMRTGESYRAPALAA

SEQ ID NO: 10589 - protein, 391 aa, unidentified
  source 1..391: note = protein_350d4d6
  REGION 4..163: note = RuvC_domain
  SITE 7: note = RuvC_P1
  SITE 60: note = RuvC_P2
  SITE 101: note = RuvC_P3
  SITE 103: note = RuvC_P4
  SITE 106: note = RuvC_P5
  REGION 266..353: note = Tnp_domain
  SITE 274: note = Tnp_P1
  SITE 304: note = Tnp_P2
  SITE 312: note = Tnp_P3
  SITE 313: note = Tnp_P4
  SITE 326: note = Tnp_P5
MIVVGIDVAKDKHDCFIVDSEGTVLFDVFTIPNTLDGFNILLDNIKSVTENFDIIKVGLEATGHYSYNLLGFLLNNGLPTYVLNPLHTNLYRKSLTLRKTKTDKADARVIASMLMSCVDLKPYTNTLYQSEELKSMTRYRFDKVSERAKLKTSVSRLVTILFPELEALVPSLHMKSVYTLLSEFPSAQHIANAHLTRLANLLSETSKGHYGKDKAIQIRGAARRSVGSVMPAKSLELRHTIKLIADLTEQIDEIETEIKKLVDATDTTLLTVPGLSYSTVAMILAEVGDFSNFATPDKVLAFAGMSPSTYQSGQLTNCYAKMEKRGSKYLRYALYNAAKFVCTWDKTFKDYLAKKRAEGKHYNVALSHAVKKLVRLIFALEKSHSPYQPVV

SEQ ID NO: 10590 - protein, 318 aa, unidentified
  source 1..318: note = protein_668dedd
  REGION 7..155: note = RuvC_domain
  SITE 10: note = RuvC_P1
  SITE 54: note = RuvC_P2
  SITE 94: note = RuvC_P3
  SITE 96: note = RuvC_P4
  SITE 99: note = RuvC_P5
  REGION 193..277: note = Tnp_domain
  SITE 201: note = Tnp_P1
  SITE 230: note = Tnp_P2
  SITE 238: note = Tnp_P3
  SITE 239: note = Tnp_P4
  SITE 250: note = Tnp_P5
MSEAVFIGIDVSKDTLEVASSAQASSWQAVNDTAGIEALSTQLLAMAPALVVLEATGGYEFEAACALQAAGLDVAVVNPRQARDFARAMGALAKTDSLDARMLAAFARVLHQHPERSRFVKPLADEALQRLQALVLRRRQLVGMLTSERQRLRMSHASARPSIERTIEFLKAQIHDMEIEAGEHVRAHHGALAAALSSVKGVGAATVCTLLAELPELGQLCRRRIAALVGVAPLNRDSGQMRGQRSIWGGRADVRKTLYMATLVAVRHSPVFKAFYERLVAAGKPKKVALVAAMRKLLTTLNAIAKSGKHWEESLHAS

SEQ ID NO: 10591 - protein, 306 aa, unidentified
  source 1..306: note = protein_105ef4c
  REGION 7..154: note = RuvC_domain
  SITE 53: note = RuvC_P2
  SITE 93: note = RuvC_P3
  SITE 95: note = RuvC_P4
  SITE 98: note = RuvC_P5
  REGION 189..271: note = Tnp_domain
  SITE 197: note = Tnp_P1
  SITE 224: note = Tnp_P2
  SITE 232: note = Tnp_P3
  SITE 233: note = Tnp_P4
  SITE 244: note = Tnp_P5
MIMQNYVGCDISKMWLDFFDETSSRCRRIDNQADATAAYVAGLQPGRDFVVMEATGVHDRLLRHALAKAGVAFSRHNPAHTHYFAKSTRRRAKTDRLDARMLSGYGRRYHPEAEPAPREEGEHLQSLARLRDQLVEIRARLKKQRSEAFDETVISELEELTTTFNTRIKAIESRIAEAIRQSEETARDNALMVSVPGVSKVTAFSLLAPELGLRSPKSIAALTGLAPFDNKSGKLNRRSQIQGGRSRVRRALYMAALGAIRACERFRVCYSAIAARSGSKKLAIIAVARKLLVVLNAIIRDKKAFA

SEQ ID NO: 10592 - protein, 341 aa, unidentified
  source 1..341: note = protein_a95b9b3
  REGION 7..149: note = RuvC_domain
  SITE 10: note = RuvC_P1
  SITE 53: note = RuvC_P2
  SITE 88: note = RuvC_P3
  SITE 90: note = RuvC_P4
  SITE 93: note = RuvC_P5
  REGION 211..295: note = Tnp_domain
  SITE 219: note = Tnp_P1
  SITE 249: note = Tnp_P2
  SITE 257: note = Tnp_P3
  SITE 258: note = Tnp_P4
  SITE 270: note = Tnp_P5
MGEVTTIGLDIAKTVFQAHGADASGAVVFRKKLSRGRLLTFFASQPPCLVAMEACAGSHHWGRELTRLGHTVRLIPPAYVKPFVKRQKNDEADAEAICEAAQRPTMRFVAVKSAEQQASAVVFRARDLLVRQRTQILNAIRGHLAEYGRVAPKGVCYVERLIAEIESPKSDLPETARASLQALVDVLPKLEEQIAGLDREIARRAKEDATARRLTTIPGVGPITASALVALAPPVEAFRRGRDFAAWLGLTPVQRSSGGKQKLGQVSKMGERTLRRLLVIGASAVIKQALIRGAPAGSWLAQMLARKPRRLVAVALANKMARVVWALLVRGGVYRTPALAA

SEQ ID NO: 10593 - protein, 401 aa, unidentified
  source 1..401: note = protein_3595881
  REGION 4..156: note = RuvC_domain
  SITE 7: note = RuvC_P1
  SITE 56: note = RuvC_P2
  SITE 93: note = RuvC_P3
  SITE 95: note = RuvC_P4
  SITE 98: note = RuvC_P5
  REGION 264..350: note = Tnp_domain
  SITE 272: note = Tnp_P1
  SITE 303: note = Tnp_P2
  SITE 311: note = Tnp_P3
  SITE 312: note = Tnp_P4
MWYAGLDWADSHHDIIVIDNAGRQVASRRVAHSAEGLAELIAFLRQIAPLDQIACIVETNQGLLISTLLEAGCTLYPVNPKTIDRRRTASGAKTDLIDAYLLAKTGRSDLADLRKLTPDSAIIQELKALSRDQDSLVQSQTRVVNQLTACLKAYYPVALQLFSKLQQRCTLLFLQTYPTLDAAMGASVEEITRVLKKAGHPSPSKVAPKIRETLHQPQLRADAITTRTKSRLMLALVAQLLPLIEQIAAYDKEISDLFLTQTDNEIFRSLPGAGKRIAPRLLAEWGDDRARYMGSTSVQALAGTAPVAFQSGNYAKAHKRYACVKPLRNVLHQFAWQSTKQEDWALTYYQRKRAEGKSHSMAVRSLANAWVRIIYAMWQEHTCYETATFEAAQHHHASRAA

SEQ ID NO: 10594 - protein, 404 aa, unidentified
  source 1..404: note = protein_b2601fb
  REGION 4..160: note = RuvC_domain
  SITE 7: note = RuvC_P1
  SITE 57: note = RuvC_P2
  SITE 97: note = RuvC_P3
  SITE 99: note = RuvC_P4
  SITE 102: note = RuvC_P5
  REGION 269..355: note = Tnp_domain
  SITE 277: note = Tnp_P1
  SITE 308: note = Tnp_P2
  SITE 316: note = Tnp_P3
  SITE 317: note = Tnp_P4
MIFVGIDWAEAHHDICVLDSEGELLTTRRIPEGLEGVARLHAMVAEHTDEPEAVIVGIETDRGLLVTALLATGYGVYAINPLAASRYRERHTLSRAKSDRGDARMLADLVRTDRQHHRRVAPDSELLAGIKVLARAHQNLVWTRQRGVNALRSALREYYPGALTAFEELGHPDATAVLSVAPDPERGRKLTEARIVSVLRRGGRRRNLERRASEIRTALRAPQLEAPTLVVEAQAANTGALVAVITTLNEQIARLEAELVDAFGRHPDAEILRSLPGLGDILGARVLAEFGDAPDRYTDARARRNYAGTAPVTRASGTSRVVVARLVRNKRLFDACYQWAFCALSRSAGARAYYDDHDPGPHTSKVARRKLANKLVGILHGCLAHRTAYDEELAWGQAPERLAA

SEQ ID NO: 10595 - protein, 341 aa, unidentified
  source 1..341: note = protein_e1a5446
  REGION 7..149: note = RuvC_domain
  SITE 10: note = RuvC_P1
  SITE 53: note = RuvC_P2
  SITE 88: note = RuvC_P3
  SITE 90: note = RuvC_P4
  SITE 93: note = RuvC_P5
  REGION 209..296: note = Tnp_domain
  SITE 217: note = Tnp_P1
  SITE 247: note = Tnp_P2
  SITE 255: note = Tnp_P3
  SITE 256: note = Tnp_P4
  SITE 268: note = Tnp_P5
MSDLALVGIDLGKHTFHLHGQDKSGHELFRKKLSRQQMMRFFANLPACTVVMEACAGAHFVARELTALGHQAKLISPQFVKPFVKGNKNDFVDAQAICEAASRPTMRFVSPKTEAQQTLSILHRLRESLIRDRTKAVNQMHGFLLEFGISLPQGVTVIRRLASVLAEHDLPTRLTLLLQRLHDHFGYLDKQIKALDKDLASQLAEDDLGNRLLSMPGIGPITASLLAVEMGDGKHYACSRDFAASVGLVPRQYSTGGRANLLGISKRGDKNLRRLLVQCARAYMQRIEYQKGALAEWVRALLTRRHSNVVACALANKLARIAWAIARHHTQYEAGPGALNA

SEQ ID NO: 10596 - protein, 345 aa, unidentified
  source 1..345: note = protein_8097ffd
  REGION 8..151: note = RuvC_domain
  SITE 11: note = RuvC_P1
  SITE 56: note = RuvC_P2
  SITE 91: note = RuvC_P3
  SITE 93: note = RuvC_P4
  SITE 96: note = RuvC_P5
  REGION 215..301: note = Tnp_domain
  SITE 223: note = Tnp_P1
  SITE 253: note = Tnp_P2
  SITE 261: note = Tnp_P3
  SITE 262: note = Tnp_P4
  SITE 274: note = Tnp_P5
MNAKLSRVGVDIAKNVFQIHGVTCDERTVWCRRVPREQWLNTVLGHLEPGSEVGMEACGGAHHWARQLQAAGYRVKLMAPQFVKPYVKGNKNDANDAEAICEAMSRPHMHFVPVKTVAQQDLQAVHRIRSELVEQRTAKANQIRGLVAEYGLIAPLRLEHLRTVLPDWLEDVDNGLTERFRRLLHGLSQDLCRLDERVAELDEEIRVIAQSDPAALRLQQLRGIGPITATALLATLGDANQFANGRQMAAALGLTPRQHSSGGKERLFGISKRGDAYLRTLLIHGARAVMRFAAGKTDRLSVWVTSLAQRRHPNIAAAALANKTARIAWALLHNGTDYQPGGAAR

SEQ ID NO: 10597 - protein, 344 aa, unidentified
  source 1..344: note = protein_4cd84b7
  REGION 7..150: note = RuvC_domain
  SITE 10: note = RuvC_P1
  SITE 54: note = RuvC_P2
  SITE 89: note = RuvC_P3
  SITE 91: note = RuvC_P4
  SITE 94: note = RuvC_P5
  REGION 213..297: note = Tnp_domain
  SITE 221: note = Tnp_P1
  SITE 250: note = Tnp_P2
  SITE 258: note = Tnp_P3
  SITE 259: note = Tnp_P4
  SITE 271: note = Tnp_P5
MNTIRVVGIDIAKSVFQVCVWMVDGSVAWNKKISRPKFLDTLRQFEPGTLIAMEACSTSHYWGRTLGAMGFSVKLIPTQHVKAFVRSQKNDANDALAICETACRPGIHFVPIKTMEQLDIKALRNTRQLMVEQRTALANQLRALLAEYGLIIPIGIQRLQQQLPEFIEDGSNDLTFTLRRLLSSLREDMQALNERVTCLDKEIAELSSQQAAYRHLLTIPGVGPLIAAAFISEVDAAQFSSGRELSAWCGLVPRQHSSGGKQRLSSVTKNGNRSLRTLVIHGARSVMRCVKKRDDSLGLWLKGLEARRGFLKTTVALANKLTRIIWRILTDDVDFNINKAFATR

SEQ ID NO: 10598 - protein, 326 aa, unidentified
  source 1..326: note = protein_804ba56
  REGION 4..155: note = RuvC_domain
  SITE 7: note = RuvC_P1
  SITE 60: note = RuvC_P2
  SITE 100: note = RuvC_P3
  SITE 102: note = RuvC_P4
  SITE 105: note = RuvC_P5
  REGION 200..286: note = Tnp_domain
  SITE 208: note = Tnp_P1
  SITE 237: note = Tnp_P2
  SITE 245: note = Tnp_P3
  SITE 246: note = Tnp_P4
  SITE 259: note = Tnp_P5
MFFIGIDVLKAKLDCSLLLEVASGKRRAKTVANSQAGVSELLTWCVKHHAFPQALHAIREGTGVYHEQAALALADAGGTVSIVNPAQIKDFGRSLGIRTKTDGVDSRVLARYAALLKPRPWTPPAQEARVLQALLSRREAIVQDLQRERNRLEKAEATETPSTIRQSLLDSIAFLERQLAKLQQDIDDHINKHPDLKADRDLLISIPAVGPQVGNQLLAVMHNHRFQSAEQLAAYLGLVRVERQSGTSLLGRPRLSKTGPARIRAVLYMAAIVGTEHNPHIKALYQRLQARGKSKMSAQGAAMRKLVYLCFGVLKTRQPYQSNYAI

SEQ ID NO: 10599 - protein, 342 aa, unidentified
  source 1..342: note = protein_6962484
  REGION 1..96: note = RuvC_domain
  SITE 33: note = RuvC_P3
  SITE 35: note = RuvC_P4
  SITE 38: note = RuvC_P5
  REGION 203..289: note = Tnp_domain
  SITE 211: note = Tnp_P1
  SITE 242: note = Tnp_P2
  SITE 250: note = Tnp_P3
  SITE 251: note = Tnp_P4
MIDTLLDAGITVVVISPNQVKNIRRRYGSSGNKDDRFDAFVLADTLRTDRARLRPLVPDRDDTIALRRACRARKDLIAHRIATGNQLRAHLRNALPATIGLFKDIDSDIALSFLERFDTQDKLDWLTPTRLGTWLRKQGYSGRTSSTVLHTKILAAPRGPEGDFATALATITASHVAVLRTLQAQTRTLEKHIDQQLTTHPDAHIFTSLPRSGRVRAARLLAEIGDCRSRFPTPEALICLAGAAPSTRQSGRIRVVGFRWSCDKQLRDAVTDFAADSIKANPWAAHLYQQARTRGHDHPHAVRILARAWLTIIWHCWQDHVPYNPSKHRALQPYLTPENKAA

SEQ ID NO: 10600 - protein, 361 aa, unidentified
  source 1..361: note = protein_2c7d6f5
  REGION 22..165: note = RuvC_domain
  SITE 25: note = RuvC_P1
  SITE 70: note = RuvC_P2
  SITE 105: note = RuvC_P3
  SITE 107: note = RuvC_P4
  SITE 110: note = RuvC_P5
  REGION 229..314: note = Tnp_domain
  SITE 237: note = Tnp_P1
  SITE 267: note = Tnp_P2
  SITE 275: note = Tnp_P3
  SITE 276: note = Tnp_P4
  SITE 288: note = Tnp_P5
MKNHSSNDQSLSSSDLSACTTLAVDLAKQVFQVAGEDVLGQVRYEQRIKSREAFYEFLQQLPPHVVVLMETGPGAQAWARQLQDKGNLARILPAGLVTTHRSGPKNDRNDALAILRAGRDEKICAVPVKSVAALAMQALHRARQGYVRRRTAVSNQMRGLLLEHGVALAQGDVAISQKIPRVLEDATQPLPGLLRELIDELLAEWRHLGERIGVLTGRLEVAANADMTARRLMTVRGIGPVIATALVAKETNPERFPNARKFAAYFGMVPDQHSSGQTVRLGDMTKRGDVYLRSLMIQGAHSVLQQLRPDSLQPDDRRLLRWMSRLGRKEAAIRLANRNLRIVWVLLQNDQSYRRHAGNGQ

SEQ ID NO: 10601 - protein, 341 aa, unidentified
  source 1..341: note = protein_da5b45a
  REGION 7..149: note = RuvC_domain
  SITE 10: note = RuvC_P1
  SITE 53: note = RuvC_P2
  SITE 88: note = RuvC_P3
  SITE 90: note = RuvC_P4
  SITE 93: note = RuvC_P5
  REGION 209..292: note = Tnp_domain
  SITE 217: note = Tnp_P1
  SITE 247: note = Tnp_P2
  SITE 255: note = Tnp_P3
  SITE 256: note = Tnp_P4
  SITE 268: note = Tnp_P5
MDTASLIGIDLGKHCFHLHAQDASGRMVFRKKLTRHQMLILLANLSSCTVVMEACAGAHWVARQVQSLGHEARLISPQFVKPFRQGNKNDFADAQAICEAASRPSMRFVSPHNEAQQVISALHRVREGLVRERTGTINQIHAFLLEFGISLPRGMAVIRRLPVVLATESLPPRLIALLERLHVHFKYLDEQIAQIERELLSQLHEDERSERLLEIPGIGPMTASVLMSELGDARQYGSARQFAASIGLVPRQYSTGGKPTLLGISKRGDKNLRRLLVQCARAIMQGIERRTDLLGVWVQGLLTRRHSNVVACALANKLARIAWAILAKGTRYRSERAVPAA

SEQ ID NO: 10602 - protein, 334 aa, unidentified; identical to SEQ ID NO: 10205
  source 1..334: note = protein_80e43b1
  REGION 7..149: note = RuvC_domain
  SITE 10: note = RuvC_P1
  SITE 53: note = RuvC_P2
  SITE 88: note = RuvC_P3
  SITE 90: note = RuvC_P4
  SITE 93: note = RuvC_P5
  REGION 209..299: note = Tnp_domain
  SITE 217: note = Tnp_P1
  SITE 247: note = Tnp_P2
  SITE 255: note = Tnp_P3
  SITE 256: note = Tnp_P4
  SITE 268: note = Tnp_P5

SEQ ID NO: 10603 - protein, 321 aa, unidentified
  source 1..321: note = protein_fdac6f9
  REGION 1..118: note = RuvC_domain
  SITE 16: note = RuvC_P2
  SITE 56: note = RuvC_P3
  SITE 58: note = RuvC_P4
  SITE 61: note = RuvC_P5
  REGION 228..317: note = Tnp_domain
  SITE 236: note = Tnp_P1
  SITE 266: note = Tnp_P2
  SITE 274: note = Tnp_P3
  SITE 275: note = Tnp_P4
  SITE 288: note = Tnp_P5
MELEVKTNRKPVVILEPTGHYHRVLVNYLQSVGYETILVNPLQAQRARRTNLRKVKTDASDAWHLGDLYYQEESWLVHPSPKESLMDLQFITRQHEFITSLYLQAKLNTRTLVDQVFPSYEGVFKDLFSKTSLNLLEMCLSPKGIEERDHNTWAAVVRESTKAARSEDWMNRKIEHLNVAIKDNPVMHVPYGLEMALRSMLTVIRDLQNQLAELEKIILELSETIAEVQLLESIPGVGTKLATSIAAEIGDASQFRHPKQLVAYAGLDPSVFSSGKFVATQNRITKRGSKRLRRAVYLAVTCGLRGDLNLRIREYYDKKKK

SEQ ID NO: 10604 - protein, 341 aa, unidentified
  source 1..341: note = protein_3bbb621
  REGION 7..149: note = RuvC_domain
  SITE 10: note = RuvC_P1
  SITE 53: note = RuvC_P2
  SITE 88: note = RuvC_P3
  SITE 90: note = RuvC_P4
  SITE 93: note = RuvC_P5
  REGION 211..296: note = Tnp_domain
  SITE 219: note = Tnp_P1
  SITE 249: note = Tnp_P2
  SITE 257: note = Tnp_P3
  SITE 258: note = Tnp_P4
  SITE 270: note = Tnp_P5
MIEVRTIGLDLAKTVFQVHGADASGVTVLRKQLRRGQVLKFFGGLPRCLVAMEACGSSHFWAREIGRLGHEVRMIPPAYVKPFVKRQKNDMADAEAICEAAQRPTMRFVAVKSEETQGAAVVLRTRDLLIRQRTQTINALRGHLAEFGEVAPQGLGYGPKLFAMVEDPQTALPETARTALRFLTATLSQLNDQIRALDAQIVRRAREDETARRLMTIPGIGPLIASALVALAPSPETFKRGRDFAAWLGLVPRQHSTGGKQRLGSTTKMGERSLRRLLIMGANSEVVWRARKGAAPGSWLARILARKPPMLVRVALANKMARIVWAIMSRGGIYRAPVAAA

SEQ ID NO: 10605 - protein, 406 aa, unidentified; identical to SEQ ID NO: 10251
  source 1..406: note = protein_6debf91
  REGION 14..170: note = RuvC_domain
  SITE 17: note = RuvC_P1
  SITE 68: note = RuvC_P2
  SITE 108: note = RuvC_P3
  SITE 110: note = RuvC_P4
  SITE 113: note = RuvC_P5
  REGION 276..363: note = Tnp_domain
  SITE 284: note = Tnp_P1
  SITE 315: note = Tnp_P2
  SITE 323: note = Tnp_P3
  SITE 324: note = Tnp_P4
  SITE 336: note = Tnp_P5

SEQ ID NO: 10606 - protein, 393 aa, unidentified
  source 1..393: note = protein_13401e9
  REGION 5..163: note = RuvC_domain
  SITE 8: note = RuvC_P1
  SITE 62: note = RuvC_P2
  SITE 102: note = RuvC_P3
  SITE 104: note = RuvC_P4
  SITE 107: note = RuvC_P5
  REGION 268..357: note = Tnp_domain
  SITE 276: note = Tnp_P1
  SITE 306: note = Tnp_P2
  SITE 314: note = Tnp_P3
  SITE 315: note = Tnp_P4
  SITE 328: note = Tnp_P5
MEPVIGVDVAKGFSVLQAFTRRNEPYGRAESLSHEEHGLERLGELLAELQETTKCTPVVVLEATGHYHRVLVAYLERGGWRYFIVNPLQSKRAKGTQLRKVKTDAADAWHLADMYYRGDVTPHRIWDEAFTELQHVTRQHEFVTGMFVQAKLNTRALLDQVFPGYEKVFRDLFSVTSLKVLARCLEGEPGDLHQIIENSGAGKSRSKRWVQEKAERLQEVLTHWKKQRRSSSQSVALHGMVSLLLQFSEQLSTLEKQMEKMASSLHEVELMKSIPGVGDKLAAALVAEIGDVGQFQNPKQLVAFAGLDPGIFSSGKFKATSSKITKRGSKRLRRALYLAVQCGIRGSINRKLRDYYDRKRKEGKAYKVVVIACANKLLHHIFAILSKNQPYNP

SEQ ID NO: 10607 - protein, 341 aa, unidentified
  source 1..341: note = protein_1061a2a
  REGION 14..161: note = RuvC_domain
  SITE 17: note = RuvC_P1
  SITE 66: note = RuvC_P2
  SITE 106: note = RuvC_P3
  SITE 108: note = RuvC_P4
  SITE 111: note = RuvC_P5
  REGION 207..294: note = Tnp_domain
  SITE 215: note = Tnp_P1
  SITE 245: note = Tnp_P2
  SITE 253: note = Tnp_P3
  SITE 254: note = Tnp_P4
  SITE 267: note = Tnp_P5
MSKGLERSQATVFTGIDVSAATLAVAVQQAGRDGFRQKEFANSACGHKRLIAWLLECGGRVRVSLEATGTYSLDVALALDAAEGIEVAVLNPKTANQFAQTLRRSKTDAADAVALAEYSRRMEFVPWQRPSRGGLELRTLSRHIATLTEDHTRWGNRLHAVEASKTTPRCVLDDMKRARAAIAKRILKLRKEAVAMVGRDAQLMRKFEQLKSIKGIAETRAVQLLGELAGLDPEMTVRQWVAYSGLDPVHQVSGSSVHKPSRISRHGNSHLRRALYIPALAGVRHDPHMRVFYELLQSRHKTKLQALVAVARKLLHAIFGIFKTGTDYNGAKLFPYLIPTS

SEQ ID NO: 10608 - protein, 406 aa, unidentified
  source 1..406: note = protein_5e4499f
  REGION 5..164: note = RuvC_domain
  SITE 8: note = RuvC_P1
  SITE 61: note = RuvC_P2
  SITE 101: note = RuvC_P3
  SITE 103: note = RuvC_P4
  SITE 106: note = RuvC_P5
  REGION 272..358: note = Tnp_domain
  SITE 280: note = Tnp_P1
  SITE 311: note = Tnp_P2
  SITE 319: note = Tnp_P3
  SITE 320: note = Tnp_P4
MRLFVGDDWAEDHHDVEVMDGAGKVLARKRLPEGVAGIAQLHALVGDLLGENADDGEVVAGIETDHGPWVMALIAAGYRVFPVNPQQSARFRARHAVSGAKSDAGDAHVLADMVRTDAHQLREAAGDSPEVAGIKVLARTHKTMIWERTRETQRLRHQLREYFPAALEAFADLAAPDTLELLAKAPGPARARRLTRAQISAAMKRARRRDIPAKATTVLAALHREQLSQPPVLAAAYAATARSLIAVITALNEQVTALQGQVAEYFGRHPDAEIIMSQPGMGAILGARVLAEFGDDPHRYRDGKARRNYAGTSPITRASGKRKVVTARFVHNGRLIDALTAQAFAALTASPGARAYYDQQRTAGHEHNDALRRLASRLVGILHGCLKTRTPYNENTAWAHRHHQAA

SEQ ID NO: 10609 - protein, 425 aa, unidentified
  source 1..425: note = protein_55640ad
  REGION 4..157: note = RuvC_domain
  SITE 7: note = RuvC_P1
  SITE 59: note = RuvC_P2
  SITE 94: note = RuvC_P3
  SITE 96: note = RuvC_P4
  SITE 99: note = RuvC_P5
  REGION 284..371: note = Tnp_domain
  SITE 292: note = Tnp_P1
  SITE 323: note = Tnp_P2
  SITE 331: note = Tnp_P3
  SITE 332: note = Tnp_P4
  SITE 344: note = Tnp_P5
MLAVGIDWSEEFHLVALGRPSEGVFEVRRVEHSPKAVDALCARIAALEPDPAEVRVVLEARHGLLVERLIDAGYVVVPVNPDLIARRRGPAKKKDDVEDARIACLLALDRFERLRPLVPHGELAGELRAIARDDERATKDARRLLNRLRQDLLATFPGALAIAGDDLGSPTFLRALERWPSAEALGAASRAELVAFARGCKHGWPERFADKVEAALAGDHFQARPYLVRAKADTIRLTASQLLAIGKQRRAWERRMGELLLGAPRRGRSKTPRPDELGEGFPDGEIYLSFPGLGDRLAARVAGEIGDHPSQFESPNALQCYGGKAPVTRRSGKSELVVSCRLAYNRHLGDAVQQWAFCSLRRSSWARAFYDGKRAQGKGHHAALRALGNRWLGLLWHCLRRGLPYDEAVHVANRERARSSQLLAA

SEQ ID NO: 10610 - protein, 321 aa, unidentified
  source 1..321: note = protein_375a1db
  REGION 8..154: note = RuvC_domain
  SITE 11: note = RuvC_P1
  SITE 55: note = RuvC_P2
  SITE 95: note = RuvC_P3
  SITE 97: note = RuvC_P4
  SITE 100: note = RuvC_P5
  REGION 193..278: note = Tnp_domain
  SITE 201: note = Tnp_P1
  SITE 230: note = Tnp_P2
  SITE 238: note = Tnp_P3
  SITE 239: note = Tnp_P4
  SITE 250: note = Tnp_P5
MAYFRDVVGIDVSKQNLDLYVLSGQQRRTVANTAAGYGDLVSWLKSLGVRMAVMEASGGYERDVAKALRQAGFDVRIVDPKRVRHFAKAAGRLAKNDRIDAEMIAEFGAVFAAAQRCEIPLDAKREHLAGLVAARQALMGHQTSLQNQISACPKGPARQALAAALKPIPASIKQLDRLIAKAIAAHPQFAALAARLDTVPGVGPVTIAALIAWLPELGRLDRRALAALVGVAPFDDDSGKRTGQRYIKGGRGKLRNIAYMAVMGAATKHNPVLKAYYDSLLNRGKLKKVALIACLRKLLTILNTMVAKQQDWNPASMAIAA

SEQ ID NO: 10611 - protein, 356 aa, unidentified
  source 1..356: note = protein_ef447d7
  REGION 12..152: note = RuvC_domain
  SITE 15: note = RuvC_P1
  SITE 58: note = RuvC_P2
  SITE 93: note = RuvC_P3
  SITE 95: note = RuvC_P4
  SITE 98: note = RuvC_P5
  REGION 217..304: note = Tnp_domain
  SITE 225: note = Tnp_P1
  SITE 255: note = Tnp_P2
  SITE 263: note = Tnp_P3
  SITE 264: note = Tnp_P4
  SITE 276: note = Tnp_P5
MSQKLNSTIAVIGIDIGKNSFHVVGHDKRGAIVLRQKWSRGQVEARLANMQPCLVGMEACVGAHHLSRKLQVLGHDARLMPAKYVRPYSKGQKNDFRDAEAIAEAVQRPTMKFVGTKTVDQLDLQALHRVRERLVSQRTGVINQIRAFLLERGVAVRQGFRFLRAELPSILAKRTDVLSPRMSHLLEDLAGDWRRLDERIEHLFREIEGLARQDQGCARLMSVPGIGPIIASATVAAIGMGDAFSKGRDFGAWLGLVPKQISTGDRTILGSISKRGNRYLRALFVQAAWVVLVKVGPKHWERYGLKSWIEAAKKRLHHNVLAIALANKLARIAWAVLNKGRAFECTKTYAVAPQAA

SEQ ID NO: 10612 - protein, 341 aa, unidentified
  source 1..341: note = protein_d883015
  REGION 7..149: note = RuvC_domain
  SITE 10: note = RuvC_P1
  SITE 53: note = RuvC_P2
  SITE 88: note = RuvC_P3
  SITE 90: note = RuvC_P4
  SITE 93: note = RuvC_P5
  REGION 211..297: note = Tnp_domain
  SITE 219: note = Tnp_P1
  SITE 249: note = Tnp_P2
  SITE 257: note = Tnp_P3
  SITE 258: note = Tnp_P4
  SITE 270: note = Tnp_P5
MNEVSIIGVDLAKSVFQVHGAGPDGTAHFRKKLTRIQFLPFLSQQPNCIVAMEACATAHGWARAISELGHEAKLIPPQYVKPFVKRQKNDMADAEAIAEAASRPTMRFVEIKSEDSQARAMIFRTRQMLVHQRTQSLNALRSHLAEYGVIAPKSRFRTDQLARLVEDKDATLPDLVRATGIMYLEHIEALTSRISELNDQIKEVVRSSKTAKRLQSMPGVGLQTSIAIEAFAPDMRCFKCGRDFAAWLGLVPKQHSSGGKERLGKVSKHGQQDIRTNLISGAMSVIVAITRFGKQPTEWLARMLERKPKKLVAIALANKMARAIWAMMMKGEDYRNPVATA

SEQ ID NO: 10613 - protein, 364 aa, unidentified
  source 1..364: note = protein_bf52d99
  REGION 1..130: note = RuvC_domain
  SITE 27: note = RuvC_P2
  SITE 67: note = RuvC_P3
  SITE 69: note = RuvC_P4
  SITE 72: note = RuvC_P5
  REGION 237..322: note = Tnp_domain
  SITE 245: note = Tnp_P1
  SITE 275: note = Tnp_P2
  SITE 283: note = Tnp_P3
  SITE 284: note = Tnp_P4
  SITE 296: note = Tnp_P5
MPNSEPKLRAVFDKLAAKFGTVLVLVDQPASIGALPLTVARDAGCQVAYLPGLAMRRVADLYPGEAKTDARDAEVIAGAARTMPHTLRSLALTEEITAELTVLVGFDEDLAAEATRTSNRIRGPLTQFHPSLERVLGPRLDHPSITWLLERYGSPQALRMAGRRRLVEVVRPKAPRMAQRLIDDIFDALDEQTVVVPGTGTLDTVIPSLARSLGAVHEQRRALEAQISELLEAHPLHPVLTSTPGVGVRTAATMLVTIGDATGFPSAAHLASYAGLAPTTKASGTSIHGEHAPRGGNRQLKRAVFLSAFAALHDPTSRTYYDKCRSRGKTHTQVLLRLARHRVSVIFAMLRDGTFYEPRTATTT

SEQ ID NO: 10614 - protein, 345 aa, unidentified
  source 1..345: note = protein_455a4e0
  REGION 5..152: note = RuvC_domain
  SITE 8: note = RuvC_P1
  SITE 55: note = RuvC_P2
  SITE 92: note = RuvC_P3
  SITE 94: note = RuvC_P4
  SITE 97: note = RuvC_P5
  REGION 212..300: note = Tnp_domain
  SITE 220: note = Tnp_P1
  SITE 250: note = Tnp_P2
  SITE 258: note = Tnp_P3
  SITE 259: note = Tnp_P4
  SITE 271: note = Tnp_P5
MDHFAGLDVSVKATSVCIVDDAGKVVREVKVTSEPEALLAVLKNPAYHFKRIGLEAGPLSQWLYSALAEAELPVVCVETRHMQAVLKAQINKTDRNDARGIAQMMRVGLYRPVHVKTLRSQKLRMLLTHRKLLQSKAIAIENDLRGTLRNFGLKVGMVGTVKFEARIKELVENLPDLAVLVEPLLVVRRVLREQIEILHRRLLTIVRDDEVCRRLMTVPGVGPVVALTYRATVDVPARFRKSKSVGAVFGLTCSKYQSGEIDRSGRISRCGDEMMRVMLYEAAQVMLTRTNKWSWLKAWAMQIARRRGMKKAIVALARRLAVIMHRIWVDGTEFRWTREQAGAAA

SEQ ID NO: 10615 - protein, 295 aa, unidentified
  source 1..295: note = protein_0a6a89f
  REGION 8..151: note = RuvC_domain
  SITE 11: note = RuvC_P1
  SITE 52: note = RuvC_P2
  SITE 92: note = RuvC_P3
  SITE 94: note = RuvC_P4
  SITE 97: note = RuvC_P5
  REGION 191..278: note = Tnp_domain
  SITE 199: note = Tnp_P1
  SITE 229: note = Tnp_P2
  SITE 237: note = Tnp_P3
  SITE 238: note = Tnp_P4
  SITE 251: note = Tnp_P5
MIKNIKYFGIDISYLVFDVTDSDGKYYQFKNNVSGFKKFTKLLKTDSHCVMEATGYYHYQLAYHLLESGIKVSVENPLAVKRFIQMKLSKIKTDKSDSKLICEYAQKVNLKLWKGNTKDEMECLQITRALSVYTKQSTMLKNKLHGEAVLGEPSKAVVRSLKQSLKQLTKEMKTLEDKLLVLVKQSHQDLLTRLKTSPGIGPKTSIMLVVLTGGFDRFTSAAELCSYAGLTPVIRQSGSSVKGRPRISKIGNQKLRNLLFMCSFNACKYNKACRDLYERIVAKGKSKKLGINCGM

SEQ ID NO: 10616 - protein, 343 aa, unidentified
  source 1..343: note = protein_c5ec070
  REGION 7..149: note = RuvC_domain
  SITE 10: note = RuvC_P1
  SITE 53: note = RuvC_P2
  SITE 88: note = RuvC_P3
  SITE 90: note = RuvC_P4
  SITE 93: note = RuvC_P5
  REGION 212..303: note = Tnp_domain
  SITE 220: note = Tnp_P1
  SITE 250: note = Tnp_P2
  SITE 258: note = Tnp_P3
  SITE 259: note = Tnp_P4
  SITE 271: note = Tnp_P5
MQAVTTIGLDIAKSVFQVHGVDSGGQVVLRRQLKRRYVLAFFEKLPPCLVGIEACASAHHWSRELQSLGHTVRLMPPTYVKPYVKRHKNDAIDAEAICEAVTRPNMRFVATKTREQQSCLTLHRTRHLLIRQQTSVINAIRAHLAEFGIVAPVGRNGVEQLLGVVADASDKRLPELARASVAALGDQLRALKAQILQFDRLIMAWHRSSEASRRLDDIPGVGPALATALVATVADPQAFRSGRNFSAWIGLVPKQHSSGGKDRLGSISKRGDRYLRGLFVAGALAVIRYAKIHGTKHRPWLTALLARRPTKIAAIALANKIARMAWAMMARGERYKEPVALAA

SEQ ID NO: 10617 - protein, 318 aa, unidentified
  source 1..318: note = protein_1fb68eb
  REGION 10..152: note = RuvC_domain
  SITE 13: note = RuvC_P1
  SITE 55: note = RuvC_P2
  SITE 95: note = RuvC_P3
  SITE 97: note = RuvC_P4
  SITE 100: note = RuvC_P5
  REGION 191..275: note = Tnp_domain
  SITE 199: note = Tnp_P1
  SITE 228: note = Tnp_P2
  SITE 236: note = Tnp_P3
  SITE 237: note = Tnp_P4
  SITE 249: note = Tnp_P5
MNPQQATEFVGVDVASAHLDVAAQGQASVRRFANTPQGIALLLRTLRPASVLALESTGRYHVPLALAAHAAGLRVYVLNPLDARRYAQSVGQRGKTDRMDALVLARYICHEHAHLQQWQPPTACQAVLRELLAHRATLVRQRSALAQAGCHSKTLARLDEPVLAALQQAIKHVDGQIETTLRADLSSHQAFEHITSVPGLGLVCGALLVMLFGRMQGGSADAVIAFTGLDPRPNDSGKKTGQRRLSKRGWPEIRRLMYAAAMSAARTKTWNGYYCAQRDKGLSTTAALVVLARKLLRVAFSLFKQQALFDPALVAGRA

SEQ ID NO: 10618 - protein, 396 aa, unidentified
  source 1..396: note = protein_5f4e365
  REGION 6..160: note = RuvC_domain
  SITE 9: note = RuvC_P1
  SITE 58: note = RuvC_P2
  SITE 98: note = RuvC_P3
  SITE 100: note = RuvC_P4
  SITE 103: note = RuvC_P5
  REGION 265..352: note = Tnp_domain
  SITE 273: note = Tnp_P1
  SITE 304: note = Tnp_P2
  SITE 312: note = Tnp_P3
  SITE 313: note = Tnp_P4
  SITE 325: note = Tnp_P5
MPEIWAGVDIGKTHHHAVVINAAGGRLLSRRIQNDESELLALIGDVLAISEDVLWAVDLNHGGAALLIGLLTAHDQPVAYLTGLAVHRASATYRGEAKTDAKDAFVIADQARIRRDLGLLRPGDEIAVDLRTLTTRRLDVVFDRTRQINRLRAQLLELFPALERSLDLTNKGPVTLLTGYQTPAAIRRAGAKRIETWLKNRKVKGAASLAQTVVEAAQAQSTALPGEKLAAAMVVRLAKGVMALDEEIAELDALIEARFHEHPHAEVIRSLPGMGPRLGAEFIAATGGDMDAFGNADRLAGFAGLAPQPRDSGRVSGNLRRPRRYHRGLLRTMYLSAMASLKSCPASKAYYRRKRSEGKGHKQALLSLARRRINVLWAMIRDRECYRPSLPVVGTA

SEQ ID NO: 10619 - protein, 396 aa, unidentified
  source 1..396: note = protein_2f09a15
  REGION 6..160: note = RuvC_domain
  SITE 9: note = RuvC_P1
  SITE 58: note = RuvC_P2
  SITE 98: note = RuvC_P3
  SITE 100: note = RuvC_P4
  SITE 103: note = RuvC_P5
  REGION 265..352: note = Tnp_domain
  SITE 273: note = Tnp_P1
  SITE 304: note = Tnp_P2
  SITE 312: note = Tnp_P3
  SITE 313: note = Tnp_P4
  SITE 325: note = Tnp_P5
MAMIWAGIDAGKTHHHCVAIDESGRRLLSRRVANDEPELLELLRDVLALGDEVTWGIDLADGGAALAITLLFNHDQPVHYISGRAIHRASESYRGEGKTDAKDAAVIADQVRIRRDLHPLRAGDETVTDLKILTGRRTDLVADRTRIVNRLRAQLTGIFPGLERALDLTNTGPLVLLTGYQTPAAIRRIGVKRLETWLRNRRVLRADRLAETAVEAAERQHTSLPGEKLTAQLVHTLAAEVMALNQQVAELDKLIEARFRDHRHFEVITSMPGLGVILGAEFLAATGGDLSLFGSPDRLAGFGGVAPVPRDSGKISGNLRRPRRYNRRLQRVLYISALFSIRSCEDSRRFYERKRSEGKRHIQAVLALARRRVNVLWALLRDGRTYEAAPPTTLAA

SEQ ID NO: 10620 - protein, 348 aa, unidentified
  source 1..348: note = protein_3a7df02
  REGION 6..147: note = RuvC_domain
  SITE 9: note = RuvC_P1
  SITE 52: note = RuvC_P2
  SITE 87: note = RuvC_P3
  SITE 89: note = RuvC_P4
  SITE 92: note = RuvC_P5
  REGION 209..294: note = Tnp_domain
  SITE 217: note = Tnp_P1
  SITE 246: note = Tnp_P2
  SITE 254: note = Tnp_P3
  SITE 255: note = Tnp_P4
  SITE 267: note = Tnp_P5
MNLKRIGLDTSKAVFTLHGVDHDEKAVLRRNLRRAEMEAFFAKLPPTHVALEACGGSHHWGRRLASFGHTVQLIPPQYVKPFVKRGKNDRNDAEAISEAASRPGMPSVAVRSAEQQAEAIVLSARELLVRQRTQLVNAVRGHAAEFGIVAAKGTSQLPALLEVVAAGEAVPDAAKEMLAFLGGQVAQLDERIGDLERRMKQQHKANPVSQLLAEVPGIGPIGALSLALTIDPGRFQSGRHFAAWLGLTPKEHSTGGRQRLGGISRAGNERLRQLLVLGATAVIKYAKPGSKTASPWLLALLERKPRKLAAVALANKMARVVWAMMATGEAYRGSKTVATQAAGAAVIA

SEQ ID NO: 10621 - protein, 346 aa, unidentified
  source 1..346: note = protein_c3cfd62
  REGION 1..142: note = RuvC_domain
  SITE 44: note = RuvC_P2
  SITE 82: note = RuvC_P3
  SITE 84: note = RuvC_P4
  SITE 87: note = RuvC_P5
  REGION 206..293: note = Tnp_domain
  SITE 214: note = Tnp_P1
  SITE 244: note = Tnp_P2
  SITE 252: note = Tnp_P3
  SITE 253: note = Tnp_P4
  SITE 265: note = Tnp_P5
MAKRVIQVHAVDATGRVVVAKALQRDAFMAWCGQLPPGCLIAMEACSGAHHWTRKLITMGFDARMIAAQFVAPYRMQGIGGKNDANDAAAVCEAASRPMMRFVPLKTPQQQAMLAVHRLREGYKADRTACINRIRGLLTEFGLVFAQSPDALRKVLADVIEDATNELPPLMRMALQQAHLNWLELECHVAWCDERIATHVRMDEQAKVAAQLCGIGPVSASALVASVGDFTQFQSAKQFGAWLGLVPRQNSSGGKTSLGKITKRGDEYLRTLLIQGAKSAVLSAGKRSDRISRWLVQLVERVGWQKAAVALANKNARILWAVLSKGKVFDANYDSIMPGAASAAMA

SEQ ID NO: 10622 - protein, 407 aa, unidentified
  source 1..407: note = protein_3ce5693
  REGION 17..171: note = RuvC_domain
  SITE 20: note = RuvC_P1
  SITE 68: note = RuvC_P2
  SITE 108: note = RuvC_P3
  SITE 110: note = RuvC_P4
  SITE 113: note = RuvC_P5
  REGION 278..363: note = Tnp_domain
  SITE 286: note = Tnp_P1
  SITE 316: note = Tnp_P2
  SITE 324: note = Tnp_P3
  SITE 325: note = Tnp_P4
  SITE 337: note = Tnp_P5
MRCVEAGAVNDSYGVYLGLDVGKGDHHAVGLAPDGKRLHDAALPNTEVRLRQLFDKLARHGRVLVVVDQPASIGALPVAVARACGHQVAYLPGLAMRRIADLHPGTAKTDARDAYVIADAARTLPHTLRRVDVGDEALAELEVLVGFDDDLAGEATRVSNRIRGLLTQIHPALERVLGPKIHHKAVLELLSRCGGPVGLRKAGRRKLVSIAAVHAPRMGERLVEQILTALDEQTVTVPGTQAAETILPRLADSLRDVLRQRDQVAGEVERMLDAHPLAPVLTSMPGIGVRTAARILLEVGDGTAFATPGHLAAYAGLAPVTRRSGSSIRGEHPPRGGNKNLKRAFFLAAFASLADPVSRAYYDRKRAEGKRHNAALICLARRRCDVLYAMLRDKIPYQPRPATPIAA

SEQ ID NO: 10623 - protein, 402 aa, unidentified
  source 1..402: note = protein_14f443c
  REGION 10..164: note = RuvC_domain
  SITE 13: note = RuvC_P1
  SITE 61: note = RuvC_P2
  SITE 101: note = RuvC_P3
  SITE 103: note = RuvC_P4
  SITE 106: note = RuvC_P5
  REGION 271..356: note = Tnp_domain
  SITE 279: note = Tnp_P1
  SITE 308: note = Tnp_P2
  SITE 316: note = Tnp_P3
  SITE 317: note = Tnp_P4
  SITE 329: note = Tnp_P5
MQVDDIDVFIGIDVGKSEHWATALTTAGECLHDRPLPNDEARLREVYEHLGEHGRLLVVVDQPATIGALAVAVAQDMGITVGYLPGLSMRRIADLSPGSAKTDRRDAAVIASAARTMPHTLRSITYSDEDAAALSMLTGFDLDLARQVNQVSNRIRGLYTQIHPALEGVLGPWLEHDSVLEVIATWPTPAALRKAGRARIDAKLKANGCRRHAAWAQAIVEALSKQTVTVAGTDAAGVVLPHLARQLIALHTQRADIAAQVEALVEAHPLYPVLTSMPGVGVRTAAVFLAGTLGKTFTTGAHLASYAGLAPVTRRSGSSIRGEHVSHGGNKRLKQAMFLSAFASLRTDPVSRTYYERKRAQGKRHNQAILALAHRRILTLHAMIRNNTLYNPQPAQPLTTTA

SEQ ID NO: 10624 - protein, 340 aa, unidentified
  source 1..340: note = protein_e5605a2
  REGION 6..147: note = RuvC_domain
  SITE 9: note = RuvC_P1
  SITE 52: note = RuvC_P2
  SITE 87: note = RuvC_P3
  SITE 89: note = RuvC_P4
  SITE 92: note = RuvC_P5
  REGION 210..299: note = Tnp_domain
  SITE 218: note = Tnp_P1
  SITE 248: note = Tnp_P2
  SITE 256: note = Tnp_P3
  SITE 257: note = Tnp_P4
  SITE 269: note = Tnp_P5
MNIKRIGLDLAKNVFQIHAVDHHEHVVVRKSIRRAHMHAYFSQLAPCTIGIEACASSHYWARELTRMGHTVHIIPPKFVKPYLRGNKNDANDAEAICEAISRPAMRFVAVKTERQQTLQAEHRVRARVIKSRTALCNEIRGFLGEFGVVLPVGISQLRKALPEILSQQEQWDDRFMRLLCELAEELRMLDDRVAGHDRRLAEAAREDICIQRLMKIEGIGVITASAMVALLGDATQFKNGREMAAYVGLVPRQHSSGGKQQLGHISKRGDSYLRTLVIHGARSVLKTCAGKEDRRSQWLQSVAERRNRNIATVALANKNVRIAWAVMSRGEDYHGSRVAG

SEQ ID NO: 10625 - protein, 413 aa, unidentified
  source 1..413: note = protein_70f05e8
  REGION 5..167: note = RuvC_domain
  SITE 8: note = RuvC_P1
  SITE 64: note = RuvC_P2
  SITE 104: note = RuvC_P3
  SITE 106: note = RuvC_P4
  SITE 109: note = RuvC_P5
  REGION 275..361: note = Tnp_domain
  SITE 283: note = Tnp_P1
  SITE 314: note = Tnp_P2
  SITE 322: note = Tnp_P3
  SITE 323: note = Tnp_P4
MRLFVGDDWAEDHHDVELMDEGGRRLAKARLPEGVAGIARLHAMVGGQLGEDADEEDAGQVAVGIETDRGPWVAALIAAGYTVYAINPLQAARYRERHGVSGAKSDAGDAHVLADMVRTDSHQLRTVAGDSAQAAAVKVVTRTHKTLIWERTRHTQRLRHALRDYFPAALEAFEDLDAPDTLELLARAPDPASAARLTTAQISAALKRARRRGIAGKAGQIQAVLRAAHLGQPAIVTAAYAASVRALIAVLGTLNEQVTTLQGQVEAYFGQHPDAEIITSQPGLGPILGARVLAESGDAPARYASAKARKNYAATSPITRASGKKKAVLARHVHNDRLLDALMSQAFSALQASPGARAYYDRQRTRGSGHNPALRQLANRLTGILHGCLKTRTLYDEATAWPQHAAKPEKAAA

SEQ ID NO: 10626 - protein, 341 aa, unidentified
  source 1..341: note = protein_b4a79fb
  REGION 6..147: note = RuvC_domain
  SITE 9: note = RuvC_P1
  SITE 52: note = RuvC_P2
  SITE 87: note = RuvC_P3
  SITE 89: note = RuvC_P4
  SITE 92: note = RuvC_P5
  REGION 211..298: note = Tnp_domain
  SITE 219: note = Tnp_P1
  SITE 249: note = Tnp_P2
  SITE 257: note = Tnp_P3
  SITE 258: note = Tnp_P4
  SITE 270: note = Tnp_P5
MDATTYAVDLAKHVFQVHWVDPASGEIHRKKLSRAKLSEFFAQLQPARIVMEACGGAHHWARRLVAMGHEPELLPAKQVRAFVRGNKDDAADARAIWVAASHEDIRRVPIKSCDQQAIQSLHRIRSHWITTQTATVNMLRGLMYEFGVVLPQGRHAGLRVLAERRAQFNESLPELMVRLVDELQRTLKEIAHNIEVAEGEIAAVQKSSETAKALRQIPGVGVLGATALAAVLGDGKAWRNGREFAASLGLSPGHQGTGGKVRMGGITKRGDPYLRTLLISGAHAVAISKSRTEWFTKILERRPTNVAAVAWANKTARTAWALIRHGRAYDASWKASAPVAA

SEQ ID NO: 10627 - protein, 405 aa, unidentified
  source 1..405: note = protein_1f036ab
  REGION 13..169: note = RuvC_domain
  SITE 16: note = RuvC_P1
  SITE 67: note = RuvC_P2
  SITE 107: note = RuvC_P3
  SITE 109: note = RuvC_P4
  SITE 112: note = RuvC_P5
  REGION 275..362: note = Tnp_domain
  SITE 283: note = Tnp_P1
  SITE 314: note = Tnp_P2
  SITE 322: note = Tnp_P3
  SITE 323: note = Tnp_P4
  SITE 335: note = Tnp_P5
MITEVAVSQQVWAGVDAGKSDHHCVAIDAEGQRLLSQRVANDETALLELIDAVAAQSDGGEVTWAIDLNAGGAALLITLLIAAEQRLLYIPGRTIYHASAGYRGDGKSDAKDAAVIADQARMRRDLQPLRPGDDIAVELRILTARRTDLVADRTRVINRLRAQLLEYFPALERGFDYSASKAALILLTGYQTPDGLRRAGAARLTAWLHKRKARNASAVAATAIEAASAQHTTVPGQNLAAAMVARLAKEVMTLDTEIAETDTMIEDRFRRHRHAEILLSMPGFGVILGAEFLAATGGDMSAFDSVDRLAGVSGLAPVPRDSGRISGNLKRPRRYDRRLLRACYLSAQIAIRTDPASRTYYNRKRAEGKTHTQSILALARRRLNVLWAMLRDHAVYQPATTTAAA

SEQ ID NO: 10628 - protein, 320 aa, unidentified
  source 1..320: note = protein_4d9dc48
  REGION 8..157: note = RuvC_domain
  SITE 11: note = RuvC_P1
  SITE 56: note = RuvC_P2
  SITE 96: note = RuvC_P3
  SITE 98: note = RuvC_P4
  SITE 101: note = RuvC_P5
  REGION 195..279: note = Tnp_domain
  SITE 203: note = Tnp_P1
  SITE 232: note = Tnp_P2
  SITE 240: note = Tnp_P3
  SITE 241: note = Tnp_P4
  SITE 252: note = Tnp_P5
MSVTSMTVGIDVAKAHIDVCVLEPKSGAQRFTNDAEGHSALAALLQPLDVGLVVMEATGGYEVALACALQAAGLPVAVLNPRQARDFAKSMGRLAKTDAVDARMLAELAAVLLRREDLSRFLRPLTDECQQWLAALVTRRRQLLTMLHSERQRLQITPAKLHPSIEAIVAAIKAQLNELETQMVGHVREHFGDLDRLLQSAAGVGPVASATMIAELPELGRLNRREIAALVGVAPMANDSGSSKGRRRVQGGRFEVRRVLYMATLTATRYNPAIKAFYERLKAAGKLPKVALVACMRKLLTTLNAMVRTGKPWDKSLHGT

SEQ ID NO: 10629 - protein, 405 aa, unidentified
  source 1..405: note = protein_03814dc
  REGION 15..169: note = RuvC_domain
  SITE 18: note = RuvC_P1
  SITE 66: note = RuvC_P2
  SITE 106: note = RuvC_P3
  SITE 108: note = RuvC_P4
  SITE 111: note = RuvC_P5
  REGION 276..360: note = Tnp_domain
  SITE 284: note = Tnp_P1
  SITE 313: note = Tnp_P2
  SITE 321: note = Tnp_P3
  SITE 322: note = Tnp_P4
  SITE 334: note = Tnp_P5
MVTSIGRYDEVDVFVGLDVGKGEHHAVALDRAGQRLYDRPLPNDERRLKAVLDQLAAHGTVLLVVDQPATVGALPVALAQANGVLVGYLPGLAMRRIADLHPGEAKTDARDAFIIAETARTMPHTLRSIQVTDEQVAELSMLCGFDDDLASQITQVSNRIRGLLTQIHPALERVLGPRLDHPAILDLLAHYPSPAAMRTAGEKRLGNRLLKNAPRKGRVWAAEILTALGEQTVVVTGTGAAALVLPRLAEQLAALRRQRDEIAIEVEKLVDQHPLQPVLTSMPGVGVRTAARLLTEVTTKSFPTAGHLAAYAGLAPVTRRSGSSIRGEHPSRRGNKILKRTMFLSAFAALRDPESRAYYDRKIAQGKRHNQALIALARRRCDVLYAMLRDGTLYQPHVTESALAA

SEQ ID NO: 10630 - protein, 339 aa, unidentified
  source 1..339: note = protein_0dcffd3
  REGION 6..147: note = RuvC_domain
  SITE 9: note = RuvC_P1
  SITE 52: note = RuvC_P2
  SITE 87: note = RuvC_P3
  SITE 89: note = RuvC_P4
  SITE 92: note = RuvC_P5
  REGION 210..296: note = Tnp_domain
  SITE 218: note = Tnp_P1
  SITE 248: note = Tnp_P2
  SITE 256: note = Tnp_P3
  SITE 257: note = Tnp_P4
  SITE 269: note = Tnp_P5
MKLTPVGIDIAKSVFQVHYVDQETGEIVNRPIKRAKFLEYFANRAPCLIGMEACGGAHHWARQLAKMGHQVKLMPAEFVKAFNIRNKNDAADARAIWLAVQQPSKPVAVKTEMQQAMLALHRMRQQLIKFRTMQINNLRGLLTEYGEVMSKSRSKLDKETPAVLERLAQRLPAVLIDTFREQWNALTKLDEQVAEIERRMREWKKEDKAVKAISEIPGVGLLTATAAVAMMGDPKVFSSGREFAAWIGIVPKQTGSGGKVNLHGISKRGDTYLRTLLIHGARSVVTRGKAPGEWVEQMKTRRPKNVVVVALANKMARTICAVLAHDRPYQKDYVSVKPV

SEQ ID NO: 10631 - protein, 407 aa, unidentified
  source 1..407: note = protein_e970dbb
  REGION 4..162: note = RuvC_domain
  SITE 7: note = RuvC_P1
  SITE 59: note = RuvC_P2
  SITE 99: note = RuvC_P3
  SITE 101: note = RuvC_P4
  SITE 104: note = RuvC_P5
  REGION 270..356: note = Tnp_domain
  SITE 278: note = Tnp_P1
  SITE 309: note = Tnp_P2
  SITE 317: note = Tnp_P3
  SITE 318: note = Tnp_P4
MLFVGDDWAEDHHDVELQDETGRVLGRAKLPEGVAGIGRLHAMIGEHLGEDDEATVVVGIETDRGPWVQALIAAGYQVYAINPLQVARYRERRGVSGAKSDTGDAHALADMVRTDRHQLRPVAGDSAQAEAVKVLSRVHKTLIWDRTRQMLRLRHALREFFPAALVAFDDLTAPEALELLGAAPEPTAAAALSTERINEALKRARRHGRAAKAEAIAAALRAEHLGQPPVVATAFAATVRAHVAILGTLNAEIKTMGKEIEAHFSEHPDAEVYLSQPGLGVVLGARVLAEFGDDKQRYADARARKNYAGTSPITRQSGKKKVVLARYVHNDRLVDALGQQAFTALNNSPGARTYYDQLRAKGVGHRAALRQLGNRLVGILHGCLKTGKPYSEDIAWAHHRKDLDTAA

SEQ ID NO: 10632 - protein, 302 aa, unidentified
  source 1..302: note = protein_8508df6
  REGION 4..148: note = RuvC_domain
  SITE 7: note = RuvC_P1
  SITE 50: note = RuvC_P2
  SITE 90: note = RuvC_P3
  SITE 92: note = RuvC_P4
  SITE 95: note = RuvC_P5
  REGION 182..266: note = Tnp_domain
  SITE 190: note = Tnp_P1
  SITE 219: note = Tnp_P2
  SITE 227: note = Tnp_P3
  SITE 228: note = Tnp_P4
  SITE 239: note = Tnp_P5
MNGIGIDVCKAMLDVAVHHGPCAQFHNTPAGHRKLLAWLANQEVGQIVLEASGGYEHPVLDVLFDAGYRIVRANAHRCHAFAAATGLPAKTDRLDAMNLACMAATLELLAYQPMEPWRRRLREFVRARRQLVALATSADHQLEQVTDKPLRRVLQANINQIKKTCARLEQQIAEQVRQQPQLEALRSLKGVGATLQAVLASYLPELGTLDGKAIARLVGVAPIAHDSGRMRGVRRIQGGRAEVRNVLYMACLSAIQHEQRIWEFYRSLRARGKPGKVAVVATMRKMLVILNARARDAQAAPT

SEQ ID NO: 10633 - protein, 305 aa, unidentified
  source 1..305: note = protein_6510c0a
  REGION 5..176: note = RuvC_domain
  SITE 8: note = RuvC_P1
  SITE 52: note = RuvC_P2
  SITE 92: note = RuvC_P3
  SITE 94: note = RuvC_P4
  SITE 97: note = RuvC_P5
  REGION 186..270: note = Tnp_domain
  SITE 194: note = Tnp_P1
  SITE 223: note = Tnp_P2
  SITE 231: note = Tnp_P3
  SITE 232: note = Tnp_P4
  SITE 243: note = Tnp_P5
MISWVGIDISKLNLVVWVQPQKEGFEIPNTSEGFVELIKRLSCYEVGRVLLEATGGYERQVMAALQQTNFQVLRINPRRARAFAVAMGKNAKTDPIDAAVLADFAEVLHGSHEKVISPEREALRELIQLREHFVQQRDDNKRRLQQAQLPTVVSATKDHIRYLQAQIKALEKHLVQGMFDLDAEKARRLMSVKGIGKVAAASLLVYLPELGELDRREVAALAGIAPYNDDSGNHNGKRQIYGGRTRVRHALYMSSWVVIRFQADFKTRYEALRERGKSAKVALIACMRILLIRLNAMLRDGTEWR

SEQ ID NO: 10634 - protein, 434 aa, unidentified
  source 1..434: note = protein_13fff77
  REGION 22..175: note = RuvC_domain
  SITE 25: note = RuvC_P1
  SITE 73: note = RuvC_P2
  SITE 114: note = RuvC_P3
  SITE 116: note = RuvC_P4
  SITE 119: note = RuvC_P5
  REGION 237..324: note = Tnp_domain
  SITE 245: note = Tnp_P1
  SITE 275: note = Tnp_P2
  SITE 283: note = Tnp_P3
  SITE 284: note = Tnp_P4
  SITE 296: note = Tnp_P5
MPAAAFRFGETWLGVLMANVMIGVDPHKGSHTAVAIGAGEEPLGELRVDACPSQAEQLRAWAVAWPQRAWAIEGAAGLGNLLAQQLVAAGERVLDVPPKLAARVRLLQAGDTNKNDPNDAYSVAVAALRSKLARPVLADGHAVVLKVWAKRHRDLARLRNQACCRLHAVLCDLVPGGVRREISAGRAARLLEQVRPADAVTTARCELAGEFLADIRRLDAQLRECHNKLAAAVRASGTSLTGLFGVGPVIAGTVIGDVRHVFRFPRRDHFASWNGTAPVEVSSGDRRKVYRLSLRGNRRVNHAIHMAAISQIRHKHSDGRAFYEKKLAEGKTHKEALRALKRRISDAIYAALAADARRAASACSKSPGGQPGDHSASRAAGSHPAHRHFGQATPGPAPTIRPGANSSRAPTQPNRARRRAAHSPASSKKPPATT

SEQ ID NO: 10635 - protein, 331 aa, unidentified
  source 1..331: note = protein_8f70a19
  REGION 9..153: note = RuvC_domain
  SITE 12: note = RuvC_P1
  SITE 56: note = RuvC_P2
  SITE 96: note = RuvC_P3
  SITE 98: note = RuvC_P4
  SITE 101: note = RuvC_P5
  REGION 192..277: note = Tnp_domain
  SITE 200: note = Tnp_P1
  SITE 229: note = Tnp_P2
  SITE 237: note = Tnp_P3
  SITE 238: note = Tnp_P4
  SITE 249: note = Tnp_P5
MAQNDVLVAGIDVAKDKVDVCIRSLSQRQTFASSPEGRRALIRWLRKHKVGKAAMEASGGYEREWAKVLRQDGIEGLVVDPKRVRNFAKSAGQLAKNDPIDAEMIAWFAETFIEARGQAYDAAREKLAQIVSARQALIDVQTSLRNRTEHSTPDVVQKMQNRLLKRLAAEIAKLEAAIAALIKTTPRFAELAEIIESVPGLAGGTSAGLIGAMPELGQIGNKVAAALLGAAPYDDDSGKRRGVRHIQGGRRKVRNVFYMASMGAATRHNPVLKAFYDRLIAKGKEPKVALTACMRKLIVILNVMIARGEKWDAGRYEVSNSARLPPSACTP

SEQ ID NO: 10636 - protein, 311 aa, unidentified
  source 1..311: note = protein_fa2b28e
  REGION 6..153: note = RuvC_domain
  SITE 9: note = RuvC_P1
  SITE 53: note = RuvC_P2
  SITE 92: note = RuvC_P3
  SITE 94: note = RuvC_P4
  SITE 97: note = RuvC_P5
  REGION 188..272: note = Tnp_domain
  SITE 196: note = Tnp_P1
  SITE 225: note = Tnp_P2
  SITE 233: note = Tnp_P3
  SITE 234: note = Tnp_P4
  SITE 245: note = Tnp_P5
MMNDSIGIDISKGRLDAFRLSDRAHRAFANTQAGFDDLRRWLGDSPISRIVYEATGPYHGAFECALASDLPLVKVNPLQARRFAQARGSRAKTDRVDARMLALMGDAFDLQPDPPVEETDHELKELQIERTALVRDRTRLLNRIKTQTLSLTKRHSKARIAQIERQLAAIQDEIETRLRADDGKARKRDILTSIPGIGPVTASTILIECPEIGMLGRKQIASLAGLAPMTRQSGQWRGKAFIQGGRKFLRDALYMPALVAMRFNTQMRAKYEALKGAGKPAKVALTAIMRKLIELANALIRDDRKWAQMRA

SEQ ID NO: 10637 - protein, 341 aa, unidentified
  source 1..341: note = protein_e663e9d
  REGION 7..149: note = RuvC_domain
  SITE 10: note = RuvC_P1
  SITE 53: note = RuvC_P2
  SITE 88: note = RuvC_P3
  SITE 90: note = RuvC_P4
  SITE 93: note = RuvC_P5
  REGION 209..295: note = Tnp_domain
  SITE 217: note = Tnp_P1
  SITE 247: note = Tnp_P2
  SITE 255: note = Tnp_P3
  SITE 256: note = Tnp_P4
  SITE 268: note = Tnp_P5
MSSVALVGIDLGKHSFHLHGQDNVGREVLRRKATRQQMMRLLGNLPRCTVAMEACAGSHFLARQLVAFGHEVKLISPQFVRPFVKGNKNDFIDAEAICEAASRPTMRFVTPKTEAQQTLSVLHRMRESLVRDRTKTANQAHGFLLEFGISLPKGLSLVRRLPTTLNEHELPPHLVGLLSRLHEHFCYLDEQIKSLDKEMTGQLAEDELGSRLLSIPCVGPITASLLCAEMGDGKQYGGSRDFAASVGLVPRQYSTGGRANLLGISKRGDKNLRRLLVQCARVYLQRLEYQQGALADWVRSLRERRHSNVVVCALANKFARIAWAIAANHSQFKARPGAAVA

SEQ ID NO: 10638 - protein, 318 aa, unidentified
  source 1..318: note = protein_067a758
  REGION 7..155: note = RuvC_domain
  SITE 10: note = RuvC_P1
  SITE 54: note = RuvC_P2
  SITE 94: note = RuvC_P3
  SITE 96: note = RuvC_P4
  SITE 99: note = RuvC_P5
  REGION 193..277: note = Tnp_domain
  SITE 201: note = Tnp_P1
  SITE 230: note = Tnp_P2
  SITE 238: note = Tnp_P3
  SITE 239: note = Tnp_P4
  SITE 250: note = Tnp_P5
MSEPVFVGIDVSSQTLEVAGSNRSETWQVGNDAGGIDQLVQQLQELAPALVVLEATGGYEFEAACALQAAGLAVAVVNPRAARDFARAMGALAKTDALDARMLAAFARVLHQHPERERFVKPLADAELQRLRALVLRRRQLVQMLTSEKQRKRIAHAAAHASIERHIEFLTKELSDSDSDVAGHVQQHHAALAEALQTVPGIGAASVAVLLAELPELGKLDRRRIAALVGVAPLNRDSGQMRGQRAIWGGRHDVRRTLYMATLVAVRHCSAFKAFYEHLVERGKRKKVALVAAMRKLLTVLDAIAKQGSRWNPMLHDA

SEQ ID NO: 10639 - protein, 350 aa, unidentified
  source 1..350: note = protein_ba9ae09
  REGION 7..150: note = RuvC_domain
  SITE 10: note = RuvC_P1
  SITE 53: note = RuvC_P2
  SITE 89: note = RuvC_P3
  SITE 91: note = RuvC_P4
  SITE 94: note = RuvC_P5
  REGION 213..296: note = Tnp_domain
  SITE 221: note = Tnp_P1
  SITE 251: note = Tnp_P2
  SITE 259: note = Tnp_P3
  SITE 260: note = Tnp_P4
  SITE 272: note = Tnp_P5
MSETITIGLDIAKNVFQVHGVDGNGAVTVRRQLRRAQLLKYFGSLSPCIVGIEACATSHHWARQIAALGHTVRLLPPAHVKPYVKRGKKNDAADAAAICEAVTRPHMRAVPVKTEVQQAVLLLHRTRDLLVRQRTMLICALRSHMAEFGVIAGQGRGNFARLKARLASEADGSVPELARSALQLIAAQIDDANMKIEALEKEIVARHRHDEAGRRLATIPGIGPIIASALAASVPDASAFKSGRQFAAWLGLVPRQNSTGGKERLGGITKAGDRYLRKLLVIGATGLIRYKRKTIPGGIEWVAKLLARKPVRLVTVALANKMARIAWAILSRGEIYRHADATVDTQPASA

SEQ ID NO: 10640 - protein, 340 aa, unidentified
  source 1..340: note = protein_cece387
  REGION 6..148: note = RuvC_domain
  SITE 9: note = RuvC_P1
  SITE 52: note = RuvC_P2
  SITE 87: note = RuvC_P3
  SITE 89: note = RuvC_P4
  SITE 92: note = RuvC_P5
  REGION 210..293: note = Tnp_domain
  SITE 218: note = Tnp_P1
  SITE 248: note = Tnp_P2
  SITE 256: note = Tnp_P3
  SITE 257: note = Tnp_P4
  SITE 269: note = Tnp_P5
MEVSTIGLDLAKNVFQAHGADASGCVVFRKQLRRKNVLEFFAKQPVCMVAMEACAGAHYWAREIGRFGHTVRLIPPAYVKPFVKRQKNDAADAEAICEAAQRPTMRFVAVKSEDAQASAVVFRARDLLVRQRTQVINSLRGHLAEYGFVTAQGPSHVAGLIEYVTDDKNTLPDAARLALAMLVDTLRSLEDRIRQLDHEIARRAREDADARRLATIPGVGPITATALTALAPAASTFKRGRDFAAWLGLTPLQRSTGGKQKLGATSKMGERTLRRLLILGASSVVRQAAHRGLPEGSWLGRMLVRKPRMLVIVALANKLARIVWALLAKGGVYGAPVAAG

SEQ ID NO: 10641 - protein, 364 aa, unidentified
  source 1..364: note = protein_c1e43e4
  REGION 19..167: note = RuvC_domain
  SITE 22: note = RuvC_P1
  SITE 71: note = RuvC_P2
  SITE 107: note = RuvC_P3
  SITE 109: note = RuvC_P4
  SITE 112: note = RuvC_P5
  REGION 238..323: note = Tnp_domain
  SITE 245: note = Tnp_P1
  SITE 276: note = Tnp_P2
  SITE 284: note = Tnp_P3
  SITE 285: note = Tnp_P4
  SITE 296: note = Tnp_P5
MTAVQAERQADSSAVEVVGGVDTHKDTHTAAAVDTAGRVLGSAQFPTDAAGYRALLRWLRGFGTLLLVGVEGTGVYGAGLARLLAAQGVAMVEVDRPDRKARRWQGKSDPVDAEAAARAALARVRTGLPKQRDGRVEALRALRVARRSAVGHRADVQRQIKALIVTAPESLRAQLRALPDRELIKVCADQRPDRAGAGDPGTATKIALRSLARRHRALSVEIADLDELLGPLVAQINPGLLALKGIGPDVAGQMLVTAGENADRLTNEAAFAMLCGVAPLPASSGRTTRHRLNRGGDRAANSALWRIVITRMATDQRTKNYIARRTAQGLTKPEIIRCLKRYVAREVFLALTSASAEKRPAKAA

SEQ ID NO: 10642 - protein, 399 aa, unidentified
  source 1..399: note = protein_60aa052
  REGION 5..164: note = RuvC_domain
  SITE 8: note = RuvC_P1
  SITE 62: note = RuvC_P2
  SITE 102: note = RuvC_P3
  SITE 104: note = RuvC_P4
  SITE 107: note = RuvC_P5
  REGION 274..363: note = Tnp_domain
  SITE 282: note = Tnp_P1
  SITE 312: note = Tnp_P2
  SITE 320: note = Tnp_P3
  SITE 321: note = Tnp_P4
  SITE 334: note = Tnp_P5
MRPVIGIDVAKGKSVIQAFIKRNAPYGRDQVIWHTPNGLERLLQILAELEMTTKTKPVVILEPTGHYHRTLVQRIQSEGYDIILVNPLQAQRARRTSLRKVKTDASDAWHLGDLYYQEEDWLVHPCREEHLMDLQFLTRQHEFITSLYVQAKLNMRTLLDQVFPGYEGVFKDLFSKTSLNLLDLCLSHEGIQNRDEEDWIQTVREATKASRSEAWMNRKVDNLKAAVLQNPVTQVSFGLETALRSMLKTVRGFQMQLTELEKTILELSAMIEEVKLLETIPGVGTKIAAAIVSEIGDATQFRYPKQLVAYAGLDPSVFSSGKFTATQNRITKRGSKRLRRAVYLAVTCGLRVGINLRMREYYDKKKSEGKPHKVAVIACANKLLHHIYAMLKRRQPYTL

SEQ ID NO: 10643 - protein, 344 aa, unidentified
  source 1..344: note = protein_881275c
  REGION 5..152: note = RuvC_domain
  SITE 8: note = RuvC_P1
  SITE 55: note = RuvC_P2
  SITE 92: note = RuvC_P3
  SITE 94: note = RuvC_P4
  SITE 97: note = RuvC_P5
  REGION 212..292: note = Tnp_domain
  SITE 220: note = Tnp_P1
  SITE 250: note = Tnp_P2
  SITE 258: note = Tnp_P3
  SITE 259: note = Tnp_P4
  SITE 271: note = Tnp_P5
MNQYAGIDVSLESSAICVVDGAGKILREMKVASEPEALIAWFGSLGPAIERIGLEAGPLSQWLYAALREAGLAVELLETRHVRDAFKAMPVKSDRNDARGIAQLMRLGWFRPVHCKSIEAQETRAVLTARKLLQSKLRDIENSLRGILRGFGLKVGKTTECTFALRIKELVGGHPGLERVAEALLEAHAVLRREFNGLDKHTQKLARLHPQAKLLMTTPAVGPIVALTYASAIDDPARFRSSKATGAHFGLTPKKYQSGQSDYTGRISKIGDAAVREALYQAAHIMLTKPVRNCSGLKSWAMRIARRAGMRKAKVALARKLAVILHRMLADAQPFNPSAKTAAA

SEQ ID NO: 10644 - protein, 401 aa, unidentified
  source 1..401: note = protein_1f213f6
  REGION 10..164: note = RuvC_domain
  SITE 13: note = RuvC_P1
  SITE 61: note = RuvC_P2
  SITE 101: note = RuvC_P3
  SITE 103: note = RuvC_P4
  SITE 106: note = RuvC_P5
  REGION 271..355: note = Tnp_domain
  SITE 279: note = Tnp_P1
  SITE 308: note = Tnp_P2
  SITE 316: note = Tnp_P3
  SITE 317: note = Tnp_P4
  SITE 329: note = Tnp_P5
MDIEDIEVFVGIDVGKTHHWATALTKGGKKVFDKALPNDEARLRALYEKLAAHGHLLVVVDQPATIGALAVAVARDMGITVGYLPGLSMRRIADLTPGSAKTDAKDAAVIAGAARTMPHTLRAISTSDEDAAALSMLTGFDLDLARQVNQTANRIRGLYTQIHPALETILGPRLKHDAVLEVIAAWPTPTALRKAGRARIDAKLKKHGARRHAAWAGKIVSALGRQTVTVTGTEAAGTVLPHLARQLIALHSQRADVAARVETLVRAHPLHEVLTSMPGVGVGTAAVFLAETLGKTFDTGAQLASYAGLTPVTRRSGSSIRGERVCRTGNKRLKHAMFLSAFASLRDPVSRTYYQRKRDQGKRHNQALLALAHRRILTLHAMIRDGALYDPQPATKPPAAA

SEQ ID NO: 10645 - protein, 341 aa, unidentified
  source 1..341: note = protein_3cfb0f5
  REGION 6..148: note = RuvC_domain
  SITE 9: note = RuvC_P1
  SITE 52: note = RuvC_P2
  SITE 87: note = RuvC_P3
  SITE 89: note = RuvC_P4
  SITE 92: note = RuvC_P5
  REGION 210..294: note = Tnp_domain
  SITE 218: note = Tnp_P1
  SITE 248: note = Tnp_P2
  SITE 256: note = Tnp_P3
  SITE 257: note = Tnp_P4
  SITE 269: note = Tnp_P5
MNDMMIGVDLAKRVFQIHGAQMTGKVTFRKKLSREQFRTFMAAQPTCLVVFEACGSASYWAQEMRAFGHEVRLIAPQYVRPFVKRQKNDAADAEAIVIAARQPEMRFVEPKTVEQQSRAAVFRGRERLVHQRTADVNALRALLYEHGHVFPAGIRHLERMTTLVEDETSDLPALIREECQDLMAQIAEKTERITERTTKLKALAAQSDRARLLQTMPGVGPLTALAVEAFGPDMAQFKTGRDFAAWLGLVPRQHSSGGKERLGRITKAGQADIRRLLIIGAMSRLGWLGQRTIAEGSWLARMLARKPRMLVAIALANKMARQIWAMLTKNEDYKDPALAAA

SEQ ID NO: 10646 - protein, 342 aa, unidentified
  source 1..342: note = protein_8d4e50c
  REGION 6..152: note = RuvC_domain
  SITE 9: note = RuvC_P1
  SITE 53: note = RuvC_P2
  SITE 91: note = RuvC_P3
  SITE 93: note = RuvC_P4
  SITE 96: note = RuvC_P5
  REGION 211..298: note = Tnp_domain
  SITE 219: note = Tnp_P1
  SITE 249: note = Tnp_P2
  SITE 257: note = Tnp_P3
  SITE 258: note = Tnp_P4
  SITE 270: note = Tnp_P5
MAILFVGIDLAKNVFAVHGVDERGKAVLVRPSVVRARLHELIASLPACTIGMEACSGAHHWARLFKRHGHTVRLMAPKFVAPYRMSGARGKNDAADAAAICEAVQRPNMHFVPVKSEDEQARLCVHRVRQGFVEQRTATINRLRGLLSEFGIVLPQKAATIRREATARLEDLPGWANAAVGDSLSEVHHLDERIAEYDRHVSQMAAGDERSRRLMQLQGVGCTTASALVATIGNAHDFKNGRQLAAWLGLVPGQYSSGGKTRLGSITKAGDGYLRTLLVLGAKSVLAAAKNKQDRLSRWAVSLQERRGYWRAVVAIAAKNARMAWAVLAKGEGFKPLEPEAT

SEQ ID NO: 10647 - protein, 343 aa, unidentified
  source 1..343: note = protein_c2902d5
  REGION 7..149: note = RuvC_domain
  SITE 10: note = RuvC_P1
  SITE 53: note = RuvC_P2
  SITE 88: note = RuvC_P3
  SITE 90: note = RuvC_P4
  SITE 93: note = RuvC_P5
  REGION 212..302: note = Tnp_domain
  SITE 220: note = Tnp_P1
  SITE 250: note = Tnp_P2
  SITE 258: note = Tnp_P3
  SITE 259: note = Tnp_P4
  SITE 271: note = Tnp_P5
MEAITTVGLDIAKSVFQVHGVDAAGVVVVRRQLKRRHVLAFFQKLAPCLVGIEACATSHHWSREIAALGHTVRLMPPAYVKPYVKRQKNDAADAEAICEAVTRANMRFVETKTREQQACLMLHRTRHLFIKQQTSVINSIRAHLAEFGIVARVGRNGVEELLRIAAGPGDARVPEAARMCIAALGVQLRILKAQILEFDRRIIAWHRSNETSKRLDQIPGVGPALATALVASVPDPKAFRSGRHFSAWIGLVPRQHSSGGKDRLGSISKQGDRYLRGLFTAGALAVIRYAKIHGIGHRPWLTTLLARRPTKVAAIALANKLARMAWAMMAKGERYKEPAALAA

SEQ ID NO: 10648 - protein, 416 aa, unidentified
  source 1..416: note = protein_2091438
  REGION 4..160: note = RuvC_domain
  SITE 7: note = RuvC_P1
  SITE 57: note = RuvC_P2
  SITE 97: note = RuvC_P3
  SITE 99: note = RuvC_P4
  SITE 102: note = RuvC_P5
  REGION 274..361: note = Tnp_domain
  SITE 282: note = Tnp_P1
  SITE 312: note = Tnp_P2
  SITE 320: note = Tnp_P3
  SITE 321: note = Tnp_P4
  SITE 334: note = Tnp_P5
MNAAGIDVSSRKSTVAVLRPFGEVVKLPFDVRHSAEDLTTLAEQLKAIEGETRVVMEHTGRYYEGIAKVLHEAGLYVTAVNPLLIKEYGNNSLRKVKTDKADAVKIARYALDNWAELRDYTPMDTIRYDLKTLNRQFQLATKQKTAVANNLIALQEQSFPGIRKLFDSPVRSDGTQKWVNFTHDFWHADCVRRSSQNAFTERYRKWCKRNHYLFSVAKATEIYALAKSAVVLVQKTSITKTLVQEAANQLTAISHAAETYRNEMNKLAAQLPEYPVVMEMYGVGESLGPQLMAEIGDVRRFDRKQSLVAFAGVDPMPNQSGEKNVRSNKASKRGSPYLRKALFNVMTCYLQKAPADEPVFQFLNRKRAEGKPYYVYMTAGANKFLRRYYGKVIEYLSTLEDLPPVDMDSTGLPKRQ

SEQ ID NO: 10649 - protein, 346 aa, unidentified
  source 1..346: note = protein_c514021
  REGION 7..147: note = RuvC_domain
  SITE 10: note = RuvC_P1
  SITE 53: note = RuvC_P2
  SITE 88: note = RuvC_P3
  SITE 90: note = RuvC_P4
  SITE 93: note = RuvC_P5
  REGION 210..296: note = Tnp_domain
  SITE 218: note = Tnp_P1
  SITE 248: note = Tnp_P2
  SITE 256: note = Tnp_P3
  SITE 257: note = Tnp_P4
  SITE 269: note = Tnp_P5
MNQIIRVGMDTSKHFFQLHGVDATEQPVLRKKLRRKEMLVFFAKLPPTVIGIEACGASHYLARELERFGHTVKLLAPQHVKPYVKRNKNDGRDAEALCEAMSRPTMDFVPVKTAEQQAGLMLMGVRQQLIARRTQLSNAIRGYAAEFGLISPRGLDKIEPLLLRIAQDNTVPVLARELFAVQGADYARLQDELKVIDAKLLAWHRADACSRRLSQIPGVGPIGASALVMKTPAPQAFASARGFAAWLGLTPKDHSTAGKLRLGKITRAGDELLRSLLVAGATAVIQQVRRGRGRASPWLVALLARKPPKLAAVALANKVARIAWKLMVTGESYDGARMLKASPHAA

SEQ ID NO: 10650 - protein, 400 aa, unidentified
  source 1..400: note = protein_329cc52
  REGION 10..164: note = RuvC_domain
  SITE 13: note = RuvC_P1
  SITE 62: note = RuvC_P2
  SITE 102: note = RuvC_P3
  SITE 104: note = RuvC_P4
  SITE 107: note = RuvC_P5
  REGION 270..356: note = Tnp_domain
  SITE 278: note = Tnp_P1
  SITE 308: note = Tnp_P2
  SITE 316: note = Tnp_P3
  SITE 317: note = Tnp_P4
  SITE 329: note = Tnp_P5
MSDRRSEVWVGIDAGKGHHWAAVVDGTGATLWSKKIENDESAILAALGEILELADEVRWAVDISGTSSALLLALLAAHGQQAVYVPGRTVNRMAGAYRGEAKTDARDAYVIAETSRHRRDFAAIDVPAQLAADLALLTAHRSDLVADRVRMINRLRDVLTGVFPALERAFDYSAHKGALVLLTGYQTPAAIRRRGRARLTAWLANRGVRNADAVAATALEAAQAQQTALPGEDVAGPIVAELAAEILALDDRLKRIDKQIRETFRAHPQAGTIESLPGMGPILGAEFVVAAGDLTAYADAGHLASAAGLVPVPRDSGRRTGNMHRPKRYSRRLRRVFYMSAQTSIIREGPNRDFYLKKRAEGCKHVQAVIALARRRAGVLWALLRDNRVFTSDPPVAHAA

SEQ ID NO: 10651 - protein, 412 aa, unidentified
  source 1..412: note = protein_13a5d49
  REGION 10..158: note = RuvC_domain
  SITE 13: note = RuvC_P1
  SITE 64: note = RuvC_P2
  SITE 98: note = RuvC_P3
  SITE 100: note = RuvC_P4
  SITE 103: note = RuvC_P5
  REGION 252..340: note = Tnp_domain
  SITE 260: note = Tnp_P1
  SITE 291: note = Tnp_P2
  SITE 299: note = Tnp_P3
  SITE 300: note = Tnp_P4
  SITE 311: note = Tnp_P5
MLKIVYPICCGMDVHKSFVVACIATTNDHGVTNYKSKRFSTFTGDLRRCADWLSENNCKDVCMESTGKYWIPIYNILEHTCNIVLAHPKYVKAIRGKKTDKRDAKWIADIFKHDLVSGSFIPPADIRQLRDLVRYHWKLTNFNVGEKNRAQNCLTVSNIKLDDVFSDVFGKAASAITTRLLESNEPFDVKPYLTKNIKKPIEQIQAAVDGEMCAEQAEKLRIIRSHMDSLELCKLNLESLILSTAEKYIPQLNLVMTAPGIQSFAAIGIISEIGVDMSVFPTSKHLCSWAGLTPQNNESAGKKKTTRISRAGAYIKPLLVQCALCAIRTKQFPEVRNRYLALKKRRGHKKAIIAIARMLLTAIYNILKWNEVYNSELYRKADRPPAHREVSVEEAVFILQRQGYLVTAPAVT

SEQ ID NO: 10652 - protein, 342 aa, unidentified
  source 1..342: note = protein_9a26c6b
  REGION 7..149: note = RuvC_domain
  SITE 10: note = RuvC_P1
  SITE 53: note = RuvC_P2
  SITE 88: note = RuvC_P3
  SITE 90: note = RuvC_P4
  SITE 93: note = RuvC_P5
  REGION 209..296: note = Tnp_domain
  SITE 217: note = Tnp_P1
  SITE 247: note = Tnp_P2
  SITE 255: note = Tnp_P3
  SITE 256: note = Tnp_P4
  SITE 268: note = Tnp_P5
MNKVAIAAIDLGKNSFHLHAQDDRGHELYRKKFTRTALVQHLANLEPCTVVMEACGGAHFMAQQAAKFGHTAKLIAPHLVRPYVKSNKNDFADAEAICEAATRPTMRFVPVKTQAQQALAMLNSTRDSFIKDRTATVNRIHAALLEFGISLPAGFKSINELTALLEASSLSDPIRKLLTRMHDHFDYLHEQIKSLDKELESQVAEDDLAARLMTIPCVGPITSSALAAELGDGKQFKCGRGYSASIGLVPKQHSTGGKTVLLGISKRGDRNQRRLLIQCARVYLMHLDRQKGVLAQWVRHLIATHHHSNHVVCALANKLARIAWAIAAYHTEFDAGPSAMSA

SEQ ID NO: 10653 - protein, 347 aa, unidentified
  source 1..347: note = protein_81a7a22
  REGION 39..182: note = RuvC_domain
  SITE 42: note = RuvC_P1
  SITE 86: note = RuvC_P2
  SITE 126: note = RuvC_P3
  SITE 128: note = RuvC_P4
  SITE 131: note = RuvC_P5
  REGION 221..306: note = Tnp_domain
  SITE 229: note = Tnp_P1
  SITE 258: note = Tnp_P2
  SITE 266: note = Tnp_P3
  SITE 267: note = Tnp_P4
  SITE 278: note = Tnp_P5
MVVARSRSALHRARMVEGTEGSHHKEGSTKMSKHTMVCAGIDTGKRKLDVAVVEGSHQLQVANSPDGHTVLSAWLRQRRVKRVGIEATGGYEQVVVTTLRRDGFVVIVFQPAQVRAYAKFHLQRAKNDKIDAALIALCTADAPKIHAPPDPRLAPFAEHLTLIEQLTEDIAHVKTRRESCRDHRIRHHWNDEIARLKRLLRIELKALVAAIRQHNDLATRLDLIASVGGIGLKTAVAILVRMPEIGRITREQAAALAGLAPYDDDSADHVGVRHIEGGRERLRKSLYTAALPAAFHWNPHLNVIYRRLIAAGKPHKVALVACARKLLIYANTVVERGTPWTERPAAI

SEQ ID NO: 10654 - protein, 356 aa, unidentified
  source 1..356: note = protein_2832431
  REGION 12..167: note = RuvC_domain
  SITE 15: note = RuvC_P1
  SITE 68: note = RuvC_P2
  SITE 104: note = RuvC_P3
  SITE 106: note = RuvC_P4
  SITE 109: note = RuvC_P5
  REGION 233..318: note = Tnp_domain
  SITE 241: note = Tnp_P1
  SITE 271: note = Tnp_P2
  SITE 279: note = Tnp_P3
  SITE 280: note = Tnp_P4
  SITE 291: note = Tnp_P5
MTVIAQTRSFVIGVDCHARTHTLAIIDTGTRECLGSEKFPTTEAGMSRALNWAARRTGGDMETLWVIEGIGTYGAGLARVVDAAGYPVVEAPRMSSRARHGIGKSDALDAVAIASAVLGLDESGLRWPRQDTGPRAALRTLGTARDHLGRERTMNVNALTALLRVYDLGMDARKPLTGPQISTVSRWRERQEPLEVLIAREEAVRLARRVQDIDAELRANQARMNELIKDSPAAPLLEITGVGVVTAAMILTAWSHPGRVRSEAAFAALAGVSPIPASSGNTTRHRLNRGGDRQLNRALHTIAMVRMTYDLETRTYVEKRRAEGRTKREIRRNIKRYLARHLYRLLNTLHATPIPS

SEQ ID NO: 10655 - protein, 320 aa, unidentified
  source 1..320: note = protein_d3f991c
  REGION 8..163: note = RuvC_domain
  SITE 11: note = RuvC_P1
  SITE 56: note = RuvC_P2
  SITE 96: note = RuvC_P3
  SITE 98: note = RuvC_P4
  SITE 101: note = RuvC_P5
  REGION 195..279: note = Tnp_domain
  SITE 203: note = Tnp_P1
  SITE 232: note = Tnp_P2
  SITE 240: note = Tnp_P3
  SITE 241: note = Tnp_P4
  SITE 252: note = Tnp_P5
MSVTSVVVGIDVAKAHVDVSVLGVKLDVQRFDNDADGHSALVAALQPFAVSLVVMEATGGYEAAIACALQAAGLSVAVVNPRQARDFAKSMGQLAKTDAVDARLLAEFASVLVRREDLASFIRPLPDDKQQTLAALVTRRRQLLTMLGAERQRLQLAIAKVRPSIEAMIKAIRAQLDDVEAQMVGHVKEHYEELDKLLRSASGIGPVASATLIAELPELGRLNRREIAALVGVAPMANDSGTTRGRRRIQGGRFEIRRVLYMAALVAAKHNPPIKAFYQRLLAAGKLPKVALVACMRKLLTTLNAMVKTNTPWDAEFDHA

SEQ ID NO: 10656 - protein, 272 aa, unidentified
  source 1..272: note = protein_54548ef
  REGION 2..74: note = RuvC_domain
  SITE 14: note = RuvC_P3
  SITE 16: note = RuvC_P4
  SITE 19: note = RuvC_P5
  REGION 138..225: note = Tnp_domain
  SITE 146: note = Tnp_P1
  SITE 176: note = Tnp_P2
  SITE 184: note = Tnp_P3
  SITE 185: note = Tnp_P4
  SITE 197: note = Tnp_P5
MPAQYVKPYVKTNKSDYIDAEAIAEAVTRPRMRFVPIKSDDQLDLQSLHRVRERWVTRRTAVVNQIRGLLLERGITIRKGRCHVDAALPGILEDASARLSGALRVLLAQLRLELDHLQTRIDEADAVIQQTAGENEACRRLVAIPGVGPVTATAIIAAIGNGAAFRKGREFSAWLGMVPGEYTTGGKQKLLGISKRGNTYLRRLFVQGARAVLQQSAKQSSGLSAWLAQLTARTHPNVAAVALANKLARMAWAVLAKNEPYRPPVLADAATD

SEQ ID NO: 10657 - protein, 400 aa, unidentified
  source 1..400: note = protein_4947fa8
  REGION 10..164: note = RuvC_domain
  SITE 13: note = RuvC_P1
  SITE 62: note = RuvC_P2
  SITE 102: note = RuvC_P3
  SITE 104: note = RuvC_P4
  SITE 107: note = RuvC_P5
  REGION 270..356: note = Tnp_domain
  SITE 278: note = Tnp_P1
  SITE 308: note = Tnp_P2
  SITE 316: note = Tnp_P3
  SITE 317: note = Tnp_P4
  SITE 329: note = Tnp_P5
MGERRARVWAGIDAGKGHHWAAVVDETGVTLWSKKIGNDESAILTAMGEILDLADEVHWAVDISGTSSALLLALLAAHGQQAVYVPGRTVNRMSGAYRGEAKTDARDAYVIAETARNRRDFASIDVPAQLAADLALLTAHRSDLVADRVRMINRLRDTLTGVFPALERAFDYSSQKGALVLLTGYQTPAALRRRGRARLTAWPANRGVRGADAVAATALEAAQAQQTALPGEDVAAQIVADLAAQILALDDRLKRIDQQIRETFRSHPQAEIIESLPGMGPILGAEFVVAAGDLTAYADAGHLASAAGLVPVPRDSGRRTGNLHRPKRYSRRPRRVFYMSAQTSMMREGPNRDFYLKKRGEGCKHVQAVIALARRRASVLWALLRDNRVFTPELPVAQAA

SEQ ID NO: 10658 - protein, 401 aa, unidentified
  source 1..401: note = protein_2f2e30c
  REGION 8..164: note = RuvC_domain
  SITE 11: note = RuvC_P1
  SITE 60: note = RuvC_P2
  SITE 101: note = RuvC_P3
  SITE 103: note = RuvC_P4
  SITE 106: note = RuvC_P5
  REGION 270..356: note = Tnp_domain
  SITE 278: note = Tnp_P1
  SITE 308: note = Tnp_P2
  SITE 316: note = Tnp_P3
  SITE 317: note = Tnp_P4
  SITE 329: note = Tnp_P5
MATGQLWAGVDVGKEHHWVCVVDDVGTVVLSRRLANDEQPIRALVGEIDSLGDQVAWTVDLTTVYAALLLTVLADAGKSVRYLAGRAVWQASAVYRGGEAKTDAKDARVIADQSRMRGNDLPLLHPDDDLITELRLLTAHRADLVADRTRTINRLRQQLVAVCPALERAAQLSSDRGWVVLLARYQRPKAIRQSGVSRLTRILADAGVRNAAAIAAAAVAAAKTQTVRLPGEEVAAGLIADLAQGVIALDDRIKTTDADIEGRFRRHPLAEVITSLPGIGFRLGAEFLAAVGDPALIGSADQLAAWAGLAPVSRDSGKRTGRLHTPKRYSRRLRRVMYMSALTAIRCDPASRAYYQRKRDQGKRPIPATCLARRRTNVLYALIRDNRTWQPDSPPITQSAA

SEQ ID NO: 10659 - protein, 390 aa, unidentified
  source 1..390: note = protein_9ea9e63
  REGION 4..157: note = RuvC_domain
  SITE 7: note = RuvC_P1
  SITE 56: note = RuvC_P2
  SITE 96: note = RuvC_P3
  SITE 98: note = RuvC_P4
  SITE 101: note = RuvC_P5
  REGION 262..349: note = Tnp_domain
  SITE 270: note = Tnp_P1
  SITE 300: note = Tnp_P2
  SITE 308: note = Tnp_P3
  SITE 309: note = Tnp_P4
  SITE 322: note = Tnp_P5
MRFAGIDIASETHVVAIVDAQGAVELKATSFAEDAAGYQKVLALLGNPKEVLIAMEATGHYWKNLFAVLAATGHSIALVNPLRTHRFAGVDLERTKTDAIDALGIARFAANKRPPATPLPDALAEELRELVHLRERLLQDFGDRVRQLHRLVDLGFPEFTRYVRTLDSELATAILRDYPTAAAYRGVSVRRLAGLRYDARHQVGLDLARTLIDAARRSVGQHHSATYRLQIRYACDDLDVLRHRLRDINRDIDAKLRQHEVGRLLTTIDGIGPQTAACLIAELGDPAHFRNAPALAAYVGTIPGLKQSGKRHTLHAGLTPVGNARLRAALWMPTLTAVRFNPWLRAHYQRLRARGKLPKVALVACMHKLLFAIYAVAKHRRPFIAQSPTT

SEQ ID NO: 10660 - protein, 342 aa, unidentified
  source 1..342: note = protein_840ccdf
  REGION 7..148: note = RuvC_domain
  SITE 10: note = RuvC_P1
  SITE 53: note = RuvC_P2
  SITE 88: note = RuvC_P3
  SITE 90: note = RuvC_P4
  SITE 93: note = RuvC_P5
  REGION 211..296: note = Tnp_domain
  SITE 219: note = Tnp_P1
  SITE 249: note = Tnp_P2
  SITE 257: note = Tnp_P3
  SITE 258: note = Tnp_P4
  SITE 270: note = Tnp_P5
MEQVTIIGIDLAKRVFQVHGAASDGKVVFRKKLSRAQLLPFLAGQPRCTVAMEACATAHEWGRAISALGHAIRLLPPVYVKPFVKRQKNDVADAEAIAEAACRPTMRFVAVKTEEQQARSMIFRTRDLLVRQRTQLINALRGHLAEHGVVAPQGPAHVKRLADAIEDEESLIQPIVRDVGRLYLQQIAIYSEKIAELEKTLHREAARSETTARLQTMPGIGPITAIAIETYAPPLETFRRGRDFAAWLGLVPLQKSTGGKQKLGRTSKMGQRDIRRLLIVGAMAVVRWAARKGQPEGSWLARMLARKPPMLVAIALANKMARSAWAMLTKRENYRDPAAASA

SEQ ID NO: 10661 - protein, 402 aa, unidentified
  source 1..402: note = protein_7e5e63d
  REGION 4..160: note = RuvC_domain
  SITE 7: note = RuvC_P1
  SITE 57: note = RuvC_P2
  SITE 97: note = RuvC_P3
  SITE 99: note = RuvC_P4
  SITE 102: note = RuvC_P5
  REGION 274..361: note = Tnp_domain
  SITE 282: note = Tnp_P1
  SITE 312: note = Tnp_P2
  SITE 320: note = Tnp_P3
  SITE 321: note = Tnp_P4
  SITE 334: note = Tnp_P5
MNCVGIDVSKGKSMIAVMRPFGEVVISPFEVQHTDSALRELAKRLKSLDGETRVVMESTGNYHAPVVWLLHDAGFYVSVVNAILVHDYGNNSIRRAKTDKKDAVKLANYGLDHWLTLPRYVPEEDTRLLLKNCYRQYQQYSKIQTMLKNNLISLLDSAFPDANRLFTSPPRADGSEKWVDFVDAFWHCECVCRLSEKAFTTKYQKWCKNCGYNFSVDKALDIYTSACGHFGVMPKTDTAKLLVEQAVSQLRTTSSALAALKQEMQSLAISLPEYPVVMEMFGVGPALGPQLIAEIGDVRRFHSKKALVAFAGIDAPPYQSGQMDIRSRSISKRGSSSLRRTLFLVMSVILKRAPADEPVYQFMDRKRTEGKPYKVYMMASANKFLRIYYATVTAFLDPLKQN

SEQ ID NO: 10662 - protein, 401 aa, unidentified
  source 1..401: note = protein_ab4a71a
  REGION 11..166: note = RuvC_domain
  SITE 14: note = RuvC_P1
  SITE 63: note = RuvC_P2
  SITE 103: note = RuvC_P3
  SITE 105: note = RuvC_P4
  SITE 108: note = RuvC_P5
  REGION 273..358: note = Tnp_domain
  SITE 281: note = Tnp_P1
  SITE 311: note = Tnp_P2
  SITE 319: note = Tnp_P3
  SITE 320: note = Tnp_P4
  SITE 332: note = Tnp_P5
MIDTRDVAVFLGLDVGKGEHHATGLTPDGKQVIDKPLPNSEPKMRAMLDKLAKKYGTVLVVVDQPASIGALPLAVARDAGCEVAYLPGLTMRRIADLYPGEGKTDARDAAIIADAARTMPHTLRSIELTDETVAELHMIVGFDDDLAGEVTRVANRLRGLLTQIHPHLERVLGPRIQHPAVLALLERFGSPKAIRKAGRRRLVTLLRPKAPRMAERLVEDIFTALDEQTVVVPGTEAAAVIVPKLAANLTSLLDQRKELASTIEALLESHPLSELLTSMPGIGVRTGARILIDVGDGTAFPTAGHLAAYAGLAPVTRRSGSSIRGESPSRRGNKHLKRAFFLAAFASLSDPASRAYYERKKAEGKRHKQALMCLARRRVDVLFAMLRDGTFFESHTVPQAA

SEQ ID NO: 10663 - protein, 338 aa, unidentified
  source 1..338: note = protein_1eab27e
  REGION 6..146: note = RuvC_domain
  SITE 9: note = RuvC_P1
  SITE 52: note = RuvC_P2
  SITE 87: note = RuvC_P3
  SITE 89: note = RuvC_P4
  SITE 92: note = RuvC_P5
  REGION 209..294: note = Tnp_domain
  SITE 217: note = Tnp_P1
  SITE 246: note = Tnp_P2
  SITE 254: note = Tnp_P3
  SITE 255: note = Tnp_P4
  SITE 267: note = Tnp_P5
MEFKRISIDTSKHIFTIHGVDGQDRVILRRDLRRGQMEAFFAKVPATEIALEACAGSHHWGRKFGALGHRVKLIPPQYVKPFVKRGKNDRNDAEAISEAAARPDMRTVPVKTVDEQAATIIVKHREMLVGQRTQAINALRGHAGEFGIVAAKGCGNVAALVCVLTNEAAIPEGARTMFAQMGRHIAELDLKIEAIDRQLLEQHKANPVSQRLAAIPGVGPITAITMAISINPANFESGRHFAAWLGLTPREHSTGGKHRIGRISKAGNERLRQLLVVGAMSVVRYAKPGSKSASTWLLQLLERRPRKIAAIALANKIARIIWAMMARGEAYRRQPASA

SEQ ID NO: 10664 - protein, 371 aa, unidentified
  source 1..371: note = protein_54c814d
  REGION 36..178: note = RuvC_domain
  SITE 39: note = RuvC_P1
  SITE 82: note = RuvC_P2
  SITE 117: note = RuvC_P3
  SITE 119: note = RuvC_P4
  SITE 122: note = RuvC_P5
  REGION 240..325: note = Tnp_domain
  SITE 248: note = Tnp_P1
  SITE 278: note = Tnp_P2
  SITE 286: note = Tnp_P3
  SITE 287: note = Tnp_P4
  SITE 299: note = Tnp_P5
MGWMPAFSDGIAMCQDCGVSATQRRGRHPWKKVTIIGVDLAKNVFQLHGAAADGSVVFRKKLSRLQFCKFMAGHPTCIVAMEACGISHYWAREMARLGHQPKLIAPGCVKPFIKRHKNDAADAEAIVEAAQRPTMRFVETKSEEQQSRAIVFRTREQLVNQRTELVNALRAHLYEFGHIAPQGIGHLRRLAEVVEDENTELPDLVREICGDLLDQIDQLTGRLDALKKTIDALSRKGETSQRLQTMPGVGPIAALAIETFAPPMETFKCGRDFAAWLGLVPLQKSTGGKQRLGKTSKIGQRDIRRLLIVGAMAVVQWASRKGAPEGSWLARMTAKKPRMLVAIALANKMARGIWAMLKKQEDYRNPAMVRA

SEQ ID NO: 10665 - protein, 325 aa, unidentified
  source 1..325: note = protein_00f1c69
  REGION 8..154: note = RuvC_domain
  SITE 11: note = RuvC_P1
  SITE 55: note = RuvC_P2
  SITE 95: note = RuvC_P3
  SITE 97: note = RuvC_P4
  SITE 100: note = RuvC_P5
  REGION 193..277: note = Tnp_domain
  SITE 201: note = Tnp_P1
  SITE 230: note = Tnp_P2
  SITE 238: note = Tnp_P3
  SITE 239: note = Tnp_P4
  SITE 251: note = Tnp_P5
MQTSQSFFGVDVGKSEVVVAMHGAAKPLTRAVKNSTTGLEKWLQTLPRGSVLAMESTGGYERLLADLAYERGLRVYVLNPKALHHYAKSQAQRGKTDRLDAVMIARYVALEHERLHRYEPCPEHIERLSQIQRLRKVAVTTRTRLRLSSDRHKHVGSQAQVQRALDALTQLADALEREMLDQIAAEPALADDFNLITSITGVGKLTGAALVTAFARIPFASSDAVVAYAGLDPRPKESGAYKGLRKLSKQGDAALRSLAYNAASSASRTAAFKPLYTALRVKGWASTQALNIIARKLLRIAFGVWKSRKPFDVNLFMASQACAKP

SEQ ID NO: 10666 - protein, 352 aa, unidentified
  source 1..352: note = protein_36f5bad
  REGION 19..161: note = RuvC_domain
  SITE 22: note = RuvC_P1
  SITE 65: note = RuvC_P2
  SITE 100: note = RuvC_P3
  SITE 102: note = RuvC_P4
  SITE 105: note = RuvC_P5
  REGION 223..310: note = Tnp_domain
  SITE 231: note = Tnp_P1
  SITE 261: note = Tnp_P2
  SITE 269: note = Tnp_P3
  SITE 270: note = Tnp_P4
  SITE 282: note = Tnp_P5
MVVYEPRSGEDGEMKDMMIGVDLAKRVFQVHGALSNGEVQFRKKLTRQQFRDFMEKQAPSLVIFEACGSASYWAREIESLGHEVKLIAPQYVRPFVKRQKNDAADAEAIVIAARQPEMRFVMPKTVEQQARAALFRGRDRIVRQRTEDVNALRAVLYEHGHVFPAGLVHLKRIEALVEDDTCDLPTMIREECRDLLAQIAEKTGRIAARDKQLKDLATQTDTARRLQTMPGVGPLTALAVEAFSPDMAQFKRGRDFAAWLGLVPRQHSSGGKERLGRISKAGQTDIRRLLITGAMTRLLGRARRKILAESWIERMLARKPKMLVVIALANKMARQIWAILTKNEVYKDPALA

SEQ ID NO: 10667 - protein, 422 aa, unidentified
  source 1..422: note = protein_e720854
  REGION 4..157: note = RuvC_domain
  SITE 7: note = RuvC_P1
  SITE 57: note = RuvC_P2
  SITE 94: note = RuvC_P3
  SITE 96: note = RuvC_P4
  SITE 99: note = RuvC_P5
  REGION 285..371: note = Tnp_domain
  SITE 292: note = Tnp_P1
  SITE 323: note = Tnp_P2
  SITE 331: note = Tnp_P3
  SITE 332: note = Tnp_P4
  SITE 344: note = Tnp_P5
MLGVGIDWAEEFHDVALGTVETGVVEQFRIEHGPAGVARLVSRCLALEPDPAEVRVVLETRHGLLVEALLDAGFTVVPVNPDLVARRRGPARKKDDAEDARICCLLALDRHASLKRLIPHGEAGGELRAIGRDDERAARDQRRLLNRLRADLQTTYPAALAVAGADLGAVTVLRLLERWPTQDELAAASRAELTDFARAGRHGWPDRFADKVTTALAAPSLPTRDYLVRAKAAGIRLAAVQLLALHEARRGWERRMGEILLGGPRTGRDHTAKDPDPGNAFPGGAIYLSFPGLGDRLAARVAGEIGEHHDQFDTPNGLQCYAGRAPVTRRSGKSDFVVARRLAHNRYLGDAVHQWAFCSLTRSGWAREFYDSKIAAGKSHHNALRALGNRWLEILWHCLTKNTLYDEATHVANRNRARGHAA

SEQ ID NO: 10668 - protein, 308 aa, unidentified
  source 1..308: note = protein_eed1f28
  REGION 1..136: note = RuvC_domain
  SITE 43: note = RuvC_P2
  SITE 81: note = RuvC_P3
  SITE 83: note = RuvC_P4
  SITE 86: note = RuvC_P5
  REGION 181..267: note = Tnp_domain
  SITE 189: note = Tnp_P1
  SITE 218: note = Tnp_P2
  SITE 226: note = Tnp_P3
  SITE 227: note = Tnp_P4
  SITE 240: note = Tnp_P5
MLTAEADKCKTKVVVNTAAGVQALLAWCAKHGAQPAQLHAILEPTGLYHEQAATALPQVRVSLVNPAQARDFAKALALRSKNDALDSYVLARYGQTLSPALWHPAPLHARQLRALLTRREALSKDLLRELNRKEKSQFSPSAPLVDGSIDKAIAFLREQIKQIERAIDQHIDNHPDLKQDCELLNSIPAIGPQAGNAILAVMHNRHIDSAQSLAAYLGVVPVQRQSGSSLNSCAHLSKAGPSQVRATLYMAALVGTRHNPTSAPFTSACSKQEKAKGRAGRGHEKTGASVLRVLKNRIPYQPNYAMNG

SEQ ID NO: 10669 - protein, 310 aa, unidentified
  source 1..310: note = protein_65dc4d3
  REGION 6..151: note = RuvC_domain
  SITE 9: note = RuvC_P1
  SITE 53: note = RuvC_P2
  SITE 93: note = RuvC_P3
  SITE 95: note = RuvC_P4
  SITE 98: note = RuvC_P5
  REGION 187..271: note = Tnp_domain
  SITE 195: note = Tnp_P1
  SITE 224: note = Tnp_P2
  SITE 232: note = Tnp_P3
  SITE 233: note = Tnp_P4
  SITE 244: note = Tnp_P5
MTTAWVGIDVAKDSLAVWIRPQGVLVSVSNDATGYQQLLELFAQDKPGRIVLEATGGYERGVLFALLRAGHVVSRLNPTRVRAFATAMGKLAKTDPIDAAVLAHLAQVLEESPSQAPSPARERLLALVQRREQLVCQRDDERRRLPQASQAFVRDCLENAIKTLQSTIRRYDQEITKALNDLDPEQVEQLRQVKGVGPVTVAGLLAYLPELGQLNRRQVAALVGLAPYNCDSGQKSGQRRIRGGRSAIRRILYMATWSVIRYQQEFADRYQKLRDKGRCPKVALVACMRVLIVRINAMVRDGTGWRTGAV

SEQ ID NO: 10670 - protein, 347 aa, unidentified
  source 1..347: note = protein_419066f
  REGION 6..148: note = RuvC_domain
  SITE 9: note = RuvC_P1
  SITE 52: note = RuvC_P2
  SITE 87: note = RuvC_P3
  SITE 89: note = RuvC_P4
  SITE 92: note = RuvC_P5
  REGION 211..302: note = Tnp_domain
  SITE 219: note = Tnp_P1
  SITE 249: note = Tnp_P2
  SITE 257: note = Tnp_P3
  SITE 258: note = Tnp_P4
  SITE 270: note = Tnp_P5
MKITAVGIDLAKTVFQIHGVDERGKVMVRKQLKRAEVAKFFANLPPCLIGMEACASAHYWARKLTDFGHTVKLMAPQFVKPYVKTNKSDARDAEAICEAVQRPNMRFVPVKTPEQQAVLALHRARQGFVKARTAQANQLRGLLAEFGIVIPKGIRHLPQRVPEILEDGENGLPGHARQLFAGLLEHFRELDRRVAELEKDIVLWHRNNEHSRKLEKIAGIGPITASALVASIGDARTLQSARQAAAWVGLVPRQHSSGGKDRLLGISKRGDVYLRTLLIHGARSVVRRVEAQADHSNGWLKALLNRRNKNVAAVALANKNVRIAWALLAKDRDYQANYAPTAKAAQA

SEQ ID NO: 10671 - protein, 344 aa, unidentified
  source 1..344: note = protein_ea861a5
  REGION 7..149: note = RuvC_domain
  SITE 10: note = RuvC_P1
  SITE 53: note = RuvC_P2
  SITE 88: note = RuvC_P3
  SITE 90: note = RuvC_P4
  SITE 93: note = RuvC_P5
  REGION 212..302: note = Tnp_domain
  SITE 220: note = Tnp_P1
  SITE 250: note = Tnp_P2
  SITE 258: note = Tnp_P3
  SITE 259: note = Tnp_P4
  SITE 271: note = Tnp_P5
MSEIVTIGLDIAKSVFQVHGVDAAGQVVVTRQLKRGQMLKFFAALPPVLIGIEACGTAHHWGRQLQNLGHDVKLIPPIYVKPYVKRQKNDAADAEAICEAVTRPTMRFVEIKSVDQQAGGVLHKTRALLIKQRTMMFNAVRSHLAEFGLVTGTGVAQVVRMVDRLAKGDELDLPELARETLGVLARHIQELQDKLTGIDKQLTRWHYRNDVSNILETIPGVGVITASALASMVTNAQSFRSARHFAAWLGLVPRQNSSGGKTRLGKITKGGNRYLRQLLVVGATSVLRHVRAGSVKGFEWAKALLDRRPPKVVAVALANKMARIAWVVMTRGVEYERKELAIAA

SEQ ID NO: 10672 - protein, 403 aa, unidentified
  source 1..403: note = protein_e15840e
  REGION 6..162: note = RuvC_domain
  SITE 9: note = RuvC_P1
  SITE 60: note = RuvC_P2
  SITE 100: note = RuvC_P3
  SITE 102: note = RuvC_P4
  SITE 105: note = RuvC_P5
  REGION 270..357: note = Tnp_domain
  SITE 278: note = Tnp_P1
  SITE 309: note = Tnp_P2
  SITE 317: note = Tnp_P3
  SITE 318: note = Tnp_P4
  SITE 330: note = Tnp_P5
MPELWAGTDAGKAEHHCTVIDTDGVTMLSRRVPNSESELLELLGDVLELADGAPVTWAVDLNSGGAALWIALLVGHGQKLLYIPGRTVHHASAAYRGSGKTDAKDAFIIADTARMRHDLLPLQETSEIAIDLRILTARRADLSADRTRAINRLRGQMLEYFPALERAFDYSTSKSALVLLTGYQTPAALRRVGRARLATWLNNRGVRTDHARNAADTAVAAAETQHAAVRGERTAAKMVHALARDVMTLDREIEELEALIVGCFRKHPDAAVITSMPGIGYLLGAEFISTTGGDMSAFGSPDRLAGVAGLAPVPRDSGKVSGNLRRPRRYNRRLLRLFYLSAQVAAVCCPESKRFYQRKRAEGKSHKQAVLALARRRLNVLWALMRDHRYFETAAARAGATAT

SEQ ID NO: 10673 - protein, 341 aa, unidentified
  source 1..341: note = protein_1a239a6
  REGION 5..152: note = RuvC_domain
  SITE 8: note = RuvC_P1
  SITE 55: note = RuvC_P2
  SITE 92: note = RuvC_P3
  SITE 94: note = RuvC_P4
  SITE 97: note = RuvC_P5
  REGION 212..311: note = Tnp_domain
  SITE 220: note = Tnp_P1
  SITE 250: note = Tnp_P2
  SITE 258: note = Tnp_P3
  SITE 259: note = Tnp_P4
  SITE 271: note = Tnp_P5
MDYYAGIDVSLECSSVCVVDASGKIVREVKVASEPVALIGWFRSLGFELARIGLEAGPLSQWLYTAMKHEGLAVELLETRHVSDAFKAMPVKSDRNDARNIAQLMRLGWFRPVHCKSMSAQETRAMLTARKLIQAKLQDIENSLRGILRGFGLKVGKTTKRSFAARIRELVAGHPALETIATATLAVHAVLLREFNGFEKRVRAMSLLDAKAKLLMSTPAVGPIISLTFASAIDDPSRFNSAKRAGPLFGLTPKKYQSGETDYCGRISKNGDASVREALYEAAHIILTKPIKGCAPLKSWAMRIAKRAGMNKAKVALARKLAVIMLRMLKDNAPFRTTAMA

SEQ ID NO: 10674 - protein, 402 aa, unidentified
  source 1..402: note = protein_e90f9fe
  REGION 4..160: note = RuvC_domain
  SITE 7: note = RuvC_P1
  SITE 57: note = RuvC_P2
  SITE 97: note = RuvC_P3
  SITE 99: note = RuvC_P4
  SITE 102: note = RuvC_P5
  REGION 274..361: note = Tnp_domain
  SITE 282: note = Tnp_P1
  SITE 312: note = Tnp_P2
  SITE 320: note = Tnp_P3
  SITE 321: note = Tnp_P4
  SITE 334: note = Tnp_P5
MNCAGIDVSKGKSTVCVMRPSGEVLVPPYEVRHTETELNELKQMLRSLEGETRVVMEATGNYHLPIAQYLHDAGFFVSAVNAILVHGYDNNSLRRAKTDKKDSIKLARYGLATWTELPRYIPAEDVRMLLKTAHRQYQHCAKLRTMLKNNLISLLDTVFPDANRLFSSPPRADGSEKWVDFVSTFWHCECVCGLSEEAFTAKYQKWCKKHRYHFSDMKAIDIYTCSCGHWGVLPKCNTTKLLVQQAISQLSAASSAMAALQAEMLSLAASLPEYPVVMQMFGVGPVLGPQLMAEIGDVRRFYSKKALVAFAGIDAPPYQSGQMDLRSRSISKRGSASLRRTLFLVMSVILQNAPADEPVFQFMDKKRSEGKPYRVYMMASANKFLRIYYASVKAHLDSLENL

SEQ ID NO: 10675 - protein, 430 aa, unidentified
  source 1..430: note = protein_c4dd1ce
  REGION 11..169: note = RuvC_domain
  SITE 14: note = RuvC_P1
  SITE 66: note = RuvC_P2
  SITE 106: note = RuvC_P3
  SITE 108: note = RuvC_P4
  SITE 111: note = RuvC_P5
  REGION 276..363: note = Tnp_domain
  SITE 284: note = Tnp_P1
  SITE 314: note = Tnp_P2
  SITE 322: note = Tnp_P3
  SITE 323: note = Tnp_P4
  SITE 336: note = Tnp_P5
MEKEVKKVMFVGIDVGKRKHEACFVESNGRVVRYMPFNNRIQGFKRFFSLIEQMRKDEVSITIALEATGHYFLNLYSFLRGHGIDVTVVNPIQTDSFRNVFIRKTKSDRRDSFVIAELARLGRARKSNIDNEGSKISNLKMLTRFRADYAHKASNMKKKLSSDVLRVFPEFFDVFKGFNTRTSLMILRNYPTPRKLLKEDRTILYTLVKNWSKGRIGEKVVDELISLAEDSVGSPIDIDAIEVEIPFIVDEIFFLEDKVKEVESYIEEQSLEIEEVELLKTIPGISTVSAASIVGEIANIDRFDSVKKLRAYAGFDPSLKESGDSVTGRSTISKRGSPYLRRALYYAANVSRRFSPTFKEYYKRKLIQHPNRERYAIVSVANKLITVIYYMLKSKKPFDPLYELNLKRNPFEKTPVTQNLEERSADDIFH

SEQ ID NO: 10676 - protein, 339 aa, unidentified
  source 1..339: note = protein_7823c38
  REGION 6..147: note = RuvC_domain
  SITE 9: note = RuvC_P1
  SITE 52: note = RuvC_P2
  SITE 87: note = RuvC_P3
  SITE 89: note = RuvC_P4
  SITE 92: note = RuvC_P5
  REGION 210..299: note = Tnp_domain
  SITE 218: note = Tnp_P1
  SITE 248: note = Tnp_P2
  SITE 256: note = Tnp_P3
  SITE 257: note = Tnp_P4
  SITE 269: note = Tnp_P5
MNYTTVGVDIAKSVMQLHWVDPDTGEIVNKAIKRAAFLEHFANRAPCLVGMEACGGAQHWARRLIEMGHQVKLMPAKFAKAFNIRNKNDAADARAIWMATQMPSKAVAVKTEAQQAVLALHRIRQQKLKFRTMQMNSLRGLLTEYGEVMGKSRAALDKAIPGVLEKLAGRLPGMLIESLREQWNDLENLDRQIADIERRLQTWLKDDRACKAIAAIPGVGLLTATAAVATMGDPKSFATGREFAAWLGLVPKQVGTGGKVVLLGISKRGDTYLRTLLIHGARSVLSHAKDPGPWVAQLVKRRPSNVAIVAIANKMARTIWAVLAHGNPYEKGYVSVRPA

SEQ ID NO: 10677 - protein, 312 aa, unidentified
  source 1..312: note = protein_238e6b3
  REGION 8..151: note = RuvC_domain
  SITE 11: note = RuvC_P1
  SITE 55: note = RuvC_P2
  SITE 95: note = RuvC_P3
  SITE 97: note = RuvC_P4
  SITE 100: note = RuvC_P5
  REGION 192..277: note = Tnp_domain
  SITE 200: note = Tnp_P1
  SITE 229: note = Tnp_P2
  SITE 237: note = Tnp_P3
  SITE 238: note = Tnp_P4
  SITE 249: note = Tnp_P5
MIQELLFVGIDVSKARFDIVVHPSGKCWSIGSSPAQIAALIERLQALGQVIVGLEASGGYERRLADSLHAAGLKVYILPPARVRNFARAMGQLAKTDRIDAAVIARYLATVHNSLTPYEPDAARSSLSALAAHRRRLVAEKSGLTSQLDTIEEPLVREMLEVRLRTIATDIATLDRAMRDLLKATPALRKRHDRMCEVTGVGPMLATALLADLPELGTVSSKVIAALVGVAPHARQSGSSNRQGKCSGGRKHLRDIAYMAALSAIKIKDPVLGAFYQRLRSKGKPFKLAIVATIRKLVTILNAIARTDPAFN

SEQ ID NO: 10678 - protein, 414 aa, unidentified
  source 1..414: note = protein_21cf5d1
  REGION 19..171: note = RuvC_domain
  SITE 22: note = RuvC_P1
  SITE 70: note = RuvC_P2
  SITE 108: note = RuvC_P3
  SITE 110: note = RuvC_P4
  SITE 113: note = RuvC_P5
  REGION 278..364: note = Tnp_domain
  SITE 286: note = Tnp_P1
  SITE 317: note = Tnp_P2
  SITE 325: note = Tnp_P3
  SITE 326: note = Tnp_P4
  SITE 337: note = Tnp_P5
MQHASNHTLPAAGPGHRTAGVDWARDDHAAAIVDASGQVVERFSVAHTATGIRDLVRRLSKMTAHEVAIERPDGPVVEALLEAGLTVVVISPNQLKNLRSRYGSAGNKDDRFDAFVLADTLRTDRARLRPLVPDSPATVALRAACRARKDLVAHRVALANQLRAHLQRAFPGAVGLFADIDSPISLRFLARFDCQERADWLSSRRLAAWLASVGYCGRVTPATLHARLTSAPRGATSTEGAAQAHVTRAFLAALSTVVQQIKLLSEQIDEQLALHTDAHIFTSLPRAGRVRAARLLAEIGDCRARFPTPDSLACLAGVAPSTRQSGRFRAVGFRWAADKQLRDAICDFAGDSIRANPWAADLYRRAIARGHDHPHAVRILARARLFVIWHCWQAGTPYDPAQHRALQALLKPAA

SEQ ID NO: 10679 - protein, 343 aa, unidentified
  source 1..343: note = protein_b20dbe5
  REGION 7..149: note = RuvC_domain
  SITE 10: note = RuvC_P1
  SITE 53: note = RuvC_P2
  SITE 88: note = RuvC_P3
  SITE 90: note = RuvC_P4
  SITE 93: note = RuvC_P5
  REGION 212..303: note = Tnp_domain
  SITE 220: note = Tnp_P1
  SITE 250: note = Tnp_P2
  SITE 258: note = Tnp_P3
  SITE 259: note = Tnp_P4
  SITE 271: note = Tnp_P5
MQAITTVGLDIAKSVFQVHGVDAEGGVVIRRQLKRRYVLAFFQKLPPCLVGIEACASSHHWSRELKALGHNVRLMPPAYVKPYVKRQKNDAADAEAICEAVTRANMRFVATKTPEQQSCLMLHRTRHLFIRQQTAVINVIRAHLAEFGIVAPVGRKGVEELLDVVADPSDKRLPEVARGCLAALGTQLRSLKAQILGFDRMIMAWHRSNETSMRLDEAPGIGPVLATALVATVADPKVFRSGRNFSAWIGLVPKQHSSGGKDRLGSISKQGDRYLRSLFMAGALAVIRYAKIHGTKHRPWLTALLARRPTKVAAIALANKIARMVWAMMARGEHYKEPVALAA

SEQ ID NO: 10680 - protein, 406 aa, unidentified
  source 1..406: note = protein_c096b19
  REGION 14..168: note = RuvC_domain
  SITE 17: note = RuvC_P1
  SITE 66: note = RuvC_P2
  SITE 105: note = RuvC_P3
  SITE 107: note = RuvC_P4
  SITE 110: note = RuvC_P5
  REGION 275..361: note = Tnp_domain
  SITE 283: note = Tnp_P1
  SITE 314: note = Tnp_P2
  SITE 322: note = Tnp_P3
  SITE 323: note = Tnp_P4
  SITE 334: note = Tnp_P5
MIQDSPDGGKRFWCGIDWGGRSHHLCVLDDDGQQLLSRKIAHTVDGLMALVEVIASLAGSVLIAIERAEGLLVEHLQQQCEAEIYCVSPKISARARERYRMAAAKSDEFDAYVLADTLRHQHAQWRPLATPSPVLAELTAISRDRQRILDMQVDTENRLRSILEAYHPAPLHLFSSLDRDITLAFIQTYPTPAQAGRITATRMGGFTGRHGYSGRQKPEALIERMQPHLLSASEGTVAGKAVAAKAFTEQLALLNTHLRGHDKRLRELLDAHPDTHIFTSFPGIGPVTAAVLISEMGEERTRFPSPSSLLADTGLAPVTKASGRTRQVRFRYAANRRMRHAIDWWMFVATREDPWSAEIYQQARAAGHAHHRALRGLGARWVRILWRCWQDHTAYDPAVHHRPTAA

SEQ ID NO: 10681 - protein, 421 aa, unidentified
  source 1..421: note = protein_a09b6f9
  REGION 38..196: note = RuvC_domain
  SITE 41: note = RuvC_P1
  SITE 95: note = RuvC_P2
  SITE 135: note = RuvC_P3
  SITE 137: note = RuvC_P4
  SITE 140: note = RuvC_P5
  REGION 296..385: note = Tnp_domain
  SITE 304: note = Tnp_P1
  SITE 334: note = Tnp_P2
  SITE 342: note = Tnp_P3
  SITE 343: note = Tnp_P4
  SITE 356: note = Tnp_P5
MFELVEASDLESQAKLWDWNHRGSAGYYSGGDDMGPIIGLDVSKGTSMLQAFTDRNKPYGKIISIAHTQEGFERLGILLEELKQITELEPVVVLEATGHYHRSLVAYLEREGYRHFIVNPLQSKRAKGTQLRKVKTDAVDAWHLAEMFYRGDIRPHRMWAEEMTELQHLTRQHEFMTSLLVQAKQNARALLDQVNPAYESVFHNLFSTTSLQVLRHMLSGGTVTVETIRETAGSSHGKAWIQAKAERIQALPPLSHSSKAQQTALLCMVEMVLTGQEQLRQLETAIEETALALPEVELLKTIPGVGDKLAAALAAEIGDAAQFKDPKQLVAYAGLDPGVHSSGKFTASSSRISKRGSKRLRRALYVAVQCGLRKGVNERLTAYYEKKRKEGKPYKVVVIACANKLLHHVFAILVKGEPYKA

SEQ ID NO: 10682 - protein, 343 aa, unidentified
  source 1..343: note = protein_e82c7f4
  REGION 6..150: note = RuvC_domain
  SITE 9: note = RuvC_P1
  SITE 54: note = RuvC_P2
  SITE 89: note = RuvC_P3
  SITE 91: note = RuvC_P4
  SITE 94: note = RuvC_P5
  REGION 213..300: note = Tnp_domain
  SITE 221: note = Tnp_P1
  SITE 251: note = Tnp_P2
  SITE 259: note = Tnp_P3
  SITE 260: note = Tnp_P4
  SITE 272: note = Tnp_P5
MKLIRVGVDLAKNVFQLHGVDRHGQVVWRRRLTRRKWLAALMAQAGPGCEVGMEACAGAHHWARELQSRGFTVRLIPPQFVKPYVKSNKNDANDAEAICEAMSRPNMRFVAVKSIAQQDLQATHRIRAELMRQRTAKANQIRGLVAEYGLVAPQTMRALRMAIPTWLEDAENGLTDYFRSLLNGLWSDLVLLDDRLLELDREIERLANSNEVTRRLQRLRGVGPMVATALVATVGNAEQYPNGRHMAAALGLTPRQCSSGGKDRLLGISKRGDAYLRMLLIHGARSVVWQAKHKEDRLSQWVTRIAQRRHPNVAAVALANKTARMAWALLRHGTDYDPDFALS

SEQ ID NO: 10683 - protein, 363 aa, unidentified
  source 1..363: note = protein_525c5a4
  REGION 29..171: note = RuvC_domain
  SITE 32: note = RuvC_P1
  SITE 75: note = RuvC_P2
  SITE 110: note = RuvC_P3
  SITE 112: note = RuvC_P4
  SITE 115: note = RuvC_P5
  REGION 231..315: note = Tnp_domain
  SITE 239: note = Tnp_P1
  SITE 269: note = Tnp_P2
  SITE 277: note = Tnp_P3
  SITE 278: note = Tnp_P4
  SITE 290: note = Tnp_P5
MVSPILTQRTTLSEDFVLLGAIMDTVSLVGIDLGKHCFHLHAQDGSGRMVLRKKLTRNQMFTLLGNFPSCTVVMEACAGAHWIARRLQTLGHEAKLISPQFVKPFRQGNKNDFADAQAICEAASRPSMRFVSPRNEAQQVVSALHRVREALVRERTGTINQIHAFLLEFGISLPRGMAVIRRLPAVLETQALPPRLVAVLERLQAHFKYLDEQIGQLEHELLTQLHEDERSERLLEIPGIGPITASVLMSELGDAHQYGSARQFAASIGLVPRQYSTGGKPTLLGISKRGDKELRRLLVQCARVIMLGIERRTDSLGTWVRSLLARRHSNVVACALANKLARIAWAILAKGTHYRSAPAALAA

SEQ ID NO: 10684 - protein, 341 aa, unidentified
  source 1..341: note = protein_c379a48
  REGION 7..149: note = RuvC_domain
  SITE 10: note = RuvC_P1
  SITE 53: note = RuvC_P2
  SITE 88: note = RuvC_P3
  SITE 90: note = RuvC_P4
  SITE 93: note = RuvC_P5
  REGION 210..295: note = Tnp_domain
  SITE 218: note = Tnp_P1
  SITE 248: note = Tnp_P2
  SITE 256: note = Tnp_P3
  SITE 257: note = Tnp_P4
  SITE 269: note = Tnp_P5
MSEVSIIGLDIAKHVFHAHGVDVSGHVLLRKKISRAKLLPFFAAQPRCQVVLEACGGAHHWARELLKLGHDVRLIAPAYVKPFVKRQKNDAADAEAICEAAQRPSMRFVPVKTEEQQAAAMVFRGRDLLVRQRTQISNALRGHMTEYGWIAPKGLAHLEKLAALLADPLAVPQGVRSVCMLLLDSLAMLDRQIAALDKEIVRRSREDALARRLMTIPGIGPITATAILALAPPSGTFAKGRDFAAWVGLTPRQHSTGGKQKLGSISKMGERTLRRLLIIGSSAVVLQASKRGAPKGSWLEQMMARKPRMLVTVALANKTARIVWALMMKNEDYTAPVAAAA

SEQ ID NO: 10685 - protein, 324 aa, unidentified
  source 1..324: note = protein_95294b2
  REGION 5..160: note = RuvC_domain
  SITE 8: note = RuvC_P1
  SITE 58: note = RuvC_P2
  SITE 98: note = RuvC_P3
  SITE 100: note = RuvC_P4
  SITE 103: note = RuvC_P5
  REGION 196..282: note = Tnp_domain
  SITE 204: note = Tnp_P1
  SITE 234: note = Tnp_P2
  SITE 242: note = Tnp_P3
  SITE 243: note = Tnp_P4
  SITE 255: note = Tnp_P5
MSNVIGIDIAKNTFDVATPLPNGKYRTRGKIPNNAEGFAQLNQWLKLHSEPDARVVMEATSVYHEALAEHLYHQGYEVIVVNPARVHYFKKSEGINYKTDKVDAKLLAAFAQAKHESPLTPWAPEPVAIRRLRVLLRRLDDLQEMLQMERNRQEVADTVVQESIQSHIRHIEKDIAQTRQMIKQHVDDDPDLRGKRDLLLSIDGIGEKTASVILAELGDLKAFRSARAVVSFAGLNPQLAESGQCNGRTPISKAGSGRIRRALYLPSITAMNMSEPLMAMKERLRAKGKAGKQIVCAVMRKMLHIVFGVLKSGHPYDPKLALAQ

SEQ ID NO: 10686 - protein, 267 aa, unidentified
  source 1..267: note = protein_97a9d5b
  REGION 1..68: note = RuvC_domain
  SITE 9: note = RuvC_P3
  SITE 11: note = RuvC_P4
  SITE 14: note = RuvC_P5
  REGION 131..223: note = Tnp_domain
  SITE 139: note = Tnp_P1
  SITE 169: note = Tnp_P2
  SITE 177: note = Tnp_P3
  SITE 178: note = Tnp_P4
  SITE 190: note = Tnp_P5
MKPYVKRSKSDAADAQAICEAMSRPEMRFVPAKSGEQQGSQMLAKLRAQFIGRRTQLANSIRGFAAEFGLVAPKGLSRLGDLLADIRADATIPDTARDMFETLGRDYAHIGTEVASLDEKLLEFHRRSEVSRRLAAIPAIGPVGATLLAIKVPDANGFKSGRDFAAWLGLTPKNHSTAGKNRLGVITRAGDEMLRSVLVVGATALIQHMRRGSKRVWPWLAALIARKAPKLAAVALANKLARIAWKLMVSGEQYRPIAATHPAPVQP

SEQ ID NO: 10687 - protein, 334 aa, unidentified
  source 1..334: note = protein_b76ec54
  REGION 1..95: note = RuvC_domain
  SITE 32: note = RuvC_P3
  SITE 34: note = RuvC_P4
  SITE 37: note = RuvC_P5
  REGION 210..297: note = Tnp_domain
  SITE 218: note = Tnp_P1
  SITE 248: note = Tnp_P2
  SITE 256: note = Tnp_P3
  SITE 257: note = Tnp_P4
  SITE 270: note = Tnp_P5
MFDFLQERGIFVAVINPFEMKQYRSQGLRAIKTDKQDSIAIANYGIDYWFRLKKYEMSEGIYQELKILGRQYSHYMRMRIESVQSLTHLLDYTMPGIKKLLKGWQDSTGKDKLSDFVEMYWHFDNITKLSEIDFINNYLAWAKEKGYHQNHNKAVKIYSLAQDGIPTLPAEMESTQIMIQQAVGVLRQVNTTLKTILTRMKELAKQLPEYSVVRSMGGVGDVLAPKLIAEIGDIRRFHSSRALIAFAGIDAPPYQSGQFIGTNRKISKRGSSTLRKIGYEVMRVLKTHSAPADSSVYWYILKKESEGKAKKLAKIAGLNKFLRIYYARVKEVYQ

SEQ ID NO: 10688 - protein, 341 aa, unidentified
  source 1..341: note = protein_4164e51
  REGION 7..149: note = RuvC_domain
  SITE 10: note = RuvC_P1
  SITE 53: note = RuvC_P2
  SITE 88: note = RuvC_P3
  SITE 90: note = RuvC_P4
  SITE 93: note = RuvC_P5
  REGION 211..302: note = Tnp_domain
  SITE 219: note = Tnp_P1
  SITE 249: note = Tnp_P2
  SITE 257: note = Tnp_P3
  SITE 258: note = Tnp_P4
  SITE 270: note = Tnp_P5
MSEVSIIGLDLAKNVFQMHGADASGAVLFRKKLRRDQVRKFLAAQPACTVAMETCASSHYWAREIARLGHEVRLIAPDYVKPFVKRQKNDAADAEAICEAVQRPTMRFVAVKSAEQQAAAVVFRARDLLVRQRTQTINAIRGHLAEFGMVAAQGPSHVAKLVSAIEDRDTDIPELARPILRLLVEQLRSLDERVALLDRELARRAREDAEAKRLMTIPGIGPITATALVALAPMAQAFKRGRDFVAWLGLTPLQRSTGGKQKLGETSRMGERTLRRLLIIGASAAVRWAMRKGSTADPWLARMLARKPPMLVIVALANKMARIVWALMARGGTYRAPAAAK

SEQ ID NO: 10689 - protein, 377 aa, unidentified
  source 1..377: note = protein_8dc32a0
  REGION 12..164: note = RuvC_domain
  SITE 15: note = RuvC_P1
  SITE 61: note = RuvC_P2
  SITE 101: note = RuvC_P3
  SITE 103: note = RuvC_P4
  SITE 106: note = RuvC_P5
  REGION 256..341: note = Tnp_domain
  SITE 264: note = Tnp_P1
  SITE 293: note = Tnp_P2
  SITE 301: note = Tnp_P3
  SITE 302: note = Tnp_P4
  SITE 314: note = Tnp_P5
MKAPSTRPAAVLGLDVGKSSHWACLIDRDGEVLASAPVRNREAELDALFASAPAGTLVVVDQFRNIGSLAVRRARAAGLGVAYLPGLAASRAAGLFAGEAKTDERDAAVIARTALGVPDSLSGVPGRGEALEAARALSSQRDHVVACATRDKNRLRAVLLESCPALEAAVDLSDRRWLELLAGFGGAWGIARSGAEGPRAEAAGEAAAASTAPPPALVEAENRQVRFLAARISEALDEAGALEAETAALLEGDETYACLLTVPGIGPRTAAQLAVSVDIGRFPDHDHLASYCGIAPRVRSSGTSVRSVRASRRGDARLKSLLIFSCNSLVRSSGRYGEYYRACRARGMGHGRALKAVARKRLRAIYAVMRDRVPYRE

SEQ ID NO: 10690 - protein, 341 aa, unidentified
  source 1..341: note = protein_9b423bc
  REGION 7..148: note = RuvC_domain
  SITE 10: note = RuvC_P1
  SITE 53: note = RuvC_P2
  SITE 88: note = RuvC_P3
  SITE 90: note = RuvC_P4
  SITE 93: note = RuvC_P5
  REGION 211..300: note = Tnp_domain
  SITE 219: note = Tnp_P1
  SITE 249: note = Tnp_P2
  SITE 257: note = Tnp_P3
  SITE 258: note = Tnp_P4
  SITE 270: note = Tnp_P5
MSEVSIVGLDLAKNVFQAHGSDALGAVLFRKKLRRDHVLRFLAAQPACTVAMEACAGSHYWAREIAKLGHDVRLIAPGYVKPFVKRQKNDAADAEAICEAAQRPTMRFVAAKSEEQQAAAIVFRVRDLVVRQRTQTINAIRGHLAEFGLVAAQGLFHVAKLVAAIEDTDSAIPEAARPILSLLVEQLRSLDEKVAVLDREIARRARDDADTRRLMTIPGVGPITATAVAALAPSAQTFKRGRDFAAWLGLTPLQRSSGGKQKLGETSRMGERTLRRLLIIGASATVRWAMRKGAAADPWLSQMLSRKPPMLVIIALANKTARIVWALMAKGGTYRAPALAG

SEQ ID NO: 10691 - protein, 341 aa, unidentified
  source 1..341: note = protein_01c3370
  REGION 5..153: note = RuvC_domain
  SITE 8: note = RuvC_P1
  SITE 55: note = RuvC_P2
  SITE 92: note = RuvC_P3
  SITE 94: note = RuvC_P4
  SITE 97: note = RuvC_P5
  REGION 212..298: note = Tnp_domain
  SITE 220: note = Tnp_P1
  SITE 250: note = Tnp_P2
  SITE 258: note = Tnp_P3
  SITE 259: note = Tnp_P4
  SITE 271: note = Tnp_P5
MLYYTGIDVSLEASHLCVVDEAGVVVKEAKIASEPDALVAWFSTLGLAVKRIGLEAGPLSQWLYAGLRTAGLDVLLLETRHVRDAFRSMPVKTDRKDARGIAQLMRLGWYRQVHCKSEDAQDTRTLLAARKVLQSKWHALEMSLRGLLRGYGLKVGETTRKTFEPRVRGLAAGVPGLAEVADALLKARAVVFDQFRVLEARVILRARKDERAGLLMTVPGVGPVIALTFVSGIDDPGRFRSSRTVGAHFGLTQRKYQSGETDITGRISKCGDQEVRTALYEAANVILTRPVKGSRLKSWAARVAQRSGMKKAKVALARKLSAVMHRMLVDGTCFDHALAAA

SEQ ID NO: 10692 - protein, 397 aa, unidentified
  source 1..397: note = protein_e2377e2
  REGION 9..163: note = RuvC_domain
  SITE 12: note = RuvC_P1
  SITE 60: note = RuvC_P2
  SITE 100: note = RuvC_P3
  SITE 102: note = RuvC_P4
  SITE 105: note = RuvC_P5
  REGION 270..355: note = Tnp_domain
  SITE 278: note = Tnp_P1
  SITE 308: note = Tnp_P2
  SITE 316: note = Tnp_P3
  SITE 317: note = Tnp_P4
  SITE 329: note = Tnp_P5
MDTSYAVFCGIDVGKSDHHAVGLDTAGGRLFDKALPNDEARLRAVFADLAVHGPILVVVDQPNTIGALPVTVARDCGHDVAYLPGLSMRRVADLYPGQAKTDARDAFIIADTARTMPHTLRRVDVGDETLTELGVLVGFDDDLAGEATRVSNRIRGLLTGIHPALERVLGPRINHLAVLEILSRYGGPAGIRQAGKRRITTLAVKHAPRMGARLAEEIFAALDAQTVTVPGSKAAEIVLPKLADSLKEVLQQRRTIGDDVERILDEHPLSQVLTSMPGIGVRTAARILIEIGDGSDFATAGHLAAYAGIAPVTHRSGTSIRGEHPARSGNRKLKRALFLSAFAALHDPTSRAYYDRKRAEGKRHNAALICLARRRCDVLHAMLKNKTFYQPPTADAA

SEQ ID NO: 10693 - protein, 399 aa, unidentified
  source 1..399: note = protein_20b8662
  REGION 12..166: note = RuvC_domain
  SITE 15: note = RuvC_P1
  SITE 63: note = RuvC_P2
  SITE 103: note = RuvC_P3
  SITE 105: note = RuvC_P4
  SITE 108: note = RuvC_P5
  REGION 274..357: note = Tnp_domain
  SITE 281: note = Tnp_P1
  SITE 310: note = Tnp_P2
  SITE 318: note = Tnp_P3
  SITE 319: note = Tnp_P4
  SITE 331: note = Tnp_P5
MIENYDNVDVFVGIDVGKGEHHAVALNRAGKSLYDKPLPNDEAKMRDVLQHLKHHGNVLVVVDQPATIGALPIAVAQAEGVLVGYLPGLAMRRIADLHPGEAKTDARDAAIIAQAARTLPHALRSIQVADESVAELSMLCGFDDDVLGQITATSNRVRGLLTQIHPALERVIGPHLDHPAVLDLLQRYPSPAVMQQAGPQRLATRLRRLAPRMGHRLASEIMDALAAQTVVVVGTNAAAVVLPRLAEQLAALRRQRAEIAVLVEEIVEAHPLSIVLMSMPGVGVRTAARLLTEVAGKHFESAGHLASYAGLAPVTRRSGSSIRGEHSSRRGNRVLKRALFLSAFAALRDPVSRAYYDRKIAQGKRHNQALIALARRRCDVLFAMLRDGSLYQADHALAA

SEQ ID NO: 10694 - protein, 348 aa, unidentified
  source 1..348: note = protein_3c56249
  REGION 10..157: note = RuvC_domain
  SITE 13: note = RuvC_P1
  SITE 63: note = RuvC_P2
  SITE 99: note = RuvC_P3
  SITE 101: note = RuvC_P4
  SITE 104: note = RuvC_P5
  REGION 229..313: note = Tnp_domain
  SITE 236: note = Tnp_P1
  SITE 266: note = Tnp_P2
  SITE 274: note = Tnp_P3
  SITE 275: note = Tnp_P4
  SITE 286: note = Tnp_P5
MLAELVELVIGVDTHTDTHTAAVVATDTRAVLATATVSADEDGYAELVALAEAHGGLRGWAIEGTGGYGAGLARHLDQLGELVVELDRPVRPARRAGAKSDPIDAERAARDALARTRLAQPKTGPERAGLQILLTARRAAVAAASTAQRQLRALVITAPEPVRARFRGQTTRDMLTTAARLRPATASADVHTFTALSTLRALARRVRALETEANEHERAIRAIVRAWRPDLLTLSGVGPINAATVLTAWSHSRRCRNDAAFAMLAGAAPIPASSGKTVRYRLNRSGNRQLNRALHNIALSRLRYDPDTRAYADRRRAQGKTDRDIKRCLKRYIARQLYRQLESGAATA

SEQ ID NO: 10695 - protein, 399 aa, unidentified
  source 1..399: note = protein_cc118b7
  REGION 9..163: note = RuvC_domain
  SITE 12: note = RuvC_P1
  SITE 60: note = RuvC_P2
  SITE 100: note = RuvC_P3
  SITE 102: note = RuvC_P4
  SITE 105: note = RuvC_P5
  REGION 272..357: note = Tnp_domain
  SITE 279: note = Tnp_P1
  SITE 309: note = Tnp_P2
  SITE 317: note = Tnp_P3
  SITE 318: note = Tnp_P4
  SITE 330: note = Tnp_P5
MTEQFDVYCGLDVGKSEHHATALTPAGERLIDKPLPQDETRLRELFTALGQHGPVLMIVDQPNTIGALPVAVARDCGCEVAYLPGLAMRKAADLYPGRSKTDARDAFIIADTARTMPHTLRAVDRDSEVLAALKVLSGFDTDLTHECTRSINRLRSLLLQIFPSLERVFVGTILTRTLVLDLLIKYAGPTGLRAAGRGNVLRWARNHSRKDPTKLINEIFAALEEQTVTVIGTDAVELVIPRVAAQIKELKHQRAIVAAEVEKLLDDFPLSIVLMSMPGVGIKTAATILLTIGDASTFTTAGHLAAYAGIAPVTRRSGTSIRGEFPARSGNKQLKNALFRSAWIASCHDPLSKAYYEKKRGQGKKHNAAIICLARRRCDVIYAMLKTKTLYEAKTPKAA

SEQ ID NO: 10696 - protein, 341 aa, unidentified
  source 1..341: note = protein_beadd73
  REGION 7..148: note = RuvC_domain
  SITE 10: note = RuvC_P1
  SITE 53: note = RuvC_P2
  SITE 88: note = RuvC_P3
  SITE 90: note = RuvC_P4
  SITE 93: note = RuvC_P5
  REGION 211..296: note = Tnp_domain
  SITE 219: note = Tnp_P1
  SITE 249: note = Tnp_P2
  SITE 257: note = Tnp_P3
  SITE 258: note = Tnp_P4
  SITE 270: note = Tnp_P5
MGEVSTVGIDLAKSVFQVHGSDPSGAVIFRKKLRRDQVLSFFSTLPRCVVAMEACASAHYWAREIAAVGHDTRLIPPAYVKPFVKRQKNDMADAQAICEAAQRPTMRFVQGKSAEAQASGVIFRTRDLLVRQRTQLINALRGHLTEFGYIVRQGVGHVAKLVDIVGDPASEIPTEARPVLTVIAESLQAMQAQIAVLDREIASRAKADPVAKRLMTIPGVGPVIATALVALAPAASTFRRGRDFAAWLGLVPRQHSSGGKERLGRTTKMGERSLRRLLILGASSATKVAARDPDKAGAWLAGMLARKPRMLVTVALANKMARTVWALMAHGGSYRAPAAAV

SEQ ID NO: 10697 - protein, 404 aa, unidentified
  source 1..404: note = protein_0333db1
  REGION 6..159: note = RuvC_domain
  SITE 9: note = RuvC_P1
  SITE 57: note = RuvC_P2
  SITE 98: note = RuvC_P3
  SITE 100: note = RuvC_P4
  SITE 103: note = RuvC_P5
  REGION 221..306: note = Tnp_domain
  SITE 229: note = Tnp_P1
  SITE 259: note = Tnp_P2
  SITE 267: note = Tnp_P3
  SITE 268: note = Tnp_P4
  SITE 279: note = Tnp_P5
MEQVIIGVDPHKLSATIEVVDQHETLLGSGRFSTDQAGYAAMRKYAKTWPDRVWAVEGANGVGRPLAQRLLEAGEHVVDVPAKLAARVRLFDTGHNRKTDALDAHSIAIVAVRTDTLRVLKVDGELEAMRLLTDRREALTRRRVQTVNRLQALLAELLPGQAKKDITPLQAKVMLASVRPRDVAGKTRRRIAAEELAELIAVDSKIKKATAELKAMVLARDSRLMEIHGVGPVVAARILADVGDVTRFADRNRFASWTGTAPLDASSGEQNRHRLSRAGNRRMNHMIHIAAVTQLRLDTDGRAYYRRKRADGKKPMEAMRCLKRRISDAVYRQLVADAQRAALTASTGAGPGGHCGASQESSAVDLPPHIDTSDQPLPGPANSTLQRTQRSRKTSPKKTPQMTS

SEQ ID NO: 10698 - protein, 334 aa, unidentified
  source 1..334: note = protein_8a90fa9
  REGION 7..149: note = RuvC_domain
  SITE 10: note = RuvC_P1
  SITE 53: note = RuvC_P2
  SITE 88: note = RuvC_P3
  SITE 90: note = RuvC_P4
  SITE 93: note = RuvC_P5
  REGION 209..299: note = Tnp_domain
  SITE 217: note = Tnp_P1
  SITE 247: note = Tnp_P2
  SITE 255: note = Tnp_P3
  SITE 256: note = Tnp_P4
  SITE 268: note = Tnp_P5
MENIALIGIDLGKNSFHIHCQDHRGKAVYRKKFTRPKLIEFLASCPATTIAMEACGGSHFMARKLAELGHFPKLISPQFVRPFVKSNKNDFVDAEAICEAASRPSMRFVQPRTESQQAMRALHRVRESLVQDKVKTTNQMHAFLLEFGISVPRGAAVISRLSTILEDNSLPLYLSQLLLKLQQHYHYLVEQIKDLESQLKRKLDEDEVGQRLLSIPCVGTLTASTISTEIGDGKQYASSRDFAAATGLVPRQYSTGGRTTLLGISKRGNKKIRTLLVQCARVFIQKLEHQSGKLADWVRELLCRKSNFVVTCALANKLARIAWALTARQQTYAA

SEQ ID NO: 10699 - protein, 343 aa, unidentified
  source 1..343: note = protein_cb9d1e5
  REGION 6..147: note = RuvC_domain
  SITE 9: note = RuvC_P1
  SITE 52: note = RuvC_P2
  SITE 87: note = RuvC_P3
  SITE 89: note = RuvC_P4
  SITE 92: note = RuvC_P5
  REGION 211..296: note = Tnp_domain
  SITE 219: note = Tnp_P1
  SITE 249: note = Tnp_P2
  SITE 257: note = Tnp_P3
  SITE 258: note = Tnp_P4
  SITE 270: note = Tnp_P5
MQIRSVGIDLGKTTFHLVALGDNGKVLLKKKFTQKQLITFTANLQTSLIGMEACSGAHFLGRALRAQGHDVKLILAQFVKPFVKSNKNDFLDAEAIAEAVDRQNMRFVPIKTDDQLDLQALHRVRERLMIRRTSVINQIRSFLLERGIVFAKSPIRLREAIPEVLENANEHLTPRMRNLIAMLWSEWKDLELQIVEMNDEVERIASSDAACIRLRQIPGVGPLVATAIVASIGNGAAFRKGREFAAWMGLVPRQHSTGGKAKLYGISKRGNRYLRKILIHGARAVVLRSKRERIAMGAWVTALEVRAPRNVLIVAMANKLARITWAVLSTGQEYRAVPNAMAA

SEQ ID NO: 10700 - protein, 342 aa, unidentified
  source 1..342: note = protein_3014086
  REGION 6..151: note = RuvC_domain
  SITE 9: note = RuvC_P1
  SITE 53: note = RuvC_P2
  SITE 91: note = RuvC_P3
  SITE 93: note = RuvC_P4
  SITE 96: note = RuvC_P5
  REGION 211..297: note = Tnp_domain
  SITE 219: note = Tnp_P1
  SITE 249: note = Tnp_P2
  SITE 257: note = Tnp_P3
  SITE 258: note = Tnp_P4
  SITE 270: note = Tnp_P5
MTIATMGIDLAKNIFAVHGVDHNGKPLLVKPKVSRTALPELIANLPPCLIGMEACSGAHYWARLFRQYGHDVRLMAPKFVSPYRLAGKVGKNDAADALAICEAVQRPHMRFVPVKDEEQQSMQCLHRTRQGFIEERTASYNRLRGLLSEFGLVAPQRTEQLRYLAAEHREALPYWVRQCVADLLGHIDAIDLKITEYDRILAKIAGQDSRSKNLMKLKGIGPTTASALVASIGNAHGFRNGRQLAAWLGLTPSQYSSGGKSCLGKITKAGDSYLRTLLVQGARSVMIGVENKQDPFSRWVSSLINRRGYWCAAVAIAAKNARLCWASLNYGDDFKLYCASDT

SEQ ID NO: 10701 - protein, 344 aa, unidentified
  source 1..344: note = protein_69eb34d
  REGION 5..152: note = RuvC_domain
  SITE 8: note = RuvC_P1
  SITE 55: note = RuvC_P2
  SITE 92: note = RuvC_P3
  SITE 94: note = RuvC_P4
  SITE 97: note = RuvC_P5
  REGION 212..300: note = Tnp_domain
  SITE 220: note = Tnp_P1
  SITE 250: note = Tnp_P2
  SITE 258: note = Tnp_P3
  SITE 259: note = Tnp_P4
  SITE 271: note = Tnp_P5
MEHYAGLDVSLELTSVCVVDGQGQVVREAKVASEPEALIRFLQAQGLEIARVGLEAGPLSQWLHAGLVAAGFEAVLLETRHVKAALSAMTVKTDRRDARGIAQLLRLGWYRPVHAKSASAQEVRSLLTARKLIQGKLLDIESGIRGVLRGFGLKVGPISRGRFDARIRELVEGQAMLDMVVGSMLAARTALQAEFARLHRALLALVRADPVCRQLMSVPGVGAVVAITFKSGIDDPSRFRRSRDVGPHFGLTPRKYQSGELDVTGSISKVGDRMVRTALYEAASVMLTRTVRMSPLKSWAMGVAKRRGGKKARVALARKLGVILHRMWVDGASFRWTSETDAMA

SEQ ID NO: 10702 - protein, 302 aa, unidentified
  source 1..302: note = protein_41f9b09
  REGION 6..148: note = RuvC_domain
  SITE 9: note = RuvC_P1
  SITE 52: note = RuvC_P2
  SITE 87: note = RuvC_P3
  SITE 89: note = RuvC_P4
  SITE 92: note = RuvC_P5
  REGION 211..295: note = Tnp_domain
  SITE 219: note = Tnp_P1
  SITE 249: note = Tnp_P2
  SITE 257: note = Tnp_P3
  SITE 258: note = Tnp_P4
  SITE 270: note = Tnp_P5
MNVKTIGIDLAKNVFQIHGVDEHGKRLFNKQLRRAQMASFFANIPPCLIGMEACASAHFWANKLISMGHNVKLMAPQFVKPYVKTNKHDAADAEAICEAVTRPNMRFVPVKTAEQQAVLALHRSRQSFIKQRTAQANQIRGLLAEFGIVVPRGIQQLQRRLPELVEDADNPLPVLFRTQLSLLQHHMAYLFDVIATLDKQIEQCYRQNALCQRIGKIPGIGPVTASALIATIGKANNFENGRQLAAWLGLVPRQHSSGGKQVLLGISKRGDTYLRTLLIMVPGRYCSRPNINRMPYRAGLTS

SEQ ID NO: 10703 - protein, 343 aa, unidentified
  source 1..343: note = protein_22c9564
  REGION 11..153: note = RuvC_domain
  SITE 14: note = RuvC_P1
  SITE 57: note = RuvC_P2
  SITE 92: note = RuvC_P3
  SITE 94: note = RuvC_P4
  SITE 97: note = RuvC_P5
  REGION 215..299: note = Tnp_domain
  SITE 223: note = Tnp_P1
  SITE 253: note = Tnp_P2
  SITE 261: note = Tnp_P3
  SITE 262: note = Tnp_P4
  SITE 274: note = Tnp_P5
MRRTTMKRNIIGIDIGKSSFHVSCHDADGHQLYRKRFTRPKLIQHLATIPPAHIAFEACGGCHWLGRLCLLYGHTVSALPPQFVKPYVKNHKNDFLDAEAIAEAASRPSMRFVPIKSEDEQITGAIHRIRQGYVKERTACMSRIGALLLEFGISFPKGHHAMKALFMKLAEINTPLPQALILELQGLHEHYLYLNDKIAEQGNKLKQIVKESKVAQLLTSIPGIGVLTASQCIAAVGNASQFKQGRQFGAWLGLVPRQHSTGGKPTLLGISKRGDKHLRTLFIHCARSILSRPEKTGTVFGTWLSSLLATKPFNVVCVALANKLARIAWAVLRYQRPFEATAL

SEQ ID NO: 10704 - protein, 384 aa, unidentified
  source 1..384: note = protein_7ee443a
  REGION 5..164: note = RuvC_domain
  SITE 8: note = RuvC_P1
  SITE 61: note = RuvC_P2
  SITE 101: note = RuvC_P3
  SITE 103: note = RuvC_P4
  SITE 106: note = RuvC_P5
  REGION 249..335: note = Tnp_domain
  SITE 257: note = Tnp_P1
  SITE 288: note = Tnp_P2
  SITE 296: note = Tnp_P3
  SITE 297: note = Tnp_P4
MLLFIGDDWAEDHHDVEVQDAQGRVLRRVRLPEGIAGITGFGELVGRFADDDTEPSDVVVCIETDRGPWVGALVAAGYRVFGVDPKQAARHREILGSSGAKSDKGDAHALADMARTRAHQLRQVAADSDAAQGLKVVTRAHQTLIWERTRHMLRLRTALREYFPAALEAYQPFDLTSRAALTLLAKAPSPEAAAKLTAGQIMAALKGHRNKDGKAAAIQQILRSEQLGQPEIANLEKEVKDHFGRHPDAEILLSQPGLGQILGAWVLAEFGDAPHRYASAKARKNYAGTSPITRQSGKMRVVTARHVHNDRLVDALHGQASCALLHDDQVRAYYDQLRARDVDDNAALRQIGNRLVGILDGCLKHRTTYDQATAWSHRLSSIAA

SEQ ID NO: 10705 - protein, 345 aa, unidentified
  source 1..345: note = protein_71a9e2b
  REGION 7..149: note = RuvC_domain
  SITE 10: note = RuvC_P1
  SITE 53: note = RuvC_P2
  SITE 88: note = RuvC_P3
  SITE 90: note = RuvC_P4
  SITE 93: note = RuvC_P5
  REGION 212..298: note = Tnp_domain
  SITE 220: note = Tnp_P1
  SITE 250: note = Tnp_P2
  SITE 258: note = Tnp_P3
  SITE 259: note = Tnp_P4
  SITE 271: note = Tnp_P5
MQQITTIGLDLAKQVFQVHGAEADGSPVVSRKLRRADVLGFFKKLSPCLVGMEACGGAHFWAREIAKLGHDVRLIPPSYVKPFVKRGKTDAADAEAICEAVIRKTMRFVPVKSANQQAAAMVLKTRELLVRQRTQVINALRAHLSELGIIAGTGPAKTATLIEIVRDEEDARLPPAARFALSELANQIEWTRKRIDKLERAIVIEAKRDEDMRRLVTIPGVGVIIAASIKALVPDPNGFKSGRHFAAWLGLTPRSHSSGGRERLGRISKMGNSTLRSLLILGATSVLKHARHRTDASTWLAAILARRPFKVVATALANKMARIIWALLTKGGTYKSGLAIGTANA

SEQ ID NO: 10706 - protein, 353 aa, unidentified
  source 1..353: note = protein_1f47fb7
  REGION 28..175: note = RuvC_domain
  SITE 31: note = RuvC_P1
  SITE 79: note = RuvC_P2
  SITE 119: note = RuvC_P3
  SITE 121: note = RuvC_P4
  SITE 124: note = RuvC_P5
  REGION 220..307: note = Tnp_domain
  SITE 228: note = Tnp_P1
  SITE 258: note = Tnp_P2
  SITE 266: note = Tnp_P3
  SITE 267: note = Tnp_P4
  SITE 280: note = Tnp_P5
MSKQIVALGKPAVSTEKYPDRQVKKLFCGIDIGAETLAIAVMEVDHPWVQREFANTVAGHKALLNWLGKMKAPVRVSLEATGIYSMDLALALDATEFVEVAVLNPKRVHDFARTLRRSKTDSADAQVLAEFSLRMPFAAWQKPSQSALALRAISRHLEALVVQQRREGNRLHAAERSLATPRCVIADLKRSLAGVDRRIVKLRREALTLIAADAHLSQRFRLLTSVPGIAAVSALQILGELVLLAPDMKVRQWVARSGLDPVHQDSGTSVHKPSRISRAGSRHLRRALYMPALAAVRWDPHLKAFYEALLARHKRKLQALIAVARKLLHAIYGIFGSQTPYDGSKLFPHLLTI

SEQ ID NO: 10707 - protein, 331 aa, unidentified
  source 1..331: note = protein_415603b
  REGION 25..166: note = RuvC_domain
  SITE 28: note = RuvC_P1
  SITE 72: note = RuvC_P2
  SITE 112: note = RuvC_P3
  SITE 114: note = RuvC_P4
  SITE 117: note = RuvC_P5
  REGION 207..292: note = Tnp_domain
  SITE 215: note = Tnp_P1
  SITE 244: note = Tnp_P2
  SITE 252: note = Tnp_P3
  SITE 253: note = Tnp_P4
  SITE 264: note = Tnp_P5
MVEGTEGSHHKEGMTKMIQPTTIAAGIDIAKAKLDVAIDGCKQHWEVSNDPAGFLHLAKLLRSRKVNRVGLEPTGGYERDVTEYLRRAGFTVFLLQPRQVRAFAESMLRRAKNDRIDASLIAAFTALMKITREAPDPRYAPLADVLVFVEQIEEDIKRIKTRLEHARIAEHRRFMLDDIKRLKMRRSRMLAKLEAAVRSHDDIAERLNLVRSIDGIALRIALAIIVYMPELGKLSREQAAALAGVAPFDDNSGKRCGERHIWGGRARLRTSVYAATLPAAFRWNSQLVDLYRRLIAAGKAHKVALVACTRKLIIFANTVLARGTPWVKVTV

SEQ ID NO: 10708 - protein, 360 aa, unidentified
  source 1..360: note = protein_043d337
  REGION 8..153: note = RuvC_domain
  SITE 11: note = RuvC_P1
  SITE 57: note = RuvC_P2
  SITE 93: note = RuvC_P3
  SITE 95: note = RuvC_P4
  SITE 98: note = RuvC_P5
  REGION 218..305: note = Tnp_domain
  SITE 226: note = Tnp_P1
  SITE 255: note = Tnp_P2
  SITE 263: note = Tnp_P3
  SITE 264: note = Tnp_P4
  SITE 276: note = Tnp_P5
MKIQRTSVGLDVHARSVVGCGLDGDTGEVFQRRLTPDRGEIAAWLRDLPGPVAVTYEAGPTGFGLARALDAAGIACVVAAPSKLIRPTGDRVKTDARDAAHLARLLHLGQITEVTVPSIEQEAARDLVRAREDVRGDLMTARHRLSKLLLRQGIVYSGGRAWIREHQRWLRRQRFDNAALQLAYDTAFDAMLATLERRERLDTAIAEMAADSRFTPVVTRLGCLRGVSTLTAFGLAVEIGDWSRLTGRSIGAYLGLVPSEYSSGATRTQGAVTKTGNGHARRLLIEAAWHHRAPYRPGAVMRRRWDAASPAARARGQAGNRRLHERWMRFDERKKRSVVANAAIARELAGWCWSLAVLED

SEQ ID NO: 10709 - protein, 400 aa, unidentified
  source 1..400: note = protein_9cf122c
  REGION 5..160: note = RuvC_domain
  SITE 8: note = RuvC_P1
  SITE 57: note = RuvC_P2
  SITE 97: note = RuvC_P3
  SITE 99: note = RuvC_P4
  SITE 102: note = RuvC_P5
  REGION 268..354: note = Tnp_domain
  SITE 276: note = Tnp_P1
  SITE 307: note = Tnp_P2
  SITE 315: note = Tnp_P3
  SITE 316: note = Tnp_P4
  SITE 327: note = Tnp_P5
MPMFAGLDWGGAAHAVCVVDTAGAVLARIEVQHDATGLADLLARLARIAPPPELPVAIERPSGLIVDALVEAGHPVIPIHPNVVKACRPRYRASSGKSDPADAFMLADILRTDGHRFRPLTPASDDIKALRALVRGRDDLVAQRVALANTLRSTLESFWPGAAIVFADIDSPIALAFIRRYPTPDSAARLGPKRLAGFLASHAYPGRRTATELLDRLRAAPTGHASEAEADAKGELVRALASALDTIVNEIARLSTRIEHDIAELPDGQIVMSFPRSGRICAAGILAELGDVRERFPTEAQLAAEAGVCPVTHASGKARGVTFRWACNQRLRKAITTFAGNSRHASAWAARIYNQARQRGCRHQHAIRILARAWCRVLWRAWQDRTAYDPGRHNAAARLA

SEQ ID NO: 10710 - protein, 341 aa, unidentified
  source 1..341: note = protein_ed9adb8
  REGION 5..152: note = RuvC_domain
  SITE 8: note = RuvC_P1
  SITE 55: note = RuvC_P2
  SITE 92: note = RuvC_P3
  SITE 94: note = RuvC_P4
  SITE 97: note = RuvC_P5
  REGION 212..300: note = Tnp_domain
  SITE 220: note = Tnp_P1
  SITE 250: note = Tnp_P2
  SITE 258: note = Tnp_P3
  SITE 259: note = Tnp_P4
  SITE 271: note = Tnp_P5
MRYYAGLDVSVKETSVCILDETGRVCLERKVASDPADLALVLQDPRWPLHRVGLEAGPLSQWLHAGLGQVGLPVICIETRHAKAFLKARVNKSDRHDARGIAQMMRVDLFRPVHVKTPASQSRRALLSARRICQEKALAIENDIRGLLRNFGLKVGLVGKPQFETRIRDLVVDEPELQPVMESLLSARAGLRASEAALHRRLLQLVRQDPVCRRLMSVPGVGPVVSLAFVATIDDPGRFSNSKAVGPALGLVPRLNQSGETERIGRISRCGDAMMRGLLFEAATVLLTRVRTWSWLKAWAVNLAKRRGMKRAIVALSRRLAVILHRIWVDGSEFQWTRATA

SEQ ID NO: 10711 - protein, 416 aa, unidentified
  source 1..416: note = protein_f05ffb6
  REGION 14..173: note = RuvC_domain
  SITE 17: note = RuvC_P1
  SITE 70: note = RuvC_P2
  SITE 110: note = RuvC_P3
  SITE 112: note = RuvC_P4
  SITE 115: note = RuvC_P5
  REGION 281..367: note = Tnp_domain
  SITE 289: note = Tnp_P1
  SITE 320: note = Tnp_P2
  SITE 328: note = Tnp_P3
  SITE 329: note = Tnp_P4
MTIEDRGSLLRLFIGDDWAEQHHDVELMDATGRVLAKARLPEGVGGMTRLHEMIAAQVGSACEEAEVVVGIETDRGPWVRALVAAGYAVMAVNPLQAARYRERLSVSGAKSDAADAHMLADMVRTDSHQLRPVAGDSDQAEAIKAVTRAHKTLIWERTRHAQRLRHTLRDYFPAALAAFADLAAPDSLELLAKAADPQAAAKLTLGQITAALKRARRRNVADKAAAIQAALRTEHLGQPAAVSAAYAVVVRSAVAVLKVLGEQIKQLQGQVEEHFGRHPAAEILLSQPGLGTVLAARVLAEFGDDPQRYATAKARRNYAGTSPITRASGKKKVVLARYVHNDRLVDALDAQAFTALQTSPGARAYYDRLRARDVYHHAALRQVANRLVGILHGCLKTGTLYNETTAWSHHLKPLAA

SEQ ID NO: 10712 - protein, 392 aa, unidentified
  source 1..392: note = protein_855db92
  REGION 4..162: note = RuvC_domain
  SITE 7: note = RuvC_P1
  SITE 60: note = RuvC_P2
  SITE 101: note = RuvC_P3
  SITE 103: note = RuvC_P4
  SITE 106: note = RuvC_P5
  REGION 267..354: note = Tnp_domain
  SITE 275: note = Tnp_P1
  SITE 305: note = Tnp_P2
  SITE 313: note = Tnp_P3
  SITE 314: note = Tnp_P4
  SITE 327: note = Tnp_P5
MIYAGVDIAKMDHVIGAVDETGAEVARPMAFKNTEAGFERCIAWLESVAESEDDVFVGMEATGHYWMACFAYLVAAGYRVCVVNPMQVHAMRRLKGLCGVKNDRIDSALIAETLRQGDYDQTGLATDEVQALKRLTRYHQGLKQELATVKTQAICVLDAYFPEYAGLFSDMFGTASLKVLAECPTPSEASRKRTSSIARLLSEGSHGRLGAERAAEIKSAAKSSVGIRLGEDAAPFQIKTMVTQVEFLNRTIAKVEREVASLLEKVEPNITTVPGISTTTGAQIVAEIGDVKRFKGAASIVKYAGLNSGVDESGMFSAEGVPITKHGSPYLRRSLWLAANRARQYDPRLKAFYDKKRREGKPHRVAVTAVARKLCHVVYAVMRDGEPYDPSK

SEQ ID NO: 10713 - protein, 407 aa, unidentified
  source 1..407: note = protein_4133452
  REGION 5..164: note = RuvC_domain
  SITE 8: note = RuvC_P1
  SITE 61: note = RuvC_P2
  SITE 101: note = RuvC_P3
  SITE 103: note = RuvC_P4
  SITE 106: note = RuvC_P5
  REGION 272..358: note = Tnp_domain
  SITE 280: note = Tnp_P1
  SITE 311: note = Tnp_P2
  SITE 319: note = Tnp_P3
  SITE 320: note = Tnp_P4
MRLFAGDDWAEDYHDVEVMDEAGKVLAKRRLPGGVAGMAQLHELIGRHLGGDGEDTEVVIGIETDRGPWVAALVAAGYTVYPVNPLQAARFRQRHGVSGAKSDDGDRHVLADMVRTDAHQLRPAAGDTPGAAAIKVVARAHKTLIWERTRQVQRLRHQLREYFPAALAAFEDLDAPEVLELLGKAPDPAAAAKLTRAQVSAALKRARRRDIAGKTDAMLAALRSPQLGQPPVLSAAYAASARALIAVITVLNEQVKALQGQVEAHFGQHPDAEIYRSQPGIGAVLGARVLGEFGDDPHRYADAKSRKNYAATSPITRASGKKKIVAARFIHNSRLVDALMAWAFASMKGSPGARAFYDELRARGIEHNDALRRLANRLVGILHGCLKTRTPYDEATAWSHRESSLAA

SEQ ID NO: 10714 - protein, 317 aa, unidentified
  source 1..317: note = protein_71cb72b
  REGION 10..160: note = RuvC_domain
  SITE 13: note = RuvC_P1
  SITE 55: note = RuvC_P2
  SITE 95: note = RuvC_P3
  SITE 97: note = RuvC_P4
  SITE 100: note = RuvC_P5
  REGION 190..277: note = Tnp_domain
  SITE 198: note = Tnp_P1
  SITE 227: note = Tnp_P2
  SITE 235: note = Tnp_P3
  SITE 236: note = Tnp_P4
  SITE 248: note = Tnp_P5
MAMQVSKLIVGADVAKAELVIHHDGSDALIKLKNAKPEIKRWLKQQPRNTAIAVEATNVYHLDLVELAHGAGIEVYVIDGFQLSNYRKSVGGRVKTDPSDARLLSRFLRNEGEDLRPWSPPPAVYGKVQSLLRRRAALVAARTAMTQSWANESLLKSAFDAFIKSIDRLDLLIQKKLKEVLREAGLQEQVARCQAVEGIGFLTATALVMAFVRGEFRSSDAYIAFLGMDLRVNDSGQTNGRRRLTKRGCSEIRRLLHNAAMAASRSAAWKDIYEHHRNSGKATTQALVILARKLARVAFALMKNQDEYVTKGGKLAC

SEQ ID NO: 10715 - protein, 392 aa, unidentified
  source 1..392: note = protein_147f2c4
  REGION 5..163: note = RuvC_domain
  SITE 8: note = RuvC_P1
  SITE 62: note = RuvC_P2
  SITE 102: note = RuvC_P3
  SITE 104: note = RuvC_P4
  SITE 107: note = RuvC_P5
  REGION 267..356: note = Tnp_domain
  SITE 275: note = Tnp_P1
  SITE 305: note = Tnp_P2
  SITE 313: note = Tnp_P3
  SITE 314: note = Tnp_P4
  SITE 327: note = Tnp_P5
MQPVVGVDVAKGSSVVQAFTRRNEPYGKLESISHGDSGFERLGELLAELQARMAIAPVVILEATGHYHRGLVAYLERSGWTHFIVNPLQSKRAKGTQLRKVKTDAADAWHLADMYYRGDVLPHRTWDETFTELQHVTRQHEFVTGMFVQAKLNARALLEQVFPAYEEIFYALFSVTSLSVLERCLEGDDGDLVETIQACAGKSRSRRWVDEKARRLREILLDWRAQPRSQSQTVALSGMVSLLLSFTEQLSDLEKQMNELAFDLPEVELVKSIPGIGDKLAAAIVAEVGDVGQFEGAKQLVAYAGLDPGIFSSGKFTATSSRITKRGSKRLRRSLYLAVQCGIRGSTNKRIREYYDKKRKEGKPYKVVVIACANKLLHHVYAILSKEQPYRN

SEQ ID NO: 10716 - protein, 340 aa, unidentified
  source 1..340: note = protein_60068f7
  REGION 7..149: note = RuvC_domain
  SITE 10: note = RuvC_P1
  SITE 53: note = RuvC_P2
  SITE 88: note = RuvC_P3
  SITE 90: note = RuvC_P4
  SITE 93: note = RuvC_P5
  REGION 212..297: note = Tnp_domain
  SITE 220: note = Tnp_P1
  SITE 250: note = Tnp_P2
  SITE 258: note = Tnp_P3
  SITE 259: note = Tnp_P4
  SITE 271: note = Tnp_P5
MSEITTIGLDLAKHVFQVHGIDAQGTTVLRKRLRRGQVLAFFSHIPRCVVGLEACATGHYWARELRALGHEVRLMPAQYVKAYIKRNKHDAADAEAICEAVGRPTMRFVPVKTAEQQATALLHRGRERLVRQRTMLVNALRAHLAEFGIVAARGLRNVGQLIAIVRDDADIRLPPVAQQVLQVLASQLEQIEAAVAALERQLLTWHKTNPVSQRLASIPGIGPIIATAIATTVADANEFRSGREFAAWLGLVPRQNSTGGKIRLGGITKRGNRYLRRLLINGASANLLRSKATKADPWVIGLRRRRPPLVVAVALANKTARIAWAVMLREKEYQPRAMAA

SEQ ID NO: 10717 - protein, 340 aa, unidentified
  source 1..340: note = protein_c4c1de5
  REGION 7..149: note = RuvC_domain
  SITE 10: note = RuvC_P1
  SITE 53: note = RuvC_P2
  SITE 88: note = RuvC_P3
  SITE 90: note = RuvC_P4
  SITE 93: note = RuvC_P5
  REGION 212..298: note = Tnp_domain
  SITE 220: note = Tnp_P1
  SITE 250: note = Tnp_P2
  SITE 258: note = Tnp_P3
  SITE 259: note = Tnp_P4
  SITE 271: note = Tnp_P5
MMEVIIVGLDIAKHVFQVHGVDQGGNAVLRRKLRRAEVVSFFDQLPPCLIGIEACATAHHWARVLINLGHEVRLMPASYVKPYVKRQKNDATDAEAICEAVTRPTMRFVPVKSEEQQSVLMLHRARELLVRQRTMLINALRAHFAELGIVMRQGSAGVSTLIALIEDDEHDLVPDFTRRALIPLAEQLRELYRRIAELDQEIIRWHRTSELSRRLETIPGVGPVTASALSATIADASLFKSGRQMAAWLGLVPRQNSSGGKERLGRISKQGDPYVRKLLVVGAHAVLRFSRKEGTGPKKWAADMLARKPHNVVAVALANKMARIAWAIMVSGERYRSIPT

SEQ ID NO: 10718 - protein, 380 aa, unidentified
  source 1..380: note = protein_6cc9708
  REGION 35..183: note = RuvC_domain
  SITE 38: note = RuvC_P1
  SITE 87: note = RuvC_P2
  SITE 123: note = RuvC_P3
  SITE 125: note = RuvC_P4
  SITE 128: note = RuvC_P5
  REGION 254..339: note = Tnp_domain
  SITE 261: note = Tnp_P1
  SITE 292: note = Tnp_P2
  SITE 300: note = Tnp_P3
  SITE 301: note = Tnp_P4
  SITE 312: note = Tnp_P5
MTTIARGTTTNHRRDQQADPDPQLDQQREPGQVVGGVDTHLDTHTAAALDPVGRLLGHATFPADPGGYAALLAWLRSFGTVVVVGVEGTGAYGAGLTRHLRAEQVQLLEIDRPDRRARRSAGKSDPLDAEAAALAALARTRTGVPKVRDGRVEALRNLRVARRSAIDQRADCQRRIKTLIVTAAEPLRARLRGLPTRQLLAACAGLRPDLTRVGDPEQATKTALRALARRHHALSEEITDLDAVIDPLVAAINPQLVALNGVGADVAGQLLVTAGENSDRVHSEAAFAMLCGVAPIPASSGRTHRHRLNRGGDRQANAALYRVVLCRLRWDPRTQAYMHRRTEQGLSKKDIIRCLKRLIAREIYYVLNPRLQPSPALQTI

SEQ ID NO: 10719 - protein, 343 aa, unidentified
  source 1..343: note = protein_b2d8183
  REGION 7..148: note = RuvC_domain
  SITE 10: note = RuvC_P1
  SITE 52: note = RuvC_P2
  SITE 87: note = RuvC_P3
  SITE 89: note = RuvC_P4
  SITE 92: note = RuvC_P5
  REGION 211..327: note = Tnp_domain
  SITE 219: note = Tnp_P1
  SITE 249: note = Tnp_P2
  SITE 257: note = Tnp_P3
  SITE 258: note = Tnp_P4
  SITE 270: note = Tnp_P5
MTQSNLIAIDLAKNIFQVAQFQGSKLKSNKQASRKALLELLVKAKPSVVAMEACASAQYFARTAQSFGHKVMLLDPLFVKAFRQGQKTDANDAIAIAIASKVPNVRTCKILSIEEQALQSLSKVRALADKQKIQLSNQIRGLLLEFGIVINQSEAAFKAAIPDILEDAENTLPLELKHALALTYALYQQQCDNKVELQKQIERIVKQNDGCQRLMALEGVGPITAIELLSFLGDTTQFSNGRSAAACAGVTPLQHSTGGKAKIGRIPKRRGGALRRNLFLGARSIVSKLKNREASTEKERWIKSLLIRKGVKCAAIALANKTMRTAYALLKNGTNYEPTALTA

SEQ ID NO: 10720 - protein, 341 aa, unidentified
  source 1..341: note = protein_eb54fea
  REGION 14..161: note = RuvC_domain
  SITE 17: note = RuvC_P1
  SITE 66: note = RuvC_P2
  SITE 106: note = RuvC_P3
  SITE 108: note = RuvC_P4
  SITE 111: note = RuvC_P5
  REGION 207..294: note = Tnp_domain
  SITE 215: note = Tnp_P1
  SITE 245: note = Tnp_P2
  SITE 253: note = Tnp_P3
  SITE 254: note = Tnp_P4
  SITE 267: note = Tnp_P5
MSKGSTVACQRLFCGIDVSAATLAVAVQQEGLERFEHHEFANTCAGHKKLTAWLLRHSRTVRVSLEATGIYSQDLALALDAAEGIEVAVLNPQQVHQFARSMKRSKTDKADAMALAEYSRRMPFVPWRRPSLAALRLRAISRLIASLREDHSRLRSRLHAARASAATPDCVVKLLKDAMAQLQKSRLKLVREAMAVIAQDTELQRKFELLKSVKGIAETSAVQLLGELAGMDPAMSVRQWVAHSGLDPQHRSSGTSVHPPSRISRRGNRHLRLALYMPALVASRFDPHMKVFYNQLKARHKASLQALVALQRKMLHAIYGCFKSNTPYNGATLFPKLIPTS

SEQ ID NO: 10721 - protein, 346 aa, unidentified
  source 1..346: note = protein_71d709a
  REGION 6..148: note = RuvC_domain
  SITE 9: note = RuvC_P1
  SITE 52: note = RuvC_P2
  SITE 87: note = RuvC_P3
  SITE 89: note = RuvC_P4
  SITE 92: note = RuvC_P5
  REGION 211..302: note = Tnp_domain
  SITE 219: note = Tnp_P1
  SITE 249: note = Tnp_P2
  SITE 257: note = Tnp_P3
  SITE 258: note = Tnp_P4
  SITE 270: note = Tnp_P5
MKITTIGIDLAKEVFQVHGVDTHGKAVLRKQLRRGEMAKFFANLEPCLIGMEACGSAHHWARKLGGFGHTVKLMAPQFVKPYVKTNKNDMADAEAICEAVGRPNMRFVPMKNVEQQAILSVHRARQGFVKARTAQANQMRGLLSEFGIVIPKGIASIPKRMDDILEDGENGLPGTMRQLLQRLYDHFKELSRQVQELELQIKQWHQENEASKKLAAIPGIGPITASAIVATVGNATEFKNGRQMAAWIGLVPKQHSSGGKQTLLGISKRGDTYLRTLLIHGARAVIRFAENKAEPDSWLRKLMARRNKNVAAVALANKNIRIIWALLTKGEMFRPDHPTAACAAAA

SEQ ID NO: 10722 - protein, 398 aa, unidentified
  source 1..398: note = protein_14c9055
  REGION 10..164: note = RuvC_domain
  SITE 13: note = RuvC_P1
  SITE 61: note = RuvC_P2
  SITE 101: note = RuvC_P3
  SITE 103: note = RuvC_P4
  SITE 106: note = RuvC_P5
  REGION 271..356: note = Tnp_domain
  SITE 279: note = Tnp_P1
  SITE 309: note = Tnp_P2
  SITE 317: note = Tnp_P3
  SITE 318: note = Tnp_P4
  SITE 330: note = Tnp_P5
MTITEYAVFLGLDVGKEEHHACGLDPGGNRVHDKALPQDEAKLRELYAMLARRGPVLVVVDQPANIGALPVAVARDEGVQVAYLPGLAMRRIADLHPGNAKTDARDAYIIAEAARSMPHALRRVDVQDETLADLDVIVGYDDDLAGEVTAAANRIRGLLTQAHPALERVLGPRVAHPAVLELLTRFGGPTGLRAAGKRRLLAVAKPRAPRSYQRLVDDIVDALDQQTVTVPGTRATELVLTKRATALAALITDRAQVAAQLEDMLDAHPLAQVLTSMPGIGVRTGARILLEVGDGTGFATPGHLAAYAGLAPVTRRSGSSIRGEHPSRSGNKQLKRAMFLAAFAALHDPTSRAYYDRKRAEGKRHNAALICLARRRCDVLFAMLRDGTTYQTRPRSAA

SEQ ID NO: 10723 - protein, 408 aa, unidentified
  source 1..408: note = protein_5a7c886
  REGION 4..165: note = RuvC_domain
  SITE 7: note = RuvC_P1
  SITE 62: note = RuvC_P2
  SITE 102: note = RuvC_P3
  SITE 104: note = RuvC_P4
  SITE 107: note = RuvC_P5
  REGION 273..359: note = Tnp_domain
  SITE 281: note = Tnp_P1
  SITE 312: note = Tnp_P2
  SITE 320: note = Tnp_P3
  SITE 321: note = Tnp_P4
MLFVGDDWAEDHHDVELMDTSGRRLAKARLPEGVAGITRLHAMIAEHLDEDLDQGADQVLIGIETDRGPWVQALIATGYQVFAINPLQVSRYRERHAVSGAKSDAADAHVLADMVRTDAHQLRTVAGDSAQAAAVKVVTRAHKTLIWERTRHVQRLRHALREYFPAALEAFNDLSAADALELLAQAPDPASAARLSTAQITAALKRARRRSLPDKAAAIQAALRAEHLSQPQVVTAAYAATVRATVAVLVVLNEQITSLEKQVEACFSEHPAAEIILSQPGLGPIVGARVLAEFGDDPTRYASAKARKNYAGTSPITRASGKKKVVLARYVHNDRLVDALGTQAFSALRSSPGARAYYDRLRARGVGHHTALRQLANRLVGILHGCLKTGTLYDESTAWGHHADTRAA

SEQ ID NO: 10724 - protein, 402 aa, unidentified
  source 1..402: note = protein_cb0298c
  REGION 5..161: note = RuvC_domain
  SITE 8: note = RuvC_P1
  SITE 58: note = RuvC_P2
  SITE 98: note = RuvC_P3
  SITE 100: note = RuvC_P4
  SITE 103: note = RuvC_P5
  REGION 269..355: note = Tnp_domain
  SITE 277: note = Tnp_P1
  SITE 308: note = Tnp_P2
  SITE 316: note = Tnp_P3
  SITE 317: note = Tnp_P4
MAYCGGLDWGSAEHGICIIEHDSGKIIARFPVPNDAAGIADLMRRLARLAPPADLPIAIERPSGLIVDALVAADHPVVPIHPNVVKASRPRYRAAGGKSDRSDPYLLADLLRTDGHRFRRLMPCSDEIKALRALVRGRDALVAQRLVLANQLRALLDSFWPGAVAIFADIDSPIALAFVQRYPTPDSAARLGEKRIKAFMAQHRYCGRRSASELWRACGAHRRVWPATAKPMPRVNSCAPGPPSSPVLVAQIAELASRIEHTIGELPDGKIVTSFPRAGRICAAQILAELGDVRERFQAEDQLAAEAGVCPVTHQSGKSRGVVFRWACNHRLRAAITCFADNSRHSSPWAADIYQRAKGRGCDHPHAIRILARAWVRVLWRAWQDRTLYDPARHRSSRASAA

SEQ ID NO: 10725 - protein, 417 aa, unidentified
  source 1..417: note = protein_b9f7e5e
  REGION 12..167: note = RuvC_domain
  SITE 15: note = RuvC_P1
  SITE 64: note = RuvC_P2
  SITE 104: note = RuvC_P3
  SITE 106: note = RuvC_P4
  SITE 109: note = RuvC_P5
  REGION 275..361: note = Tnp_domain
  SITE 283: note = Tnp_P1
  SITE 314: note = Tnp_P2
  SITE 322: note = Tnp_P3
  SITE 323: note = Tnp_P4
MSLNVSGALLFVGIDWAADTHAVCVLDAAGRRVTAFTVEHTAMGLAGLTQRLARLGDPEQVPVAIERPDGRLVDVLLEAGHPVVPVKPNAIKVWRSGEVLSGAKSDAGDAEVIAEYLRLRHHKLNLATPYSAETKALRTVVRSRGYLVDMRIAATNQLTALLDLHWPGAKAIFANVESSIALEFLTCYPTARDAQRLGAKRLAAFCAKHGYSGRRTGEQLLARLRAAPAGTLDITLCKAVRDAVLALVTVLKALGAALKDMGHSVLAHLEEHPDSAVFTSLPRSGQINAAQILAEWGDSRHAYEGPDSVAALAGATPVTKESGRHRAVHFRWACNKRFRHAITIFADNSRHASPWAAAVYAAARARGHDHAHAVRALARAWIRVIWRCWIDRRPYEPARHGNAARMLETAQSELVAA

SEQ ID NO: 10726 - protein, 401 aa, unidentified
  source 1..401: note = protein_82c8940
  REGION 11..166: note = RuvC_domain
  SITE 14: note = RuvC_P1
  SITE 63: note = RuvC_P2
  SITE 103: note = RuvC_P3
  SITE 105: note = RuvC_P4
  SITE 108: note = RuvC_P5
  REGION 273..358: note = Tnp_domain
  SITE 281: note = Tnp_P1
  SITE 311: note = Tnp_P2
  SITE 319: note = Tnp_P3
  SITE 320: note = Tnp_P4
  SITE 332: note = Tnp_P5
MIDTSEVQVFVGLDVGKSEHHAHALTRAGKKVLDKRLPNTEPGLRAVFDKLTGKFGTVLVVVDQPASIGALPLTVARAAGALVAYLPGLAMRRLADLHPGEAKTDARDAEVIAQAARSLPHTLRAIETSDEISAELNVLVGFDQDLAAEATRTSNRIRGLLTQFHPSLERVLGPRLDHEAVTELLQRFGSPQALRQAGRRQIGALLRPRAPRMAERLTEEIFAALDEQTVVVPGTGTLDLVIPSLAASLAAVHTQRAAVATQVETLLEAHPLSAVLTSIPGVGARTAAVLLVTIGDGTSFPTSAHLASYAGLAPATRSSGTSIRGEHAPRTGNRVLKRAMFLSAFAALHDPRSRAYYDRQRARGKTHTQALLRLARQRINLIHAMLRDGTLYQHPTQPEAA

SEQ ID NO: 10727 - protein, 341 aa, unidentified
  source 1..341: note = protein_95635bd
  REGION 6..148: note = RuvC_domain
  SITE 9: note = RuvC_P1
  SITE 52: note = RuvC_P2
  SITE 87: note = RuvC_P3
  SITE 89: note = RuvC_P4
  SITE 92: note = RuvC_P5
  REGION 211..297: note = Tnp_domain
  SITE 219: note = Tnp_P1
  SITE 249: note = Tnp_P2
  SITE 257: note = Tnp_P3
  SITE 258: note = Tnp_P4
  SITE 270: note = Tnp_P5
MNITTIGLDLAKSVSHVVCCNQAGKIVRKKMLRRTQILHFFSELSPCLVGVESCASAHYWAREIAKYGHQVKQIAPQHVKAYVRGNKTDFNDALAIAEAVVRPEMRFVQTKTQTQQDIQALHVMRKKCERDRTANSNEIRGLLNEYGIILPVGISHVYKSLPELFDRQVENGLSELFKELLERHYQKLVELDEHLDWYTKKIKQLSQHEACRRLQSIPGVGPIIASALYQHIGNGSEFKNGRAVSASLGLVPKQHSSGGKHNLQGISKRGDSYLRTLLIHGARAVMRVSKHKETPLSQWIKRIEQTRGRNKAAVALANKLARIAWALLAQGGDYQPELTTA

SEQ ID NO: 10728 - protein, 348 aa, unidentified
  source 1..348: note = protein_2fcb763
  REGION 7..143: note = RuvC_domain
  SITE 39: note = RuvC_P2
  SITE 77: note = RuvC_P3
  SITE 79: note = RuvC_P4
  SITE 82: note = RuvC_P5
  REGION 213..298: note = Tnp_domain
  SITE 221: note = Tnp_P1
  SITE 250: note = Tnp_P2
  SITE 258: note = Tnp_P3
  SITE 259: note = Tnp_P4
  SITE 271: note = Tnp_P5
MSKHAVPAGEVSGLLRRFAELRRKAAARTGRDLPIIVIQEAGLDGFWIHRVLQSEGIESHVVDAASILTSRRRRRAKTDRIDGETLVRTLMAYKRGEPRVCSMARAPTPQEEDRRRVCRERRTLMGERVSHVNRIKGLLSAQGVFGYEPLRKGRRERLEDLRTGDRRPLPVRLKAQIIRELDRLEVLLEQLKTVEAERDALLKPASDEAASPAAMLARLKGIGPETAAVLWSEGLFRQFDNRRQVAAYAGLAPTPWQSGSIDHEQGVSKAGNPRLRTAMVELAWLWLQNQPTSALSLWFHERVQRLGRRVRKTIIVALARKLLIALWRYTTAGVVIEGAVMKAAAVTN

SEQ ID NO: 10729 - protein, 323 aa, unidentified
  source 1..323: note = protein_9f66169
  REGION 5..154: note = RuvC_domain
  SITE 8: note = RuvC_P1
  SITE 58: note = RuvC_P2
  SITE 98: note = RuvC_P3
  SITE 100: note = RuvC_P4
  SITE 103: note = RuvC_P5
  REGION 195..281: note = Tnp_domain
  SITE 203: note = Tnp_P1
  SITE 233: note = Tnp_P2
  SITE 241: note = Tnp_P3
  SITE 242: note = Tnp_P4
  SITE 254: note = Tnp_P5
MSNFVGVDVAKNTFDIATHLPNGKHKTKAKLANNSKGFKEFEAWLNKHAEPAARIVMEATSVYHLELAEFVYNKGYRVCVVNPATTHAYADSELRRIKTDKSDAKLIADFAREKAEKLQQWAPEPKKYRQLKAMVRRLDDLQEMEQMELNRLDVSDEKVKDSINSVLRHIEKEIAETHKVIKKHIDDDPDMRQMRDLIVTIDGIGQKTLERLLAELGDLRKYDDPRKLVAAAGLNPKLQDSGKLKGRTVISRIGSARVRAGLYMPGLVALKHNEPIIAMRNRLKANGKAPKQIICAAMRKLLHFVYAVLKSGQPFDPKFALAR

SEQ ID NO: 10730 - protein, 337 aa, unidentified
  source 1..337: note = protein_045196a
  REGION 6..148: note = RuvC_domain
  SITE 9: note = RuvC_P1
  SITE 52: note = RuvC_P2
  SITE 87: note = RuvC_P3
  SITE 89: note = RuvC_P4
  SITE 92: note = RuvC_P5
  REGION 210..295: note = Tnp_domain
  SITE 218: note = Tnp_P1
  SITE 248: note = Tnp_P2
  SITE 256: note = Tnp_P3
  SITE 257: note = Tnp_P4
  SITE 269: note = Tnp_P5
MLIKVLGIDLGKTSFHLIGHDYAGREVYRKKCNRAQLLKILLQLDKTTVAMESCAGSHWLARKCQQFGHNTKLIPPQYVKPYVKTNKNDYIDADAIAEASTGPSMRFVSVKTEESQILSAVQRIRSGFIKEQTATMCRIGALLLEFGINFPRGHAAMGKLFQWLADKNHTLPPLLLQELAVLYEHYQYLHQKIAEQDKKIKAVLKESEMGELLQTIPGIGPMIASACLSEVPSPKDFKNGRHLAAWVGLVPRQYSTGGKSTLLGISKRGNKSLRTLFIHGARALISRPKIAEAIFGDWITELLKRKPFNVVVVALANKLARIAWSVMVTGLPFRKLN

SEQ ID NO: 10731 - protein, 404 aa, unidentified
  source 1..404: note = protein_47f5c3b
  REGION 4..159: note = RuvC_domain
  SITE 7: note = RuvC_P1
  SITE 61: note = RuvC_P2
  SITE 96: note = RuvC_P3
  SITE 98: note = RuvC_P4
  SITE 101: note = RuvC_P5
  REGION 267..353: note = Tnp_domain
  SITE 275: note = Tnp_P1
  SITE 306: note = Tnp_P2
  SITE 314: note = Tnp_P3
  SITE 315: note = Tnp_P4
MWYAGIDWADTHHDALVIDEKGHQVGSLRIAHTPAGMNQLNTFLERIIGAAAKEEMACIIETTHGLLIASLLEAGWPVYPVNPRTVDRKRAASGAKTDLIDAYLLAKTGRADLADLHRLTPDSAKVAELKQLTRDQQTLIQMQTRLVNQLTACLKAYYPVALDLFSKLQQRSTLVFLQTYPTPSAAMAASREQIMHTLKSTRHPHASETAQLIVDRVHQPQLVADAVLTRTKSRLMLVLVNQLLPLLEQIAQYDKEIETLFLTHEDHEIFQSLPRAGKQLAPRLLAEIGDDRTRYQDAGSLQKLGGTAPVMYESGKYSKAHRRLGCIKPLRNTLHQFAWQTTQSEAWAMAYYQRKRAEGKSHTVAVRALANVWVRIIFAMWFTRTSYDAATFERAQQQHAPRAA

SEQ ID NO: 10732 - protein, 291 aa, unidentified
  source 1..291: note = protein_c82d740
  REGION 5..97: note = RuvC_domain
  SITE 37: note = RuvC_P3
  SITE 39: note = RuvC_P4
  SITE 42: note = RuvC_P5
  REGION 158..242: note = Tnp_domain
  SITE 166: note = Tnp_P1
  SITE 196: note = Tnp_P2
  SITE 204: note = Tnp_P3
  SITE 205: note = Tnp_P4
  SITE 217: note = Tnp_P5
MEACAGAHFMARTLGGLGHHVRLIAPHLVRPFVKSNKNDFADAEAICEAASRPSMRFVTPRTEPQQVLSALHRIRESFVRDRVCTGNQVHGILLEFGVSLPVGSTALKRLPTIIAQHSLPPRLVMMLERLHAHYKYLDGQIADLDKELARQLSDDDLGQRLLTIPGVGPITASVLSSEVGDGKQYRNSRDFAASIGLVPRQHSTGGKATLLGISKRGDKNIRRLLVQCARSYMRDVERRSGPLADWVRALLGRRHSSVVACALANKLARIAWAIAARHTVFEATGSRLQDA

SEQ ID NO: 10733 - protein, 346 aa, unidentified
  source 1..346: note = protein_82ec748
  REGION 7..147: note = RuvC_domain
  SITE 10: note = RuvC_P1
  SITE 53: note = RuvC_P2
  SITE 88: note = RuvC_P3
  SITE 90: note = RuvC_P4
  SITE 93: note = RuvC_P5
  REGION 210..296: note = Tnp_domain
  SITE 218: note = Tnp_P1
  SITE 248: note = Tnp_P2
  SITE 256: note = Tnp_P3
  SITE 257: note = Tnp_P4
  SITE 269: note = Tnp_P5
MEQIIRIGMDTSKHIFQLHGVDGAEQPVLRKRLRRKEVVAFFAKLPPTVIGIEACGASHYWARELEQLGHEVKLLAPQLVKPYVKRNKNDGRDAEALCEAMSRPSMRFVPVKTAEQQAALMLAGIRERLVARRTQVSNAIRGYAAEFGVTAVKGLDKIEPLLAQIAEDESVPMLARELFAMQGREYAQLQVELKAIEVRLMAWHRANACSRRLAQIPGIGPISATALVMKTPDPRAFPSGRHFAAWLGLTPKDHSTAGKTRLGKITRAGDEVLRSLLVAGATAVIQQVRHGRGRRSPWLVALLKRKPPKLAAVALANKIARIAWKLMTTGESYDGAWMPGASAFAA

SEQ ID NO: 10734 - protein, 341 aa, unidentified
  source 1..341: note = protein_40cabdc
  REGION 7..148: note = RuvC_domain
  SITE 10: note = RuvC_P1
  SITE 53: note = RuvC_P2
  SITE 88: note = RuvC_P3
  SITE 90: note = RuvC_P4
  SITE 93: note = RuvC_P5
  REGION 209..296: note = Tnp_domain
  SITE 217: note = Tnp_P1
  SITE 247: note = Tnp_P2
  SITE 255: note = Tnp_P3
  SITE 256: note = Tnp_P4
  SITE 268: note = Tnp_P5
MQDVTIVGIDLGKNTFHLHGQDRRGKAVFRKKLGRRQLVEFFATFHACTVVMEACAGAHHMARLLTTFGHEVKLISPQFVRPFVKSNKNDFVDAEAICEAASRPTMRFVTAKTESQQTLSALHRLRESFVRDRTRTINQMHGLLLEFGVSLPVGKASVARLPAFLSEHSLPPRLIAILQRLHEHYKYLDSEVGHIEKEINAQLADDELGQRLLTIPGIGPITASVLAAEMGDGKQYRCGRDFAASVGLVPRQYSTGGKATLLGISRRGDKNIRRLLVTCARAYMLRLEGRTGQLADWVRAMLTRRHSNVVACALANKLARTAWSMAAHGTPYCAGLTVAAD

SEQ ID NO: 10735 - protein, 405 aa, unidentified
  source 1..405: note = protein_410e4a8
  REGION 4..160: note = RuvC_domain
  SITE 7: note = RuvC_P1
  SITE 57: note = RuvC_P2
  SITE 97: note = RuvC_P3
  SITE 99: note = RuvC_P4
  SITE 102: note = RuvC_P5
  REGION 274..360: note = Tnp_domain
  SITE 282: note = Tnp_P1
  SITE 312: note = Tnp_P2
  SITE 320: note = Tnp_P3
  SITE 321: note = Tnp_P4
  SITE 334: note = Tnp_P5
MNAVGIDVSKGKSTVTIRRPGDVVLMPPRDIPHTKSAINELIKQIQSLDGETKACMEHTGRYYEPLAAWLSDAGIFVSAVNPVLIRDFADDSLRSPKTDKADSKKIARYTLDRWAKLKQYGSMDKTRNQLKTMNRQFSFFMAQKTAMKNNLIALLDQSYPGANDLFDSPARSDGSQKWVDFVYTYWHVDCVRGKSLSAFTEHYRKWCKHKGYNFSAEKAEKVYEASCDLIAVFPKDDNTKMLIRQAVAMLNTASETVENLRIKMDETASALPEYPVVMAMNGVGSTLGPQLMAEIGDVTRFTHREALTAFAGVDPGKNDSGKHVQKSVRTSKKGSPHLRRTLFQIMDGLIKRSPIDDPVYVFMDKKRAQGKPYYVYMTAGANKFLRIYYGRVREYFASLPETGEN

SEQ ID NO: 10736 - protein, 414 aa, unidentified
  source 1..414: note = protein_b8381d7
  REGION 19..176: note = RuvC_domain
  SITE 22: note = RuvC_P1
  SITE 75: note = RuvC_P2
  SITE 115: note = RuvC_P3
  SITE 117: note = RuvC_P4
  SITE 120: note = RuvC_P5
  REGION 283..370: note = Tnp_domain
  SITE 291: note = Tnp_P1
  SITE 321: note = Tnp_P2
  SITE 329: note = Tnp_P3
  SITE 330: note = Tnp_P4
  SITE 342: note = Tnp_P5
MAEVSPSVLLDPSSFAYVVGIDIGSEDCCLTVLTPQKQVVIKPTKLANAASGFALLQERMARLGVDPGQIVVGLEATSRYGENLFHFLQQQGYHLCLLHPRQTHEFAKQRGLRAKTDRLDATTIARALLSGEARVGYVPDEQIASYRELVRLHSHLSDELAREKNEIQALLVVLFPEFSQVFADPCRPTATSVLRAYPSAKAIREAGVDAIASVLQASAPHRYGRETARQLVGVAEHSVSSDLALDVRSLSLKIWCEQLQHTLAHLEQIEEEMEKRLSRDPGVRGLQEVPEFGMQTVAVLRAELGDVARFQRLDQVVAYAGMDVEIKQSGKWQGQAKLSKRGSGLVRRMLYMAAMRCTSLPGSAFGAYYHRLLARGLGKKTALMAVMRKMLMIAAYLLRTREDYDPTWGAGSAG

SEQ ID NO: 10737 - protein, 341 aa, unidentified
  source 1..341: note = protein_ee2b582
  REGION 7..149: note = RuvC_domain
  SITE 10: note = RuvC_P1
  SITE 53: note = RuvC_P2
  SITE 88: note = RuvC_P3
  SITE 90: note = RuvC_P4
  SITE 93: note = RuvC_P5
  REGION 209..295: note = Tnp_domain
  SITE 217: note = Tnp_P1
  SITE 247: note = Tnp_P2
  SITE 255: note = Tnp_P3
  SITE 256: note = Tnp_P4
  SITE 268: note = Tnp_P5
MTTATLVGIDLGKHSFHLHGQDAAGREVFRKKATRQQMMRWLGNLPACTVVMEACAGAHYLARQLVAMGHEARLISPQFVRPFVKGNKNDFIDAEAICEAACRPSMRFVTPKTETQQTLSVLHRMRDSLVRDRTKTANQAHGFLLEFGISLPKGVALMRRLPDTLADRELSHRLLVLLMRLHAHFCYLDDRIKELDREITDQLAADELGSRLLTIPCVGPMTASVLTAEMGDGKQYRCSRDFAASVGLVPRQYSTGGRSHLLGISKRGDKHLRRLLVQCARVYLQRLDHQQGPLAEWVRALRLRRHSNVVVCALANKFARIAWAIATRHSAFNAGPRVMTA

SEQ ID NO: 10738 - protein, 405 aa, unidentified
  source 1..405: note = protein_2ad80cb
  REGION 4..160: note = RuvC_domain
  SITE 7: note = RuvC_P1
  SITE 57: note = RuvC_P2
  SITE 97: note = RuvC_P3
  SITE 99: note = RuvC_P4
  SITE 102: note = RuvC_P5
  REGION 274..361: note = Tnp_domain
  SITE 282: note = Tnp_P1
  SITE 312: note = Tnp_P2
  SITE 320: note = Tnp_P3
  SITE 321: note = Tnp_P4
  SITE 334: note = Tnp_P5
MNAVGIDVSKGKSTVTIRKPGDVVLMSPCDIPHTQSAINDLIKQIKSLEGETKVCMEHTGRYYEPVATWLSDAGIFVSAVNPILIRDFGDDSLRTPKTDKADSKKIARYTLDRWAKLKQYGIMDKTRNQLKTMNRQFGFYMAQKTAMKNNLIALIDQTYPGANDFFDSPARNDGSQKWVDFIHTYWHVDCVRSKSLNAFTEHYQNWCKRKNYNFSAEKAAKIYQISSDLIAVFPKNDITKMLIWQAVALLNTASKTVESLRSKMNELASTLPEYPVVMDMNGVGATLGPQLIAEIGDVSRFTHREALTAFAGVDPGKNDSGKHIQNSVRTSKKGSPYLRKTLFQIMDSLIKRSPVDDPVYAFMDKKRSEGKPYYVYMIAGANKFLRIYYGRVREYLSNLSNNETI

SEQ ID NO: 10739 - protein, 343 aa, unidentified
  source 1..343: note = protein_cc20921
  REGION 6..149: note = RuvC_domain
  SITE 9: note = RuvC_P1
  SITE 54: note = RuvC_P2
  SITE 89: note = RuvC_P3
  SITE 91: note = RuvC_P4
  SITE 94: note = RuvC_P5
  REGION 213..301: note = Tnp_domain
  SITE 221: note = Tnp_P1
  SITE 251: note = Tnp_P2
  SITE 259: note = Tnp_P3
  SITE 260: note = Tnp_P4
  SITE 272: note = Tnp_P5
MKITRVGVDIAKNVFQIHGVDQSGRPIWRRKLKRAGWLRQMTLKLEPGCAVGMEACSGAHHWARELASRGFVVKLISPQFVKPYVKSQKNDATDAEAICEAMSRPGMRFVAPKTVEQQDIQSIHRVRSSVVGQRTAQGNQIRGLVAEYGLVAPQHLGSLRKAIPEWLEDAENGLTDRFRALLHGLWTELLRFDERIQAFDDEIARIAEAHPDARRLKQLQGVGPLIATALVARFGDASQFKRGREAAASIGLTPRHHGTGGKNRLMGITKRGDSYLRGILIHGARSVVTRAHRKDDRLNRWATELKERSHTNVAAVALANKTVRIAWAMLRNGTDFEPTLAVG

SEQ ID NO: 10740 - protein, 328 aa, unidentified
  source 1..328: note = protein_5d1bfad
  REGION 4..158: note = RuvC_domain
  SITE 7: note = RuvC_P1
  SITE 60: note = RuvC_P2
  SITE 100: note = RuvC_P3
  SITE 102: note = RuvC_P4
  SITE 105: note = RuvC_P5
  REGION 200..286: note = Tnp_domain
  SITE 208: note = Tnp_P1
  SITE 237: note = Tnp_P2
  SITE 245: note = Tnp_P3
  SITE 246: note = Tnp_P4
  SITE 259: note = Tnp_P5
MAFLGADISKNKIDVCLLVAGIKGKKKQKVFTNEPCVARKIIDWLEAQKCASDNMTVVMEATGIYHENLAYGLHDAGISVCMANPYRVREFACGMDILTKNDTVDAFVLACYGELKHPDAWVPPSVEVRKLRALLRQRDALKEDVQRTANRLEKAHSTSTPREVIGSLERTHGWLSDELERIEKLITDHTDNDPGLKADLELLKSIKCVKEQVGREMLALLKDGTFKSASQVAAYLGITPVERVSGSSVRGRAHMSKTGPSIVRAKLYVAALSAIRWNKPAKAIYERLVAKGKAKKAALGAVMRKLVHMCFGVLKTRLPWDENYAATA

SEQ ID NO: 10741 - protein, 343 aa, unidentified
  source 1..343: note = protein_07d6bb9
  REGION 5..152: note = RuvC_domain
  SITE 8: note = RuvC_P1
  SITE 53: note = RuvC_P2
  SITE 91: note = RuvC_P3
  SITE 93: note = RuvC_P4
  SITE 96: note = RuvC_P5
  REGION 211..298: note = Tnp_domain
  SITE 219: note = Tnp_P1
  SITE 249: note = Tnp_P2
  SITE 257: note = Tnp_P3
  SITE 258: note = Tnp_P4
  SITE 270: note = Tnp_P5
MNQYIGLDVSLKDTAISIREDGKRIWRGKCPSDPKLLAETIRKHAPHARRVVFETGPLSTWFYHALTNEGFPAICIEARHAQKVLNETLNKTDANDADGLAQLAEAGFYKAVRVKSFDAMTTRALVAARDKLVHISTQLGNQIRGVMKTFGFIVPEGKGRIFDGNVRELVAGNDNLARIILPLLDAWRDIRKRAAILDRQLLAAARQSQSAKLLTTIPGIGAITAISYVAAIEHPQNFRTSRSVGAWLGLTTRRYQSGEVDYDGHISRRGDNHLRALLYEAATVMLTRTGARTESRLKDWGLKLRERLGFKRAAVAVARKLAVIMHTMLKTGEIFNPSASAIV

SEQ ID NO: 10742 - protein, 428 aa, unidentified
  source 1..428: note = protein_7a9ea7e
  REGION 19..179: note = RuvC_domain
  SITE 22: note = RuvC_P1
  SITE 77: note = RuvC_P2
  SITE 118: note = RuvC_P3
  SITE 120: note = RuvC_P4
  SITE 123: note = RuvC_P5
  REGION 286..372: note = Tnp_domain
  SITE 294: note = Tnp_P1
  SITE 324: note = Tnp_P2
  SITE 332: note = Tnp_P3
  SITE 333: note = Tnp_P4
  SITE 345: note = Tnp_P5
MNYNQNEKIAQITSETLIIGVDIAKFKHVARAQDFRGLEFGAPCHFENTKPHFDLFLSWIKQLMEQHGMRKVIIGMEPTGHYWLNLAHFLKEEEIKFVVVNPMHVKKSKELDDNSPTKNDVKDARVIAQLVKDGRYAEPNIPQGVYAELRVARKIRDLLYVDLQAVQGQIHNWLDRYFPEFLTVFKDWEGKAALQLLKLNALPHELEILSEQEILIHLRKAVKRAVGLSKIQELKRVAKDSIGIREGSRMAKLELRTLLDKYELITKKFEELESDIDGLLERIPGVQQMLAITGIGKDTVAGFFSEVGNLSYYSHPRQIIKLAGLSLKENTSGKHKGQTKITKRGRKTLRALLFRVAMPLVAKNTAFKALHEYFTTRKNNPLKKMQSLIAICNKLIRILFTIGTKQCEFSEDRMLKDIPHMALLQKVA

SEQ ID NO: 10743 - protein, 353 aa, unidentified
  source 1..353: note = protein_0edb3a2
  REGION 6..160: note = RuvC_domain
  SITE 9: note = RuvC_P1
  SITE 67: note = RuvC_P2
  SITE 105: note = RuvC_P3
  SITE 107: note = RuvC_P4
  SITE 110: note = RuvC_P5
  REGION 210..298: note = Tnp_domain
  SITE 218: note = Tnp_P1
  SITE 249: note = Tnp_P2
  SITE 257: note = Tnp_P3
  SITE 258: note = Tnp_P4
  SITE 271: note = Tnp_P5
MKKLFIGIDFAKEKFDAAIIEACGLKEFGNREYGTFTNDKKGYRQFFKWVKTNADKSVENEWLFCGEDTGSCSLGLSKWLYGKGLDIWIENAYSIKHSSGIQRVKSDKADSSMIAEYAWRHQDKAVLFEPLSESLSQLREVFLYRHKLVQQHIAMDVRKQDKEAAEPSKAISFIKRKSKHLMSEIDNAIKECDLMIDRIIESDAELKENYAIITSIKGVARQNGACLLIFTNNFRRFDLDARKIACYYGVAPFGKDSGTSIHSPAKTSHFANKLIKSLLGQAAHCAKKFNPEIREYYNRLIGRGKKPQVALNNVKNKLIRIIVALVRKKVYYDPKTYMFYNAKFTDVKKMLNS

SEQ ID NO: 10744 - protein, 314 aa, unidentified
  source 1..314: note = protein_d2d1b49
  REGION 3..148: note = RuvC_domain
  SITE 6: note = RuvC_P1
  SITE 50: note = RuvC_P2
  SITE 90: note = RuvC_P3
  SITE 92: note = RuvC_P4
  SITE 95: note = RuvC_P5
  REGION 189..273: note = Tnp_domain
  SITE 197: note = Tnp_P1
  SITE 226: note = Tnp_P2
  SITE 234: note = Tnp_P3
  SITE 235: note = Tnp_P4
  SITE 246: note = Tnp_P5
MLIGIDVAKAELVVAARPSGERWTAPNDERGVQRLVERLRHDGPALVVLEATGGYELLCVGALAAAGLPVVVANPRQVRDFAKATGQLAKTDRIDADVLALFAERVRPEVRTLPAADAQELDALLARRRQLLEMLQAERNRLGQVFGRGRQPVKKSLKAHIAFLERELRIADTDLGAMIRRSPAWRERDDLLQSVPGVGPVLSLTLLAELPELGRLSRREIAKLVGVAPLSRDSGALRGRRFVQGGRAGVRAVLYMAALVATKRNAVIGAFYQRLLRAGKPKKLAPVACMRTLLTILNAMARTNTRWQEHPATA

SEQ ID NO: 10745 - protein, 411 aa, unidentified
  source 1..411: note = protein_9c46ec1
  REGION 9..154: note = RuvC_domain
  SITE 12: note = RuvC_P1
  SITE 58: note = RuvC_P2
  SITE 93: note = RuvC_P3
  SITE 95: note = RuvC_P4
  SITE 98: note = RuvC_P5
  REGION 255..341: note = Tnp_domain
  SITE 263: note = Tnp_P1
  SITE 294: note = Tnp_P2
  SITE 302: note = Tnp_P3
  SITE 303: note = Tnp_P4
  SITE 314: note = Tnp_P5
MDKVYDKCCGIDVHKKLIVACFRKGSKQELRNFGATTRELLELANWLQNGGCEMVAMESTASYWKPLYNILESSELKAMVVNASHMKAVPGRKTDTKDAEWIAELLQHGLLKASYIPDKQQRELRELVRYRKSLVSERTRELNRLQKMLEGANIKLSGTVSDINCMSARNILEYLLTGEFFDEAKYDEMYKQKIIAHNLKASKEQLIDDLNGVMTPLQRRMMKELLSHLDELNVHINNLEDEIDNFMKPEEKKATQAIQDVTGIGKNSSQAIISVIGTDMSRFPTAGHLAAWAGLCPGNNESAQKRKTGKMRKGNALLRSTLVVCAHSATRNKNSYFYAQFMRISSHRGKKRAYVAVAHSMLIAIYHILKDGVVFKDLGADYYNQFNKERKINAYLKKLKALGWEVPVVAA

SEQ ID NO: 10746 - protein, 355 aa, unidentified
  source 1..355: note = protein_0f15383
  REGION 8..161: note = RuvC_domain
  SITE 11: note = RuvC_P1
  SITE 67: note = RuvC_P2
  SITE 107: note = RuvC_P3
  SITE 109: note = RuvC_P4
  SITE 112: note = RuvC_P5
  REGION 208..295: note = Tnp_domain
  SITE 216: note = Tnp_P1
  SITE 246: note = Tnp_P2
  SITE 254: note = Tnp_P3
  SITE 255: note = Tnp_P4
  SITE 268: note = Tnp_P5
MAIRKQCIGIDISKSTFTACLCQQAEDGKLTFSKVLDFGNDSKGFNQLLRWVKGLIVSDSELVFLMEATGVYYENLAHHLYKIKKRVHVVLPNTSKHYFSSLNVKTKTDAVDARILSQFGIERVHKLWSPPPSTLLQLRNLTRYYVQLQEQKTTLGNISHSKDCAHDIQVFITKSNKKLITEIDKEIERCLKEIKKAIEKEDVLKEHVRKVLTIKGVGLITVATILAETMGFEQFHSSKQLVSYSGYDVVQRESGTSIKGKTRISKKGNRYIRNALYFPAMVACRYNEALKETYIRINKNNKASKMIGQVAIQRKLLVLIYTLWKNDTEFIENYQRGSLDPKTETTQDSSVAELL

SEQ ID NO: 10747 - protein, 341 aa, unidentified
  source 1..341: note = protein_1389fac
  REGION 6..148: note = RuvC_domain
  SITE 9: note = RuvC_P1
  SITE 52: note = RuvC_P2
  SITE 87: note = RuvC_P3
  SITE 89: note = RuvC_P4
  SITE 92: note = RuvC_P5
  REGION 211..297: note = Tnp_domain
  SITE 219: note = Tnp_P1
  SITE 249: note = Tnp_P2
  SITE 257: note = Tnp_P3
  SITE 258: note = Tnp_P4
  SITE 270: note = Tnp_P5
MQITTIGLDLAKNVFQVHGIDAAEKVVVRKQLRRRQMLEFFKALPPCLIGMEACATSHYWARELTKLGHEVRLMPAKDVKAYIKRNKNDAADAEAICEAVRRPTMRFVQIKSAEQQGQLMQHRARDLLMRQRTQVINAMRAHLAELGIPARQGREGLKELMAIVADDDDTRVPVNARASLMVLAAQLQALQTLIGSIEKRIIKQHRVNEASQRLESIPGIGVIGATAIAATVADPKVFRSGRDFAAWIGLVPREASTGGKQKLGPISKQGDRYLRRILVVGACAVLKLARQKPEKYPWLTQLLARRPFKVVAVALANKMARMAWALLANGGTYRAPRIAAA

SEQ ID NO: 10748 - protein, 374 aa, unidentified
  source 1..374: note = protein_948afc1
  REGION 19..133: note = RuvC_domain
  SITE 29: note = RuvC_P2
  SITE 70: note = RuvC_P3
  SITE 72: note = RuvC_P4
  SITE 75: note = RuvC_P5
  REGION 248..336: note = Tnp_domain
  SITE 256: note = Tnp_P1
  SITE 286: note = Tnp_P2
  SITE 294: note = Tnp_P3
  SITE 295: note = Tnp_P4
  SITE 308: note = Tnp_P5
MISVGVDISKGKSTVCILKPYGEIRVVMEATGVYHLPILTFLQEKGYFVSVINPYSMKKYAKDNSLRRAKTDRLDSIMIANYGIDRWFKLQKYEGDENTYAELKLLGRRYRYYMELHVKSLQELTHILDYVMPGIKAMFNSWDEASNKDKLSDFVERYWHYDLITSMSREEFIEDYLAWAKEKKYHQSSAKAEAVYEMASDGIPTLSSDTPSTKMLVQEAIAVLRAVDNSLFRIISRMQELAKTLPEYSTVRSMGGVGDVLAPKLIAEIGDVRRLHNAKALIAWAGIDPPPYESGQFVGSQRRITKRGSSTLRKVGYEVMRVLKSHREPEDNIVYNYILKKEAEGKSKKAAKIAGLNKFLRIYYARVMAVYQQQ

SEQ ID NO: 10749 - protein, 429 aa, unidentified
  source 1..429: note = protein_1bd9ec2
  REGION 20..181: note = RuvC_domain
  SITE 23: note = RuvC_P1
  SITE 79: note = RuvC_P2
  SITE 120: note = RuvC_P3
  SITE 122: note = RuvC_P4
  SITE 125: note = RuvC_P5
  REGION 288..374: note = Tnp_domain
  SITE 296: note = Tnp_P1
  SITE 326: note = Tnp_P2
  SITE 334: note = Tnp_P3
  SITE 335: note = Tnp_P4
  SITE 347: note = Tnp_P5
MNYNTQNAKIASITEKTLIVGIDVGSETHYARAFGWRNYEYSKKPFAFSNDEAGFSSFKDWMDDIAEKHGMEAVIPGMEPTGHYWLNLGAYLQEQGMKPVHVNPHHVKKSKELDDNNPSKNDRKDPKTIAGLVNEGRFSYPYIPTGIYAEIRNLSNLRIQTQEEITRIKNRIARWFSIYFPEIKDVYRNPDAVSGLMVIKQAPLPCDIKELGVDGVNKIWRDARLKGAGIKRATTLVTAAEHSIGNTEAPRSARKEIRNLLNDYEIYKNRMDELMEEIEETLSEIAYIDKLMEINGIGIKTVSCFIAEVGDIGRFDNPKQVQKLAGYAIVADSSGKHNGESRISHRGRKRLRYALYEAAISVIGKNKEFKEIHCYYRTREKNPLKKMQSVIAVACKLIRIFYTILTKGIEYDGQKMLSDIVRPKMQPAA

SEQ ID NO: 10750 - protein, 318 aa, unidentified
  source 1..318: note = protein_94448a5
  REGION 10..159: note = RuvC_domain
  SITE 13: note = RuvC_P1
  SITE 55: note = RuvC_P2
  SITE 95: note = RuvC_P3
  SITE 97: note = RuvC_P4
  SITE 100: note = RuvC_P5
  REGION 191..275: note = Tnp_domain
  SITE 199: note = Tnp_P1
  SITE 228: note = Tnp_P2
  SITE 236: note = Tnp_P3
  SITE 237: note = Tnp_P4
  SITE 249: note = Tnp_P5
MKTQQATEFVGVDVASAHLDVAVHGHTNVRRYANTREGICQLLRALRPGCVLALESTGRYHTALAQAAHAAGLRVYVLNPLDARRYAQSVGQRGKTDRIDALVLARYICREHEQLRQWQPPTASQAQLRELIAHRATLVRQRSALAQAGSHNKMLASLDAPVLKALQEAIEHIDAQLAVIIQADPPSRQAFEHITSVPGLGLVCGSLLVMLFGRMHERSADAVIAFTGLDPRPNDSGKKTGQRRLSKRGWPEIRRLLYAAAMSAARTKTWNGFYLAQRAKGLSTTAALIVLARKLLRVAFSLFKQQSDFDSSLMAVKG

SEQ ID NO: 10751 - protein, 413 aa, unidentified
  source 1..413: note = protein_4dc8e7d
  REGION 5..167: note = RuvC_domain
  SITE 8: note = RuvC_P1
  SITE 64: note = RuvC_P2
  SITE 104: note = RuvC_P3
  SITE 106: note = RuvC_P4
  SITE 109: note = RuvC_P5
  REGION 275..361: note = Tnp_domain
  SITE 283: note = Tnp_P1
  SITE 314: note = Tnp_P2
  SITE 322: note = Tnp_P3
  SITE 323: note = Tnp_P4
MKLFAGDDWAEEHHDVELMGIAGRRLAKGRLPEGVAGIARLHAMIGEQLGEDADEEDAGQVAVGIETDRGPWVQALIAAGYTVFAINPLQASRYRERHGVSGAKSDAADAHVLADMVRTDSHQLRPVAGDTALAAAVKAVTRTHKTLIWERARHGQRLRHALRDYFPAALEAFGDLDAAGTLELLARAPDPASAARLTTAQISAALKRARRRNIAEKAGQIQAVLRAPHLGQHDIVTAAYAASARALIAVLTTLNEQIQALQGQVEAYFGQHPDAEIIMSQPGLGPVLGARVLAESGDDPSRYVSAKARKNYAGTSPITRASGKKKVVAARYVRNDRLIDALMGQAYTALTASPGARAYYDRQRGRGAEHNAALRQLANRLTGILHGCLKTRTLYNEATAWPQRPAKTHKAAA

SEQ ID NO: 10752 - protein, 296 aa, unidentified
  source 1..296: note = protein_af1863f
  REGION 7..149: note = RuvC_domain
  SITE 10: note = RuvC_P1
  SITE 53: note = RuvC_P2
  SITE 88: note = RuvC_P3
  SITE 90: note = RuvC_P4
  SITE 93: note = RuvC_P5
  REGION 209..293: note = Tnp_domain
  SITE 217: note = Tnp_P1
  SITE 247: note = Tnp_P2
  SITE 255: note = Tnp_P3
  SITE 256: note = Tnp_P4
  SITE 268: note = Tnp_P5
MSESALIGIDLGKHSFPLNGQDTAGREVFHKKLKRTQMMQFFGNLPSCVVVMEACAGAHFVARQLAGMGHTSKLISPQFVRPFVKGNKNEFVDAEAIFEAASRPSMRFVSPKTEAQQTLSVLHRMRESLVRDRTKTANQMHGFLLEFGISLPKGLAIMKRLSSVLAEHELPVRLTVLLQRLHNHFVYLDGQIKELDKELAYQLADDDLGRRLLSMPCVGPITASLLAVEMGDGQQYRCSRDFSASVGLVPRQYSTGGKANLLGISKRGDKHLRQLLVQCSRVYMQRLEHRKGPLAE

SEQ ID NO: 10753 - protein, 406 aa, unidentified
  source 1..406: note = protein_9215b80
  REGION 4..163: note = RuvC_domain
  SITE 7: note = RuvC_P1
  SITE 60: note = RuvC_P2
  SITE 100: note = RuvC_P3
  SITE 102: note = RuvC_P4
  SITE 105: note = RuvC_P5
  REGION 271..357: note = Tnp_domain
  SITE 279: note = Tnp_P1
  SITE 310: note = Tnp_P2
  SITE 318: note = Tnp_P3
  SITE 319: note = Tnp_P4
MLLVGDDWAEDHHDVELQDEAGRRLGKARLQEGIAGIVRLHELLAEHLDPDAEPDQVVIGIETDRGPWVQTLLAAGYRVYGINPLQVARYRQRHSVSGAKSDAADAHTLADMVRTDRHQLRPIAGDSDLAEAIKVVARAHKTLIWERTRHTLRLRHALREFFPAALVAFVDLTSTDALELLGKAPDPASAARLTITQITTALKRARRHHVADKAAAIRSALGAEHLGQPAVVVAAYAATVRAQVAILATLNAEITTMEEQAEAHFGRHPEVEIYRSQPGLGEILGARVLAEFGDDPTRYADARSRKNYAGTSPITRQSGKKQFVLARYVHNDRLIDALGRQAFAALLASPGARGYYDELRGRGVGHHAALRQLANRLVGILHGCLKTGTTYHEATAWSHRQLKAAA

SEQ ID NO: 10754 - protein, 407 aa, unidentified
  source 1..407: note = protein_ff8a9b8
  REGION 4..160: note = RuvC_domain
  SITE 7: note = RuvC_P1
  SITE 57: note = RuvC_P2
  SITE 97: note = RuvC_P3
  SITE 99: note = RuvC_P4
  SITE 102: note = RuvC_P5
  REGION 269..355: note = Tnp_domain
  SITE 277: note = Tnp_P1
  SITE 308: note = Tnp_P2
  SITE 316: note = Tnp_P3
  SITE 317: note = Tnp_P4
MIFLGDDWAEAHHDIYICNGAGDRLAARRLSEGIAGVTSLHELVSAHAESPSEVVVGIETDRGLWVQSMVEAGYQVYAINPRAASRYRDRHRLSGAKSDAGDAKMLAELVRTDRHNHRQVAGDSDLAEGVKIVARGHQNLIWERTRHTNRLRSSLREYYPAALDTFDDLADRDTLAVLDRAPTPAQGQALTPGQVRTALRAGGRTRNIDTRAHAIVEGLRVESLQAPDLIVSAFAATTRSQVAILRALNEQIAALETELTAHFEQHPDADIYLSLPGFGVVLGARVLAEFGDDPNRYANAKSRKNYAGTSPITRASGTRHVALARFVRPSRLADALDQWAFCTLRVSPGCRAHYDHRRAQGDTHHQALRALSNHLVGILHGCLTHHTTYDETLAWAHRHDPDANIAA

SEQ ID NO: 10755 - protein, 351 aa, unidentified
  source 1..351: note = protein_9aa5639
  REGION 13..154: note = RuvC_domain
  SITE 16: note = RuvC_P1
  SITE 59: note = RuvC_P2
  SITE 94: note = RuvC_P3
  SITE 96: note = RuvC_P4
  SITE 99: note = RuvC_P5
  REGION 218..304: note = Tnp_domain
  SITE 226: note = Tnp_P1
  SITE 256: note = Tnp_P2
  SITE 264: note = Tnp_P3
  SITE 265: note = Tnp_P4
  SITE 277: note = Tnp_P5
MSHQTTTEAIATIGIDLGKNTFHLIGMDARGKILLRRKIARGQLQSCLANVPVCLIGMEACAGAHHVGRQLAAFGHDVRLLPAQYVKPFLKGHKNDYRDAEAIAEAVQRPTMRPVPLKSAEQLDLQALHRVRRRRIGQRTAVINQIRAFLLECGLPVRQGLAGLREALPTLLSQRTDVLSPRMIHLIEDLSDDWRQLDERIETLTRDITALAREDAGCRRLMDVPGVGVITASAMVAAIGTGAAFSKGRDFAAWLGLVPKQISTGNRTILGGLSKRGNRYLRTLFVGGAQAILQHPQNWQRHRFGHWLTAALTRLHRNVLAAALANKLARIAWSVLYRERGYDAGIAAQVP

SEQ ID NO: 10756 - protein, 369 aa, unidentified
  source 1..369: note = protein_660895d
  REGION 9..159: note = RuvC_domain
  SITE 12: note = RuvC_P1
  SITE 63: note = RuvC_P2
  SITE 99: note = RuvC_P3
  SITE 101: note = RuvC_P4
  SITE 104: note = RuvC_P5
  REGION 224..308: note = Tnp_domain
  SITE 232: note = Tnp_P1
  SITE 262: note = Tnp_P2
  SITE 270: note = Tnp_P3
  SITE 271: note = Tnp_P4
  SITE 283: note = Tnp_P5
MGEYSEAFVAFDVAKKKHAVAIAAGGRTGEVRFLGEVENRPAAIERTIKKLGKRYDRLHVCFEAGPTGYGLCRQVRDLGHDCMVVAPALIPKRSGERIKTNRRDAVTLARLHRAGELTGVWVPDVVHEAVRDLVRARESGADDLRRKRQQLLSFLLRHGRIYEGGGHWTLAHRRWLARQSFEHPAQQIVFQEKIDAIEDAVQRLRRLDEQLSAVVPTWSMARVVEAYQAMRGASFLVAVIFAAEIGDVRRFDTPPQLMAFLGLVPGERSTGDTVRRSSLTLAGNRRARRALVEAAWTYRYPARVSEALRLRLEGLPKAVRDIAWKAQVRLCARYRRLNAAGKKPPVVVAAIAREMAAFLWAIGQEVEPS

SEQ ID NO: 10757 - protein, 321 aa, unidentified
  source 1..321: note = protein_256071b
  REGION 4..148: note = RuvC_domain
  SITE 7: note = RuvC_P1
  SITE 52: note = RuvC_P2
  SITE 92: note = RuvC_P3
  SITE 94: note = RuvC_P4
  SITE 97: note = RuvC_P5
  REGION 191..278: note = Tnp_domain
  SITE 199: note = Tnp_P1
  SITE 229: note = Tnp_P2
  SITE 237: note = Tnp_P3
  SITE 238: note = Tnp_P4
  SITE 251: note = Tnp_P5
MTYVGIDVSKTTFVVAYSSDKASRTKTFKNTVKGVHEFIQTLSAAEHHCVLEATGNYSALLVYLLSEASITVSLENPLKIKNFARVMLSVTKTDETDARLIALYGEKMQPAPYKLRSDSILTLKQKRTVIRQLKKQLIATRNLKGSMEALPFFDPKCRKAIEKTIAFLEKQIKGLEEELASLVQSEYKKQMDLLTSIKGIGVTLAAALIVATGGFTYFDNAKQFTRYLGLSPTYQQSGTSVNVKGHINRNGDSSLRSQLYVAAFSSLRCNSECKACFDRLRSNGKPGKVAVIAVANKLVRQAFAVVTHGKPYVDGFKSERL

SEQ ID NO: 10758 - protein, 259 aa, unidentified
  source 1..259: note = protein_d2ac1a6
  REGION 5..152: note = RuvC_domain
  SITE 8: note = RuvC_P1
  SITE 55: note = RuvC_P2
  SITE 92: note = RuvC_P3
  SITE 94: note = RuvC_P4
  SITE 97: note = RuvC_P5
  REGION 212..259: note = Tnp_domain
  SITE 220: note = Tnp_P1
  SITE 250: note = Tnp_P2
  SITE 258: note = Tnp_P3
  SITE 259: note = Tnp_P4
MYHYAGIDVSLESSTICVVDSTGKILRETKVASEPEALITWFRSLGLALERIGLEAGPLSQWLYAALREAGFAVELLETRHVRDAFKAMPVKSDRDEARGIAQSMRLGWFRPVHCKSIEAQETRAVLTARKLLQSKLRDVENSLRGVLRGFGLKVGKTTEGTFAGRIRELVAGHPGLELVAKALLEAHAVLRREFNGLDKHTQKLARSHPQARLLMTTPSVGPIVALTYASAIDNPSRFRSSKTTGAHFGITPKKYQSG

SEQ ID NO: 10759 - protein, 354 aa, unidentified
  source 1..354: note = protein_ce9ba28
  REGION 4..160: note = RuvC_domain
  SITE 7: note = RuvC_P1
  SITE 59: note = RuvC_P2
  SITE 100: note = RuvC_P3
  SITE 102: note = RuvC_P4
  SITE 105: note = RuvC_P5
  REGION 222..307: note = Tnp_domain
  SITE 230: note = Tnp_P1
  SITE 260: note = Tnp_P2
  SITE 268: note = Tnp_P3
  SITE 269: note = Tnp_P4
  SITE 280: note = Tnp_P5
MVTVGIDPHKRVHVAVAVDDNGRRVGRGLTVSNDEHLIIALLQWIRSISDEGAVTWAIEDGRGFARRLADELLLAGQEVVWVPSRLTLAHRKLHAATGAKSDVIDAAAVARAAIATPGLSRHQVDKRVRELRILTDYRSDLVKRRTMVVNQLKAQAHLWLDYTPGDLARAKTLTLLRARLDAAPVSTHITHVLSEMINEMIELNNRIGELDATIKELVTPLAPNLLKIVGISHNSAAVLITEIGDISRFSTSAKLARYTGCAPIPVYSSDHERHRLHRGGNRRLNSVLYTAAIVQNRFHPAAQQLTARHQPTKGARGARRILKRHLVDVIHRAMQLDRASWQHHITQHPAHALT

SEQ ID NO: 10760 - protein, 316 aa, unidentified
  source 1..316: note = protein_4e9459c
  REGION 9..148: note = RuvC_domain
  SITE 12: note = RuvC_P1
  SITE 55: note = RuvC_P2
  SITE 95: note = RuvC_P3
  SITE 97: note = RuvC_P4
  SITE 100: note = RuvC_P5
  REGION 190..275: note = Tnp_domain
  SITE 198: note = Tnp_P1
  SITE 227: note = Tnp_P2
  SITE 235: note = Tnp_P3
  SITE 236: note = Tnp_P4
  SITE 247: note = Tnp_P5
MNDTSMKCAGVDVSKAKLDVAVFDGQRFVETNDAAGHRRLAARLTAAGVERVGMEASGNYEAAVRAALEVVGFAVKVFDPRQVHGYRIFRGRRAKNDAIDAHLILAATAALGSGGAAADPRLAAFQEHMTLIDALTDDIARHETRRDRFSDPAHRRYLEAEIRRLSKRKSKELAKLIAKVKAHADLAKRFALLLSIPGLGEITALVFVVRMPELGRLSRAEAAALVGVAPFDHDSGTHAGQRRIAGGRRRLRKAVYMAAFSAANHWNPILVAFRKRLVDAGKTYKQAIVACARKLVHMANAVLARGTPWNPQNASA

SEQ ID NO: 10761 - protein, 345 aa, unidentified
  source 1..345: note = protein_cf39830
  REGION 14..160: note = RuvC_domain
  SITE 17: note = RuvC_P1
  SITE 65: note = RuvC_P2
  SITE 105: note = RuvC_P3
  SITE 107: note = RuvC_P4
  SITE 110: note = RuvC_P5
  REGION 206..293: note = Tnp_domain
  SITE 214: note = Tnp_P1
  SITE 244: note = Tnp_P2
  SITE 252: note = Tnp_P3
  SITE 253: note = Tnp_P4
  SITE 266: note = Tnp_P5
MNKLVFTPQATVFCGVDVSARTLAVAQIGSDGSLAQREFANSAVGHKALLAWLARCNTRVRVSLEATGVYSLDLALALDREAWIELAVLNPKVVNRFAQTLRRSKTDSADAVVLAEYGQRMPFTPWQRPLAGHLRLRTVSRYIESLVVDQAGLKNRLRTAESTATTPRAVLVDLRQALAALERRVAKMRREVLDLVRAEPALWERFRLLTSVPGIAQISALQILSELVLLAPAMTVRQWVASSGLDPAHQQSGTSLNKPSRISRAGNRHLRRALYMPALAAVRCDPHLRAFYLALRSRHKTGLQALMAVARKLLHAIYGIFKTGRPYDGKLLFPNIQTEVESVAG

SEQ ID NO: 10762 - protein, 282 aa, unidentified
  source 1..282: note = protein_d05a988
  REGION 6..159: note = RuvC_domain
  SITE 9: note = RuvC_P1
  SITE 57: note = RuvC_P2
  SITE 98: note = RuvC_P3
  SITE 100: note = RuvC_P4
  SITE 103: note = RuvC_P5
  REGION 221..282: note = Tnp_domain
  SITE 229: note = Tnp_P1
  SITE 259: note = Tnp_P2
  SITE 267: note = Tnp_P3
  SITE 268: note = Tnp_P4
  SITE 279: note = Tnp_P5
MDQVIIGVDPHKLSVTIEARDRREVLRVTGRFGTGTAGYRQLLRAACQWPQRVWAVEGANGIGRPVAQRLLADGERVLDVPAKLAARARVFDTGQGRKTDATDAHAIVMVALRDTGLRELSSDPELMVLRMLCDRRDEISRGRAQALNRMHRLFLELVPGGAPVKKSTGQYKALLARVRPRDLAGKTRRRMAAEELADLARYDARLKTMKAELKAAVQARGSHLMNIHGIGPAGAARILADVGDIARFPDRNHFASWTGTAPIDASSGEHTRHRLSRAGTAG

SEQ ID NO: 10763 - protein, 266 aa, unidentified
  source 1..266: note = protein_732e091
  REGION 2..95: note = RuvC_domain
  SITE 32: note = RuvC_P3
  SITE 34: note = RuvC_P4
  SITE 37: note = RuvC_P5
  REGION 137..224: note = Tnp_domain
  SITE 145: note = Tnp_P1
  SITE 175: note = Tnp_P2
  SITE 183: note = Tnp_P3
  SITE 184: note = Tnp_P4
  SITE 197: note = Tnp_P5
MVFSVYLASKNIPFLLVAGLEIKQSLGIVRGKNDKADAKNIAKYGHRMRDEITPTKLSSDDELSLKRLLSLRERLVKQRSGYKASLKEQKRVLVQKDNKTLFSTQEKMICYLTKQIDEVEKEMNEIMNKNESMLKNYELLRSINGVGPQTALFIIAYTANFTKFKNYRKFASYCGIAPFQNQSGTSIRGKTKVSNLANKKIKSLLDMSAKSSIQHNTEMKLYYEKRIAKSKNKMSTINIIRNKLLSRMFAVVNRNEPYVDTLKYAA

SEQ ID NO: 10764 - protein, 401 aa, unidentified
  source 1..401: note = protein_0a7489d
  REGION 10..164: note = RuvC_domain
  SITE 13: note = RuvC_P1
  SITE 61: note = RuvC_P2
  SITE 101: note = RuvC_P3
  SITE 103: note = RuvC_P4
  SITE 106: note = RuvC_P5
  REGION 271..356: note = Tnp_domain
  SITE 279: note = Tnp_P1
  SITE 308: note = Tnp_P2
  SITE 316: note = Tnp_P3
  SITE 317: note = Tnp_P4
  SITE 329: note = Tnp_P5
MNIEDVEVFVGIDVGKAEHWATALTDDGKKIFDKALPNDESRLRDLYERLGEHGRVLVAVDQPATIGALAVAVAQAMGITVGYLPGLSMRRIADLTPGNAKTDARDAAVIADAARTMPHTLRAIDASDKDAAALSMLTGFDLDLARQVNQTANRIRGLYTQIHPALETVLGKWLEHDPILEVIAAWPTPAHLRKAGRARIDAKLKSKGAKRHAAWAKAITDALNKQTVVVAGTDAAGVVLPHLARQLIALHAQRDDVAAQVEALVEAHPLYPVLTSMPGVGVRTAAVFLAETAGKTFPSGAHLASYAGLTPVTRRSGSSIRGEYVSHAGNKRLKRAMFLSAFASLRSDPASRAYYDRKRAQGKRHNQAILALAHRRILTLYAMIRDGSLYDPPAQQLPAAA

SEQ ID NO: 10765 - protein, 386 aa, unidentified
  source 1..386: note = protein_b26ad0b
  REGION 41..184: note = RuvC_domain
  SITE 79: note = RuvC_P2
  SITE 118: note = RuvC_P3
  SITE 120: note = RuvC_P4
  SITE 123: note = RuvC_P5
  REGION 255..342: note = Tnp_domain
  SITE 263: note = Tnp_P1
  SITE 292: note = Tnp_P2
  SITE 300: note = Tnp_P3
  SITE 301: note = Tnp_P4
  SITE 313: note = Tnp_P5
MQKLNDLSRSPNPLDPDGTLIAVIELSLSSWLVAGIVPGVERQPLKKLAVDENALLKLLHRWREEAAKAGHRIKRIAIAFEAGRDGFWLARWLRARDIEAHVIHASSVAVSREHRRAKTDRLDTELLKRSFLGWLRGERDHCKMVAIPTTQDEDAKRPNREHESLVGEQSRIVNRMKATLIRLGIRGFNPKLKKAAERLDGLRTPEGEPIPPNTLAELRRDMARRRLVSDQIRQIEDARLERLKQAPSDGPHAMVRLLARVIGVGVETADMLVQEVLSRSMRDRRAIARYAGLTGSPDESGRKRREKGLTRSGNARVRRGMIQLAWRFLMFQKDSTLAQWFRTRTENARGTRKTMIVALARKLLIALWRLVREGVVPDGVVLRPAS

SEQ ID NO: 10766 - protein, 400 aa, unidentified
  source 1..400: note = protein_d22a73c
  REGION 10..164: note = RuvC_domain
  SITE 13: note = RuvC_P1
  SITE 62: note = RuvC_P2
  SITE 102: note = RuvC_P3
  SITE 104: note = RuvC_P4
  SITE 107: note = RuvC_P5
  REGION 270..356: note = Tnp_domain
  SITE 278: note = Tnp_P1
  SITE 308: note = Tnp_P2
  SITE 316: note = Tnp_P3
  SITE 317: note = Tnp_P4
  SITE 329: note = Tnp_P5
MEPSRQRIWVGIDAGKAHHWATAVDESGTTLWSKKIANDEGAILDALAELLVLADEIVWGIDICGTASALLLALLAAHGQQPLYVPGRTVNRMAGAYRGEAKTDARDAYVIAETVRHRTDFAPIDVPAETVRALAVLTAYRNDLVADRTRQVNRLRDALCSIFPALERAFDYSRAKGPLVLLTGFQTPRALRRIGRARLETWLRKRGVRSAESIADKAMEAAASQRARVSGEAVTASIVADLARQILDLDERLTGTEKQVRETFRELDAAKIIESVPGFGPVLGAEFIAAAGNLTGYRDAGHLASAAGLVPVPRDSGRRSGNLHRPKRYNRALRRVFFMSALSALKVEGPSREFYQKKRGEGLKHVQAVIALARRRVGVLWALLRDGRKFTPAPPLPLAA

SEQ ID NO: 10767 - protein, 320 aa, unidentified
  source 1..320: note = protein_0f4e6f2
  REGION 10..152: note = RuvC_domain
  SITE 13: note = RuvC_P1
  SITE 55: note = RuvC_P2
  SITE 95: note = RuvC_P3
  SITE 97: note = RuvC_P4
  SITE 100: note = RuvC_P5
  REGION 191..274: note = Tnp_domain
  SITE 198: note = Tnp_P1
  SITE 227: note = Tnp_P2
  SITE 235: note = Tnp_P3
  SITE 236: note = Tnp_P4
  SITE 248: note = Tnp_P5
MTILNSPTVIGIDVAKAEIVVYREDLKITQAIDNNREALGRWLKTLPAQSSIALEATSFYHLDTAELAHGMGFHVYVVDPYRVAHYRESIGLRAKTDPCDARLLARYLTNEQARLRIWSPPPEAYKVLKNLLRKRAALIKARVSIVLSFSNEPRLKDILARQLEVFKESDQAIQKLMREASQAAGITENINRCKAIEGIGELTAIGLATAFMRGHFVSGDAFIAFLGMDLRPKDSGKKHSPRHLSKKGDGELRRLAHNAAMAACRSPAWKPYYEAFLARGLARTQALVILARKLCRVAFALMKNQSEYQPNSRLQGSPAT

SEQ ID NO: 10768 - protein, 402 aa, unidentified
  source 1..402: note = protein_4064ca2
  REGION 4..160: note = RuvC_domain
  SITE 7: note = RuvC_P1
  SITE 57: note = RuvC_P2
  SITE 97: note = RuvC_P3
  SITE 99: note = RuvC_P4
  SITE 102: note = RuvC_P5
  REGION 274..361: note = Tnp_domain
  SITE 282: note = Tnp_P1
  SITE 312: note = Tnp_P2
  SITE 320: note = Tnp_P3
  SITE 321: note = Tnp_P4
  SITE 334: note = Tnp_P5
MNSVGIDVSKGKSLIAVMRPFGEVVVSPREVRHTDSELSELAKLLKSLDGETRVVMESTGNYHAPVAWLLHDAGLYVSVVNAMLVHDYGNNSLRRAKTDRKDAVKLANYGLDHWPTLPRYVPEEDTRLMLKNCYRQYQQYSKVQTMLKNNLISLLDTAFPDANRLFASPPRADGSEKWVDFVAAFWHAECVCELSEKAFTTRYQKWCRKHGYNFSEDKALDIYASACGHFGVMPKTETAHLLVEQAVSQLHATSAALAALKQEMQKLASTLPEYPVVMRMFGVGPALGPQLMAEIGDVRRFHSKKALVAFAGIDAPPYQSGTVNVRSCSISKRGSSSLRRTLFLVMGIILQNSPADEPVYQFMDKKRSEGKPYKVYMMASANKFLRVYYASVKGYLDSLERD

SEQ ID NO: 10769 - protein, 403 aa, unidentified
  source 1..403: note = protein_fb3a05c
  REGION 6..158: note = RuvC_domain
  SITE 9: note = RuvC_P1
  SITE 57: note = RuvC_P2
  SITE 95: note = RuvC_P3
  SITE 97: note = RuvC_P4
  SITE 100: note = RuvC_P5
  REGION 266..352: note = Tnp_domain
  SITE 274: note = Tnp_P1
  SITE 305: note = Tnp_P2
  SITE 313: note = Tnp_P3
  SITE 314: note = Tnp_P4
  SITE 325: note = Tnp_P5
MSNYFAGLDWASRTHALCVVDERGGVVERFEIGHDAAGLADLQRQLRRLGSPPVAIERPSGLLVDTLVEAGFMVVPIHPNAVKASRPRYRSHGGKSDASDAYVLADLLRTDGHRFKALTAQGDEIKALQALVRGRDDLVASRVQLANQLRTLLESFWPGAAAVFADIDSPIALAFVERYPTPEAASSLGPKRMAAFCAQYAYSGRRGAEDLLARLHEAPAAVCGELQMEAKGELARCMARTLRSVVEQIRLLSSRIEHHVASLEDGRILMSFPRAGRICAAQILSELGSVRERFVSVEHLAAEAGVAPVTYESGKSKAVTFRWACNHRLRAALTCLADNSRHANAWAASVYAKAKARGCDHPHAVRILARAWLRVIWRAWTDRRPYDPSQHRGAQLLLKTVGG

SEQ ID NO: 10770 - protein, 342 aa, unidentified
  source 1..342: note = protein_06930e7
  REGION 6..147: note = RuvC_domain
  SITE 9: note = RuvC_P1
  SITE 52: note = RuvC_P2
  SITE 87: note = RuvC_P3
  SITE 89: note = RuvC_P4
  SITE 92: note = RuvC_P5
  REGION 211..317: note = Tnp_domain
  SITE 219: note = Tnp_P1
  SITE 249: note = Tnp_P2
  SITE 257: note = Tnp_P3
  SITE 258: note = Tnp_P4
  SITE 270: note = Tnp_P5
MEIVRIGLDLAKNIFEVHGVDAEDKAVLRNTLRRDAVAQFFADLAPCIVGMEACSGSHYWAKVFADLGHEVRLISPQFVRPYVKSNKNDRNDAEAICEAVSRPSMRFVPPKSSEQLETQAVHRIRQRLVSDRTRLVNQIRGLLAEHGLVVARDISRLRYALGRIADGTDNNLGHIISELACDVRDELSELDQRIAAYNKRIRDLFRSNEMCQRIGKIEGIGPITATALVAAVGDRTCFKNGRQFAAWLGLVPKQRSSGGKSRLFGISKRGDRYLRTLMIHGARAVLAKSGGKTDPRSQWIERMRERRHPNVVAVAVANKNARIVWSLLSGDKAYQPTAPAQA

SEQ ID NO: 10771 - protein, 378 aa, unidentified
  source 1..378: note = protein_0264524
  REGION 10..164: note = RuvC_domain
  SITE 13: note = RuvC_P1
  SITE 61: note = RuvC_P2
  SITE 101: note = RuvC_P3
  SITE 103: note = RuvC_P4
  SITE 106: note = RuvC_P5
  REGION 271..356: note = Tnp_domain
  SITE 279: note = Tnp_P1
  SITE 308: note = Tnp_P2
  SITE 316: note = Tnp_P3
  SITE 317: note = Tnp_P4
  SITE 329: note = Tnp_P5
MNTEDIEVFIGIDVGKSEHWATALSREGRKVFDKALPNDEERLRALYKKLADHGHLLVVVDQPATIGALAVAVAQDMGITVGYLPGLSMRRIADLTPGSAKTDAKDAAVIAGAARSMPHTLRAINASDEDAAALSMLTGFDLDLARQVNQSANRIRGLYTQIHPTLEQVLGPWLEHDAVLEVIAAWPTPADLKRAGKARIDARLKKHGCRRHATWAGQIVSALEHQSVVVAGTDAAAVVLPHLARQLISLHAQRADVAAQVEALVEAHPLYEVLISMPGIGVRTAAVFLAETLGKTFDTGAQLASYAGLAPVTRRSGSSIRGEHVSHGGNKRLKRAMFLSAFASLRSDPVSRAYYQRKRDQGKPPWARPSSPWPTAAS

SEQ ID NO: 10772 - protein, 396 aa, unidentified
  source 1..396: note = protein_116103d
  REGION 6..160: note = RuvC_domain
  SITE 9: note = RuvC_P1
  SITE 58: note = RuvC_P2
  SITE 98: note = RuvC_P3
  SITE 100: note = RuvC_P4
  SITE 103: note = RuvC_P5
  REGION 265..352: note = Tnp_domain
  SITE 273: note = Tnp_P1
  SITE 304: note = Tnp_P2
  SITE 312: note = Tnp_P3
  SITE 313: note = Tnp_P4
  SITE 325: note = Tnp_P5
MTAIWAGIDAGKTHHHCVVIDDTGKRLLSRRVANNESELLKLLADVLALGDEAVWGIDLADGGAALAITVLFNHGQQLLYIPGRAVNRASEGYRGDGKTDAKDAAVIADQTRIRRDLAALRPGDKLVSELRVLVRHRRDLSDDRTRTINRLRGHLTEIFPGLERELDLGNVGPLMLLTGYQTSTAIRRAGSRRLTTWLRNRKVRSADELAAKAVQAAEGQHTSVPGEDMTAHVVHSLAKEVIDFNEKIAEIDKLIEGRFRAHHYAEVITSMPGIGGLLGAESLAATGGDMEAFASPDRLAAFAGVSPTPRDSGKVSGNLHRPTRYNRRLQRVFYTSALISIRCCEESRRFYDRKRAEGKRHSQAVMALARRRVNVLWALLRDGRCYQPIPPVTSAA

SEQ ID NO: 10773 - protein, 344 aa, unidentified
  source 1..344: note = protein_8495232
  REGION 4..157: note = RuvC_domain
  SITE 7: note = RuvC_P1
  SITE 55: note = RuvC_P2
  SITE 96: note = RuvC_P3
  SITE 98: note = RuvC_P4
  SITE 101: note = RuvC_P5
  REGION 219..304: note = Tnp_domain
  SITE 227: note = Tnp_P1
  SITE 257: note = Tnp_P2
  SITE 265: note = Tnp_P3
  SITE 266: note = Tnp_P4
  SITE 277: note = Tnp_P5
MITIGIDPHKSSLTAVALDQTGRQLAARRITINAAAYKTLINWAARWPHRRFAVEGAAGLGRGIAQLLAAASEHVVDVPATLAARARLLDTGGSRKTDAADAASVAHAAMRHQRLRQVIAEDQHTRLRLLAERRDDLARERVRLLNRLHVLLRDLIPGGAALDLTADKAAALLRGIRPATATDSCRRDLARDLIADLRYLDRRLTTNQVHTRQVHAETHSTITHIHGVGHITAAKILGHVGDITRFPTADHFASYAGTAPLEASSGERRRHRLNPTGNRQLNTALHTIALCQARDPGPGRLYYQRKISEGKTPAEARRALKRRLTNVLYRHLLHDQRKHLPATG

SEQ ID NO: 10774 - protein, 343 aa, unidentified
  source 1..343: note = protein_cf8c9a5
  REGION 6..148: note = RuvC_domain
  SITE 9: note = RuvC_P1
  SITE 52: note = RuvC_P2
  SITE 87: note = RuvC_P3
  SITE 89: note = RuvC_P4
  SITE 92: note = RuvC_P5
  REGION 211..297: note = Tnp_domain
  SITE 219: note = Tnp_P1
  SITE 249: note = Tnp_P2
  SITE 257: note = Tnp_P3
  SITE 258: note = Tnp_P4
  SITE 270: note = Tnp_P5
MRIVAVGIDLGKTVFHLVAMGERNRVLVRRKFSRQQLLAYTANLEPTLIGTEACAGAHFLATALCAQGHDVRLMAAQFVKPYRKSNKSDFLDAETIADAVQKENMRFVPVKTDEQLDLQAMHRVRTRLVQRRTALINEIRGFLLERGIIFPAKPIHLRKQLPGVLEDATQNLTPRLRWLLSELAEEWKELEARIIAISDAIERISTSDPLCQRLRQIPGFGPLVSTATVAAIGNGSSFRKGRDFAAWLGVVPRQYSTGGKTALYGMSKRGNRYLRQLLIHGARAVLIRVKYDTAGLGQWIHKLAERAPRNKVIVAIANKLARIAWAVLAKGEPYRHQPLAAAA

SEQ ID NO: 10775 - protein, 315 aa, unidentified
  source 1..315: note = protein_0afe3f8
  REGION 12..162: note = RuvC_domain
  SITE 15: note = RuvC_P1
  SITE 57: note = RuvC_P2
  SITE 97: note = RuvC_P3
  SITE 99: note = RuvC_P4
  SITE 102: note = RuvC_P5
  REGION 192..276: note = Tnp_domain
  SITE 200: note = Tnp_P1
  SITE 229: note = Tnp_P2
  SITE 237: note = Tnp_P3
  SITE 238: note = Tnp_P4
  SITE 250: note = Tnp_P5
MAMPVSVLMPIVGVDVAKNELVIFQAELDLLETIPNNKTAIKQWLKGLPGAVEVAIESTNIYHLEFADLAHEAGCTIYMVDGYELSHYRKGVKIRAKTDALDAKLLARYLKNEHEELHPWIPPSPLYRRLLSLFRRRSALVQARVGLVQSWSNEPLLKTAFAAQVASMQKLEVLVEKMINDHLKEAGLLAQLKRCMKVEGIGFLTGARLIAAFQRGDFRNADAFIAFLGMDLRVSKSGQKDGRRSLTKRGDPEARRLLHNAAMSASRTSTWNGFYQEQRDRGFSTTQALVILARKLARIVFALLKGQSEYQPKAG

SEQ ID NO: 10776 - protein, 425 aa, unidentified
  source 1..425: note = protein_a71b931
  REGION 19..179: note = RuvC_domain
  SITE 22: note = RuvC_P1
  SITE 77: note = RuvC_P2
  SITE 118: note = RuvC_P3
  SITE 120: note = RuvC_P4
  SITE 123: note = RuvC_P5
  REGION 286..372: note = Tnp_domain
  SITE 294: note = Tnp_P1
  SITE 324: note = Tnp_P2
  SITE 332: note = Tnp_P3
  SITE 333: note = Tnp_P4
  SITE 345: note = Tnp_P5
MNYKQNEKINQVKESTLVVGIDIGSTTQYARAFDWRGIELGKVFTFSNSREGFEAFKAWMQHLQDKYRKSDVIVGIEPTGHYWFDLGAYLEDEGILLVMVNPYAVKQTKELDDNSQSKNDRKDPKVIAKLVTEGRYSAPYTPDGVYADLRIMVANRKRLIREMTQIKNRFARWFAIYFPEYTDVFGDYEAQSSMLLLKKVCTPEAIVELGAEKINQIWRDAKLRAVGMKRATTLCETAKRSIGLKKGSSAARYEMKLLLEDYEYKKAQLDAVMEEIEKLCRKIPESEQMLAIKGIGVITVAGFLAEVGDVRRFESPRQIQKLAGLSLRENSSGKHKGQTTISKRGRSKLRAVLFNAAIPLIAKNPEFKSLHEYYTTRANNPLKKKQSVIAISCKLIRVFYAILAKGVTYDAQKLISDIHRQPQVA

SEQ ID NO: 10777 - protein, 332 aa, unidentified
  source 1..332: note = protein_925eece
  REGION 7..162: note = RuvC_domain
  SITE 10: note = RuvC_P1
  SITE 62: note = RuvC_P2
  SITE 100: note = RuvC_P3
  SITE 102: note = RuvC_P4
  SITE 105: note = RuvC_P5
  REGION 205..293: note = Tnp_domain
  SITE 213: note = Tnp_P1
  SITE 243: note = Tnp_P2
  SITE 251: note = Tnp_P3
  SITE 252: note = Tnp_P4
  SITE 265: note = Tnp_P5
MEDFYFIGVDVSKKKLDFCVMFEGKVVCEEKTANHQSAIMSLIYHLQEDYEIAGSRMLICAEHTGQYTFPLACACKAMECRLWLENPTEIKYSSGVQRGKNDKVDAKRIAIYARRFQDKVHYYERPTEDIERLKQLESERTLYVSDLAKYKAQLKDQKDYMPKTLFERKMKRLQALMDDLIEAINAITDEMEEVISACPVLSRQMELLMSVDGVGRVVATNMIIVTEAFTRFDDSRKFNCYAGVAPFSYSSGSSQHSKSKVSHRADKTIKRLLHLAAVAITHKTGGELKMYYERKVAEGKNRMSVINALRAKIVSRMFAVIKRNEIYRPFFK

SEQ ID NO: 10778 - protein, 392 aa, unidentified
  source 1..392: note = protein_2ff6502
  REGION 4..157: note = RuvC_domain
  SITE 7: note = RuvC_P1
  SITE 56: note = RuvC_P2
  SITE 96: note = RuvC_P3
  SITE 98: note = RuvC_P4
  SITE 101: note = RuvC_P5
  REGION 262..349: note = Tnp_domain
  SITE 270: note = Tnp_P1
  SITE 300: note = Tnp_P2
  SITE 308: note = Tnp_P3
  SITE 309: note = Tnp_P4
  SITE 322: note = Tnp_P5
MRFVGIDIGAETHLVAAVDEAERVLMPPTKIGEDADGYQRLLERLGEPHDTLVAMEATGHYWTNLFAALAARGFAVALLNPLRTARFASEDLARTKTDAIDALGIARFAAQTRPAATRLPDRVTEELRELVRLRDRLVQDFGDRVRQRHRLVDLGFPEFTRYVRRLDSELAAAILHDYPTAAAFASVSVRRLAALRYDGRHRVDDELAQALLTAAARSVGRHHGEAYRIQVRYACEDLDLLRRRLRTLEGDIERMLDRHEVGSLLTTIDGVGPPTAARLVAELGDPASFRSAGALAAYVGVVPSRRQSGKRSATRAGLTSIGHAALRASLWMPVVTAVRKNPWLRAYYRRLRARGKLPKVALIAAMRKLLVAVYTVAKQRRPFVPALAEARP

SEQ ID NO: 10779 - protein, 366 aa, unidentified
  source 1..366: note = protein_72f8640
  REGION 25..173: note = RuvC_domain
  SITE 28: note = RuvC_P1
  SITE 77: note = RuvC_P2
  SITE 113: note = RuvC_P3
  SITE 115: note = RuvC_P4
  SITE 118: note = RuvC_P5
  REGION 242..328: note = Tnp_domain
  SITE 250: note = Tnp_P1
  SITE 281: note = Tnp_P2
  SITE 289: note = Tnp_P3
  SITE 290: note = Tnp_P4
  SITE 301: note = Tnp_P5
MPTLFGASERDDGFSMAAKKRHVTGGVDTHGKTHHAAAVDQTGRVLGDHEFPATAVGYQQLLAWLRGFGRVIKIGVEGTGTYGAGLARYLASRGVALVEIDRPDRRARRARGKSDPLDALAAARAALSGQANGTPKTRSGPVEAIRALRVARRGAVKARTAALNQMHGLIASAPDALRQDLTGAGAKLVDQRAALHADETRLTDPVEATKAALAVIAARIRHLTAEITQADRRLRPAVARTAPHLNAVYGVGTDVAGQLLTTAGDNPDRLRSEAALAHLCGAAPIPASSGRTDRHRLNRGGDRAANSALHTIALVRMRYDPRTRAYVDKRTKQGLSKKEIMRCLKRYIVREIHTALLADFTALNTP

SEQ ID NO: 10780 - protein, 428 aa, unidentified
  source 1..428: note = protein_76c3ed6
  REGION 20..181: note = RuvC_domain
  SITE 23: note = RuvC_P1
  SITE 79: note = RuvC_P2
  SITE 120: note = RuvC_P3
  SITE 122: note = RuvC_P4
  SITE 125: note = RuvC_P5
  REGION 288..377: note = Tnp_domain
  SITE 296: note = Tnp_P1
  SITE 326: note = Tnp_P2
  SITE 334: note = Tnp_P3
  SITE 335: note = Tnp_P4
  SITE 347: note = Tnp_P5
MKYNTQNAKIESITEKTLIVGIDVGSETHYARAFDWRNYEYSKKPLEFSNNEAGFVTFKVWMEELAEKYGKDVVIPGMEPTGHYWFNLGAYLQDNGMKPVHVNPHHVKKSKELDDNNPNKNDRKDPKTIAALVNEGRFSYPYIPTGVYAEIRSLSNLRLQAQEEITRIKNRIARWFSIYFPEIKDVYKNPGAVSGLMILKVAPLPKDIVKLGVDGVNQIWRDAKLRAAGLKRAKTLVTAAEHSIGSQEACDSARIELKILLNDYEIYHQREEELMELIEEKLSEVPYIDKLLEIKGIGMKTVSGFVAEVGDIKRFDNPKQLQKLAGYAIVECSSGKHKGESHISYRGRKRLRYVLYEAAISLIARNTEFKEIHRYYQTRGKNSLKKMQSVIAVACKALRIFYAILTKGVTYDGAKMLQDIKRPQLKVA

SEQ ID NO: 10781 - protein, 302 aa, unidentified
  source 1..302: note = protein_bae28b3
  REGION 3..112: note = RuvC_domain
  SITE 14: note = RuvC_P2
  SITE 52: note = RuvC_P3
  SITE 54: note = RuvC_P4
  SITE 57: note = RuvC_P5
  REGION 172..258: note = Tnp_domain
  SITE 180: note = Tnp_P1
  SITE 210: note = Tnp_P2
  SITE 218: note = Tnp_P3
  SITE 219: note = Tnp_P4
  SITE 231: note = Tnp_P5
MIRRRAPDAARVVFETGPLSVWFFHALTAEGLPGICIDARHAKAALDMAPNKTDANDADGLAQLAEVGFFREVRVKGFDSMLGRTLVAARNRLVQITTELSNQIRGLMKTFGLVVPAGKGSRFEAHVRALLADQEGLAPIMLPLLDAWRAVRVRAAELGRQLVASARQSEACQILMSVPGVGAVTATSFATAVEDPENFRRSRSVGAWLGLTTRRYQSGEVDYDGHISRRGDTHLRGLLYEAATVLLTRTSAESSLRTWGLKLQERIGFKRAAVAVARKLAVVMHAMLRSGQLFDRTAGVAA

SEQ ID NO: 10782 - protein, 309 aa, unidentified
  source 1..309: note = protein_91b5e6d
  REGION 5..153: note = RuvC_domain
  SITE 8: note = RuvC_P1
  SITE 52: note = RuvC_P2
  SITE 92: note = RuvC_P3
  SITE 94: note = RuvC_P4
  SITE 97: note = RuvC_P5
  REGION 186..270: note = Tnp_domain
  SITE 194: note = Tnp_P1
  SITE 223: note = Tnp_P2
  SITE 231: note = Tnp_P3
  SITE 232: note = Tnp_P4
  SITE 243: note = Tnp_P5
MSAYAGIDVSKATLQVALFPKADELCVPNTEEGLASIAEYLSAHQVERVLVEATGGYEKLSVKLLANAGFKIQRINPVRSRQFALAMGKRAKTDPIDAQMLAMFASSLEAKGFAKPDEEREVLLELVNLRNNLLQQRDDNRRRIKQAILPSVVDIYLALEASLKVQIKAVDQLVDAQARKVDSELLQRLHAVKGVGPVTIASLFCYLPELGDLSRGQIAALAGVAPYNNDSGSKVGKRQIYGGRTKLRRATYMCALVMVRYNADFKERYARLRAKGKCAKVALVACMRVLLIRLNAMVRDGTPWRDHAV

SEQ ID NO: 10783 - protein, 404 aa, unidentified
  source 1..404: note = protein_c8f536b
  REGION 4..157: note = RuvC_domain
  SITE 7: note = RuvC_P1
  SITE 56: note = RuvC_P2
  SITE 94: note = RuvC_P3
  SITE 96: note = RuvC_P4
  SITE 99: note = RuvC_P5
  REGION 265..351: note = Tnp_domain
  SITE 273: note = Tnp_P1
  SITE 304: note = Tnp_P2
  SITE 312: note = Tnp_P3
  SITE 313: note = Tnp_P4
MWYVGLDWADTHHDVEVLDEAGKRVGTRRFAHSHQGLNELIQFLLGIAAQPEHLACIVETNHGLLITFLLEAGIPVYPVNPKTANQLRKSAGAKTDQIDAHLLAKIGRLDLAELRRLEPDSPSVAELKTLTRDQDALIQTQTRLVNQLTACLKDYYPAALHLFAKLQQRSTLVFLQTYPTPQAAQVASLGEITATLRLGKHTNPTRLAPKIVEELHRPQLVASAAMIRAKSRLMLSLVKQLLVVLEDIASYDEAIAPLFLSHDDAELWSSLPRAGKRLAPRRLSEWGDDRARYVAAGSVQALAGTAPVPFQSGNYAKAHKRFACLKPLRNALHQFAWQSTRQEGWAREYYQRKRAEGKTHSMAGRSLANVWARIIYRMWVSKTAYQSATFEAAKMTHAPRQRVA

SEQ ID NO: 10784 - protein, 401 aa, unidentified
  source 1..401: note = protein_bb48fb1
  REGION 4..160: note = RuvC_domain
  SITE 7: note = RuvC_P1
  SITE 57: note = RuvC_P2
  SITE 97: note = RuvC_P3
  SITE 99: note = RuvC_P4
  SITE 102: note = RuvC_P5
  REGION 274..361: note = Tnp_domain
  SITE 282: note = Tnp_P1
  SITE 312: note = Tnp_P2
  SITE 320: note = Tnp_P3
  SITE 321: note = Tnp_P4
  SITE 334: note = Tnp_P5
MNCVGVDVSKGKSMIAVMRPLGELVIPPFEVAHNDAELRKLSRLLGDLDGETRVVMEATGNYHLPVASFLCDSGFYVSVVNAMLVHGYGNNSLRRAKTDKKDAIKLSNYGLDHWLALPKYIPEDEVRLMLKTTYRQYQQCAKVQTMLKNNLISLLDTAFPDVNRLFTSPARADGSEKWVDFVAAFPHCECVCGLSEKAFTAKYQKWCKKHGYNFSQDKALDIYASACGHFSVMPRTDTAKLLVDQAVSQLRAASAALAALRNEMQSLAASLPEYPVVMGMFGVGPALGPQLMAEIGDVRRFHSKKALVAFAGIDALPYQSGQMEVRSRSISKRGSSALRRTLFLVMSTILRRSPADEPVYQFMDKKRAEGKPYRVYMIASANKFLRIYYATVKRHLDSLEA

SEQ ID NO: 10785 - protein, 323 aa, unidentified
  source 1..323: note = protein_8f651e5
  REGION 9..154: note = RuvC_domain
  SITE 12: note = RuvC_P1
  SITE 56: note = RuvC_P2
  SITE 96: note = RuvC_P3
  SITE 98: note = RuvC_P4
  SITE 101: note = RuvC_P5
  REGION 191..276: note = Tnp_domain
  SITE 199: note = Tnp_P1
  SITE 228: note = Tnp_P2
  SITE 236: note = Tnp_P3
  SITE 237: note = Tnp_P4
  SITE 248: note = Tnp_P5
MAKHTTICAGIDTGKRKLDVALEGSREQLQVENTPAGHTVLLVWLRRHRVKRVGIEASGGYEQPVVAELRRKGFVVVVFQPAQVRAYAQFHSQRAKNDRIDAALIAACTAAVRKIHAAPDARLLPFAEQLTMIDQIGEDIARLKNRIESCRDAQIKRLWKEDIGRLEKRERVELKALIASIRKHPDLAKRLDLINSIDGIGPPTAVAILVRMPEIGQITREQAAALAGLAPYDDDSGEQVGTRHIEGGRQRLRRALYTAALAASFRWNSQLISLYQRLIAAGKEHKRALVACARKMLVFANTVVARGTPWQDRPPVKAALTTG

SEQ ID NO: 10786 - protein, 325 aa, unidentified
  source 1..325: note = protein_5308d2f
  REGION 34..127: note = RuvC_domain
  SITE 69: note = RuvC_P3
  SITE 71: note = RuvC_P4
  SITE 74: note = RuvC_P5
  REGION 193..282: note = Tnp_domain
  SITE 201: note = Tnp_P1
  SITE 231: note = Tnp_P2
  SITE 239: note = Tnp_P3
  SITE 240: note = Tnp_P4
  SITE 252: note = Tnp_P5
MAWTAMTRCSGAEITHVASGYRQTRPCRCRDRHGACASAHHWARELQARGYHVTLIAAQFVKPYVKSHKNDRVDAEAICEAMGRPNMRFVAVKTVAQQDVQAAHRIREELVHQRTAKANQIRGLIGENGLVAPVGIGQLRTALPRWLEDAGNGLTDTFRVLLAGLAEDLRHLDDRIATVTAGIEKQAKANPVTKHLMSLRGVGPLTASALAGALGDGQAFRCGRDFAASLGLTPRQHSTGGRDHLLGISKRGDSYLRKLLVHGARAVFRHVEHQEDGLSHWIRQLAERKHGNVAVAALANKTARIAWAITRHEAAYDPALAAHAA

SEQ ID NO: 10787 - protein, 319 aa, unidentified
  source 1..319: note = protein_84120da
  REGION 9..155: note = RuvC_domain
  SITE 12: note = RuvC_P1
  SITE 56: note = RuvC_P2
  SITE 96: note = RuvC_P3
  SITE 98: note = RuvC_P4
  SITE 101: note = RuvC_P5
  REGION 192..277: note = Tnp_domain
  SITE 200: note = Tnp_P1
  SITE 229: note = Tnp_P2
  SITE 237: note = Tnp_P3
  SITE 238: note = Tnp_P4
  SITE 249: note = Tnp_P5
MAQVDLIVVGIDVAKDKVDACIRAFKLRQSWPSTAQGQRKLVTWLRKHQVNKAVMEASGGYERAWAQVLRKADIEVRIVDPKRVRNFALSAGRLAKNDAIDAEMIAWFAETFSDAPSQKHDAAHEELQALVKARLDLIDARMRLANQSEHAASGLVQTAHARILKSLASELAKLEAAISAKIKSMPDFAERAEIVESVPGLAATSAANLVAGMPELGQVSDQIAAALIGAAPYDDDSGKRRGERHIKGGRRWVRNAIYMPCVGAATQNNPVLKAYYLRLIAKGKEPKVAIIACMRKLIVILNTMIARRQKWDPSRYALS

SEQ ID NO: 10788 - protein, 331 aa, unidentified
  source 1..331: note = protein_eb19d64
  REGION 8..160: note = RuvC_domain
  SITE 11: note = RuvC_P1
  SITE 62: note = RuvC_P2
  SITE 100: note = RuvC_P3
  SITE 102: note = RuvC_P4
  SITE 105: note = RuvC_P5
  REGION 204..291: note = Tnp_domain
  SITE 212: note = Tnp_P1
  SITE 242: note = Tnp_P2
  SITE 250: note = Tnp_P3
  SITE 251: note = Tnp_P4
  SITE 264: note = Tnp_P5
MDKFTQFIGIDISKEYFDASIYVEVSNYKHNQFANTKKGVLQFIKWMKGEGCLVDNTLICMEHTGIYKNILVRELQIKNCNIWVEMAYKIIRSSGIQRGKNDKVDSARIALYAKKNQEEAALFKASDQVIDKIQALLGQREMSIVHKTAMNVRTNELKDFNAELYKTLCANEKASLKALEEMIKLIDEQLDILLKENQEIKEIYDCVTSVVGIGPITAMFLICYTNRFTSFDEARQLASYCGVVPFEYTSGKCVKGKPKVHFMSNKKLKKLLHMCALSSIRHDPEMKSYYERKVGDGKHKMLVLNNVRNKLVQRICACVKDKKMYVMKQVA

SEQ ID NO: 10789 - protein, 345 aa, unidentified
  source 1..345: note = protein_bf7cbf4
  REGION 6..147: note = RuvC_domain
  SITE 9: note = RuvC_P1
  SITE 52: note = RuvC_P2
  SITE 87: note = RuvC_P3
  SITE 89: note = RuvC_P4
  SITE 92: note = RuvC_P5
  REGION 211..296: note = Tnp_domain
  SITE 219: note = Tnp_P1
  SITE 249: note = Tnp_P2
  SITE 257: note = Tnp_P3
  SITE 258: note = Tnp_P4
  SITE 270: note = Tnp_P5
MQIKSIGIDLGKTTFHLIALGERSQIVMRKKFSRSQLLEYRANLPSSLIGMEAGVGSHFLGRALREQGHQVRLIPAQFVRPFVKSNKNDYRDGEAIAEAVERENMRLVPLKTEDQLDLQALHRVRDRLVARRTSVINQIRAFLLERGISFRKGPATLRRQMPEILENADAKLSTAMRRLLDFLWQEWKSLQLQIESLNTELEQIASSDPSCVRLQQIPGVGPLVSTAVVSAIGNGAAFKKGREFAAWLGLVPRQWSTGGRAKLLGISKRGNPYLRRMFIHGARAAVLRVKREGSSLGTWMSGLETRTARNVVIVATANKLARISWAVLASGNDYQPRHKAAVFSN

SEQ ID NO: 10790 - protein, 342 aa, unidentified
  source 1..342: note = protein_ddd3523
  REGION 6..147: note = RuvC_domain
  SITE 9: note = RuvC_P1
  SITE 52: note = RuvC_P2
  SITE 87: note = RuvC_P3
  SITE 89: note = RuvC_P4
  SITE 92: note = RuvC_P5
  REGION 212..297: note = Tnp_domain
  SITE 220: note = Tnp_P1
  SITE 250: note = Tnp_P2
  SITE 258: note = Tnp_P3
  SITE 259: note = Tnp_P4
  SITE 271: note = Tnp_P5
MSIAVLGIDLGKNSCSLVGLDAGGRVVLRRRMRRETVLAFGAKLPPCVVAMEACCGAHHMGRVLAGQGHAVRLMSPEYVRPYVKAHKNDDRDAEAIAEAATRPTMRFVALKSEAQLDMQTLHRVRDQLVGERTALMNQIRAILLERGHIVPQGRAKLAACLADLLGDEAAPSLTPRIRALVADVRERWQFLDQRIAALDAEFADHVRTDESARRLTTIPGIGALNATALVAAIGDVATFARGRDLAAWLGLVPRQVTTGGRPKLLGITKRGSKYLRKMLIQGARAAMPTLRQSETQLGRWLRGLLARAHANTAVAALAAKMARIVWALLRHGRVYQATAVAV

SEQ ID NO: 10791 - protein, 331 aa, unidentified
  source 1..331: note = protein_820e43e
  REGION 5..154: note = RuvC_domain
  SITE 8: note = RuvC_P1
  SITE 55: note = RuvC_P2
  SITE 95: note = RuvC_P3
  SITE 97: note = RuvC_P4
  SITE 100: note = RuvC_P5
  REGION 198..283: note = Tnp_domain
  SITE 204: note = Tnp_P1
  SITE 234: note = Tnp_P2
  SITE 242: note = Tnp_P3
  SITE 243: note = Tnp_P4
  SITE 256: note = Tnp_P5
MGLYIGIDVGSRSCAMSWRDKGRVAGSWDIIQTPKGRKAAVKKLLSLKPVAVVMEATGVYYLDLAIELAAAGLPVSVINPKSFHNFAKLTLTTSKTDGIDAQLLAEYGERMTPRLWVAPTPIQLELRAIGRHINRLTCHRTRAKNELHALQATETSMALLIEDEEEAIAMFDKRIERFRVAGRELISTCPTLSAQFKHMIAAPGMGEVSVFAALAELTTLPTTLKSSQVSRHAGLDVRLTQSGTSINKPGRMSKAGNAYLRSAMFMPAMTAVRCDPYVKAFFEALVSRGKRKMQAICAVMRKYLTGLWACMRSGEDFDTAKLFSEKHFVKA

SEQ ID NO: 10792 - protein, 397 aa, unidentified
  source 1..397: note = protein_5ed1668
  REGION 5..158: note = RuvC_domain
  SITE 8: note = RuvC_P1
  SITE 59: note = RuvC_P2
  SITE 99: note = RuvC_P3
  SITE 101: note = RuvC_P4
  SITE 104: note = RuvC_P5
  REGION 264..354: note = Tnp_domain
  SITE 272: note = Tnp_P1
  SITE 302: note = Tnp_P2
  SITE 310: note = Tnp_P3
  SITE 311: note = Tnp_P4
  SITE 327: note = Tnp_P5
MSQVVGIDVGAYKHAAAICRSGERTATKRVFRYAATRPGFNELDLWLERQGAVDMVVMESSGHYWWPLASHLHRRGIPVAVVNPLEAKYFAKSRLQRSKSDPADARTLAALGMTEQPRTREPLLGAEVKEAARFCMRLVRDQANVCQRLTRLIEIGFPELKEAFEDPTCDTALAVLRQAPTARTAARRRLNTLADAIRPGGRRRLGESKARRIQELAKETIAPPEMDEQMAFEVGLLIQQYDLLAKQIELAETRVTQLLDSELAQRLQTIPGVGAATAATLIAEIGDIWRFSDFDQLAAYAGTHPREQSSGRHGEKPETSWRMAKTGNSYLRSALYRMAVVGIQHNPIIKEHYQRKRQQGKAPMNAIGHCMAKSLAIVWGVWRSGQSFDPNKGGRRP

SEQ ID NO: 10793 - protein, 398 aa, unidentified
  source 1..398: note = protein_631a6bb
  REGION 10..164: note = RuvC_domain
  SITE 13: note = RuvC_P1
  SITE 61: note = RuvC_P2
  SITE 101: note = RuvC_P3
  SITE 103: note = RuvC_P4
  SITE 106: note = RuvC_P5
  REGION 271..356: note = Tnp_domain
  SITE 279: note = Tnp_P1
  SITE 309: note = Tnp_P2
  SITE 317: note = Tnp_P3
  SITE 318: note = Tnp_P4
  SITE 330: note = Tnp_P5
MTRPEYAVFLGLDVGKEEHHACGLDPDGERVHDKPLPQDEAKLRALFDKLANRGRVLVVVDQPATIGALPVTVARDAGVDVAYLPGLAMRRIADLHPGNAKTDARDAYIIAEAARSMPHALRRVDVGDEALADLEVTVGYDDDLAAEVTRVTNRIRGLLTQIHPALERAIGGWLHHKAVLELLTRFGGPTGLRAAGRRRLTAVAKPRAPRIHTKIVDAVLAALDEQTVVVPGTTAAERVLPKLATQLAGLLAERADAARQVEEMLDAHPLSTVLTSMPGIGVRTGARILLEVGDGSAFPTPGHLAAYAGLTPVTRRSGSSIRGEHPNRGGNKKLKNAMFQAAFAALHDPASRTYYDRKRAQNKKHNAAIICLARRRCDVLYAMLRDGTPYTTKAPSAA

SEQ ID NO: 10794 - protein, 316 aa, unidentified
  source 1..316: note = protein_3ef40b8
  REGION 8..152: note = RuvC_domain
  SITE 11: note = RuvC_P1
  SITE 55: note = RuvC_P2
  SITE 95: note = RuvC_P3
  SITE 97: note = RuvC_P4
  SITE 100: note = RuvC_P5
  REGION 190..274: note = Tnp_domain
  SITE 198: note = Tnp_P1
  SITE 227: note = Tnp_P2
  SITE 235: note = Tnp_P3
  SITE 236: note = Tnp_P4
  SITE 247: note = Tnp_P5
MEGTPIFVGIDVSKAGLDVAVRPMGSREFVANDAAGIEILVERLRELQPALIVLEATGGVERAVTRALASAEFPVVVINPRQVRDFAKATGQLAKTDTIDAAVLARFGEAVRPALRPLPDEVTWELRAVVTRRRQLTEMIVAETNRLSGASKAVRKRINAHLRWLETELKRADKDLDQSIRQSPIWRENEDLLRSVPGMGPVISRTLLAELPELGRLNRKQIAALVGVAPLNRDSGTLRGRRSIWGGRATVRAALYMGALVASRRNAVIQTFYRRLRNAGKAPKIALVACMRKLLTILNAMIKHKTHWSEIISQTT

SEQ ID NO: 10795 - protein, 412 aa, unidentified
  source 1..412: note = protein_8bf32e3
  REGION 12..167: note = RuvC_domain
  SITE 15: note = RuvC_P1
  SITE 64: note = RuvC_P2
  SITE 104: note = RuvC_P3
  SITE 106: note = RuvC_P4
  SITE 109: note = RuvC_P5
  REGION 275..361: note = Tnp_domain
  SITE 283: note = Tnp_P1
  SITE 314: note = Tnp_P2
  SITE 322: note = Tnp_P3
  SITE 323: note = Tnp_P4
MSVALPPAQLFAGLDWAAEVHAVCVMDPAGTIVARFTIAHTADGIAMLIRRLAKLAEPGDVQVGIERPNGRLVDLLLQAGHPVVPVSPNAIKSWRDGEVLSGAKSDAGDAAVIAEYLRLRQHRLRVATPYSDDTRALRTVVRTRTDLVDMRVAATNQLAALLDDHWPGAKAVFADVESPISLEFLTRYPTPNSAKHLGEKRMQAFLTKHGYSGRRPATQLLERLRSAPAGTSSDALTEALHDTVLALADVLKALNTAVKNLDRSATAHLGEHPDGEIFTSLPRSGQINAAQILAEWGDCRQAYETPDSVAALAGCTPVTKESGKHRAVHFRWACNKRFRVALTTFADNSRHASPWAAHIYNQARASGKDHPHAVRVLARAWIRIIWRCWHDGVPYDPAKHGAAAALINPVAA

SEQ ID NO: 10796 - protein, 316 aa, unidentified
  source 1..316: note = protein_d4133d3
  REGION 8..154: note = RuvC_domain
  SITE 11: note = RuvC_P1
  SITE 55: note = RuvC_P2
  SITE 95: note = RuvC_P3
  SITE 97: note = RuvC_P4
  SITE 100: note = RuvC_P5
  REGION 190..274: note = Tnp_domain
  SITE 198: note = Tnp_P1
  SITE 227: note = Tnp_P2
  SITE 235: note = Tnp_P3
  SITE 236: note = Tnp_P4
  SITE 247: note = Tnp_P5
MQTPLVFVGIDVSKVRLDVAVRPSGEQNSMTYDATGITTLIAQLTQGQPIRIVVEATGGLERPLLRALVAAALPVIVVNPRQVRDFAKATGQLAKTDTLDAQVLARFAEVIQPALRVIPDAQTQELAALLARRRQVLAMQGAEQHRLNRAPDRVRKRIEAHLRWLRAERVRLDEDLDDLIQQSPVWRAREGLLQSVPGVGPVMSRTVLAELPELGRLNREQIVALVGVAPFNRDSGRLRGHRTIWGGRAPVRRALYMAALVATRWNPVIHRFYQRLRAAGKAPKVALVAAMRKLLTMLNGMVHAGTPWQPVVAREA

SEQ ID NO: 10797 - protein, 392 aa, unidentified
  source 1..392: note = protein_e126368
  REGION 5..163: note = RuvC_domain
  SITE 8: note = RuvC_P1
  SITE 62: note = RuvC_P2
  SITE 102: note = RuvC_P3
  SITE 104: note = RuvC_P4
  SITE 107: note = RuvC_P5
  REGION 267..356: note = Tnp_domain
  SITE 275: note = Tnp_P1
  SITE 305: note = Tnp_P2
  SITE 313: note = Tnp_P3
  SITE 314: note = Tnp_P4
  SITE 327: note = Tnp_P5
MEPVVGVDVAKGFSVVQAFLKRNEPYGKMISISHGEGGFKYLGEVLAELQTKTMQPPVVILEATGHYHRGLATYLERNGWTYFIVNPLQAKRAKGTQLRKVKTDAADAWHLAEMYYRGDVTAHRTWDEAFRELQHVTRQHEFVTGMYVQAKLNMRALLDQVFPAYEKVFRDLFSVTSLNVLARCLEGQVENLHEVIQKGVGRSHSRKWMEAKVEQLEEALSDWSEQPRSHSQTFVLRGMVDLLLAFSEQLSELEKQINEMATSLPEVELVKSIPGIGDRLAAAIVAEIGDVRQFKEAKQLVAFAGLDPGIFSSGKFTASSSKITKRGSKRLRRALYLAVQCGIRGRTNPKIWDYYDKKRKEGKPYKVVVIACANKLLHHVYAILSKSQPYQS

SEQ ID NO: 10798 - protein, 341 aa, unidentified
  source 1..341: note = protein_a9fecfb
  REGION 6..148: note = RuvC_domain
  SITE 9: note = RuvC_P1
  SITE 52: note = RuvC_P2
  SITE 87: note = RuvC_P3
  SITE 89: note = RuvC_P4
  SITE 92: note = RuvC_P5
  REGION 211..300: note = Tnp_domain
  SITE 219: note = Tnp_P1
  SITE 249: note = Tnp_P2
  SITE 257: note = Tnp_P3
  SITE 258: note = Tnp_P4
  SITE 270: note = Tnp_P5
MNIKRVGIDLAKQVFQVHGVDVQEKAVLRKKLPRAQMLAYFQQLPPCLIGMEACGSAHYWGRELQKLGHTVKLMAPQFVKPYVKSNKNDANDAEAICEAVARPTMRFVAIKTIAQQDIQALHRIRSELVHQRTAKVNQIRGLLGEYGLVVGRRVDVLRTALPLLLEDAENSLTIDFRELLQGLQQDLITLDERVDEMDKKIKLLASSNVDAKRLQQIPGIGPITATALICAIGDGKQFKRGRDMAAWLGLTPRQHSSGGKDRLLGISKRGDAYLRTLLIHGARAVLRVAGEKDDPRSRWLQNLCDRRNKNIAAVALANKNARIVWALLTKKTDFLPEGKPA

SEQ ID NO: 10799 - protein, 424 aa, unidentified
  source 1..424: note = protein_5453d57
  REGION 4..157: note = RuvC_domain
  SITE 7: note = RuvC_P1
  SITE 59: note = RuvC_P2
  SITE 94: note = RuvC_P3
  SITE 96: note = RuvC_P4
  SITE 99: note = RuvC_P5
  REGION 285..371: note = Tnp_domain
  SITE 292: note = Tnp_P1
  SITE 323: note = Tnp_P2
  SITE 331: note = Tnp_P3
  SITE 332: note = Tnp_P4
  SITE 344: note = Tnp_P5
MLGVGIDWAESFHDVALGRPDNGIVEQFRIDHTAAGVGRLIARCLELETDPADVRVVLETRHGVLVEALTDAGFTVLPVNPDLVARRRGPAKKKDDAEDARICCLLALDQFLELRKLIPHGNLAGELRSIARDDERAARDQRRLLNRLRADLLATFPAALTIAGDDLGSPVMLKLLATWPTHAQLAGAGTDAIESFARSSRHGWPDRFAARVADALTVEQLPVRDYLIRAKATTISLTATQLLALREARKSWERRMAELLLGDTRYGRAKQPRNPDPGKAIPGGDIYLSFPGLGDILAARIAGEIGDHIEQFDTPNGLQCYAGTAPVTRRSGRSELVIARRLAHNRYLGTAVHQWAFCTLTTSTWAREFYDRKITAGKAHHSALRALANRWLEILWHCLTKGIRYDEAVHIRNRSKTLQTATAA

SEQ ID NO: 10800 - protein, 323 aa, unidentified
  source 1..323: note = protein_db5fbec
  REGION 5..151: note = RuvC_domain
  SITE 8: note = RuvC_P1
  SITE 52: note = RuvC_P2
  SITE 92: note = RuvC_P3
  SITE 94: note = RuvC_P4
  SITE 97: note = RuvC_P5
  REGION 196..284: note = Tnp_domain
  SITE 203: note = Tnp_P1
  SITE 235: note = Tnp_P2
  SITE 243: note = Tnp_P3
  SITE 244: note = Tnp_P4
  SITE 257: note = Tnp_P5
MKKFVGIDISKETFDIYFEQEDKGCHVKLHQTEEDYKVLLRLIGNDVICIMEATGNYHLKLANFLHQAGIKVIAENPLKIKRFSQMSLQRTKTDKADAKLIYEYGRLILSSIELHFWQPDKTDIGHLKQYDTVRHQLIKQRTALSNSEEALNALTHLNDEVTQVLSDMVAAINKAIKQLDKGMLKLVKEHHAETFYLVTSVPGVGPKTATMMICLTDGFKKFSHDQVKQFISYIGMSPRTFESGTSVKGRAHISKVGNSRMRSMLYMCSWTAKTKNDQCVALYERLTEKGKPEKVIKVAIAHKLIRQIFGVIKSGEPFSKEYA

SEQ ID NO: 10801 - protein, 339 aa, unidentified
  source 1..339: note = protein_4ec11f5
  REGION 6..148: note = RuvC_domain
  SITE 9: note = RuvC_P1
  SITE 52: note = RuvC_P2
  SITE 87: note = RuvC_P3
  SITE 89: note = RuvC_P4
  SITE 92: note = RuvC_P5
  REGION 212..299: note = Tnp_domain
  SITE 220: note = Tnp_P1
  SITE 250: note = Tnp_P2
  SITE 258: note = Tnp_P3
  SITE 259: note = Tnp_P4
  SITE 271: note = Tnp_P5
MKINRMGIDLAKSVFQLHGVDENEQVVVRRQLKRSQMQGYFHRQQPMLIGMEACGSAHYWARTLTAMGHTVKLIAPQHVKPYVKSNKNDRNDAEAICEAVSRPTMRFVAVKTIEQQDMQSIHRVRERLVKARNALTNEVRGLLAEYGIVISALGVSAVSKALPTIVSDAENGLSRKMRELLHGMYEELDALKKRIKQFDQQIQQHSQEDERVHRLMQIDGVGPITASAIVTAVGDAKQFRSGREMAAWLGIVPKQHSSGGRERLGGISKRGDKRLRTLVIHGARSVIKMSEKKDDRRSQWVNALAKRRNKNIATVALGNKNVRIMYAMLTRNVEYQRAA

SEQ ID NO: 10802 - protein, 322 aa, unidentified
  source 1..322: note = protein_3afc435
  REGION 8..155: note = RuvC_domain
  SITE 11: note = RuvC_P1
  SITE 60: note = RuvC_P2
  SITE 100: note = RuvC_P3
  SITE 102: note = RuvC_P4
  SITE 105: note = RuvC_P5
  REGION 195..281: note = Tnp_domain
  SITE 203: note = Tnp_P1
  SITE 233: note = Tnp_P2
  SITE 241: note = Tnp_P3
  SITE 242: note = Tnp_P4
  SITE 254: note = Tnp_P5
MTHPIIFVGIDVAKAKFDVALLSAEGKYRSKVFPNTPAGHRQLLDWLNKYEAQEAHLCMETTGAYGRNLARFLAQQQLLVSVVNPAQIHAFGKTELTRAKTDKADARLIARYCQMHRPAPWVPPAEEIITLQALVQRLEDLLALQTMESNRLESAEGPARKSVEAVLEFIQQQIQMVRLQIEIHIDKHPDLKNQQELLSSIPGIGDNTAATLLAFLSPLDRFHSAKQVVAYAGLNPRIRESGQWAGKTPIAKAGNALLRKALYLPAVVAKQHNPIIAAFCDRLLTRGKRPMQVVVAAMRRLLHMAFGVLKSGKPFDPNFGLA

SEQ ID NO: 10803 - protein, 317 aa, unidentified
  source 1..317: note = protein_7216473
  REGION 10..150: note = RuvC_domain
  SITE 13: note = RuvC_P1
  SITE 53: note = RuvC_P2
  SITE 93: note = RuvC_P3
  SITE 95: note = RuvC_P4
  SITE 98: note = RuvC_P5
  REGION 187..271: note = Tnp_domain
  SITE 195: note = Tnp_P1
  SITE 224: note = Tnp_P2
  SITE 232: note = Tnp_P3
  SITE 233: note = Tnp_P4
  SITE 245: note = Tnp_P5
MAMPARELDFGVDVAKASVQIDGEGLSLELSNTTRDLRTWLKRLPSQACFALEATSTFHLTFANLAHELGHAVYLIDGFRLSRYREGIGGRAKTDVLDAQLLRRYLSHEKQSLRLWTPPPAGYSEILKLLNLRERCVSARVMIEQSMAGVGVCKRELSETVRKMRALEALLGQRIEACARRYWAEQVTRCRQIEGVGPITSAALAAIYQRGSFRSSDAFVAFIGLDVQARDSGTQRGRRKLSKRGNAELRRLLYTAAMTACRSGTWKPYYQQLLARGLKKIQALVALSRKLARVAFTLMKNECDYQPEMRSGGCLAT

SEQ ID NO: 10804 - protein, 399 aa, unidentified
  source 1..399: note = protein_1990dee
  REGION 12..166: note = RuvC_domain
  SITE 15: note = RuvC_P1
  SITE 63: note = RuvC_P2
  SITE 103: note = RuvC_P3
  SITE 105: note = RuvC_P4
  SITE 108: note = RuvC_P5
  REGION 274..357: note = Tnp_domain
  SITE 281: note = Tnp_P1
  SITE 310: note = Tnp_P2
  SITE 318: note = Tnp_P3
  SITE 319: note = Tnp_P4
  SITE 331: note = Tnp_P5
MIKDYKSVEVFIGVDVGKSNHHAVALDKTGKKLLDKALPQDEAKLREIIDSLAGHGTLLLVVDQPATIGALPVAVAQAAGVMVGYLPGLAMRRIADLHPGEAKTDARDAAIIAEAARTMPHTLRSIDIADEQAAELSMLCGFDDDLTQQSTATSNRIRGLLTQIHPSLERVIGAHLDHPAMAELLAKYPTPDTLKKAGTKRVEALLKKYAPRAGARWAAEIFTALGEQTVVVSGTAGAAVVLPQLAAMLANLRTGRVEVLARVEALVEAHPLHVVLSSIPAVGIRTEARIITEVIGKEFVSAGHLASYAGLAPVTWRSGTSIRGDHPSRKGNKALKRALFLSAFAALKHPVSRAYYDRKRAEGKRHNQALIALARRRCDMIFAMLRDGTLYDEKVTKAA

SEQ ID NO: 10805 - protein, 304 aa, unidentified
  source 1..304: note = protein_4236b74
  REGION 7..160: note = RuvC_domain
  SITE 10: note = RuvC_P1
  SITE 62: note = RuvC_P2
  SITE 100: note = RuvC_P3
  SITE 102: note = RuvC_P4
  SITE 105: note = RuvC_P5
  REGION 205..293: note = Tnp_domain
  SITE 213: note = Tnp_P1
  SITE 243: note = Tnp_P2
  SITE 251: note = Tnp_P3
  SITE 252: note = Tnp_P4
  SITE 265: note = Tnp_P5
MDNFYFIGVDVSKKKLDFCVLFEGKVLREEQVSNHQQAVARLIGELKNDLEMDNEQFLICAEHTGQYTFPLVCACKSVECKLWLENPSQIKYSSGMQRGKNDKVDAKRIAIYASRFGDKVKYYDRPTEEIERLKQLERERALYVTDLAKYKGQMYDQKDFMPAALYRKKTKRMKGLIQELQAAIDAITAEMEKIIGSTEVLARQMELLMSIDGVGKVVALNVIIETEAFSRFDNPRKFCCHAGVAPFSYTSGSSQHSKNKVSHRANKNIKKLLHMAAVSVTHRKEGELKAYYMRKVKKERTKCR

SEQ ID NO: 10806 - protein, 370 aa, unidentified
  source 1..370: note = protein_4affdde
  REGION 4..163: note = RuvC_domain
  SITE 7: note = RuvC_P1
  SITE 60: note = RuvC_P2
  SITE 101: note = RuvC_P3
  SITE 103: note = RuvC_P4
  SITE 106: note = RuvC_P5
  REGION 266..311: note = Tnp_domain
  SITE 274: note = Tnp_P1
  SITE 304: note = Tnp_P2
MIYVGIDVAKDKHDCFITNSDGEVLFKAFTITNNLDGFNELHQKIASVMNDVTKVKVGLEATGHYSYNLLGYLIDKGLPTYVINPLHTNLYRKSLSLRQTKTDKVDARTIASMLISDVNLKSYSDIFYHNEELKSLTRYRFDKVKERAKLKTSVSRLVCILFPELEKLVPQLHMASIYAMLSEFPVQKQVANAHLTRLTNLLSESSKGRYDKETAITFRDAARASISSNMPAKSLELKHTIKLIQELDSEIDEIENEIKIIMDEINSPILSIPGISYRMGAMIIAEIGDFSRFDSPDKILAYARLFRHQHINPDNWMVLTHIWKNVAPDTCDTLCIMPPSMSATGTQHLQPILLKNERKVSITMLPYHTL

SEQ ID NO: 10807 - protein, 333 aa, unidentified
  source 1..333: note = protein_db23f22
  REGION 7..160: note = RuvC_domain
  SITE 10: note = RuvC_P1
  SITE 65: note = RuvC_P2
  SITE 103: note = RuvC_P3
  SITE 105: note = RuvC_P4
  SITE 108: note = RuvC_P5
  REGION 204..291: note = Tnp_domain
  SITE 212: note = Tnp_P1
  SITE 242: note = Tnp_P2
  SITE 250: note = Tnp_P3
  SITE 251: note = Tnp_P4
  SITE 264: note = Tnp_P5
MEKKWFIGIDISKKTLDVVLYNSQKKHSDETNYRKFSNDEEGYKELLSWCRSKYISCSQLVVGMENTGVYGFDLRLFLESKKIDYCAFMPLDLKHSMGLIRGKNDKVDAERIAYYTYLHREELSYSKLSGSSILRLQELSVERKRFVKQRAEYEGLITEYQEKKTTATYTRAKQMKEVLDEEIAAVESEMKEVVAHDPALLHNYQLLLSIKGIGEVNAISTLIHTNNFKAFETARQYACYLGIAPFDHTSGTSIKGRPQVSHVGAKLLKADLSQAAKSAVVWDKELKSYYERKIKEGKEYGVVLNAVKFKLVCRMFAVVRRGTPFVDLMAYKN

SEQ ID NO: 10808 - protein, 320 aa, unidentified
  source 1..320: note = protein_0e8ba70
  REGION 8..163: note = RuvC_domain
  SITE 11: note = RuvC_P1
  SITE 56: note = RuvC_P2
  SITE 96: note = RuvC_P3
  SITE 98: note = RuvC_P4
  SITE 101: note = RuvC_P5
  REGION 195..279: note = Tnp_domain
  SITE 203: note = Tnp_P1
  SITE 232: note = Tnp_P2
  SITE 240: note = Tnp_P3
  SITE 241: note = Tnp_P4
  SITE 252: note = Tnp_P5
MSATLVVVGIDVAKAQVDVAVLGATLDAQRFGNEAEGHTALAAALAPLGVALVVMEATGGYEAALACALQAAGLAVAVVNPKQARDFAKSMGKLAKTDRIDARVLAEFAAVLVRRDDLAHFIRPLAPSEQRALAALVTRRRQLLTMLLGERQRLQLAMALVRPSIEAMIAAIRAQLDDVEAQMATHVREHFAELDQLLQSASGIGPVASATILAELPELGRLNRREIAALVGVAPTANDSGTSRGRRHVQGGRFEIRRVLYMATLSATRHNPSIKAFHDRLLAAGKFPKVALVACMRKLLTMLNAMVRHNKPWDQSLHNA

SEQ ID NO: 10809 - protein, 385 aa, unidentified
  source 1..385: note = protein_db86798
  REGION 4..159: note = RuvC_domain
  SITE 7: note = RuvC_P1
  SITE 58: note = RuvC_P2
  SITE 98: note = RuvC_P3
  SITE 100: note = RuvC_P4
  SITE 103: note = RuvC_P5
  REGION 262..349: note = Tnp_domain
  SITE 270: note = Tnp_P1
  SITE 300: note = Tnp_P2
  SITE 308: note = Tnp_P3
  SITE 309: note = Tnp_P4
  SITE 322: note = Tnp_P5
MIYVGIDIAKLNHFASVLSSDGKVLVEPFQFTNDNDGFCMLLSVLNQYDKDNLIVGLESTAHYGNNLVEFLVTRHFPVSVLNPIQTSCMRKNRIRKTKTDKVDTAIIAQTLMTQPFRRFTQYDLDLLHLKNLGRFRRKLMKQRTRNKIMLTSYLDQAFPELQYFFNGIHHKSVYAILKEAPSPDTIASMHMTHLAHLLASASHGRFKKDKAQEVRVLARKSVGSSDSSISIQITQTIEQIELLDSQIEDVESNMETIIRSMDSVIMTIPGISCLEAGMILGETGDVHRFSAPGKLLAFAGLDPSIHQSGNFNATHTRMSKRGSRYLRYALMYAAHNVVRNNAVFKQLYDKKRDAGLNHYGALGHCAGKLVRIIYKMLTDNVTFNL

SEQ ID NO: 10810 - protein, 343 aa, unidentified
  source 1..343: note = protein_f21d940
  REGION 7..149: note = RuvC_domain
  SITE 10: note = RuvC_P1
  SITE 53: note = RuvC_P2
  SITE 88: note = RuvC_P3
  SITE 90: note = RuvC_P4
  SITE 93: note = RuvC_P5
  REGION 212..296: note = Tnp_domain
  SITE 220: note = Tnp_P1
  SITE 250: note = Tnp_P2
  SITE 258: note = Tnp_P3
  SITE 259: note = Tnp_P4
  SITE 271: note = Tnp_P5
MEKIITIGLDLAKSVFQVHGIADDGSIVVRRALRRSQVLDFFRAIDPCLVGIEACASSHYWANAIGQLGHTVRMMPPTYVKAYVKRSKTDAADAEAICEAVSRPTMRFVPIKTPAEQAACMVLRTRELFVRQRSQTANAMRAHMAELGIIAAAGMTSIAKLILVLRDAEDTRLPVAARAALLEMAEQIEMLTARIEKLDTKIIATVKADETAWRLTSIPGVGPIIAATVRATIQDPTVFKTGRDLAAWIGITPRANSSGGKERLGRISKQGNKQLRTLLIVGATSILKQARRGVKLPSWIISLMARRPYKVVAVALANKIARTIWALLVKGGTYQAPAIMTRA

SEQ ID NO: 10811 - protein, 334 aa, unidentified
  source 1..334: note = protein_132b9dc
  REGION 7..148: note = RuvC_domain
  SITE 10: note = RuvC_P1
  SITE 53: note = RuvC_P2
  SITE 88: note = RuvC_P3
  SITE 90: note = RuvC_P4
  SITE 93: note = RuvC_P5
  REGION 208..295: note = Tnp_domain
  SITE 216: note = Tnp_P1
  SITE 246: note = Tnp_P2
  SITE 254: note = Tnp_P3
  SITE 255: note = Tnp_P4
  SITE 267: note = Tnp_P5
MEKVTTVGIDLAKRVFALHGVDGTGRVVLRRTVRREQLMEVVAALSPCLIGMETGGGAHDWARRFQQLGHTVHLMAAKFVSPYRRNGKNDGNDAEAICEAVSRPGMRFVPVKSAEQQAILTLHRVRQGFIVERTATINRIRGLLMEFGVALPLRSIVVRRQAREAAEVLPALARRAIEDLCAHLRDLDARIAAYDRELDQQARCSEAAQRLMKIRGVGPMSALAIVATVGNARDFRSGRQFAAWLGLTPHQHSSGGKARLGTITKRGDAYLRTLLILGARSVIHTAARHTDRMSRWVASIESRRGYQRTLVAIANKNARIAWALLSKNEELRLA

SEQ ID NO: 10812 - protein, 420 aa, unidentified
  source 1..420: note = protein_06111a6
  REGION 8..165: note = RuvC_domain
  SITE 11: note = RuvC_P1
  SITE 64: note = RuvC_P2
  SITE 104: note = RuvC_P3
  SITE 106: note = RuvC_P4
  SITE 109: note = RuvC_P5
  REGION 278..372: note = Tnp_domain
  SITE 286: note = Tnp_P1
  SITE 316: note = Tnp_P2
  SITE 324: note = Tnp_P3
  SITE 325: note = Tnp_P4
  SITE 338: note = Tnp_P5
MKSFVPVAGVDVSKRFSDLCVLSPDNNVLLRQKIYHDMVSMKLAEKKLHEIELECGARPVVVMESTSHYHLILFQFFTDAGFEVVVVNPIQSGALKNINVRKVKNDRVDAYRIAMLHRLKVLRPSQIPTSSLRGLRLLTRQRSELKGDVARFKNRLTAYLDQIFPGYGEVFSDVGGSASRAVLHMSPTPEKLLNANESLLAKAICEAGNKGPKFGAEKAAKLREAAGSAQVIGVRSASNASLIKNVLDIIEGLLAAIQRIEGEIKELVTQDTRLDEDVKLLCSIPGIGFSSAVVIVAEMGDISLFRKPKQLAAYFGLDPGERQSGTFKGRKNKLSKRGSPQVRAALHMAAVSSVSRNRDGTYRNPVLAEYYERKCAEKPCKVARVAVMRKLSNIIYAVLRDRRPFELRTPQEHMALLAAA

SEQ ID NO: 10813 - protein, 339 aa, unidentified
  source 1..339: note = protein_1664766
  REGION 4..159: note = RuvC_domain
  SITE 7: note = RuvC_P1
  SITE 58: note = RuvC_P2
  SITE 98: note = RuvC_P3
  SITE 100: note = RuvC_P4
  SITE 103: note = RuvC_P5
  REGION 263..323: note = Tnp_domain
  SITE 271: note = Tnp_P1
  SITE 301: note = Tnp_P2
MIYVGIDIAKLNHFASVMDSDGEVLAEPFMFTNDFSGFQKLLDCISSFPRDELYIGMESTAHYAENLTSFLFTRDFNVCIINPIQTSALRKSNIRKTKTDSVDTYLIIKALSMNHFRLYTQRDYDSLQLKNLCRFRQKLMKARTRVKIQLVTYVDLLFPELQYFFKSGIHGKACYALLKEEPNPDKIASMHLTRLSNLLNKTSKGHFGKQHAIALKELAAQSVGIKNDTLSLQILQSINQIELFDSQLNEVEGSINEIMDKLDSVIKTIPGIGSLNGAMIIGEIGDISRFEKPCQLLAYAGLDPSVTSQETFQHPGQGCPREAPEYSDTLSSMLHGRQH

SEQ ID NO: 10814 - protein, 344 aa, unidentified
  source 1..344: note = protein_a3fac09
  REGION 7..149: note = RuvC_domain
  SITE 10: note = RuvC_P1
  SITE 53: note = RuvC_P2
  SITE 88: note = RuvC_P3
  SITE 90: note = RuvC_P4
  SITE 93: note = RuvC_P5
  REGION 213..298: note = Tnp_domain
  SITE 221: note = Tnp_P1
  SITE 251: note = Tnp_P2
  SITE 259: note = Tnp_P3
  SITE 260: note = Tnp_P4
  SITE 272: note = Tnp_P5
MSKAITIGLDIAKHVFHAHGVDERGLTLFSKRISRGKVLEFFAAQPRCTVALEACGGAHHWARQLIQLGHEVRLIPPAYVKPFVKRQKNDAIDAEAICEAAQRPSMRFVAVKSEEQQAAGLVFRTRDLLVRQRTQLINAVRGHLTEYGWVAPKGPSHVAMLGGLIEEEEMANSLPEAARAMFRLMLDQLAGLNGKITDLDKEIAQRARQDEVSRRLMTIPGIGPISATAIAALAPPAETFTKGRDFAAWLGLTPVQRSTGGKQKLGGTSKMGERTLRRLLIIGSSAVVQQASKRGAPRGSWLEQMLARKPRMLVTVALANKMARIVWALLVKRENYRAPAAARA

SEQ ID NO: 10815 - protein, 381 aa, unidentified
  source 1..381: note = protein_5807b0f
  REGION 1..152: note = RuvC_domain
  SITE 2: note = RuvC_P1
  SITE 50: note = RuvC_P2
  SITE 91: note = RuvC_P3
  SITE 93: note = RuvC_P4
  SITE 96: note = RuvC_P5
  REGION 214..299: note = Tnp_domain
  SITE 222: note = Tnp_P1
  SITE 252: note = Tnp_P2
  SITE 260: note = Tnp_P3
  SITE 261: note = Tnp_P4
  SITE 272: note = Tnp_P5
MDPHKRSVTIEVMAADETILGGGRFDTDAAGYRSLVRYARQWPERIWAIEGCQGIGKHVAMRLLADEEAVVDVPPKMSARARVFATGHGRKTDATDAHSVALVGTRMSGLRPVINDEQLAILRILVDRRRSLGEDHTRMVSQLHQLLLELIPGGAKKDLSAAQAKALLAKVRPRDVAGKTRRRVAAELIADLERIYARKKAANKELTALVEATGTSLLDLHGIGPSGAARLLVEVGDITRFPNKAHFASWNGTAPIDPSSGDQVRHRLSRKGNRQINRVLHIMATVQLRHDTEGRAYFDRRKAAGKTSNEAMRSLKRRLSDIVYRYMVDDAAKHAVTGPGGHIGNVSDSSATGSQPSTGSSDQSLPGPATTKPKPAPPAAS

SEQ ID NO: 10816 - protein, 305 aa, unidentified
  source 1..305: note = protein_133d458
  REGION 4..111: note = RuvC_domain
  SITE 16: note = RuvC_P2
  SITE 51: note = RuvC_P3
  SITE 53: note = RuvC_P4
  SITE 56: note = RuvC_P5
  REGION 176..259: note = Tnp_domain
  SITE 183: note = Tnp_P1
  SITE 213: note = Tnp_P2
  SITE 221: note = Tnp_P3
  SITE 222: note = Tnp_P4
  SITE 234: note = Tnp_P5
MLPFFAAQPRCLVALEACGSSHHWARELAQLGHDVRLIPPAYVKPFVKRQKNDAADAEAICEAARRPNMRFVAVKSEEQQASGLVFRTRDLLVRQRTQTINAIRGHLAEYGWVAPRGPSWMSMLGELVDNDLGASLPPVARDMFRAMLGLLDELDCRIAELDKEIARPACEDEVVCRLMTIPGIGPIAATAIAALAPAMETFRRGRDFAAWLGLTPKQNSTGGKTKLGRISKMGERTLRRLLIIGASAVVQHASRRGAPEGSWLAGMLTRKPRMLVSVAQANKTARIIWAVLTTKQDYRARVVSG

SEQ ID NO: 10817 - protein, 401 aa, unidentified
  source 1..401: note = protein_f30137a
  REGION 11..166: note = RuvC_domain
  SITE 14: note = RuvC_P1
  SITE 63: note = RuvC_P2
  SITE 103: note = RuvC_P3
  SITE 105: note = RuvC_P4
  SITE 108: note = RuvC_P5
  REGION 273..358: note = Tnp_domain
  SITE 281: note = Tnp_P1
  SITE 311: note = Tnp_P2
  SITE 319: note = Tnp_P3
  SITE 320: note = Tnp_P4
  SITE 332: note = Tnp_P5
MIDIRDVAVFLGLDVGKGEHHATGLMPDGRSVVDKPLPNSEPKIRAMLDKLTAKYGRVLVVVDQPASIGALPLAIARDAGCEVAYLPGLTMRRIADLYPGEGKTDARDAAIIADAARTMPHTLRSIELTDETIAELHMIVGFDDDLAGEVTRVANRLRGLLTQIHPHLERVLGPRIQHPAVLTLLEQFGSPKAIRKAGGRRLITLLRPKAPRMAQRLVEDIFTALDEQTVVVTGTDAAAVIVPKLAKNLAGLLDQRKELASDIEELLKSHPLSELLTSMPGIGVRTGARILIDVGDGTAFPTAGHLAAYAGLAPVTRRSGSSIRGESPSRRGNKHLKRAFFLAAFASLSDPSSRAYYERKKAEGKRHKQALMCLARRRVDVLFAMLRDGTFFEPQATPQAA

SEQ ID NO: 10818 - protein, 318 aa, unidentified
  source 1..318: note = protein_773ee7a
  REGION 7..155: note = RuvC_domain
  SITE 10: note = RuvC_P1
  SITE 54: note = RuvC_P2
  SITE 94: note = RuvC_P3
  SITE 96: note = RuvC_P4
  SITE 99: note = RuvC_P5
  REGION 193..277: note = Tnp_domain
  SITE 201: note = Tnp_P1
  SITE 230: note = Tnp_P2
  SITE 238: note = Tnp_P3
  SITE 239: note = Tnp_P4
  SITE 250: note = Tnp_P5
MFKSVCIGIDVAKAHVDVAMDVGGAVQRHANDVDGHTAVVAALSKDAVALIVMEATGGYEAELACALQAAGLPVAVINPRQARDFAKAMGHLAKTDRLDAAILAALAAVIARRPDAMRFVRPLPDAERQRLIALVARRRQLLSMLTSERLRLATAHPAVRASINAAIEAIRKLLDDADSELVRHVDEHHAAAEALLRSVSGIGPTTAATLIAELPELGRLNRRQISALVGVAPMNRDSGQKRGPRTIQGGRAQVRHTLYMATLTAAHHNPVIRNFYKRLVTAGKLKKVALVACMRKLLTILNAMVRDSASFNPNYAKT

SEQ ID NO: 10819 - protein, 358 aa, unidentified
  source 1..358: note = protein_430258d
  REGION 12..158: note = RuvC_domain
  SITE 15: note = RuvC_P1
  SITE 64: note = RuvC_P2
  SITE 100: note = RuvC_P3
  SITE 102: note = RuvC_P4
  SITE 105: note = RuvC_P5
  REGION 232..316: note = Tnp_domain
  SITE 238: note = Tnp_P1
  SITE 269: note = Tnp_P2
  SITE 277: note = Tnp_P3
  SITE 278: note = Tnp_P4
  SITE 289: note = Tnp_P5
MDRERPLPCVVGGVDTHKDLHVAAVVDDHDHLLDTQSFATTRHGYRQMIAWMRSFGNLRRIGIECTGSYGAGLLRFVQKAGIEVLEVTTPDKSDRRRRGKNDDLDAQNAAHAAFAGKRTMTPRSRDGMVEALRVLMACRKTAVSARRVALQMIQNTIVCAPDGLRDDLRKMTRMQLVRTLAAWRPDLTGYREISTAYRIALKSLARRYLELHDEIADLDTMITAIVADLAPDLTARNSIGHIGAAQLLLTAGDNPERMKAEASFAALCGVSPVPASSGKTIRHRLNRGGDRRANSALHIIAIGRLRTDQRTKDYVARRIAAGHSKLEALRSLKRDIAREVFGVIMRRQKEVNQGQIAA

SEQ ID NO: 10820 - protein, 397 aa, unidentified
  source 1..397: note = protein_bf4524a
  REGION 9..163: note = RuvC_domain
  SITE 12: note = RuvC_P1
  SITE 60: note = RuvC_P2
  SITE 100: note = RuvC_P3
  SITE 102: note = RuvC_P4
  SITE 105: note = RuvC_P5
  REGION 270..355: note = Tnp_domain
  SITE 278: note = Tnp_P1
  SITE 308: note = Tnp_P2
  SITE 316: note = Tnp_P3
  SITE 317: note = Tnp_P4
  SITE 329: note = Tnp_P5
MTQPYAVFCGVDVGKGEHHAVGLDPAGKRLFDKALPNDESRLRAVFDKLATHGRLLIVVDQPNTIGALPVTVARACGHDVAYLPGLSMRRIADLYPGQAKTDARDAHIIADAARTMPHTLRRVDIGDETLTELGVLAGFDDDLAGEATRTSNRIRGLLTSVHPALERVLGPRIAHPAVLEILSRCGGPEGIRAAGRRKLTAIATKHAPRMGARLVEEILAALPTQTVTVPGMKAAETVLPKLADSLKAVLLQRKQIAADIEEMFADHPLAEVLTSMPGIGVRTGTRILLEVGDATAFASAAHLASYAGIAPITHRSGSSIRGEHPARSGNHKLKRALFLSAFAALHDPASRAYYDRKRAEGKKHNAALICLARRRCDVLYAMLHSKQPYRAPAASAA

SEQ ID NO: 10821 - protein, 342 aa, unidentified
  source 1..342: note = protein_ab635a9
  REGION 6..148: note = RuvC_domain
  SITE 9: note = RuvC_P1
  SITE 52: note = RuvC_P2
  SITE 87: note = RuvC_P3
  SITE 89: note = RuvC_P4
  SITE 92: note = RuvC_P5
  REGION 211..298: note = Tnp_domain
  SITE 219: note = Tnp_P1
  SITE 249: note = Tnp_P2
  SITE 257: note = Tnp_P3
  SITE 258: note = Tnp_P4
  SITE 270: note = Tnp_P5
MNITTAGIDLAKNVFQVHGVDERGKTVVRKRLRRNQVVAFFVRRPPCLVGMEACGGAHYWARKLQTQGHTVKLMSPQFVKPYVKANKTDAADAEAICEAVSRPNMRFVAIKNAEQQAILSLHRARQGFVRARTAQVNQIRGLLTEYGITLPQGISHVANRLPEIIEDAANELPSLFRDLLQRLLVHLRELNHQVQELEERIDAWHRANEASQKLAKIPGIGALTASALTASIGNAKSFKNGRELAAWLGLVPRQHSSGGKPLRLGISKRGDAYLRTLMIHGARSAVRVAERKSTPTDRWSTEMLDRRHMNVAAVARANKNARIVWALLVHGRDYKADYKLAG

SEQ ID NO: 10822 - protein, 342 aa, unidentified
  source 1..342: note = protein_a793e36
  REGION 5..152: note = RuvC_domain
  SITE 8: note = RuvC_P1
  SITE 55: note = RuvC_P2
  SITE 92: note = RuvC_P3
  SITE 94: note = RuvC_P4
  SITE 97: note = RuvC_P5
  REGION 212..300: note = Tnp_domain
  SITE 220: note = Tnp_P1
  SITE 250: note = Tnp_P2
  SITE 258: note = Tnp_P3
  SITE 259: note = Tnp_P4
  SITE 271: note = Tnp_P5
MDHYAGIDVSLERSSVCVVDATGRIIRETKVASEPEALVRFFRELGLPLTRVGLEAGPLSQWLHAGLTGAGLEAVLLETRHVKAALSAMIVKTDRKDARGIAQLLRMGWYRPVHRKSPDAQEARALLAGRKLLQAKLRDVELSIRGILRGFGLKVGEVSKGRFAARIGELIAGHEMLEAVTGAMLQAREGLRAEFVRLHRRMLAIVRGDAVCRRLMTVPGVGALVALTFKTAVDDPERFRRAKAVGAHFGLTPKRYQSGETDVSGGISKVGDASVRTALYEAANAMLTRVSGISALERWAMGVAKRRGMKRAKVALARKLAGVLHRMWANGADFRWGEEAVA

SEQ ID NO: 10823 - protein, 341 aa, unidentified
  source 1..341: note = protein_3e29542
  REGION 6..148: note = RuvC_domain
  SITE 9: note = RuvC_P1
  SITE 52: note = RuvC_P2
  SITE 87: note = RuvC_P3
  SITE 89: note = RuvC_P4
  SITE 92: note = RuvC_P5
  REGION 210..297: note = Tnp_domain
  SITE 218: note = Tnp_P1
  SITE 248: note = Tnp_P2
  SITE 256: note = Tnp_P3
  SITE 257: note = Tnp_P4
  SITE 269: note = Tnp_P5
MKDMMIGVDLAKSVFQLHGATMTGHVKFRKKLARGQFYRFMATQAPALVVMEACGSAHYWSRELVKLGHEVKLIAPQYVRPFVKRQKNDAADAEAIVIAARQPEMRFVSPKTADQQAQAILFRARERIVHQRTELMNALRAVLYEYGQTVPLGIGRVKRIAVIVEDVDIDLPELVRDECRDLLAQINEKTARIEEKTKRLIELSRQSDNARRLQTMPGVGPMIAMAVEAFAPAMENFQCGRNFAAWLGLVPRQFSSGGKERLGRASKAGQADIRRLLIIGAMTRVRWASLKPPVKGSWLARMLTRKPRMLVAIALANKMARRIWAMLMKQEDYRNQALVVA

SEQ ID NO: 10824 - protein, 408 aa, unidentified
  source 1..408: note = protein_eac1571
  REGION 6..162: note = RuvC_domain
  SITE 9: note = RuvC_P1
  SITE 59: note = RuvC_P2
  SITE 99: note = RuvC_P3
  SITE 101: note = RuvC_P4
  SITE 104: note = RuvC_P5
  REGION 269..356: note = Tnp_domain
  SITE 277: note = Tnp_P1
  SITE 309: note = Tnp_P2
  SITE 317: note = Tnp_P3
  SITE 318: note = Tnp_P4
MKRYYVGVDWSDEFHQVWVSDPEGKKVMEKKVLENVEGLAEFGRWLDESRAKGIELWAAIEKPAGRIVDFLLDHGVVVYPVNPKALDRVRDRFRMSQSKSDSFDAYVLAEFLRTDHAHLRALEPSSEQAQELKLLTRDHHRLGRHKTRILNLLGRTLKEYYPRPLEVFGDLESKIALDFLTKYPTPQALSNLNRRQWNRFAKREHHLAEARCKELWDNLHKPQLKVPEHVVRAKAQLLTVLVVQLKTLIQAVESYSERVKSFFASMPAAELVQSLPGGKSGTILPMLWAELGDAKSRWESFKHLQAEAGAVPVTRSSGKSSYVQFRFSCNKHMRYAAYWFAFVSLNRCEWANKYYRDQRARRKSHHQALRALGAKWLKIIFVMWRDHKPYDENYHLANITRQQMRQAA

SEQ ID NO: 10825 - protein, 345 aa, unidentified
  source 1..345: note = protein_c605eb6
  REGION 6..147: note = RuvC_domain
  SITE 9: note = RuvC_P1
  SITE 52: note = RuvC_P2
  SITE 87: note = RuvC_P3
  SITE 89: note = RuvC_P4
  SITE 92: note = RuvC_P5
  REGION 211..297: note = Tnp_domain
  SITE 219: note = Tnp_P1
  SITE 249: note = Tnp_P2
  SITE 257: note = Tnp_P3
  SITE 258: note = Tnp_P4
  SITE 270: note = Tnp_P5
MNVTTVGIDLAKCIFQIHGVDERGKPVLRKQLKRHQMVAFFANLPACLIGMEACASAHFWARKLQGLGHTVRLMAPQFVKPYVKTNKNDVADAEAICEAVARPNMRFVPVKNVDQQAVLALHRARQGFVRARTAQANQIRGLLGEFGLVVPRGITSIAQHVPQLIEDAGNELPGSFRLLMRRLIDHLKELERQVDEIETQIKAWHHASDASRRLAEIPGIGPITASALVASIGDAKSFSTARQLAAWLGLVPRQHSSGGKPTLLGITKRGDTYLRTLMVHGARAVVRYCANKDDAFSGWLQRLLTRRHKNVAVVAVANRNARIAWALLTQGTVFRSDYPPTAVAA

SEQ ID NO: 10826 - protein, 345 aa, unidentified
  source 1..345: note = protein_31c15e8
  REGION 5..152: note = RuvC_domain
  SITE 8: note = RuvC_P1
  SITE 55: note = RuvC_P2
  SITE 92: note = RuvC_P3
  SITE 94: note = RuvC_P4
  SITE 97: note = RuvC_P5
  REGION 212..300: note = Tnp_domain
  SITE 220: note = Tnp_P1
  SITE 250: note = Tnp_P2
  SITE 258: note = Tnp_P3
  SITE 259: note = Tnp_P4
  SITE 271: note = Tnp_P5
MKHYIGLDVSVKETAVCIVDDTGRICRELRVVSHPDDLLAVLKDPALNIERVGLEAGPLSQWLFEGLASAGLPVICIETRHVKAFLKAQPNKTDRNDARGIAQMMRVNLYRPVHVKTLTSQKRRALLTARKLLQGKAIAIENDIRGLLRNFGLKVGVVGTVKFEARIRDLVAGMPDLEEIMAPLLAARRKLREEFSHLHRKVLTITKDDKTCNRLTTIPGVGPITALAFTSTIDIPQRFRNSKAVGPILGLTPKLNESGESKRVGCVSLCGDAMMRTLLYEAAQVLLTRVTKWSWLKAWAMNVAKRRGLRKAIVALARRLAVIMHRMWLDGTEFRWTREASAAAV

SEQ ID NO: 10827 - protein, 318 aa, unidentified
  source 1..318: note = protein_dc397ae
  REGION 10..153: note = RuvC_domain
  SITE 13: note = RuvC_P1
  SITE 57: note = RuvC_P2
  SITE 97: note = RuvC_P3
  SITE 99: note = RuvC_P4
  SITE 102: note = RuvC_P5
  REGION 193..278: note = Tnp_domain
  SITE 201: note = Tnp_P1
  SITE 230: note = Tnp_P2
  SITE 238: note = Tnp_P3
  SITE 239: note = Tnp_P4
  SITE 250: note = Tnp_P5
MMAQNDLVVVGIDVAKDKVDACIRSLSLRQTSPGTVQGQRKLIAWLCKHRVSKAVMEASGGYERGWAKALRGAGIEVRIVDPKRVRSFAKSAGRLAKNDAIDAEMIAWFAETFCEAPGQTYDAAREELQKLVNARQGLLEIQTKIQNRDEHVAPAPVQKMHARLLKRVTTELARLEAAIAATIKATPHFAERAEIIESVPGLAGTTAANLIVGMPELGQVSNKIAPALLGAAPYDDDSGRRRGERHIKGGRRKVRNAFFMPCLGAATQHNAVLKSFYQRLLAKGKEKKVALIACMRKLIVILNTMLARGEKWDATRYA

SEQ ID NO: 10828 - protein, 406 aa, unidentified
  source 1..406: note = protein_75a1281
  REGION 6..164: note = RuvC_domain
  SITE 9: note = RuvC_P1
  SITE 59: note = RuvC_P2
  SITE 101: note = RuvC_P3
  SITE 103: note = RuvC_P4
  SITE 106: note = RuvC_P5
  REGION 278..363: note = Tnp_domain
  SITE 286: note = Tnp_P1
  SITE 316: note = Tnp_P2
  SITE 324: note = Tnp_P3
  SITE 325: note = Tnp_P4
  SITE 338: note = Tnp_P5
MSMNAVGIDVSKRKSTVAILRPGGEVVASPFDVPHLSGCFQPLIQHIRALNGQTRIVMECTGRYYEPVARQLSQAGFFVCAVNPQIIHGFQGQGNPLRRVKTDKADSIKIARYTLDNWANLKQYTLMDELRTQLKTMNRQFDFYMKHKTAMKNNLIGLIDLAYPGANTYFDSPAREDGSQKWVDFLDTYWHVDCVRKMSCNAFTLHYQKWCCRKKYNFSRLKAEEIYETAKELIPVLPKDDFTKRIIKQAIQQLNAASQTVEQLRILMNETAAKLPEYPIVMAMKGVGPSLGPQLMAEIGDVARFTHKGAITAFAGADPGVNDSGDYSQKSVHVSKHGSPALRKTLYQVMDVLIKTKPDDPVYLFMDKKRAQGKPYYVYMTAGANKFLRIYYGRVKEYLASLPASE

SEQ ID NO: 10829 - protein, 345 aa, unidentified
  source 1..345: note = protein_0f1cc2e
  REGION 14..165: note = RuvC_domain
  SITE 17: note = RuvC_P1
  SITE 65: note = RuvC_P2
  SITE 105: note = RuvC_P3
  SITE 107: note = RuvC_P4
  SITE 110: note = RuvC_P5
  REGION 206..293: note = Tnp_domain
  SITE 214: note = Tnp_P1
  SITE 244: note = Tnp_P2
  SITE 252: note = Tnp_P3
  SITE 253: note = Tnp_P4
  SITE 266: note = Tnp_P5
MNKLVSSSPSTVYCGIDVSASSLAVALIELDDCTGQREFANNASGHKALVVWLGKRNALVRVSLEATGVYSLDLALALDAAACIEVAVLNPKLVNRFAQTLRRSKTDAADALVLAEYSRRMPFTAWQRPGAGHLRLRTIGRYIESLVVEQAGLKNRLRTAQSTATTPRAVTVDLRQALSAVQRRVAKMRREAIKLVRNEAALWERFQLLVSVPGIAEISALQILSELVLLAPAMTVRQWVAYSGLDPVHQVSGTSVHKPSRISRAGNRHLRRALYMPTLAAVRCDPHMRAFHRALLERHKTGLQALMAVARKLLHAIYGIFKSSRPYNGRLLFPNLLLELESTAG

SEQ ID NO: 10830 - protein, 351 aa, unidentified
  source 1..351: note = protein_b28a58e
  REGION 6..147: note = RuvC_domain
  SITE 9: note = RuvC_P1
  SITE 52: note = RuvC_P2
  SITE 87: note = RuvC_P3
  SITE 89: note = RuvC_P4
  SITE 92: note = RuvC_P5
  REGION 211..295: note = Tnp_domain
  SITE 219: note = Tnp_P1
  SITE 249: note = Tnp_P2
  SITE 257: note = Tnp_P3
  SITE 258: note = Tnp_P4
  SITE 270: note = Tnp_P5
MDIAVLGIDLGKNVCSVVGLDGSGRVMLRRRVRREMLERLVDGLPRCVVAMEACCGAHHLGRVFGGQGHEVRLMSPEYVRPYVKAQKNDDRDAEAIAEAATRPTMRFVPVKSVAQSDVQALHRGRERLVAERTALINHLRALLLERGITVPQGRGKLAVELCTFADEDDSRLSPRIRLLIEDLRREWRTLDERIAGFDAEFAALAREDEAARRLMTIPGIGTINATALAAAVGDARTFGRGRDMAAWLGLTPRQRTTGGKPHLLGISKRGNRYLRKNLIHGARAVLPRLADQPTPLGRWARGLLARARRTSPSSPWPISWRGSSGRCLPMAGLTTRSLPRHEDPGTVRASQ

SEQ ID NO: 10831 - protein, 391 aa, unidentified
  source 1..391: note = protein_8597a62
  REGION 6..163: note = RuvC_domain
  SITE 9: note = RuvC_P1
  SITE 61: note = RuvC_P2
  SITE 102: note = RuvC_P3
  SITE 104: note = RuvC_P4
  SITE 107: note = RuvC_P5
  REGION 267..351: note = Tnp_domain
  SITE 273: note = Tnp_P1
  SITE 303: note = Tnp_P2
  SITE 311: note = Tnp_P3
  SITE 312: note = Tnp_P4
  SITE 324: note = Tnp_P5
MSQYFVGIDISKYKHDCCIINAADQSIVAKFTIQNDKDGFNELLTSLQSLSTPEDIRIGFESTAHYALNLELFLEKAHHSFMEVNPVLISEYKKSTSLRRTKTDSIDCESIARWLMTIEYKPHSKGFYHAYSLKSLTRLRDRLIRQRSFYLVKITNVLDHTFPEFKPFFQERFSKTALYLLENYGSAEKMARMNSASYDILRRISHGKFTPQKFIELKALAANTVGVNNSIFDTELTCLLTLYKEAAKQVSVLESQIIELIEEVHPHYMSIPGIGPISAAVIYAEYGDISNFSSPAQMLAFAGLEPGISESGTESHKGRMVKRGSSQLRYTLMNCALPLIRFDVTFATYYAKKRSEGKPHRVAISHVTKKLVRVIFALERQNTDFVATALR

SEQ ID NO: 10832 - protein, 335 aa, unidentified
  source 1..335: note = protein_ba7f880
  REGION 6..147: note = RuvC_domain
  SITE 9: note = RuvC_P1
  SITE 51: note = RuvC_P2
  SITE 86: note = RuvC_P3
  SITE 88: note = RuvC_P4
  SITE 91: note = RuvC_P5
  REGION 208..296: note = Tnp_domain
  SITE 216: note = Tnp_P1
  SITE 246: note = Tnp_P2
  SITE 254: note = Tnp_P3
  SITE 255: note = Tnp_P4
  SITE 267: note = Tnp_P5
MSLKLLAIDLGKRSFHCHGVDSDGVIISRKTSRSKLLETIKELAPETIAMEACASAHYWGRRFLADGHRVLLINPRFVKPFVKGSKNDAADAEGIYEAALRPTMRFVPVKSTEQQDLQSLHRTRDRITCTRTALINHMRGLLGEYGVILPQGAWRFLRQAHDAIAAAEVSDLTRELFTDMLDELRALDLRLDKLDRQLVALCRTNDACRRLSKLPGVGPVIATALVAAVDDGRHFRSGRELAAWIGLVPRQYTTGGKPRLGGIGRRANHYLRRQMIHGARSVMFRLAKHDDRRSQWLKGLTARRGFNRAIVALANKTSRIAWAVLARKEDYLAAA

SEQ ID NO: 10833 - protein, 346 aa, unidentified
  source 1..346: note = protein_6e30610
  REGION 7..149: note = RuvC_domain
  SITE 10: note = RuvC_P1
  SITE 53: note = RuvC_P2
  SITE 88: note = RuvC_P3
  SITE 90: note = RuvC_P4
  SITE 93: note = RuvC_P5
  REGION 212..297: note = Tnp_domain
  SITE 220: note = Tnp_P1
  SITE 250: note = Tnp_P2
  SITE 258: note = Tnp_P3
  SITE 259: note = Tnp_P4
  SITE 271: note = Tnp_P5
MQAISTIGLDLAKHVFQVHAVAADGTVLLRRQLRRSQLLIFFEKLPTCLVGMEACGGAHHWAREIAALGHHVRLMPPAYVKPYVKRGKTDAGDAEAICEAVTRPTMRFVPVKTAEQQAGAMVLKSRDLLVRQRSQAINALRAHLSELGIVTGIGVAKVTTLIAIVRDEDDARLPEAGRLALRMLGDQIEALTERIECLERAVVEQVRQDQDLRRLTTIPGVGPISAAALRALAPDPRAFVSGRHFSAWLGLTPRSHASGGKERLGRISKMGNGTIRTLLILGATAVLRHARAGSPAPAWVTALLARRPFRVAAVALANKTARIVWALLVRGGTYRKTGLQAAAVIG

SEQ ID NO: 10834 - protein, 338 aa, unidentified
  source 1..338: note = protein_6ec8205
  REGION 4..150: note = RuvC_domain
  SITE 7: note = RuvC_P1
  SITE 54: note = RuvC_P2
  SITE 90: note = RuvC_P3
  SITE 92: note = RuvC_P4
  SITE 95: note = RuvC_P5
  REGION 211..297: note = Tnp_domain
  SITE 219: note = Tnp_P1
  SITE 249: note = Tnp_P2
  SITE 257: note = Tnp_P3
  SITE 258: note = Tnp_P4
  SITE 270: note = Tnp_P5
MIHVGVDLHQRFCYMTALEARGKILQAGTVTNEKLALRRYFRQFRGKEVQVAVEACGFWPAFREVVEPEVKRLVLVHPQRVKAIASAKLKNDRVDSATLAHLLRCDLLPESWKADRGTQARRQQVRLRATLVRHRTRLKNQVHAVLHQQGLRSPVTDLFGKRGRLWLAEVKLPVQARESVNVCLRLLDGYSEEIQKQNLQLSEKAKQDKRAEWLMTIPGIGECSAMMLLAEIGDIGRFQDKEALCSYAGLVPRVRESAGKAARGGITRQGSPWMRWILVEAAQVATRCSPAAKRYYERLARKKHKHVARVALARKLLIAVYALLRDGVVFDEQKFATV

SEQ ID NO: 10835 - protein, 407 aa, unidentified
  source 1..407: note = protein_b51574b
  REGION 4..163: note = RuvC_domain
  SITE 7: note = RuvC_P1
  SITE 60: note = RuvC_P2
  SITE 100: note = RuvC_P3
  SITE 102: note = RuvC_P4
  SITE 105: note = RuvC_P5
  REGION 271..357: note = Tnp_domain
  SITE 279: note = Tnp_P1
  SITE 310: note = Tnp_P2
  SITE 318: note = Tnp_P3
  SITE 319: note = Tnp_P4
MLFVGDDWAEDHHDVELMNPAGKRMARARLPEGVDGIARFHALIAEHSGTDTHAADVVVGIETDRGPWVAALIAAGYSVFAVNPLQAARYRQRHAVSGAKSDPADAHVLADVVRTDSHQLRPVAADSAEVEALKVVARAHKTLIWERTRHVQRLRHALREYFPAALEAFDDLTAPDALELLGKAPDPVSAARLSLNQIRAALTRARRRDVEAKAARIQAVLRSEHLRRDAVIDTAYAATTRASVSVLITLREQITALQGQAEAHFGRHPDAEIVLSQPGMGVILGAGVLAEFGDAHDRYASAKARKNYAGTSPITRASGKKKIVAVRFVHNDRLIDALLRQAFSALTVSPGARAYYDKHRARGLEHQAALRQLANRLVGILHGCLKTRTVYDEAAAWSPHTEKATAA

SEQ ID NO: 10836 - protein, 422 aa, unidentified
  source 1..422: note = protein_25e93ee
  REGION 4..157: note = RuvC_domain
  SITE 7: note = RuvC_P1
  SITE 57: note = RuvC_P2
  SITE 94: note = RuvC_P3
  SITE 96: note = RuvC_P4
  SITE 99: note = RuvC_P5
  REGION 284..371: note = Tnp_domain
  SITE 292: note = Tnp_P1
  SITE 323: note = Tnp_P2
  SITE 331: note = Tnp_P3
  SITE 332: note = Tnp_P4
  SITE 344: note = Tnp_P5
MLGVGIDWAEEFHDVALGRHEEGVIEQFRIAHDPDGVARLIGRCLAHEPDPAEVRVVLETRHGLLVEALVDAGFSVIPVNPDLVARRRGPAKKKDDPEDARICCLLALDRHVALKQLIPHSAQAAELRAISRDDERAARDQRRLLNRLRADLQVTYPAALTLAGDDLGSPTMLRLLSTWPTNEQLAAATRDELVAFARAGKHGWPTRFADQVAAALAAEHLPVRDYLVRAKAGGIRLAAVQLLAVLEQRRAWERRMTELLLGGPRTGRDKTVKDSDPGNAIPGGEIYLSMPGLGDRLAARVAGEVGDHIEQFATPNALQCYAGAAPVTRRSGKSDFVVARRLAHNRYLGAAVHQWAFCSLSRSAWAREFYDAKIKAGKSHHAALRALGNRWLEVLWHCLHKNVRYDEAVHRTNRTKAVAPAA

SEQ ID NO: 10837 - protein, 341 aa, unidentified
  source 1..341: note = protein_b2c0861
  REGION 6..147: note = RuvC_domain
  SITE 9: note = RuvC_P1
  SITE 52: note = RuvC_P2
  SITE 87: note = RuvC_P3
  SITE 89: note = RuvC_P4
  SITE 92: note = RuvC_P5
  REGION 211..300: note = Tnp_domain
  SITE 219: note = Tnp_P1
  SITE 249: note = Tnp_P2
  SITE 257: note = Tnp_P3
  SITE 258: note = Tnp_P4
  SITE 270: note = Tnp_P5
MEIDILGIDLAKRVFQLHGADRRGQAMHRSKVSRPALMETIRQLRPRTIAMEACSSAHHWARQFQALGIEVQLISPHYVKPFVKTNKNDRNDAEAIVEAACRPSMNFVPVKSVEQQDIQAVHRVRELLVHQRTALINQARGLLAERGIIIAKSPAAFKRSIPDILSEPDGELTTFCQSLLTMLLEQFRVIENQIGRAEDWITSFMKNSALCQRLVTIPGVGAITATAIVAAVGDAKAFKNGRHLAAWIGLVPRQHSSGGKNRLLGISKRGDGYLRTLLIHGARSVLIRVACKSDARSRWLQELIARRGYNRATVALANKNARIIQAMLSHETNYCPAMVAA

SEQ ID NO: 10838 - protein, 396 aa, unidentified
  source 1..396: note = protein_87598ee
  REGION 4..158: note = RuvC_domain
  SITE 7: note = RuvC_P1
  SITE 59: note = RuvC_P2
  SITE 99: note = RuvC_P3
  SITE 101: note = RuvC_P4
  SITE 104: note = RuvC_P5
  REGION 264..354: note = Tnp_domain
  SITE 272: note = Tnp_P1
  SITE 302: note = Tnp_P2
  SITE 310: note = Tnp_P3
  SITE 311: note = Tnp_P4
  SITE 327: note = Tnp_P5
MTTIGIDIGGRTHVAARCRDGQARADREILRVSQNRAGFGVLDAWLARQAEPVTLVTMESSGHYWMPLASHLRHHDIPVAVVNPLAAKYFARSRLARTKSDPADARSLAEMAMRDTPAARDPLAGAELRQAARFAMTLVTEQAKVCQRLIRLVELGFPELGELFDDPTCRTAREVLRIAPTATAARRRRTSTLANANAGPGHRRLGQAKAERLQAAAADSIAVPELDAEVAFEVGLLLDQYDLLERQITDADRRVAGLLDGETARRLQTIPGVGPSIAATLISEIGDIGRFDDFDQLLAYAGVHPAERSSGTKGANPETSWHMSKAGNAHLRAAAYRMALVGLQHNPVIAAHYARKRAAGKSKMNALGHCMRKALSIVWGVWRNGTDFDPDWGVEA

SEQ ID NO: 10839 - protein, 340 aa, unidentified
  source 1..340: note = protein_3bdaba8
  REGION 6..147: note = RuvC_domain
  SITE 9: note = RuvC_P1
  SITE 52: note = RuvC_P2
  SITE 87: note = RuvC_P3
  SITE 89: note = RuvC_P4
  SITE 92: note = RuvC_P5
  REGION 211..298: note = Tnp_domain
  SITE 219: note = Tnp_P1
  SITE 249: note = Tnp_P2
  SITE 257: note = Tnp_P3
  SITE 258: note = Tnp_P4
  SITE 270: note = Tnp_P5
MQITTIGIDLAKNVFQVHGVDVRGKAVLKRQLKRSQMVTFFANLPACLIGMEACGSAHYWARKLQTLGHTVKLMAPQFVKPYVKTNKHDAADAEAICEAVSRPNMRFVPLKHVEQQAVLAQHRVRQGFVKARTAQANQIRGLLGEFGLVVPQGIVRLFELVPALLEQETDQLPGTFRELIHRLLDHLKELDRQVGELEAQIQAWHRANALSRKLERIPGIGPITASALVASIGDAKNFTNGRQLAAWLGLVPKQHSSGGKTNLQGISKRGDTYLRTLLIHGARAVIRHAEHKLQAHQWLHKLIARRNKNVAVVALANKNARIVWALLARDSEFRSDHAAA

SEQ ID NO: 10840 - protein, 414 aa, unidentified
  source 1..414: note = protein_a96fd79
  REGION 4..160: note = RuvC_domain
  SITE 7: note = RuvC_P1
  SITE 57: note = RuvC_P2
  SITE 97: note = RuvC_P3
  SITE 99: note = RuvC_P4
  SITE 102: note = RuvC_P5
  REGION 274..361: note = Tnp_domain
  SITE 282: note = Tnp_P1
  SITE 312: note = Tnp_P2
  SITE 320: note = Tnp_P3
  SITE 321: note = Tnp_P4
  SITE 334: note = Tnp_P5
MNAAGIDVSSRKSTIAVLRPFGEVVKVPFEVSHTAEGLASLARQLKAIDGETRVVMEHTGRYYESVANVLHESGLYVSAVNPLLIKEYGGNSLRKVKTDKADAMKIARYALDNWCDLRDYTPIDTVRYDLKTLNRQFQLASKQKTASSNNLIALLEQSFPGIRKCFEGPVRKDGTQKWVDFAHTFWHADCVRKLSLNAFAERYRKWCKRNRYQFSTEKTDEVYELAKSAVVLVSKTEVTKVLIKEAANQLTSISRSVETYRTEMNRLASQLPEYPVVMEMYGVGESFGPQLMAEIGDVRRFERKQSLVAFAGIDPMPNQSGEKNVRSNKSSKRGSPYLRKTLFNIMTVHLQRAPANEPVYQFLDTKRAGGKPYYVYMMAAANKFLRRYYAKVRDYLASLDSLPPVDMDSTGLNK

SEQ ID NO: 10841 - protein, 330 aa, unidentified
  source 1..330: note = protein_6bc5423
  REGION 8..160: note = RuvC_domain
  SITE 11: note = RuvC_P1
  SITE 59: note = RuvC_P2
  SITE 97: note = RuvC_P3
  SITE 99: note = RuvC_P4
  SITE 102: note = RuvC_P5
  REGION 202..289: note = Tnp_domain
  SITE 210: note = Tnp_P1
  SITE 240: note = Tnp_P2
  SITE 248: note = Tnp_P3
  SITE 249: note = Tnp_P4
  SITE 262: note = Tnp_P5
MKPWNVILGVDVSKKTIDICWAEQKLFLNVDNNSDGFSKFKKWCKDHGIDLYRTFIVLEYTGGYEYRFIQFCESHPIDYRRVPGLEIKKSQGIIRGKCDKADAFRIGRYGEEKIKRLEPSKRLDKHILELKTLLSFRKRLVREGAGYQSTVKERKHMYEVNDQDMIIEIAKDKIAANAQYIRQVEDQIMELIKNDEQMYLNYRIITSIKGIGQVNGWMTIAYTENFTSFPDARHYAVYVGVIPFEHSSGTSIRGRRRTSNLAQKELKQELNQAAKTAMQHDPEIRAYAERKMKNKEYGLVLNNVKFKLILRMFSLVKRGVKYVENYKRVA

SEQ ID NO: 10842 - protein, 341 aa, unidentified
  source 1..341: note = protein_84f8775
  REGION 7..149: note = RuvC_domain
  SITE 10: note = RuvC_P1
  SITE 53: note = RuvC_P2
  SITE 88: note = RuvC_P3
  SITE 90: note = RuvC_P4
  SITE 93: note = RuvC_P5
  REGION 211..297: note = Tnp_domain
  SITE 219: note = Tnp_P1
  SITE 249: note = Tnp_P2
  SITE 257: note = Tnp_P3
  SITE 258: note = Tnp_P4
  SITE 270: note = Tnp_P5
MGQASTIGLDIAKQVFQAHGADASGRVVFRKRLARAKVLEFFAGQVPCVVALEACGGAHHWAREIGKLGHTVRLIPPAYVKPFIKRQKNDVADAEAICEAAQRPSMRFVPVKSEAQQANALVFRTRDLLVRQRTQCINALRGHLTEYGHVVPKGTDQVDRLVALVEDAESALPKAGQAILQMLIKTLEALGKQIDDLDAEINRRAKADPVARRLMTIPGIGPIAATAITALVPAPEGFRAGRDFAAWLGLTPLQKSTGGKQKLGAISKMGERTIRRLLILGASSVVRWAVHRGATAGSWLAQMLARKPRMLVTTALANKTARIVWALLVKGGTYKAPAAAA

SEQ ID NO: 10843 - protein, 343 aa, unidentified
  source 1..343: note = protein_561aa9d
  REGION 7..149: note = RuvC_domain
  SITE 10: note = RuvC_P1
  SITE 53: note = RuvC_P2
  SITE 88: note = RuvC_P3
  SITE 90: note = RuvC_P4
  SITE 93: note = RuvC_P5
  REGION 212..297: note = Tnp_domain
  SITE 220: note = Tnp_P1
  SITE 250: note = Tnp_P2
  SITE 258: note = Tnp_P3
  SITE 259: note = Tnp_P4
  SITE 271: note = Tnp_P5
MSEVTTIGLDIAKNVFHAHGADARGRALFSRKISRTKLLEFFAQHPRCTVALEACGGAHHWGRELTGLGHDVKLIAPTYVKPFVKRHKNDAIDAEAICEAAQRPNMRFVAIKSEEQQASGLVFRTRDLLVRQRTQLINAIRGHLTEYGWVAPKGPSHVAMLGDLLEDEIGSSLPEAAKAMFRTMLDLLEELNDRIGDLDKEIARRAREDAIARQLMTIPGVGPITATAIAALAPPAETFAKGRDFAAWLGLAPRQLSTGGKQKLGSITKMGERTLRRLLIIGSSAVVLQASKRGAPAGSWLEQMLARKPRMLVTVALANKTARIIWALLMSEEDYRVPVATAA

SEQ ID NO: 10844 - protein, 407 aa, unidentified
  source 1..407: note = protein_1781545
  REGION 8..159: note = RuvC_domain
  SITE 11: note = RuvC_P1
  SITE 58: note = RuvC_P2
  SITE 98: note = RuvC_P3
  SITE 100: note = RuvC_P4
  SITE 103: note = RuvC_P5
  REGION 267..358: note = Tnp_domain
  SITE 275: note = Tnp_P1
  SITE 305: note = Tnp_P2
  SITE 313: note = Tnp_P3
  SITE 314: note = Tnp_P4
  SITE 326: note = Tnp_P5
MDLLKTVFGIDVSSRKSNVCIMVNGQKVDDYAISNDMVGFNQLLDDLKQVTKPQIIFEATGVYSRRLQAFLDMHELRYVMMNPLEAKRKTKDDLHQNKTDKLDALYLAKLQSEHPQRLAYVQSKEYQELMANNRIYEQASHDLITNRNRLHKAIQLTFPEIEHLMVNPRGKNYWSIVLRFPHPDIVLETKEADIIDFLKGLSGIGKKRANDIMQSLIRLAKVACPAVKKDSAHIRGLEMAINNILSAEEACQTALKEMTKLAPKRDLEILTSIPGIGENTALRIISELGDIRRFNNPSQLNAFVGVDPQVYESGNLTAHLSISKRGTAIGRKVLYLAINQIQSAKKAGNPSHIADYYEKRKRSSETASHKKAAIASIHKLLRTIFALIKNDQLYSYDVAKHNQRLLS

SEQ ID NO: 10845 - protein, 310 aa, unidentified
  source 1..310: note = protein_5e3059f
  REGION 5..146: note = RuvC_domain
  SITE 8: note = RuvC_P1
  SITE 51: note = RuvC_P2
  SITE 91: note = RuvC_P3
  SITE 93: note = RuvC_P4
  SITE 96: note = RuvC_P5
  REGION 187..271: note = Tnp_domain
  SITE 195: note = Tnp_P1
  SITE 224: note = Tnp_P2
  SITE 232: note = Tnp_P3
  SITE 233: note = Tnp_P4
  SITE 244: note = Tnp_P5
MQDTIGIDISKLILDALRLTTGEFRQFPNDKAGCAALIRWIGKTPMRIVFEPTGPYHRLLEQSLTQAGTAIVKVNPRYARRFAEATGELAKTDRIDAMLLARMAAVLDLQARPGRSEIHHDLRELSMARQALIKDRTAARNREQVAQNAIIRRQLEARLGQIEKQMGEIEKAMAAIVAADETLARRREILASIPGIGPVTAMAIIVEMPELGELDGKQAASLAGLAPITRESGGRKGRSRIQGGRASLRCGLYMPALVALRINPDLRRKYLALKEVGKPSKVAIAAIMRKLIVLTNALIRDNRKWSPNAT

SEQ ID NO: 10846 - protein, 314 aa, unidentified
  source 1..314: note = protein_3341e06
  REGION 7..151: note = RuvC_domain
  SITE 10: note = RuvC_P1
  SITE 53: note = RuvC_P2
  SITE 93: note = RuvC_P3
  SITE 95: note = RuvC_P4
  SITE 98: note = RuvC_P5
  REGION 189..273: note = Tnp_domain
  SITE 197: note = Tnp_P1
  SITE 226: note = Tnp_P2
  SITE 234: note = Tnp_P3
  SITE 235: note = Tnp_P4
  SITE 246: note = Tnp_P5
MSQPVFVGIDVAKDSVEVCCSDASTHAFENTEAGHAKLLRWLRRKTVTLVILEATGGYERACAVALAGVGLPVSVINPRQARDFARAMGRLAKTDRLDARALAEFAAVLHAQGHQPRALATQEQRELVALVTRRRQLVAMLVSERQRLAVAHERARASIEAMIEALLSQLADIDNDVQRVLQERYADLSALLQSVKGVGPTTASTLIAELPELGHLTRKQITSLAGLAPINRDSGTLRGQRHIFGGRSSVRRVLYVAALVATRFNPLIRSCYLRLIAAGKPKKVALVACMRKLLITLNAIARSGERWQPDFKGA

SEQ ID NO: 10847 - protein, 319 aa, unidentified
  source 1..319: note = protein_559617b
  REGION 4..157: note = RuvC_domain
  SITE 7: note = RuvC_P1
  SITE 55: note = RuvC_P2
  SITE 96: note = RuvC_P3
  SITE 98: note = RuvC_P4
  SITE 101: note = RuvC_P5
  REGION 219..281: note = Tnp_domain
  SITE 227: note = Tnp_P1
  SITE 257: note = Tnp_P2
  SITE 265: note = Tnp_P3
  SITE 266: note = Tnp_P4
MIVIGIDPHKSSLTAVAVDDTGHELAARRFVVNAGTFTQLISWAQRWPQHRFAVEGAKGLGRGIAQQLAATGAGVVDVPATLAARARLLTTGGGRKTDATDAASIARVGLHHHRLDPVQPEDQSTILRLLTEHRDDLTHERTRILNRLHGLLRDLVPGGAPTGLSADKTAAALRGVRPATATDSCRRDIARQLLAALRRIDAQLKANETELDHAVTAARSSLTELPGIGVIMAAKILGHVGNVTRFPNADHFASYTGAAPIDASSGPRKRHRLNTGATANSTPPCTSSPSSKPTTQTSDGPTTSANSAKVRHQPKPDAP

SEQ ID NO: 10848 - protein, 321 aa, unidentified
  source 1..321: note = protein_303407c
  REGION 15..129: note = RuvC_domain
  SITE 33: note = RuvC_P2
  SITE 68: note = RuvC_P3
  SITE 70: note = RuvC_P4
  SITE 73: note = RuvC_P5
  REGION 192..278: note = Tnp_domain
  SITE 200: note = Tnp_P1
  SITE 230: note = Tnp_P2
  SITE 238: note = Tnp_P3
  SITE 239: note = Tnp_P4
  SITE 251: note = Tnp_P5
MILRERLSFNVGSCELGCWHFFAKQPACLVGMEACGAAHHWSRELQKLGHRVKLMPPRYVKPYVKRQKNDAADAEAICEAVTRPNMRFVEIKSCEQQGVLVLHRVRLMLMRQRIALSNAIRGHMAEYGLVAPVGRNGLQRLAAIIADHGDDRLPAMARASLIVLVSQLQLVNEQVLEKDRRVRVTARSTEIGRRLVEVPGVGPLLASAMVASVPDPSAFRSGRDLAAWIGLVPRQNSSGGKEKLGSITKQGDRYLRQLLVVGALSVIRYAQQHGTRRPWLISLLARRSPKIAAVALANKMARMIWAMMMTAERYREPVTAA

SEQ ID NO: 10849 - protein, 348 aa, unidentified
  source 1..348: note = protein_a7a811b
  REGION 9..151: note = RuvC_domain
  SITE 12: note = RuvC_P1
  SITE 55: note = RuvC_P2
  SITE 90: note = RuvC_P3
  SITE 92: note = RuvC_P4
  SITE 95: note = RuvC_P5
  REGION 214..304: note = Tnp_domain
  SITE 222: note = Tnp_P1
  SITE 252: note = Tnp_P2
  SITE 260: note = Tnp_P3
  SITE 261: note = Tnp_P4
  SITE 273: note = Tnp_P5
MNATRKTVVGVDTAKSVFQVYTVVQETGEVINKPIKRAQFLQWFANRAPCLVGMEACGGSQHWARKLQELGHEVKLMSGKMVKAFVCGNKNDAADARAIYMATRQPEVKAVAVKTEGQQAVLAMHRIRQQLVKMRTAQINELRGLLGEYGEVFGTGRKAFETGMKGALERLAEGLPAPLIDTLRDQWSELARLDERIARIEASLRAWLREDRGARAIAEIPGVGLLTATAAVAAMGHAKAFRSGREFAAWIGLVPGQTGSGGKVRLLGMSKRGDTYLRTLLIHGARAVLQHAKTPGPWLQQLSQRRPPNVVIVALANKIARTIWAVLAHERAYDKDHVSMRPLAAAAT

SEQ ID NO: 10850 - protein, 319 aa, unidentified
  source 1..319: note = protein_23ac6c3
  REGION 9..151: note = RuvC_domain
  SITE 12: note = RuvC_P1
  SITE 56: note = RuvC_P2
  SITE 96: note = RuvC_P3
  SITE 98: note = RuvC_P4
  SITE 101: note = RuvC_P5
  REGION 192..277: note = Tnp_domain
  SITE 200: note = Tnp_P1
  SITE 229: note = Tnp_P2
  SITE 237: note = Tnp_P3
  SITE 238: note = Tnp_P4
  SITE 249: note = Tnp_P5
MAQNDLVVVGIDVAKDQVDACIRSLSLRQTCPSTAQGHRKLIAWLRKHKVNKAVMEASGGYERGWARVVREAGIEVRVVDPKRVRSFARSAGRLAKNDTIDAEMIAWFAETFSEAPSQTHDAAHEELLALVKARIGLVDLKMRLQSQSEHAAPVPAQKAHAGVLKTLADEIAKLEAVISARIKSAPHLAERAEIIESVPGFAQTTSANLVAGMPELGQVSNKIAAALLGAAPYDDDSGKRYGERHIKGGRRWVRNAIYMPCVGAATQNNSMLKAYYDRLIAKGKKPKVALVACMRKLIVILNTLIARRQKWDQSRYVLN

SEQ ID NO: 10851 - protein, 339 aa, unidentified
  source 1..339: note = protein_db375af
  REGION 6..147: note = RuvC_domain
  SITE 9: note = RuvC_P1
  SITE 52: note = RuvC_P2
  SITE 87: note = RuvC_P3
  SITE 89: note = RuvC_P4
  SITE 92: note = RuvC_P5
  REGION 211..300: note = Tnp_domain
  SITE 219: note = Tnp_P1
  SITE 249: note = Tnp_P2
  SITE 257: note = Tnp_P3
  SITE 258: note = Tnp_P4
  SITE 270: note = Tnp_P5
MQVTTVGLDLAKNIFHVHGVSQTGEVAFNRPLRRAQVLAFFERLSPCLIGIEACASSHHWGRELTKLGHTVRLMPPMYVKPYVKRGKSDAVDAEAICEAVTRPTMRFVEIKSEDQQALLSLHRARDFVVRQRTRLINMLRSLAAEFGVAIARGVTRAIDFAKGIIEGKQSGFPELAQDVLRVLSRQLVELHNRLRWYEITMRIQARLSRQAQLLQTIPGVGPVTASAVAATIGSGHQFKSGREFAAWLGLTPRNHSSGGKERLGKITKMGDRYLRQLIVVGMTSRVRQVTNHPERADPWLTKLLQRKPARLATVAMANKTARIMWAVLTRNEPYRPHTA

SEQ ID NO: 10852 - protein, 411 aa, unidentified
  source 1..411: note = protein_45d6faf
  REGION 5..164: note = RuvC_domain
  SITE 8: note = RuvC_P1
  SITE 61: note = RuvC_P2
  SITE 101: note = RuvC_P3
  SITE 103: note = RuvC_P4
  SITE 106: note = RuvC_P5
  REGION 272..358: note = Tnp_domain
  SITE 280: note = Tnp_P1
  SITE 311: note = Tnp_P2
  SITE 319: note = Tnp_P3
  SITE 320: note = Tnp_P4
MRLFVGDDWAEDHHDVELMDEQGRVLARRRLPEGVAGMARLHVLIGEQLGEDADDSEVVIGIETDRGPWVAALVAAGYTVFAVNPLQASRYRERHGVSGAKSDTGDAHMLTDMVRTDSHQLRAVAGDSADAGAVKVVARAHKTLIWERTRQVQRLRHQLREYFPAALAAFEDLDAPDALELLGKASDPARAARLTRAQVSAALKRARRRDIPGKATAIMAALRSPQLGQPPAITAAYAATVRSLIAVITTLNEQVKALQGQVEADFGRHPDAEIYLSQPGLGSVLGARVLGEFGDDPGRYASGKARKNYAATSPITRASGKKKVVAARFIRNDRLTDALMAQAFAALQASPGARALYDAERARGAEHNPALRKLANRLTGILHGCLKTRTLYDETTAWSHREKTPQSGIAA

SEQ ID NO: 10853 - protein, 319 aa, unidentified
  source 1..319: note = protein_aa7c21c
  REGION 7..156: note = RuvC_domain
  SITE 10: note = RuvC_P1
  SITE 55: note = RuvC_P2
  SITE 95: note = RuvC_P3
  SITE 97: note = RuvC_P4
  SITE 100: note = RuvC_P5
  REGION 194..278: note = Tnp_domain
  SITE 202: note = Tnp_P1
  SITE 231: note = Tnp_P2
  SITE 239: note = Tnp_P3
  SITE 240: note = Tnp_P4
  SITE 251: note = Tnp_P5
MSVISVVGIDVAKAHVDVCVLGANRDTQQFANDAEGHSALAATLQPLGIGLVVMEATGGYEAALVCALQAAGQPVAVINPRQARDFAKSMGRLAKTDTIDARMLAELASVLVQREDLARFLRPLADAQQQWLAALVTRRRQLLTMLNAERQRLQITPAGLHPSIEAIVAAIKAQLDDVEAQMVGHMREHFGELDRLLQSASGIGPVASATLIAELPELGRLSRREIAALVGVAPMANDSGSSRGRRRILGGRFEIRRVLYMATLTATRHNPAIKAFYQRLTAAGKLPKVALVACMRKLLTVLNAMVRTSTPWGKSLHRT

SEQ ID NO: 10854 - protein, 344 aa, unidentified
  source 1..344: note = protein_1700337
  REGION 5..152: note = RuvC_domain
  SITE 8: note = RuvC_P1
  SITE 55: note = RuvC_P2
  SITE 92: note = RuvC_P3
  SITE 94: note = RuvC_P4
  SITE 97: note = RuvC_P5
  REGION 212..309: note = Tnp_domain
  SITE 220: note = Tnp_P1
  SITE 250: note = Tnp_P2
  SITE 258: note = Tnp_P3
  SITE 259: note = Tnp_P4
  SITE 271: note = Tnp_P5
MEHYAGLDVSLELTSVCVVDARGEIVREAKVASEPEALVHFLSCQDLEIVRVGLEAGPLSQWLHAGLVAAGFETVLLETRHVKAALSAMTVKTDRRDARGIAQLLRLGWYRPVHAKSASAQEVRALLTARKLIQGKLLDVESGIRGVLRGFGLKVGPISRGRFEMRILELVDGHAMLEEVIGAVLAARTALDTEFKRLHRALLALVRDDPVCRQLMSVPGVGAIVAITFKSGVDDPTRFRRSRDVGPHFGLTPRKYQSGELDVTGSISKVGDRMVRTALYEAASVMLTRSVRFSALKAWAMAVAKRRGTKKACVALARKLAVILHRMWVDGTSFRWSNEETAIA

SEQ ID NO: 10855 - protein, 319 aa, unidentified
  source 1..319: note = protein_8c50c1e
  REGION 9..150: note = RuvC_domain
  SITE 12: note = RuvC_P1
  SITE 56: note = RuvC_P2
  SITE 96: note = RuvC_P3
  SITE 98: note = RuvC_P4
  SITE 101: note = RuvC_P5
  REGION 192..277: note = Tnp_domain
  SITE 200: note = Tnp_P1
  SITE 229: note = Tnp_P2
  SITE 237: note = Tnp_P3
  SITE 238: note = Tnp_P4
  SITE 249: note = Tnp_P5
MAQNDLVVVGIDVAKDKVDACIRRFTLRQTFPNTAQGHRKLVAWLRRYQVGKAVMEASGGYELEWRNVLHKAGIEVRIVDPRRVRSFAQSAGRLAKNDPIDAEMIAWFAETFSQAPGQTPDAAREELAALAKARTALVDVKIRLQAQDEHAAPEPARKAYARVLKNLAAEMDKLEAAISAKVKATPEFAERAEIIESVPGLAHVTSAILIAGMPELGQVSDEVAAALIGVAPYDDDSGKRRGERYIKGGRRWVRNAFYMPCLGAATQCNPVLKAFYQRLLAKGKEPKVALVACMRKLIIILNTMLARRQKWNPGRHATG

SEQ ID NO: 10856 - protein, 403 aa, unidentified
  source 1..403: note = protein_2e8b24b
  REGION 4..160: note = RuvC_domain
  SITE 7: note = RuvC_P1
  SITE 57: note = RuvC_P2
  SITE 97: note = RuvC_P3
  SITE 99: note = RuvC_P4
  SITE 102: note = RuvC_P5
  REGION 269..355: note = Tnp_domain
  SITE 277: note = Tnp_P1
  SITE 308: note = Tnp_P2
  SITE 316: note = Tnp_P3
  SITE 317: note = Tnp_P4
MLFVGDDWAEDHHDLYLMNEAGDRLASRRLPEGLAGIRLLHDLIAAHADDPAQVAVGIETDRGLWVEALTGAGYQVYAVNPLAVARYRDRHAVSGAKSDAADAKLLADLVRTDRHNHRLIAGDTPDAEAVKVLARAHQNLIWTRNRHTNALRSALREYYPAALEAFDDLSDRDALAILGHAPDPRQASSLSLAKIRSALKAAGRQRNIDIRAQEIQAALRSEQLAAPAAVTAAFAATTRATVGLVVELSRQIDDLENELAAHFETHPDADIYRSLPGLGVILGARVLGEFGDDPNRYTNAKCRKNYAGTSPLTIASGRKRAVLARHIRNRRLYDAIDQWAFCALTRSPGARQFYDHRRAEGDLHHQALRALGNRLVGILHGCLRHRTRYDEHKAWAHRTPAAA

SEQ ID NO: 10857 - protein, 304 aa, unidentified
  source 1..304: note = protein_c6a2070
  REGION 7..149: note = RuvC_domain
  SITE 10: note = RuvC_P1
  SITE 53: note = RuvC_P2
  SITE 88: note = RuvC_P3
  SITE 90: note = RuvC_P4
  SITE 93: note = RuvC_P5
  REGION 197..270: note = Tnp_domain
  SITE 205: note = Tnp_P1
  SITE 235: note = Tnp_P2
  SITE 243: note = Tnp_P3
  SITE 244: note = Tnp_P4
  SITE 256: note = Tnp_P5
MQTTKTVGFDIAKSVFQVHGVDADGNVVVRRQLKRRYVLTFFQKLPPCLVGIEACASSHYWSRELQALSHTVRLMPPAYVKPYVKRHKNDAADAEAICEAVTRPNMRFVPTKTAEQQSCLTLHRTRHLFIRQQTAIINSIRAHLAEFGIVAPVGRRGVEQLLKVCVAALGTQLLALKAQILAFDRCIMAWHRSNETSKRLDAIPGVGPALATALVASIGDPKAFRSGRDFSAWIGLVPKQNSSGGKDKLGNISKQGDRLSAQLIHRRCSRRDPLCEAPWYEASAMAYSIVGTAADQGRCHRTRQ

SEQ ID NO: 10858 - protein, 321 aa, unidentified
  source 1..321: note = protein_869e6d0
  REGION 4..147: note = RuvC_domain
  SITE 7: note = RuvC_P1
  SITE 52: note = RuvC_P2
  SITE 92: note = RuvC_P3
  SITE 94: note = RuvC_P4
  SITE 97: note = RuvC_P5
  REGION 191..278: note = Tnp_domain
  SITE 199: note = Tnp_P1
  SITE 229: note = Tnp_P2
  SITE 237: note = Tnp_P3
  SITE 238: note = Tnp_P4
  SITE 251: note = Tnp_P5
MTYVGIDVSKATFVVAYSSAKGSRTNSFKNTIKGIHEFIQTISVAEHHCVLEATGNYSSLLVYLLSEAGIAVSLENPLKIKNFARVMLSITKTDEIDARLIAMYGEKMQPAPYKLRSDTILVLKQKRTVIRQLKKQLVATGNLKGSMEALPFFDPKCKKTIERTIIFLEKQIKELEEELASLAQSEYKKQMDLLTSVKGIGVTLAAALIMATGGFTYFDNAKQLTRYLGLSPTYQQSGTSVNVKGHINRNGDSSLRSQLYVAAFASLRCNTECKACFDRLRSKGKPGKVALIAVANKLIRQAFAIVTQEKLYVDGFKPEKP

SEQ ID NO: 10859 - protein, 317 aa, unidentified
  source 1..317: note = protein_0c7c2a0
  REGION 9..150: note = RuvC_domain
  SITE 12: note = RuvC_P1
  SITE 56: note = RuvC_P2
  SITE 96: note = RuvC_P3
  SITE 98: note = RuvC_P4
  SITE 101: note = RuvC_P5
  REGION 191..276: note = Tnp_domain
  SITE 199: note = Tnp_P1
  SITE 228: note = Tnp_P2
  SITE 236: note = Tnp_P3
  SITE 237: note = Tnp_P4
  SITE 248: note = Tnp_P5
MTKTSTGTAGIDTAKDKLDVAVHGREQRWQVANAAAGWRQLATDLAKAGVTKVGIEATGGYERGVVRHLRAKGLIVLVLQPIQVKNFARLHLRRAKNDVLDAVLIAACAALLDPPSIEADERLSDLADHLTFVEQIEEDIARLKTRLEHIDEPRRRRLVLNDIDRLKARRLTELERMAGQLREQADLARRLDLVLSVPGIGERTALALIIRMPELGQISREKAAALAGLAPFDDDSGKRKGERHIGGGRARLRRSLFAAALPASFRWNKALCALYARLKTRGYAHNYALVACARKLLIYANTVVQRGSPWVENQTAL

SEQ ID NO: 10860 - protein, 344 aa, unidentified
  source 1..344: note = protein_e401896
  REGION 7..147: note = RuvC_domain
  SITE 10: note = RuvC_P1
  SITE 53: note = RuvC_P2
  SITE 88: note = RuvC_P3
  SITE 90: note = RuvC_P4
  SITE 93: note = RuvC_P5
  REGION 210..301: note = Tnp_domain
  SITE 218: note = Tnp_P1
  SITE 248: note = Tnp_P2
  SITE 256: note = Tnp_P3
  SITE 257: note = Tnp_P4
  SITE 269: note = Tnp_P5
MDQISRIGMDTSKHVFQLHGVNAAEAPVLRKKMRRKEMVAFFKKLAPTVIAIEACGASHHLARLLQSFGHTVKLIAPQLVKPYVKRGKNDAADAEALCEAMSRPTMRFVPVKTTEQQATLMLVGVRDRLIRNRTQLANTIRGYAAEFGEIAAKGMAHLVPLLERIQADESLPVLARELFAIQAKEYVELQTQIDEVEAKLTAWHRADECSRRLAKIPSVGPIGAVLLRMKTPDPAQFRSGRQFAAWIGLTPKDHSTAGKIRLGVITRAGDEGLRSVLVVGATSVIQHAMRSGKASPWLAALLKRKPPKLAAVALANKTARIAWKMMLTGEDYSAKSAATPAGVV

SEQ ID NO: 10861 - protein, 400 aa, unidentified
  source 1..400: note = protein_89da18e
  REGION 10..164: note = RuvC_domain
  SITE 13: note = RuvC_P1
  SITE 61: note = RuvC_P2
  SITE 101: note = RuvC_P3
  SITE 103: note = RuvC_P4
  SITE 106: note = RuvC_P5
  REGION 271..356: note = Tnp_domain
  SITE 279: note = Tnp_P1
  SITE 309: note = Tnp_P2
  SITE 317: note = Tnp_P3
  SITE 318: note = Tnp_P4
  SITE 330: note = Tnp_P5
MPRPEYAVFLGLDVGKQEHHACGLGPDGKRVHDGPLPQSEARIGEILEDLSGRGRVLVVVDQPASIGALAVTVARSLGVDVAYLPGLAMRRIADLHPGNAKTDARDAYVIAEAARTMPHALRRVDAGDEALADLEVIVGFDDDLAGEVTRISNRIRGLLTQVHPALERVLGPKVQHRAVLELLQRFGGPQGLAKATRRQLIAATKVRAPRSYERLVDAVVKALTEQTVSVPGTRAAELVLPQLAVTLGGLLDQREQAAKQIEEMLDPHPLSRVLTSMPGIGVRTGARILLEVGDGSAFPTSGHLAAYAGLAPVTRRSGTSIRGEHPSRAGNKQLKRAFFLAAFASLSDPTSRVYYDRKRAAGKKHNAALICLARRRVDVLHAMLKNGTLYETRQSSAPAA

SEQ ID NO: 10862 - protein, 321 aa, unidentified
  source 1..321: note = protein_5d6c6e9
  REGION 9..158: note = RuvC_domain
  SITE 12: note = RuvC_P1
  SITE 57: note = RuvC_P2
  SITE 97: note = RuvC_P3
  SITE 99: note = RuvC_P4
  SITE 102: note = RuvC_P5
  REGION 196..280: note = Tnp_domain
  SITE 204: note = Tnp_P1
  SITE 233: note = Tnp_P2
  SITE 241: note = Tnp_P3
  SITE 242: note = Tnp_P4
  SITE 253: note = Tnp_P5
MSERSAVVVGVDVAKRHLDVAALGARLPQARFTNDAEGQAQLAALLAEAEPELVLMEASGGYEAALACELDAAGLPVVVVNPRQARDFARAMGRLAKTDRLDARLLAELAAVLVRRDDLSCFVRPPADPERLDLAALVARRRQLVAMLLAERQRLALARPTVRPSIEALIDALRAQLDVLDGEMREHVASHHRALDVLLQSAKGIGPTSSATIIAELPELGRLDRRQIAALVGVAPYARESGVWGGRRRISGGRSQLRRTLYMATLTATRFNPTIRAFYARLLAAGKLKKVALVACMRKLLSILNAMVRDSRSFDPWLNHA

SEQ ID NO: 10863 - protein, 399 aa, unidentified
  source 1..399: note = protein_fbdcddb
  REGION 10..164: note = RuvC_domain
  SITE 13: note = RuvC_P1
  SITE 62: note = RuvC_P2
  SITE 102: note = RuvC_P3
  SITE 104: note = RuvC_P4
  SITE 107: note = RuvC_P5
  REGION 270..356: note = Tnp_domain
  SITE 278: note = Tnp_P1
  SITE 308: note = Tnp_P2
  SITE 316: note = Tnp_P3
  SITE 317: note = Tnp_P4
  SITE 329: note = Tnp_P5
MGERSARAWAGVDAGKGHHWAAVVDEAGTTLWSKKIVNDETAILTALGEILELAEQVHWAVDISGTASALLLALLAAHGQQAVYVPGRTVNRMAGAYRGEAKTDARDAYVIAETSRQRRDFAAIEVPAQLAADLALLTAHRSDLVADRVRMINRLRDVLTGIFPALERAFDYSAHKGALVLLTGYQTPAALRRRGRARLTAWLANRSVRGADAVAATALEAAEAQRTVLPGEDVAAAIVADLAAQILALDDRLKRIDKQIRDTFRAHPQAEIIESLPGIGPILGAELVVAAGDLAAYADAGHLASAAGLVPVPRDSGRRTGNMHRPKRYSRRLRRVFYMSAQTSIMRDGPNRDFYLKKRAEGCKHVQAIIALARRRVSVLWALLRNNRIFTPVLNAQAA

SEQ ID NO: 10864 - protein, 323 aa, unidentified
  source 1..323: note = protein_b83cac2
  REGION 9..151: note = RuvC_domain
  SITE 12: note = RuvC_P1
  SITE 56: note = RuvC_P2
  SITE 96: note = RuvC_P3
  SITE 98: note = RuvC_P4
  SITE 101: note = RuvC_P5
  REGION 191..276: note = Tnp_domain
  SITE 199: note = Tnp_P1
  SITE 228: note = Tnp_P2
  SITE 236: note = Tnp_P3
  SITE 237: note = Tnp_P4
  SITE 248: note = Tnp_P5
MAKHTTICAGIDTGKRKLDVALEGSREQLQVKNTPEGHTVLLAWLRRHRVKRVGIEASGGYEQPVVAELRHKRFVVVVFQPAQVRAYARFHLQRAKNDKIDAALIAACTAAVRKIHAAPDARLRPFAEQLTMIDQIAEDIARLKNRIESCRNARIKAVWKEDIARLERREKVELKALITSICKHSDLAKRLDLINSIDGIGLPTAVTVLVRMPEIGQITREQAAALAGLAPYDDDSGEQVGTRHIAGGRQRLRHALYAAALAASFRWNRQLISLYQRLIAAGKGHKRALVACARKMLVFANTVVARATPWQDRPPGRIASTTG

SEQ ID NO: 10865 - protein, 278 aa, unidentified
  source 1..278: note = protein_84e8f7a
  REGION 2..81: note = RuvC_domain
  SITE 21: note = RuvC_P3
  SITE 23: note = RuvC_P4
  SITE 26: note = RuvC_P5
  REGION 143..228: note = Tnp_domain
  SITE 151: note = Tnp_P1
  SITE 181: note = Tnp_P2
  SITE 189: note = Tnp_P3
  SITE 190: note = Tnp_P4
  SITE 202: note = Tnp_P5
MGHEVKLISPQYVRPLVKGNKNDFIDAKAICEAASRPTMRFVPPKTEAQQTLSMLHRVRESLVHDRTKTANQMPGFLLEFGVSLPIGFTVIKRLPALLAEHEDLPPQLISVLERLHEHFKYLDGQIAELEKQLSHQVHEDDLGQRLMTLPGVGPITASVLSAEMSDGHQFAASRDFAASLGLVPRQYSTGGKATLLGISKRGDKNLRRLLVQCARAFMQRLDKYPSPLADWVRSLLTRRHSNVVACALANKLARMAWALARAHTVYEPGKLRPEPTTT

SEQ ID NO: 10866 - protein, 322 aa, unidentified
  source 1..322: note = protein_7705517
  REGION 8..155: note = RuvC_domain
  SITE 11: note = RuvC_P1
  SITE 60: note = RuvC_P2
  SITE 100: note = RuvC_P3
  SITE 102: note = RuvC_P4
  SITE 105: note = RuvC_P5
  REGION 195..281: note = Tnp_domain
  SITE 203: note = Tnp_P1
  SITE 233: note = Tnp_P2
  SITE 241: note = Tnp_P3
  SITE 242: note = Tnp_P4
  SITE 254: note = Tnp_P5
MTHPTLFVGIDVAKTKFDVALLNAEGKYRSKVFPNTPVGHQQFLEWLTRHDAQEAHLCMETTGVYGRDLARFLAQQQILISVVNPAQIHAFGKTELTRAKMDKADARLIARYCRMHRPAPWVPPAEEIATLQALVQRLEDLLALQTMENNRLEAATGPARESVEAVLQFVHQQIEMLRLQIEIHIDKHPDLKNQQELLSSIPGIGDNTAATLLAFLSPLERFHSAKQVVAYAGLNPRIRQSGQWAGKTPIAKAGNALLRKSLYLPAVVAKRHNPIIASFCDRLLARGKRPMQVVVAAMRKLLHLAFGVLKSGKPFNPKLGVA

SEQ ID NO: 10867 - protein, 471 aa, unidentified
  source 1..471: note = protein_8a01091
  REGION 5..161: note = RuvC_domain
  SITE 8: note = RuvC_P1
  SITE 59: note = RuvC_P2
  SITE 99: note = RuvC_P3
  SITE 101: note = RuvC_P4
  SITE 104: note = RuvC_P5
  REGION 276..362: note = Tnp_domain
  SITE 284: note = Tnp_P1
  SITE 314: note = Tnp_P2
  SITE 322: note = Tnp_P3
  SITE 323: note = Tnp_P4
  SITE 335: note = Tnp_P5
MALTLGIDVAVRAEHQATLARDGATVWRGRKFWTRPADLERLWADLDLPDPAELTVVVEPTRNAWIVLAEWFRRHGARVVMVPTTQSADLRKYYSKHTKNDRIDSELLAGCPCCTPKACGSTPGRGPAHSLRRLVKQRSTMVKRRVAVYARLDALVELLGPAWYAVLGSNYGAAALEFLSRYADPHAVIRLGRARLTRFLIARSRGAWRDDHAAGLITAARETLALWGTSDGSDGMDFAELAEDIAHEAEQALFLTRQIKQIDERVANLYADADPAGIVASAPGVGAVISAVIAGRIGDPHRFTSLAAIRAYTGLVPNVSQSGVSKVESSITKAGDPLLREMLCTAADQARRVDPQFAAKYQRLMVGDRHHESAICHLATHLVTRIAACMRAGQPYALRDVDGTPITEAEGRAIVTARYKIDPRRRDNVRYQRMRERRKQAAGQESQESQESRCAPTAQPAKTKPTSRHVA

SEQ ID NO: 10868 - protein, 404 aa, unidentified
  source 1..404: note = protein_5ade38f
  REGION 4..160: note = RuvC_domain
  SITE 7: note = RuvC_P1
  SITE 57: note = RuvC_P2
  SITE 97: note = RuvC_P3
  SITE 99: note = RuvC_P4
  SITE 102: note = RuvC_P5
  REGION 270..356: note = Tnp_domain
  SITE 278: note = Tnp_P1
  SITE 309: note = Tnp_P2
  SITE 317: note = Tnp_P3
  SITE 318: note = Tnp_P4
MIFVGVDWAETHHDICVLNEAGEVLARKRIPDTFEGLRALHELLAPHAEEPEEVIVGIEKDRGLIVSAMLGANYHVYALNPMSVARYRERHVTSGSKSDPGDAKVLADLVRTDRHNHREAAGDTEGADAIKVLARTHQSAIWSRQREKNALRNALKDYYPGALNAFGTDLDDGDAVEVLTIAPTPALGAQLSLSKITSALRRGGRQRNLERTAKKIQHALREEQLRERPKVEAAFGKITFAHVAMIRAYSATIAELEHALAEDFKQHPDAKIILSLPGLGMVLGARVLGEFGDDPNRFADAKSRKNYAGTSPVTKASGKSRVVLARHARNTWLGDATDQWAFCSLKKSPGARAHYDELRAKGKTHRQAIRQLANRSVGILHACLEQRVDYDEDLAWKHRADIRA

SEQ ID NO: 10869 - protein, 432 aa, unidentified
  source 1..432: note = protein_7a0852f
  REGION 11..176: note = RuvC_domain
  SITE 14: note = RuvC_P1
  SITE 67: note = RuvC_P2
  SITE 107: note = RuvC_P3
  SITE 109: note = RuvC_P4
  SITE 112: note = RuvC_P5
  REGION 276..361: note = Tnp_domain
  SITE 284: note = Tnp_P1
  SITE 314: note = Tnp_P2
  SITE 322: note = Tnp_P3
  SITE 323: note = Tnp_P4
  SITE 334: note = Tnp_P5
MSERKSLELRVSVDVGSRRHSVAIGLPDGQVLEEFEIAHRPEGFQEFFSRIEKHQKAQGCGVAVAMEGYNGYARPLDTLVRQRGYRLYNINNLKLARFKEIFPGAAKKDRIDARKGLELFQLRDHLPLAKGVLQEVTGTPKENEILKRLTRRRRRLVNERVRVVNNLQSDLQAVCPGLLEITTEASNQWFLNFLLSADSLPQLARLRKSTLLKIPAVGRKYASLIEQWQKRAHFSDEIEWVNEMVREDALRCLELDEKIRTLEAKIEEIAKSSKIAKILLSIPGFGPVCTSELAGEIGTVERFSKEGSLALYLGMSTLDNSSGDYHGSKQPKHVNTRAKAAMMIALDRHRKYVPESQRYYEKKRTEGKKHNQTIRSLGRHLCRIIFRMLRDQRNYEIRPQQRNTKTKVRSRSCVKTKIRRPKISATHLKQKV

SEQ ID NO: 10870 - protein, 316 aa, unidentified
  source 1..316: note = protein_0aa9795
  REGION 7..152: note = RuvC_domain
  SITE 10: note = RuvC_P1
  SITE 54: note = RuvC_P2
  SITE 94: note = RuvC_P3
  SITE 96: note = RuvC_P4
  SITE 99: note = RuvC_P5
  REGION 190..274: note = Tnp_domain
  SITE 198: note = Tnp_P1
  SITE 227: note = Tnp_P2
  SITE 235: note = Tnp_P3
  SITE 236: note = Tnp_P4
  SITE 247: note = Tnp_P5
MSELVYVGIDIAKNSFEVAVTGELQTLNLANDEAGHAQLCQWLAPLAPRLILMEATGGYEQDLALALAGAGLHVSVVNPRQARDFARCVGKLAKTDRIDAQALRSFASMLDAQGHQPRALADDERRELTALVVRRRQLVAMLVSERQRLGVAHRKAKPSILAIMDAIAAQLHDVDDELKAHVQTHHADLAKLLTSVKGVGPTTACTLLAQLPELGQLNRKQITALVGLAPMNRDSGTLRGQRHIFGGRADVRRVLYVAALVGTRFNPVLKVFYAKLLAAGKAKKVALVACMHKLLVILNAIARTRSPWRDDFAERL

SEQ ID NO: 10871 - protein, 340 aa, unidentified
  source 1..340: note = protein_406ab74
  REGION 6..148: note = RuvC_domain
  SITE 9: note = RuvC_P1
  SITE 52: note = RuvC_P2
  SITE 87: note = RuvC_P3
  SITE 89: note = RuvC_P4
  SITE 92: note = RuvC_P5
  REGION 210..301: note = Tnp_domain
  SITE 218: note = Tnp_P1
  SITE 248: note = Tnp_P2
  SITE 256: note = Tnp_P3
  SITE 257: note = Tnp_P4
  SITE 270: note = Tnp_P5
MQVIRFGIDLAKNVFQVHGVDATGRVVVQRQLRRAQVAKFFAAQPPALIGMEACGSAHHWGRTLRALGHEVKLMPPAYVKPYVPRNKNDARDAHGCCEAVSRPDMRFVPIKTVEQQWARALHRTRDLLVRQRTQLANAMRGMLYEMGQTSAQGAAGLEALLQRVEAADEAIPEALLICLTPLAGQWRALDGEIGKLDKQILAQVRQQKAALRLTTIPSVGPIIAHATIAAIGDGRQFTSGRDFAAWLGLTRKSHDTGGKHKLTGHISRAGDRDLRRLLILGASSWLRQVRAKPDRGSPWIRGLLARRPVKVAVVAQAAKTARIIWAMLNSGQEYRAPVAA

SEQ ID NO: 10872 - protein, 323 aa, unidentified
  source 1..323: note = protein_afd64aa
  REGION 5..154: note = RuvC_domain
  SITE 8: note = RuvC_P1
  SITE 59: note = RuvC_P2
  SITE 99: note = RuvC_P3
  SITE 101: note = RuvC_P4
  SITE 104: note = RuvC_P5
  REGION 189..277: note = Tnp_domain
  SITE 197: note = Tnp_P1
  SITE 227: note = Tnp_P2
  SITE 235: note = Tnp_P3
  SITE 236: note = Tnp_P4
  SITE 249: note = Tnp_P5
MNHSIGIDVGKAELVACIRASDGKTAIPAPFPNSIIGLKKLIVHFSKNNIGTDDPILLESTGPYHWKAARTLTDKGYLVKVANPLHTKQMARHSIRKRKTDKVDAGHLSFLASQEYGYRFVETEEMARKKALVRHYWKLRLTATNHSIHERYLKEYRGIGTHSISDLILKKCEKLKQEIIDEWDKGNDVKYLDSIPGLTPFLAITILAELLPIQRFERIDQIIAYAGLDPSVKQTGGKKGAHGAISKRGSPTLREALFLAAFGSFSKQPMKTLYDRYKARGLHHNTILCIIGRKILRIAVSLLKKRRMFDPRKLSAVHHLTGT

SEQ ID NO: 10873 - protein, 341 aa, unidentified
  source 1..341: note = protein_98ca738
  REGION 7..149: note = RuvC_domain
  SITE 10: note = RuvC_P1
  SITE 53: note = RuvC_P2
  SITE 88: note = RuvC_P3
  SITE 90: note = RuvC_P4
  SITE 93: note = RuvC_P5
  REGION 209..295: note = Tnp_domain
  SITE 217: note = Tnp_P1
  SITE 247: note = Tnp_P2
  SITE 255: note = Tnp_P3
  SITE 256: note = Tnp_P4
  SITE 268: note = Tnp_P5
MSDLTLVGVDLGKHSFHLHGQDKPGREVFRKKLSRQQMMRFFGNIPTCTVVMEACAGSHFVARELIAMGHQAKLISPQFVRPFVKSNKNDFVDAEAICEAATRPTMRFVAPKTESQQILSIMHRTRESLVHDRTKAVNQMHGFLLEFGISLPKGPTMMKRLGNILAEHELPVRLTVLLQRLHQHFSYLNEQIKEMDKELVGQLADDDLGSRLLSIPCVGPITASLLAAEMGDGKQYGCSRDFAASVGLVPRQYSTGGKANLLGISKRGDKNLRRLLVQCARVYMFRLKYQHGALADWVRSMLCRRHSNVVACALANKLARIAWAIAAHHTQFEAGPDALAA

SEQ ID NO: 10874 - protein, 341 aa, unidentified
  source 1..341: note = protein_407c792
  REGION 7..149: note = RuvC_domain
  SITE 10: note = RuvC_P1
  SITE 53: note = RuvC_P2
  SITE 88: note = RuvC_P3
  SITE 90: note = RuvC_P4
  SITE 93: note = RuvC_P5
  REGION 212..300: note = Tnp_domain
  SITE 220: note = Tnp_P1
  SITE 250: note = Tnp_P2
  SITE 258: note = Tnp_P3
  SITE 259: note = Tnp_P4
  SITE 271: note = Tnp_P5
MGKIITIGLDIAKNVFQVHGVDATGSVVVRQKFRRSDVLTFFERTEPCLVGIEACATAHYWARSIMALGHNVKLMPPTYVKPYVKRQKNDAADAEAICEAVTRPTMRFVPVKGEEQQGILVLHRTRELLIRQRTMLINALRGHLAEFGIVMRQGRAGVATLVTLVEHDEHDLIPEIARKALLAVVDQLRDAHDRIGAIERNIQLWHHSNEQSRRLETIPGIGPITASAIAATITDPSLFTSGRQLAAWIGLVPRQNSSGGKERLGHISKKGDPYIRRLLVIGAHAVLRFARNGKATTTKWAAALLARKPYKLAAVALANKMARIVWALLTKNEEFRLQPAA

SEQ ID NO: 10875 - protein, 323 aa, unidentified
  source 1..323: note = protein_b8f7818
  REGION 9..154: note = RuvC_domain
  SITE 12: note = RuvC_P1
  SITE 56: note = RuvC_P2
  SITE 96: note = RuvC_P3
  SITE 98: note = RuvC_P4
  SITE 101: note = RuvC_P5
  REGION 191..276: note = Tnp_domain
  SITE 199: note = Tnp_P1
  SITE 228: note = Tnp_P2
  SITE 236: note = Tnp_P3
  SITE 237: note = Tnp_P4
  SITE 248: note = Tnp_P5
MAKRNTICAGIDTSKDKLDVALDGSSEELQVKNTAEGHQELVEWLKRHKVKRVGIEASGGYEQAAVAELRRKRFVVIVFQPIQVRAYATFHLQRAKNDKIDAALIAACTAAVKNIHPAPDPRLQPFAVHLTMIDQIKEDIAKLKNRLESCRDERIQKFWKEQIALLAKHRRAEFKALVAAIRKHRDLAARLDLIYSVGGSGLPTAVAILIRMPEIGRITREQAAALTGLAPYDDDSGKHIGARRIDGGRQRLRQALYTAALPASFRWNPQLMALYSRLIAAGKGHKRALVACARKLIVIINAVVARGTPWVAEPPKTVSVSVT

SEQ ID NO: 10876 - protein, 428 aa, unidentified
  source 1..428: note = protein_58881d8
  REGION 20..181: note = RuvC_domain
  SITE 23: note = RuvC_P1
  SITE 79: note = RuvC_P2
  SITE 120: note = RuvC_P3
  SITE 122: note = RuvC_P4
  SITE 125: note = RuvC_P5
  REGION 288..376: note = Tnp_domain
  SITE 296: note = Tnp_P1
  SITE 326: note = Tnp_P2
  SITE 334: note = Tnp_P3
  SITE 335: note = Tnp_P4
  SITE 347: note = Tnp_P5
MKYNTQNSKIASITEKTLIVGIDVGSQTHYARAFDWRNYEYSRKPFAFSNDEEGFMAFKNWMSGIAEKHGKEVVLPGMEPTGHYWFGLGMFLQNLGMRPVHVNPHHVKKSKELDDNNPNKNDKKDPKTIAALVNEGRFSYPYIPSGIYAEIRNLSNLRFQTQEQITRIKNRIARWFSIYFPEYKDVYGKLDALSGMMILKEAPLPGDIVKLGVDGVNKVWRNAKLRAVGLKRARTLVNKAEHSIGSQAAPEAARMELEILIHDYEMYNQRMEELMQTIEEKLYEIPYIDKLMEIKGIGMITICGFIAEVGDIRRFDNPKQLQKLAGYAIVSNNSGKHNGESRISYRGRKRLRYVLYEAAISLIGKNAEFKEIHHYYRTRERNPLKKMQSVIAVACKVIRIFYAILTKGVAYDGGKMLEDIKRPVVAMN

SEQ ID NO: 10877 - protein, 343 aa, unidentified
  source 1..343: note = protein_2b629db
  REGION 6..148: note = RuvC_domain
  SITE 9: note = RuvC_P1
  SITE 52: note = RuvC_P2
  SITE 87: note = RuvC_P3
  SITE 89: note = RuvC_P4
  SITE 92: note = RuvC_P5
  REGION 211..302: note = Tnp_domain
  SITE 219: note = Tnp_P1
  SITE 249: note = Tnp_P2
  SITE 257: note = Tnp_P3
  SITE 258: note = Tnp_P4
  SITE 270: note = Tnp_P5
MKVSTIGLDLAKSVFQVHGIDAAGQVVVRRQLRRRQLLGFFEKLGPCLVGIEACATAHYWGREIAALAHEVRLMPAHYVKAYVKRGKNDAADAEAICEAVQRPTMRFVSLKSPDQQSMLMLHRTRALLVRQRTMLVNALRAHMAEFGIVTRVGLPQLKELLAVIADKDDRRLPPDARACLEILGRQFLSVHEEICAADSRLHAWHRSDPVSQRLATIPGIGPVTASALAASITDPSVFKSGREMAAWIGLVPRQNSTGGKQRLGKISKQGDPYLRWLLVAGAMTVIRHAKRRGRANQPWLDDLIARRPTKVAAVALANKMARMAWALLRHGGAYRPSAITASV

SEQ ID NO: 10878 - protein, 411 aa, unidentified
  source 1..411: note = protein_72f7853
  REGION 4..161: note = RuvC_domain
  SITE 7: note = RuvC_P1
  SITE 57: note = RuvC_P2
  SITE 98: note = RuvC_P3
  SITE 100: note = RuvC_P4
  SITE 103: note = RuvC_P5
  REGION 276..362: note = Tnp_domain
  SITE 283: note = Tnp_P1
  SITE 313: note = Tnp_P2
  SITE 321: note = Tnp_P3
  SITE 322: note = Tnp_P4
  SITE 335: note = Tnp_P5
MNAVGIDVSKGKSTVAILRPFGEVVHLPFDVAHDYGSLERLADQIICLDGESRVLMEATGRYHEPVAAALHERGIYVSVLNPLAIHGYNSGGTVRKVKTDQKDSIKIAKFALDHWTDLREYTPVDAIRQQLKIFSRQYNLYMKSSVALQSNLISLSDKVFPGVNEMFTSPERADGHKKWVDFLTTFWHCECISRVREDAFVERYRKWCKRKGYNFSEAKASDIYTDSLGHIVTLPKNNNTKLLIQTAAKELTAMNELLASVRAEMVRLAKELPEFETVHAMYGVGEATAAQLMAEIGDIRNYPRRSSLVAFAGVDPEVDQSGKKDSKSNPSTKRGSPHLRRTLFQIMTVYLRLKPQDEAVYQFLDKKRAEGKPYYVYMTAGSNKFLRIYYARVKECMAKLDAPTETAEENG

SEQ ID NO: 10879 - protein, 389 aa, unidentified
  source 1..389: note = protein_4dc98bf
  REGION 6..161: note = RuvC_domain
  SITE 9: note = RuvC_P1
  SITE 60: note = RuvC_P2
  SITE 100: note = RuvC_P3
  SITE 102: note = RuvC_P4
  SITE 105: note = RuvC_P5
  REGION 265..352: note = Tnp_domain
  SITE 273: note = Tnp_P1
  SITE 303: note = Tnp_P2
  SITE 311: note = Tnp_P3
  SITE 312: note = Tnp_P4
  SITE 325: note = Tnp_P5
MYSYFVGIDIAKNTHWASCLSSDGEIILEPFSFSNDNSGFQKFISKLESLDKTKILIGLESTAHYGENIISYLFNLDYNIGLINPIQTANLRRSNIRKTKNDKVDNKIIIKALTLGNYSLITSRDINNLKLKGLCRSRRNLVTMKSKAKIQLVSYLDQIFPELAQFFKGNLHLNVSYQLLKEYSSPKQISSLHLTKLSNILHDNSHGRYNKQDAIRLRELAKNSVGIDNPSLSLQIKHSILQIELYNEQIAEVEALYKQILDEMNTPILSIPGMSYNQAAVIICCIGDINRFEHSCQLLAYAGLDPSVIQSGNFQARSTRMSKRGSGMLRYSLVYSAHNVVKNNKTFRDYYELKRSQGKSHYCALGHVAHKLVRIIFKMLKDNVAFNLD

SEQ ID NO: 10880 - protein, 427 aa, unidentified
  source 1..427: note = protein_4a4f8f4
  REGION 19..179: note = RuvC_domain
  SITE 22: note = RuvC_P1
  SITE 77: note = RuvC_P2
  SITE 118: note = RuvC_P3
  SITE 120: note = RuvC_P4
  SITE 123: note = RuvC_P5
  REGION 286..375: note = Tnp_domain
  SITE 294: note = Tnp_P1
  SITE 324: note = Tnp_P2
  SITE 332: note = Tnp_P3
  SITE 333: note = Tnp_P4
  SITE 345: note = Tnp_P5
MNYTQNEKIMSITEKTLVIGIDIGKGVQFARAFDYRGIELSKIQSFENTLEGFKLFEEWAESVITEYRKDNIIVGLEPTGHYWFNLAEFVRNLGIRLVLVNPYHVKRSKELDDNSQTKNDRKDPKTIAKLVIDGRYSEPYIPEGIYSDLRIAMNMKEGLTRNLNIIKNKVDHWLDKYFPEFNNVFVDWEGKTALISLTEFPTPDKVLSVDVQQIVTTWKKKVKRGIGFNRAVKLVESAKISVGITEGLKMAEKELKADLEQYELYIKQYEELEKEIEELALQIPGVKEMLTIKGVGIMTAAGFISEVGDIKRFTHPSQIQKLAGLNLIEDSSGKHKGKTSISKRGRSRLRALLFRVIMPLVSKNNEFKILHEYYTSRKENPLKKKQSLILLCCKLIRIFFAIMNKQVEYNPQKLIKDTGFDILPMVA

SEQ ID NO: 10881 - protein, 344 aa, unidentified
  source 1..344: note = protein_6167794
  REGION 7..149: note = RuvC_domain
  SITE 10: note = RuvC_P1
  SITE 53: note = RuvC_P2
  SITE 88: note = RuvC_P3
  SITE 90: note = RuvC_P4
  SITE 93: note = RuvC_P5
  REGION 212..299: note = Tnp_domain
  SITE 220: note = Tnp_P1
  SITE 250: note = Tnp_P2
  SITE 258: note = Tnp_P3
  SITE 259: note = Tnp_P4
  SITE 271: note = Tnp_P5
MEAVVTIGLDLGKSVFQVHGVNREGVVVVQRRLTRARLLAFFAKQPGCLVGMEACAAAHHWARELRKLGHRPKLMPPRYVKPYVKRQKNDAADAEAICEAVTRPNMRFVEIKSCEQQGVLVLHRVRLMLMRQRIALSNAIRGHMAEYGLVASVGRNGLQRLIEIIADESDERLPAMARSSLVILASQLQLVNEQVLENDRRVRVSARSTDVGRRLMEVPGVGPVLASAIVASVPDPAAFRSGRDLAAWIGLVPKQNSSGGKEKLGGITKQGDRYLRQLLVVGALSVIRYAQRHGTRRPWLVALLSRRSSKIAAVALANKMARVIWAMMMTGERYREPVLVGSAG

SEQ ID NO: 10882 - protein, 407 aa, unidentified
  source 1..407: note = protein_e6c1e1f
  REGION 4..164: note = RuvC_domain
  SITE 7: note = RuvC_P1
  SITE 61: note = RuvC_P2
  SITE 101: note = RuvC_P3
  SITE 103: note = RuvC_P4
  SITE 106: note = RuvC_P5
  REGION 272..358: note = Tnp_domain
  SITE 280: note = Tnp_P1
  SITE 311: note = Tnp_P2
  SITE 319: note = Tnp_P3
  SITE 320: note = Tnp_P4
MLFVGDDWAEDHHDVELMDAAGRTLARARLPEGVAGITRLHAMIGAQLGEDADGAGQVTIGIETDRGPWVQALIAAGYTVLAVNPLQAARYRDRLGVSGAKSDAADAHMLADMVRTDGHQLRRVAGDSAGSEAVKVVARMHKTLIWERTRASQRLRHALREYFPAALAAFDDLDAADTLELLARAPDPASAARLSISQISAALKRARRRDIPAKAAAIQAVLRAEHLSQPAVVTAAYAASVRALIAVLGTLNEQVKALQGQVEAYFGQHPDAEIILSQPGLGTILGARVLAEFGDAADRYTSAKARKNYAGTSPITRASGKKRTVAARFVHNDRLIDALMTQAFASLNTSPGARAYYDRQRARGASYNAALRQLANRLVGILHGCLKTGALYDEATAWSHHLNEAAA

SEQ ID NO: 10883 - protein, 391 aa, unidentified
  source 1..391: note = protein_8addd73
  REGION 4..163: note = RuvC_domain
  SITE 7: note = RuvC_P1
  SITE 60: note = RuvC_P2
  SITE 101: note = RuvC_P3
  SITE 103: note = RuvC_P4
  SITE 106: note = RuvC_P5
  REGION 266..351: note = Tnp_domain
  SITE 274: note = Tnp_P1
  SITE 304: note = Tnp_P2
  SITE 312: note = Tnp_P3
  SITE 313: note = Tnp_P4
  SITE 326: note = Tnp_P5
MIYIGIDVAKDKHDCFITNSDGEVLFKSFTISNNREGFETLFQKVQSILDDLTKVKVGLEATGHYSYNLLGFLLDKGLPTYIINPLHTNLYRKSLSLRKTKTDKVDARTIASMIMSDVNLKSYTNTSYHNEELKSLTRYRFDKVKERAKLKSSISRLVCILFPELEKLVPTLHMASVYALLSEFPSANAIASSHLTRLTNLLSENSHGRYGKDTANLIRNAARNSIGSHMPAKSLELKHTIKLIKELTTEINEIETEIKSIMDKIDSPILTIPGIGYNTGAMIIAEIGDFNRFDSADKILAYAGMSPSTYQSGQLENCHSHMEKRGSRYLRYALYNATKYVCYWDESFGVYLGKKRSEGKHYNVALSHATKKLVRLIFAMEKSKQPYQPTV

SEQ ID NO: 10884 - protein, 330 aa, unidentified
  source 1..330: note = protein_35dc75e
  REGION 8..157: note = RuvC_domain
  SITE 11: note = RuvC_P1
  SITE 59: note = RuvC_P2
  SITE 97: note = RuvC_P3
  SITE 99: note = RuvC_P4
  SITE 102: note = RuvC_P5
  REGION 202..289: note = Tnp_domain
  SITE 210: note = Tnp_P1
  SITE 240: note = Tnp_P2
  SITE 248: note = Tnp_P3
  SITE 249: note = Tnp_P4
  SITE 262: note = Tnp_P5
MEKFAFYIGVDVSRNTLDVHCAELNKHITIPNRTEGFRMFHCLCRENGIDLKNAFVALEYTGGYEYRFIQHLHDKQISFARIPGIAIKHSLGITRGKSDKIDAKRIATYAEEKRRQLSPEKPVDKTIIAIKELLGLRKRLVRESAGYKATIKERKHMYGVGNKDFIVAVLLKKEAGNKRLIEKTEQQITLLVKENPAIHHSFKLLTSIKGIGKVNAWMTITYTENFTSFPNARSYAVYVGVIPFDYSSGTSIKGRKRVSHLANKELKQELSQAARSAIQWDTEMRLYAEKKLENKHYGIVVNNIRFKLILRMFAVIKRGEKYVDKYANVA

SEQ ID NO: 10885 - protein, 325 aa, unidentified
  source 1..325: note = protein_10bba37
  REGION 6..156: note = RuvC_domain
  SITE 9: note = RuvC_P1
  SITE 54: note = RuvC_P2
  SITE 92: note = RuvC_P3
  SITE 94: note = RuvC_P4
  SITE 97: note = RuvC_P5
  REGION 197..284: note = Tnp_domain
  SITE 205: note = Tnp_P1
  SITE 235: note = Tnp_P2
  SITE 243: note = Tnp_P3
  SITE 244: note = Tnp_P4
  SITE 257: note = Tnp_P5
MKNVIIGIDISSRTLDICIHNYPAIEHQVIENDIKAIRSFFRKYAKDDLVVAMENTGRYNWNLFEVLPSFNFKVYVISPLHLKKSLGLIRGKNDQIDASRICSFIERNQADISPWKPTPVEIKKLKVLLTERNSRIKMQRQLLRQQQDYKLMKSISFQKELSKLNKKLLETVDLQVKNVEAQIEKTIQADESLTDQARLIRSVPGVGKVVSWMMIAKTEGFTMINNPRKMACYCGVVPFDHQSGTSIRQRPRVSIYADKTMKSTLHLAAMSAIRLDNDLRMYYRRKIEEGKNKMSVLNAVRNKIIHRIFAVIKNQTLYKTDLALS

SEQ ID NO: 10886 - protein, 349 aa, unidentified
  source 1..349: note = protein_3655b24
  REGION 8..162: note = RuvC_domain
  SITE 11: note = RuvC_P1
  SITE 67: note = RuvC_P2
  SITE 107: note = RuvC_P3
  SITE 109: note = RuvC_P4
  SITE 112: note = RuvC_P5
  REGION 208..295: note = Tnp_domain
  SITE 216: note = Tnp_P1
  SITE 246: note = Tnp_P2
  SITE 254: note = Tnp_P3
  SITE 255: note = Tnp_P4
  SITE 268: note = Tnp_P5
MEVLKQVLGIDVAQKELVVTLGRMVEDLSIDLYAYKVFRNNEKGFLALLEWVKKLTKDKTKVRYVMEATGVYHQKFAYFLDEKDYEVCVVLPNKISNYMRTLDNKTITDKTCSEAIAQFGLERKLDLWHRPKSIYRNLQQLTRERDQIVFERAMVKNHLHAEQSEAEPNESSVLRISARIKFLSGQEKEIKKEIENWVNKDVVLKKEIENICTIPGIGELTAVIILAETNGFELIRSKRQLTSYAGLDVKEKQSGTSIKGKPRISKSGNRHLRKAMHLPALAAIRWDDNFRDLYARIVSKQGIKMKALVAVQRKLLEMVYTIFKNKCPYDKEYETKRMEQKNSVHAQTA

SEQ ID NO: 10887 - protein, 391 aa, unidentified
  source 1..391: note = protein_2fdc614
  REGION 4..163: note = RuvC_domain
  SITE 7: note = RuvC_P1
  SITE 60: note = RuvC_P2
  SITE 101: note = RuvC_P3
  SITE 103: note = RuvC_P4
  SITE 106: note = RuvC_P5
  REGION 266..353: note = Tnp_domain
  SITE 274: note = Tnp_P1
  SITE 304: note = Tnp_P2
  SITE 312: note = Tnp_P3
  SITE 313: note = Tnp_P4
  SITE 326: note = Tnp_P5
MIYVGIDVAKDKHDCFITNSDGEVLFKAFTIPNTLDGFNNLYQKIESVMEDITKVKVGLEATGHYSYNLLGYLIDKGFPAYVINPLHTNLYRKSLSLRQTKTDKVDARTIASMLMSDVNLKSYSDTSYHNEELKSLTRYRFDKVQERAKLKTSVSRLICILFPELEKLVPTLHMASVYAMLSEFPGAKHVANAHLTKLSNLLSEASKGRYGKETAITFREAARTSIGSNMPAKSLELKHTIKLIQELTSEIDEIENEIKIIMDEINSPILSIPGINYRMGAMIIAEIGDFSRFDSPDKILAYAGFSPSTYQSGQLDGAYSHMEKRGSKYLRYALYNAAKYVCHWDSTFAEYLAKKRAEGKHYNVAISHAVKKLVRVIYHLEQTNQQYSKTA

SEQ ID NO: 10888 - protein, 323 aa, unidentified
  source 1..323: note = protein_0c37f6a
  REGION 5..155: note = RuvC_domain
  SITE 8: note = RuvC_P1
  SITE 58: note = RuvC_P2
  SITE 98: note = RuvC_P3
  SITE 100: note = RuvC_P4
  SITE 103: note = RuvC_P5
  REGION 195..281: note = Tnp_domain
  SITE 203: note = Tnp_P1
  SITE 233: note = Tnp_P2
  SITE 241: note = Tnp_P3
  SITE 242: note = Tnp_P4
  SITE 254: note = Tnp_P5
MSSIVGIDIAKHSFDIATLQTNGKYRTKAKLANSAAGFQVLQEWLQQYAEPGAWLVMEATGTYHEALAEHLHGLGYRVCVMNPAQLASYARSQLQRVKTDQVDAKLMASYGQRHVDELRAWQPEPPAIRRLRALVRRLQDLKEIEQMERNRLDVADASVQDSIRSVLEHVEQQIAETLKAIRDHLDDDPDLCSKRDLLVSIDGIGEQTAALLLAELGDPLQFKNARAITAFAGLNPKLQESGQHKGRVRISRVGSARLRTGLYMPAVVSLSHNPAIKALAQRLRARGKAGKQIVCAAMRKLLHIAYGVLKSGQPFDARLALAH

SEQ ID NO: 10889 - protein, 256 aa, unidentified
  source 1..256: note = protein_f3990fe
  REGION 1..78: note = RuvC_domain
  SITE 20: note = RuvC_P3
  SITE 22: note = RuvC_P4
  SITE 25: note = RuvC_P5
  REGION 121..208: note = Tnp_domain
  SITE 129: note = Tnp_P1
  SITE 159: note = Tnp_P2
  SITE 167: note = Tnp_P3
  SITE 168: note = Tnp_P4
  SITE 181: note = Tnp_P5
MVVNPKASHNFAKVLMRNSKTDAVDANTLAEYAARMDFVAWTRPANETIALRCFSRRINSLTGQKAAAKNHLHALTATQETPKAVLRDAKLAIIQLQKRIDRLTAEALVLISKYPELERVLELLTGIKGIAETSAIALMGELLWLPPDLSHREWVKFAGLDPKAFDSGKSVHKKTRVSKAGNRYLRAALYMPALSAHQHDPHVRAYFEHLVVTNGKEKMQALCAVMRKLLHAIHGMLKHDKPFDNTRFYAIPASVG

SEQ ID NO: 10890 - protein, 314 aa, unidentified
  source 1..314: note = protein_958fcb6
  REGION 8..152: note = RuvC_domain
  SITE 11: note = RuvC_P1
  SITE 52: note = RuvC_P2
  SITE 92: note = RuvC_P3
  SITE 94: note = RuvC_P4
  SITE 97: note = RuvC_P5
  REGION 187..271: note = Tnp_domain
  SITE 195: note = Tnp_P1
  SITE 224: note = Tnp_P2
  SITE 232: note = Tnp_P3
  SITE 233: note = Tnp_P4
  SITE 245: note = Tnp_P5
MSATTSRIGVDVGKAEVWFSINGEPAQCCKNTPAAIERWIRGLTEPADFAMEATSDYHLVTALEAIRQGHRVYLINGYRLNRYRESIGGRAKTDAGDARLLVRYLEREQDDLRPWTPPPEGYQTLQKLLRRRATLVRARVMLQQSLRGVPELQTGLKSLLRQIQKIDDELQRHLHKAVDRAGWSEDSRRCKQMEGVGPITAAALTMAFHRGHFRSSDAFIAFLGLDVRVRDSGQKRGRRRLTKQGDPEVRRLLYLAAMQAKSKPAWQDYYQRCLDRGLATTQALNALARKLARVAFALMKKQSDYQPKVPCGQT

SEQ ID NO: 10891 - protein, 341 aa, unidentified
  source 1..341: note = protein_f446ab2
  REGION 7..149: note = RuvC_domain
  SITE 10: note = RuvC_P1
  SITE 53: note = RuvC_P2
  SITE 88: note = RuvC_P3
  SITE 90: note = RuvC_P4
  SITE 93: note = RuvC_P5
  REGION 209..295: note = Tnp_domain
  SITE 217: note = Tnp_P1
  SITE 247: note = Tnp_P2
  SITE 255: note = Tnp_P3
  SITE 256: note = Tnp_P4
  SITE 268: note = Tnp_P5
MQNVTLVGIDLGKHSFHLHGQDKAGKAVFRRKFSRKQLVEFFATFHACTVVMEACAGAHWMARKLSQFGHTVKLISPQFVRPFVKSNKNDFVDAEAICEAAARPSMRFVSPKTESQQTLAALHRVRQALVRDRVRTTNQMHGFLLEFGISLPVGHAVVKRLSVVLAEHPLPPRLVAILERLHAHFKYLTQQIGDIEKELDRQLAEDPVGQRLLTIPGVGPITASLLASELGDGKQYRCGRDFAAAVGLVPKQYSTGGRANLLGISKRGDKNIRHLLVQCARAFMLRLDRQSGRVGDWVRAMLTRRHSSVVACALASKLARIAWAIANANTVFERLASVPAS

SEQ ID NO: 10892 - protein, 350 aa, unidentified
  source 1..350: note = protein_90cf46a
  REGION 13..155: note = RuvC_domain
  SITE 16: note = RuvC_P1
  SITE 59: note = RuvC_P2
  SITE 94: note = RuvC_P3
  SITE 96: note = RuvC_P4
  SITE 99: note = RuvC_P5
  REGION 218..303: note = Tnp_domain
  SITE 226: note = Tnp_P1
  SITE 256: note = Tnp_P2
  SITE 264: note = Tnp_P3
  SITE 265: note = Tnp_P4
  SITE 277: note = Tnp_P5
MSIRNQPRDAAVFGIDIGKTVFHVVGLDAAHAPIQKATFRRETLLQFFERASPVLVGMEACPGSQWLARKLLGMGHTVRIVPAQFVKPFVKSNKNDIIDAEAIAEAVTRPTMRFVEIRTPEQIDLQALHRVRDRMIAHRTRLISQMRAFCLEYGIAIHQGAGKFKAEIPRVLADETNELTPSMRRILTEVHGEMMELEQRITAMNHEIEAIAARSDTARRLMTVPGIGPLASTALLAAAGSGRQFRRARDLAAWLGLVPREHSTGGKTKLLGISKRGNKYLRRMIVHGARSCVTHLDRSRDRLGPWLDGLESRMHKNKVTVALAAKIARVVWVILTKPGATYERRVPAFG
